United States Patent Application Publication US 2004/0018514 A1 - sequence listing, part 2

SEQ ID NO: 10 - DNA, 1163020 bp, Listeria innocua
  misc_feature (1)..(end): n can be any nucleotide: a, g, c or t/u
taacttcccttttaaatctttataatggcgacgactatttacaaaaaactgacccgatgacagttgttacttccgccatggttgctgcaacactagatttacctatcgacaaaaatttaggttatgcgtggattgttccttacaaaggcagagcacagtttcagcttggttataaaggatacatccagttagcactacgcacaggacaatataaaagcattaatgttatcgaagtgcgcgaaggtgagctactgaaatggaaccgacttactgaagaaatcgaactagatttagacaacaatacaagtgaaaaagttgttggctactgtggctatttccagttaattaatggctttgaaaaaacggtctattggactcgtaaagaaatagaagcgcataaacagaaatttagtaaatcggattttggatggaaaaaagactacgatgcaatggctaaaaaaactgttcttagaaacatgttaagcaagtgggggattttatccattgatatgcaaacagcggttacagaggacgaagcagagcctagagaacgaaaagacgttacagacgatgaatcaataccggacataatagatgcgcctgtaacgccgtctgacacgttagaagctggctcggtagttcaagggtcaatgatctaatttgaaaggagaaaagaagcatgtcacatgggtgggttaaattgcatagagatttgaaagaaaagcctatatggagaagctctacacccgagcaaaaaaccatccttgtgactttgttaatgatggcaaatcacaaggaaaacgagtgggagtggatggggaaacctttcaaagcaaaaccaggtgaattcgtcacaagtattaagtcaattacagaggaatgcggcaaagggatctcttcgcaaaatgtcaggacagctctaaaaagatttgaaaattacggatttctaacaaaggaatcaacaaaggtaaacacccttataaacatagtgaactggggcgtttatcaagaatcggaaaataaatctaacacacttgctaacaaacagctaacaaacgactcacaaacagctaacaaacagctaacaactaacaagaatgtaagaactaaagaatgtaataaaaacaacaacaacagcgatttaaatttcaaggatttttgggaacaaaatggattcggaatgatgctaccgattgagcaagaaaaactacttgcatgggtagatgatttttctggtaatcgagaaatagtttttaaggcattggaagttacttctgaacaaggagcgaataaacgtaattatgcatacgttaataaaattcttagaaactgggaagaaagaggatttaaaacggttgctgatgtgaatgcggcagaagaggaaaggcgaatgcaaaatgaacagaagtataacaagcccgcttacggcaaatacaacaagaatcagaaacaagaagtcttgccggattggtttgatagcgaggtaaaaccgcaagtatcgacatcagaatcagaatcaagcgaagacttagaaaagaaagtcgctgaaattaaagcgaaattagcggctagaagcgaggtgcaggcgtgacagaatacgcactttataaagcagacgaactactaataatcggcacagtagacaaactagcggagtttcagaaagtgaagcgtgagacgattttgttttatgctacgcctacgtatcaaaagaggacgactgataaggggttaagagtaattagagtggtttagaaaggatgaaatttcttgggaaaatattactggcacgtgtcaagatttggtggaaagccgacagaaattcgacactataaccacattacaaaaatgtataaatttattttgcgaaatccggcaatgttcaaagataaaactttaacgatttatgatgacgcaaaagcagttacaaacatgacgtttaacgaaattaagtatagagctagtttgaatttatgtgaaacggtagaaagaaagtatgtgttgtcacttactcaaaggcttaaggaggaacagaaggaggctaaaaagtgaaacgaatacttaattatcccggcagtaaatggggtttggcagatttaataattgaaaatatgccggagcataaaagttatttagaaccattctgcggatcatgtgcggtctttatgaacaagcaaaaagctactttagagacgataaacgatttagacggtcgactagttaatctttttaaaacaatgcgtgataatccagaagaactgcagtatttaatcatgcacacgctgtattctcgtgaagagtatatgctttcgcatgaaatatcaagtgattcattagaagacgctagacgcatggctgtgaggctctggtttgccgtcggaggcaagactaatgcaaatgttggatttagaaaaaacgtgtcttggaatggtccttacaatgcatatgagtggaatgacatgtataaccgaatcggaatagctgcagcaagactgaaagacgctcaaatcgaaaatgtagatgcaattaaactgattgaacagcataacgataaagatacactgatatattgtgacccgccatatgttgcaacttctttagcaagttcacattatcagcatgactttagtttagagcaacacaaagagttactaaaagtgcttaaaaagcatgagggcaaagtaatgttaagcggctatgaatcagaactatataaacaagagttatcagactggccagctcttaaaacaatgacaaaagtaggcattacatcagaaaagaaatcagataggcaagaaattatttggtgcaattttgagccaccgatgcaattaaatctttttaaggaggaacaagcatgagatttaaagaaggcgaaaacgtacacgtaattgtaggcaatgaattgttaagtggttggtacaacggtaaagagtttggaacaggcaactctttagtgaaagtttctaaggacaagataatagctactaaagattgttttattgccaaagaaaaggaagcagagttggtagtagttccgcaattagtaggtgattttttggaaaatcattctaaagaagatggtcatacacttcatgatttattgtgcgatttattaacttctagagattcgctagatgaaaatgtctacgactggatcatggaaaacaatagtgaaaatggtgaattgcttgcacgcgcatggcttgacggctacgaagtcgagaaagaaccgctttattatgtgaagttaccgatttcaaagcggaatgaagctacagacgaattagaagtaattaacatgtgtcttttgttaaatatacaatcacacgaaacatgtatttctggaaattacagatgggttgataagctaaaaagaacgggttggagaaccaaattgacagaagctcaaataaaagatatgcccgaaggtgacgcttattggcagtttgctgttcctgttagagatttggagggtgaagcatgagagcgattggatttagaggtaaacgaatagacaacagagaatggatttacggtaatttaatgcaatttgaggatagcgctactttcatttttgcagatgaacgaaaaggcgctagcacattaacttatgcacattttattattaataacatgcacgcgatagacgaaaaaacacttggaagctgtataggtcgtgaagatgaagacgaaaaaactatttttgaaaatgacattgtgcaagtagttttagaacactggccaatgggatactaccaagaagtagaatacattggagtggttaaatatgacacggatatatgtgcgtattatcttgatttgattaagcctcctgctgttagtggcgaaacgataccggatgaaatcgacggaattaaaattacaagagaagactcggaagatttcgatacaagattctacttcgatgctagcgttgattcagcagctatgacagtgataggcaacatacacgaaaattcggaaatattggaggaacagtaaatgacgttaagagaagcattagagaagcacacaagatatatcttgttttgtggcatgtgcgagtgtggacttgtatggactatctgaatttaaattcaaaaataagccgaaggaagggacgatagcatgagagagattgaatatagagcgtttgtaaaagaaactaagaaaatgcttccagtcacagatttgtgttttaacgaaacagagtctgtaggcgtaagtggttgcggcaacccatattgtacaatgtgcgtcgactggtacaactttgacgatgtcctgctgatgcaatacacagaaagagaagacatcaacaacaataaaatatttgaaaaggacattgcaacttgtcagtttttcgacaaaaaaatcactggtgttatcgagtttatcgaatttatgtgggcagtaattgatcacaagaatcaacgactatatcagttgaacgaagttagcaatattgaagttgttggaaatgtggaagaaaacccggaattgttggaggtgtcggaatgaacgataaaaaaacagattataaagtatataaaataacatacaagcaacgtttcatgggggaagttattgttgattcatatgaaagaacggtaaaagatgataacgaattacggtctgcaattaacgctttatatgacgacccacatgtgttttcagttagtagtgaagaggtggcggaatgattttatatggagtagtaacatataacgaagtaacagagtggacaacggacttcctaacagctaaaaaatggttggaaaatgctaagcaagttttctatgacggagaacttgatgaagattactatgttgcgttaataaagttagacgtagaagcattcttatacgataaatatgacaaagaaacagatttgagtgatcagttacatgatgaagctgagacaatgaaagagtattgtttgttattagatgatgacggaacttacatggtgaaagaggtggcgaaatgaacgacaaaaaagtaagattctacgtttctacgggcatgcacggatcacttgaaacagaaacatttcttttgaaagcggacttgaatattgagttcgagatattaacacctgaacaattagaaaaagagattacagaggcttacgacgactggctaggcaataatattgactcgggctggtctatcgagaaaggaagcgtctaaatgactaacacaataaaaatatctgaaatagataaagtgttccagattgcgacggaagctgggtgggttgaacagactggaatgcaagcgacgattgacggaatagactttgcaatatgtccattaaaaaatgaaaaaaatgcatttatacaagttagcgaagttaaaagcggcgctgcattactgagggttccagtaaatcttatagacatttttattttggatactcgagataaagcaatcgaatattataaatataatgtaattcctttaatcaagaaaaaagtcgaatttaacggattagataaatttagaaaagaagttgaaaaagcgaaaaaatatatggttgaaactcacggagaacgaccggaaattaaagattttgagggggaatgtaaatgatgaactattacagcatcgaaaaaggcacaaaagcatatgagtatttagacaaaatttacaatcaagatacagacgcttttttgaatgaagttactgaattgctaggatttgaagcaagaggacatatagctattaacagagcgcctttaattattgataaaaaagcgcttaaagagtttaagccagagtggctgccgaaattcaaaaaatataaaggtgagttgatgactccgaaaacggcattcaaggagctaatcaatgcatatgaagaacttcagcaaaaatacaacatggatatgacattcagaaactttaatataaataacgctttagcaggtaaaacagaagttatctatgactttgataacacaggtttcgtttattttgaatctgatcgaaaaatattaaaagaggattttaaagaaataacggatattgattatattaaaagaaatttagaatgcgcaatttggatgaaagagagggaagacgaatgatgaatcgtgtagtacttgtaggacgactaacgaaagatcctgatttacgatatacgccagctggtgcagcagttgcgacttttacattagctgtaaatcgtacgttcactaaccaacagggagaacgagaagccgattttattcaatgtgttgtttggcgtaaaccagcggaaaacgcagctaatttcttgaagaaaggaagcatggcgggcgttgatggacgcatacaaactcgaaattatgaggatagcgacggtaaacgcgttttcgttacagaagtagtagctgaatcagttcaattcttagagcctagaaaccacgcagaaggcgctacatcgaataattatcaaaacgaggctaattattcaaataacaataaaacaagctcatatagagcggatacgagccagaagagcgattcatttgcaaacgagggtaaaccgatagatattaatccggatgatttaccattttgagcgaaagggtgaataaaaatgacagcagaaacagcaataaaaaagttgagaaatagatcaatgagcatcagacaaatggctaatgcgattgcagaagtcacaaactaccaaattagcgaaatcgaacaaatgggggacgaagaaattgaggcgaagtatacggcgtacgtcattaacgaaacaaacgagtacgcgaagtaaatacaatgcgaagaaagttgtcattgacaatataaagttcgatagcaaagcagaagcagcatattatcagcaattgaaattattaaaaatgagcggggaagtagtgagcttcgatttacagccagagtttgtactacaagaaagctttcggaaaaatgggaaactgtatcgagcgattaaatataaagctgattttcttgttagatatagtgacgggcacgaagaattaatagacatcaaaggaatgttgacaaaagagtttcgaatcaagcaaaaacttttcgaactgcgttatatgcaatcaattaagtgtttgaagctgaaagggcgaaattttgtggaggtgtgacaaatgacagtaatggagatgacgaagagtaaagcgaggcagcgggagataattagttatatagcaaataacgatgtagagcttgacgaattactaaagttgcaaaaagaactcaatcaactaatgaacgagaatacaatagaaaagcaaaaaacttactggaccaaaacgttcgatcgaatcgtgaaaaagaaaaaatggccggaaattacaattcatgaattcgctgatttacgtaatgcaggactaacgtgttacgcaattgcagagcatttcaaagtgtcgaagtcgatagtctttaattacacacaaagaaacaaaaaagaatactataagctgtttgatatggatgaatatcaacggaataaggagatatggaatgattgataaagtagcgaaatttattggagctttgactatatacgctctgtgggtcctagtactgattttcgtactaggattagtggttaaagggattttatgggcatggagtaatatgttttaaataattacaagggggcgactttatgggacaattattcaatctaccacaaattgaagatataaactacattcagacagtcggagcagtaagaaagttctttaaagactatttaacgctgcgagtgatggctggtgatcgtaaatttccaactatgacgactatgtacaagattacgccaccaaattttggcaatgagtttcattcgaaagtagaagatgctgcaattcataatgtcgataacgttcatgcagcacaagaagcggttaaaaaatacgatgctattttgaatcaacttgagcacatccatagaaagatactgttcgagaagttcattcataacctacaagatataactattatgcttgatattccttatgaagaaaggcaatacaaaagagagaaaaggaaggctgttattgaattagcaacaacacttgggattgaagtgctaaattgaaaatggcacttttctggcactttttgagcaaaaaaaggtgataaaatgttattagtgagaagtgaagatgattacaaaaataaaatcttatattgagtctgcgctccacttctcattaagtattaaaagtgatttgttaaatcttgagcaatatttttatgtttgttaaaataaaagcgaacaaaaataaaaatattggagggattttaatgaatgaaaaagaaaaaattgattttgcaaggaagtatattgatgaaaaaggctaccatgaaatctataaagtaacagatggaggaattttggttaggttagataaagttgataaatttctttcattaccaggcaacgaagaaggtattataaataacatagaaaataataagtagtattaaagccctgtttttcagggcttttttgatacataaaaataaggagtggtaaaaaatgaataatcaagaatttatagacaaatgtaaaggcgttgttttaaattacgctaacagtcatttagacaaaagcgataaaaaagaaattggcttagatgatgtttttgtagtatggagttgtaaaacattacaaaacagcaaagcgctactaagcacaacgttgtacgatggcatgtattatgaatgtactttcaatggcgacaaatcagaattgtattttgacgcatacaaaaaatgggaaaataaaaaaattagtatttgagtctaggtgttcctaggctctttattttatcaaaataaagggagttggtgatatgtagtgaaactaaccgaaaaacaaaaacgatttgcagatgaatatataaaatgcggtaatgctacagaagccgctcgtcttgctggttatagctcgaaaacggctaatcgtatagcgaccgaaaacctgtcaaaaccagttattaaaggctatatagacaaggttttaagcgaactcgaagaaaagcgagtgatgggctacacagaggcaatgcaattattcaccgaaatagctcgaggtgaaatggaagaagaagtaattgtttcgaatggtgatggtttttccgtcgttactaagagtgctgacatcaatcaacgagtatcagcgctaaaagagattgttaaacgccacgttgctggcggtagagacaaattacaagaagagcttattcaagcgcaaattgataagttaagagcagatacaaaacaagaaggtaatcaaggaacaactactatcatcatgtcaaatgttgacgaaatgcaagcctaccttgataaaaaggcaggtggcgacgatgaacgcgatgatacacaaacaactagttgactatcaggttatcaatgtaatagacaaaatcaatcccgctttttacgacttgtggctatctaaacataatcacatcatagcaaaaggcgggcgttcttctatgaagtcgtctgttatcagcttaaagctcgtagaaaagaaaatggctaatccgcaatctaatatggtgtgtcttcgtaaagtagctaatacactttataaatcagtctatcagcagattaaatgggctttgtatgaaatgggtgttgctgaccaatttaaatttggtaagtcgccaatggaaatcatccacaaagaatgggggacaggcttctacttctctggttgtgatgatcccgctaaactaaaatcgatgaaaattccagtcggttatgttagcgatttgtggtttgaggaattagcggaattctctggcgtgactgatattgatgttgtagaagatacattcattcgtgaagatttgccgcaaggacaagaagttacaatatacatgtcatttaacccgcctcgtaatccatatgaatgggtgaatgaatatgtagatagtaaacgtagtgacgatgattatttaatacatcacactacttatttggatgatgaaaaaggctttttatctaagcaaatcattaagaagattgagaaatacaaaaagaatgacctcgattattaccgctggatgtatctaggtgaggtaattggtcttggtgataatgtttataatatgaacctgtttcagccgcttaaagctattcctgcggatgacaggcttattttaattgacttcgctattgatactggacatcaagtatcagctaccacgtgtctagcgttaggttttacagcaaaacgaaatgttatcttactagatacgtactattacagtcccgctaatcaagtggttaaaaaagcgcctagtgattattcaaaggagctgagagagttcatgacaaaagtagtctcgaagtataatgcgccagtgggcatgcaaacagtagatagcgcagagggagggcttcgcaatcaatattataaagattatggcgttagcttacatcccgttgctaaaggaaaaaaagtggatatggtcgactttgtgtgtgatttattggcgcaaggtcgtttttattatcttgatattccagaaaatcaaatattcatcgaggaacaccggaaatatcaatgggatgtcaaaacagttaatacagataagcctgaggtcatcaaagaagacgatcatacgtgtgatgctttccaatactatgtaaaagataatttacgcaaattaggtcttaaattctagggggtgaaaaccttgattaaccaaataatcgcgggagtgaaaggagtgatgcggagaatgggactattgaaatcattgaaagacgtaacggaccataaaaaagtaaatgctaatgatgaagattataagtatatcgatatgtggaaacgtctatatcaaggccattacgccgaatggcataatctcaattatgagcataatggcaatccggttaacagacgtcaattatctatgaatttgccgaaggttacggctaaatacatgtctaagcttctttttaatgagaaagtgaaaatcaatattgatgataaagccgctgaggaattcgtgcttaatgtattgaaaacaaacggttttacgaagaacatggaacgctatattgaatacggcgaagcgatgggcggttttgtgataaaggtttatcatgatggcaataaaaacgtcaaaatttcatttgcgacagctgattgcatgtatcctttgtcaaatgatagcgagaatgtagatgaatgcgttattgctaatagtttccacaaaaacaataaatactataagttgcttgagtggaatgaatggaaggggaaggaagagaaagtatacacaatcacgacggagttataccagtcggacaatccagatgaacttggtggagaagtaagtttgaaattgctgtttaatgacatcgagccagttgttccactcccgccgcttacacgtccgactttcatttatatcaaacctaacatcgcgaataacaaaaacttaacttcacctttaggcatttccatttatgctaacgcattagacacattaaaaacgcttgatttgatgtttgattcatactatcaagagtttaagcttggcaaaaagaaagtattggtgccttcgagcttcgttaaaacggctgtcaacttagacggctcaaccacgcagtatttcgattcaactgatgaagcattctttttatatcaaggcgaccaagatgcagatggtaaatcagtaaaagatatatctgtagagattcgttcaacggagttcatcgagtctataaacgcaatgctacgcatttatgcgatgcaggttggattaagcgctggcacattcactttcgatgaaaacggcttaaaaacagctacagaagttgtaagcgagaagtcagaaacttatcaaactaaaaacagtcattcgcaactaatcgagcaaggcataaaagaaatgattgtgagcattcttgaggtcgggaaatttatcgaagcttatagcggcgatgtagttgagttagacacgattacagtcgattttgacgattctatagcacaagatgaagatacaacaatcaatcgttatactactgctaaaaaccaaggtatgataccgcttaaaattgctttacagcgcgcttggaatattaccgatgcagaagctgaagagtggaaagaagagatagaaaaagatgcacgagcagaaattccggggaatgatttatctggattgttaggagatattgagctaccagatgaaaacgcgaacgggacattagaagctagtgctgttgcaggcgaaactattcaagaggtgtcactaaacggcgctcaaataacttcattagtcaatatagttcaatcagttgctaaaggagagcttccttataattcagcccttgaaatgattgttgctgcatttccatttgacgaagaaaaagcgaaaaagattttagcggatgctggcaacggctttactatcaaagagaaggaaaagacctctaaaaaggaagtggattagatgacactaactccacgacaactcgacttatttgtgcaaccggttgttgatgtatacacaacgctcgaaaatgaactgttcactcttattgttcgacgattgaaaacaaagaaaaatatcagcgccgacaatgtgctggcttggcaaatagaaaaacttaatcaagttcatgcattagatcagcaaatgataaataaaatttctaaagcttcgggagtatcagctaagaagcttttttctattgtcaaagatgcgggatacagtgatttaaaacaagtagataactatttcagtaaattagccaaagcaggtgctgtgttaccacttgtgaccgacgggcaaacaatagtcgataaagtaatgagaagttattttaagttagcacaaagcaactacaatcgcgtcaatcaaacaatgttatcgcaagcaagacaaatttattcagacatcatacacgaaacgacacaaagcgtcctagctggtttaaaaacacatagacaagcattagctgaaacggtaactaaattcgctgaaaatggcgttcctgcgcttgtagataaagctaataaaaggtggacacccgaggcatacgtccggactgtaaccagaacaacagttaacagtgtttataacagcattgaagacgagcgaatgaatgaatttggcgtggatttagtgcgtatttcacaacacataggagcacgaccaacgtgttcacttgttcaaggcaaagtaatctgtttgttatctgttgaagaaacaaaaacgaaatacggaaataaatacatgtctatttactcaccagaacttagatatggctatggagatgggattttcggttgtaattgccgtcatcatcgttttgcttttattgaaggcattaacattgcgccagacgaaagcgagttaatagatgaagaagagaacaaacgcgtttatatgctaagtcagcaacaacggttaatggaacgtgatataagagcagctaaacgcaaattatcagctgccgaagaattaggcgatgaactagcagttaaaaaggctaaacaagctgtcagaacgaagcaaagcaagctaagagcatttgtaaaaacgcacaatttgactaggcagtatagcagagaaaaagtatatacctaacattcgacctgttcggaagtcgtaaaaagacggctctcgcggtcgttgccgcgtaaaaatatcggaggaggaacaaagatgcaaagagaatatttaaagggtttaggcttggaggatgaagtcattaataaagtgatggctgaaaacggtaaggacattacagctgctaaacaacaattatctgaggtggaagcagagagagacggcttaaaaagccagctaacacaacgggacaaagatattgacgatttgaaaaaagattctggtactagtgaagaattgaaaaaacaaatcgaggacttgcagcaaaaaaacaaagatttagagtccgattatcaatctgaaattgccgaaaccaaaaagaattcagctattgaactggctcttgctagtgcaaaagcgaaaaacccaaaggcagtaagagcgcttttggataacgacaaactagaattaacagatgaaggcctgaaaggtcttgacgaacagctagaagcattgcaagaaagcgatgcttatttgtttgctcaagaaagcggaaattcagctctaaaatggggagcaagtggaaatcaaacaggtgggacaggggagcaaggcgcacttaaacttcctaatcaagtgctaaatgaacacagaatcacaaaataattattaaacggaggtaataaattatgggttttaatccagatactacgacaatgcaaaatgcaaaaacaggttctattccgattaacatttcggaaaaaattgttacaggggtaaaaaatggttcggcggcgatgaaattagctaaagctgttccaatgaacaaaccggaggaagagtttactttcatgagtggtgttggtgctttttgggtagatgaagcagaacgtattcaaacaagcaaaccgacgtttactaaagcaaaaatgcgatctaaaaaaatggctgttattattccaacgaccagggaaaatctaaactatagcgtaactaacttctttagtcttatgcaagaagaaattgcagaagcgttttataagaaattcgaccaagctgttttcactggtgtagagagtccttacaactggaacattcttaaatcggctacagatgcaggtcatttagtagaggaaactgttaataagtatgacgatttaaacgaggctattggtttaattgaagctgaggacttagaaccgaacggaattgcaacgattcgtaagcaacgcgttaaatatcgcagtactaaagatggtaatggtatgccaatttttaacactgcaacttcgtctggtgtagatgatgttttaggccttccagtagcatatacccctaaatatacatttggtggtaaagatatttcggaattagttggtgactggaatcaagcgtactacggcatcttgcgcggcattgagtatgatgttttaacggaagcgactctgacaactgttaaagatgaaaaaggtgaaccaattaacctagctgaacgtgatatggctgcattgaaagctacttttgaacttggattcatggttgttaaagatgaagccttttctgttgttcaaccaaaagcgggaaactaatggcggcgcggtcgggtaaaactgatagcgcgccgattaaagacttttcagctatgacagtagcagaattgaaagaagagcttgtgaatagaaatatcgaatttgcaagtaatgcgaaaaaagcggagttggtagctctgttggaaggtagtgattgatatgccttacacgacactagaattttatactaacgagtatgcgggggagcatttggaacaggatgaatttgacaaactgttaaagcatgctgaaagaaaaattgattcagtgacattttaccgaatacgcaaaagcgggattgaatcgtttagcgaatttattcagcatcaaatacagttagctacttgtaatcaaattgagtattttaaagaggcaggcggaacaagtgagctagctgtttccaagccggataatgtgagcatcggaagaacgtctattagtgatagcaattttgcatcaactgctacatcacttaatagcggattagtgggtagtgatgtaaggtcctatttagcgcatacaggtcttctttacaacggggtaggtgttcgttgatgaaagtagtaaaaccgataacaaatgcccctccgttgcctcttgactggctaattcataacattagctatgaagcgtataaagaagaaggtagacacaatcaagtcgtttatgaaaaaggctttgagattgaacatgttcgtgtcgatttctcaaaatcaaatcaaatcgcgggattatctgatagtgatagatatgacgcggttatttttattgatgcagtgaacagcatgaacgtgccagatgattttataagtagatcgagaatttttttctctggaaaagcttataagattgttaaggttataccttgttatgcgacctctgaaaatgtgcaccattgggaaatagaggtgatttgatgccgattaaagtacgtgtagacctctcgaaagcaaaagggagcgtaaaaaaggcgaaagaaagaggtcagtttgctttaattaaccaggcggctgctgatattgcgctttatgtgccttttttaagcggtgacttgtcgaatcaatacgttattatgaacgacaaagaaatcatgtggacatctatttatgcgcggagactctacaacggaataaacttcaatttcacactcacacatcatccgttagctggtcctaaatgggaccagcgtgcaaaagtagataagctagaaagttggatagaagtagcgcaaaaagcggttgaggagggactataatgtcattagattttttagatagtgttatggatgctatcgaaaacaacgtcgatttaaaagatatgaaattaagaacagcgatattaaaacccgagtcaattgctttgctactgactccaaataacgacaaacaaggttatcaagacggctcttatgagcggtctttttcttttaatctaaacggctctagcaagcaagaaatgaaagttttaaatgtgttgaatgctattactgcttattttgataacacagaattagaaagcattcagagcttaaataacagctttgtgctagaagacaaagaaacaactagtgtggcgaacctcgtttctgctagtgacgatggaacgtttatttatagcgctagtttcaaaattaaattatatattgaaagcgaggaaaaataaaaatggctagaattaaaaatgcgaaaacgaaatactttgtagctgaaatcgtagatggtgtgggcgagccagtatggaaacggctgtcaaaatggattacaaacgtgtcagacgatgggtcagataacaccgaagagcaaggcgattatgacggtgatggcaacgaaaaaacggttgtgctaggttactcagaagcttacacgtttgaagggacacacgatcgtgaagacgaagcgcaaaacttaattgtcgctaaacgtagaacgcctgagaatcgcgggattatgtttaaaatcgaaattccagataccgaaacagctatcggtaaagcgactgtttcggaaattaaaggttccgctggtggtggagatgctacggagttcccagcgttcgcttgccgcatcgcttatgatgaaacgcctaaggtaacaaaaccctgaggagagcccgtccagcgtcgaagtggacaaggcgactattacgctaaaagttggtgaaacatccactgttactgcctcagtattacctgtcggagcaagtcaagaagtaacttttacttcttcaaatccaccaaaagcaaaagtaaatgctagtggcgtggttgaaggcgtagcagaaggaacagcaaacataactgtcgcatctaaagaaagtccttctatcaacaaagtagtgcaagtaacagtagaagcagcagactaataaatgaagcccttactcaatgtaggggcttttaaattggaggaaatcatacatgacacaaaataatgtaatcaatattcaattagaagaatcatatcaagagtttcagcttggcacggaactgtttagagtcggtttaggtgatgaaatgcgccgcaaatggattgaagcagatgagaagtacaagaagaagctagaaaagctaaataaatacaacattgataatactgacgaaatgagttcagaagaatattttacattagaagaagatgtaaaagaggctttaactgaagcatatgcaattttattggatgacgaaaaagcatttgataaatgttatgcgcaatgcaaagatattttaaaaatgtatcaggtatacaatcaagttgcagaaatcattgtcggttcagtagaaaaacaacaaaatgaaattcaaaagaaatataaagcaaaaatgactaaaaaagcgaagtgatataaatgctttcgctcgcttttggagttaacgatatttacgaatatgaaggaaaagagtataagctcgatttagcttttgacaacgttctaagagtgattgatttaacggaagataatagtttatctgatgtgttcagagctaacctagcaattgatgtgctatttgctgatgatatgccttggccacgttcaaatgaggaagacgaatacgcgaatattgaagaaaaatcactggtacttattgatattttcactaattatattgttaaagaaaacgacgatggtttgctttatgatatcgacggaaacaagatgccaagcgctacaaacaatgaggatgcggaagaaattgcttcatattcattaacgcaagatgcggattatatctacgcttcttttttacaagactacaatattgatttattagatagtcgggggaaaatgcactggtataagtttagagcattgttagaaagtttgcgtgatgatacaacaattaaaacgataatcggcattaggcaagcggaattaccttcggggaaaggaacagaaaaagaacgaaacgaattaattaaactgaaaaacagatataagttaaaagattagaggtgagaacatgagtgatggatcagtagtaattgagattagtttagacgataaaaaagcagataaacaactggatgcgtttgaacaagatttagcgaaagcaggcacaaatgcaggggcggcattagataaagcgtatagagaagcggtatctgatattgctagtcaatcgaaacgattaaaagacacgtttgtaaatgcgtttaaaagcatgggaagtgctggctcaaatgctttaaaagctagtttaaactttatgcgtgaattgccttcaaatgtacaagccgctctatctaaacttgcatcaacagtaaaaactgggttcgtaaacgctgctaaagcatctattacagcgataaaggaacttggaacaagtatcaaaaacacagcggttaatattaaaaacggcttcttttcaattgctaagacagtacaaagtagtattgtgtcagctgttaaagtatcaattaatgtcattaaatccatccccggcgcaattaaaagcgctggaatcagtattaaatcagcattagtaagtagtttgcaagcagctaaatcggctgctatttcttttgctcaaactactgtaaaagttattaaaagtattccaggagctgctaaaacagcggctacagcagtgaaaaacagtttcgtagtagcttacaaagcggtggtagttgctgcttatatgagcgttaaaggaactattagcgctgtgaaagctattcctagcgctacaaaatcagcggcattagcagtaagtagcgcaatgaaaacagcttttagcgctgtatcaagcgcggcgaaaacgacaggaacaacagtgaaatcagcattaaaaacaggctttagcgctgtgaaatccggagctaaagcggcaggccaagctggtatttcagcattaaaaggcctaggaaacattgcgaaaagcactggttctttaattaaaagtggattagtaagcggatttaacgcggcaaaagcggcggcgaaaggtgcaggcgctggaatgcgtgaagcacttaaaaattcagttgaaaagcccgccgaacaagctcgctttagtattctcagattagcagcagcgttcggattaattgcagcaactaaaaatgttgtgggtagcgctattggtcgagttgatacgattgatactgcaactaaatcgttaacagtccttactggttcagcaaaagatgcgcaactagttatgacagaccttacagccgctatcgatggcacaccaatcgcattagatgctgtcgcattaggtgctaaaaaaatggtcgcggcaggcatgaaagcggcgaatgtaaaacctgttttcaccgctattgctgatgcggcgtacggagtcggtaacggttcggaatcaattgaccagatgacagatgcgatttctgcgttacaagcgtctggtgttgcttatgcagacgatattaaccgtttagttgaagcgggtgttcctgcatggcaaattttagcaaattccacaggcaaatctgttggagaaatgaaaaaatatgtttccgagggatctttagaatcaacaaaagctatcgcaatgttgacaaaaggcatcgaagaaggaacgactggaatggctggcaacacggctaaaatggcaggtctagcaaaaacagcaggtaacactattagtggttcatttgcgaacatgaaaaccgcagccgttaagagccttgctaatatcgccgaaaacttaaaaggtccgattatccaagcactagatgttgctaaaaacgcatttaaacagtttgcagcagtaacagcaagtccggaattccagaagaaactttctgatttgattcaaaaaatcaaagagtttataccagttttaatcgagtgggcgccagttttggcgaaagttgccgctggatttgtagcatttaatattattagtagtgtatattctaaagttgctggtttggtaatggcatttagaggcttagcaagcagtggcacgttgctcggtggaattgttaacactgtgaaaggctctttcttggcgcttaaagtcgctctaggttcagctgccgccgcattcggagtaataatcgcagttattggtgcagttatagctgttgcatacggcatgtatgtatcattcaaagaaaacactgcgaatattaaaggctttttatcaactatgtgggatggcgtgaaaaattctttcggtaaaatagtagatgtgttcaaacagatagttgccgcattaaaaccagtaggtagtggatttaaagatgtacttaaatatgttggtgttgctatttgggcgtctcttggtctagttctagctgctgtagttgatattattcaagtattagcacgaattgtgttagtagctattaaagcgctacaggggctgtattatgctataaaagcagcatttcaagctctacattgggatttgaaaggtgctaagaaaagcttagagcaatcaaaagatgcgtttgtcgaagcaggttcagcaataaaagatgcatttaacaaagataattatgcactgactggaacagttgaagcattcaaacaaatgggcggagaagccgaaaaaacagcaaagaaaactgaaacatccggcaagaaaataaaggaaacattaaagcttgtagaaacaactgccaaacaaactgaaacaactgtttcgaagtcgaatcaagcaatagatacgatgctgagcggcggagttgatcagtatggaaagaaacttagtgaaaaaactgagtcattcttaaatgcggctaaagacctttacgaacaatatcaagaagcaactataaagtctcaagataaatatagcgtagctatggaaaaggctcagagtctcgaaggagataaacgtaaaaaagctatagcggatgcaaacgcaacattagtagcagagattgacaaaaataacggtacccttttaactcttcaagcagattatgcaaaattactaaaagggaataaatgggtcgatggtacagaattaacagctcaacaaaagaaatttttacaacaacaaaccgcggatattcaagcagagttagcaaagcaaaatcaactttatgtagaaggaaacttgctaaaattatcaaatggcaagacgttaaatgaaaaagaacgatctacgagtatagaagtgcaaaaaagcttatatgctgatagaaaaaaagcggttgaaacaggcgaaaaagaactagctgatttgaaaaagaaaaaaagtgacgccacaactgaaactgaaaaagcaaactatcaaattcaaatcgacgagcaaacgaagaagaataaaacattggctgaaaacttacaaaaatgggctagtgaaatgaatgctattattgcgaatggtgggactttaaacgcagaaacttttgcaaaaggcttgtcagaaatgggaaatattagcgatgaacaattaagcgcagtttggcaagactttgtaaaagtgagtggctctattgataatacactagctggattagcggctgttatgagtaaacgaggtggagaaggtgttcaagcgtttgttacagcacttcaaagcggagattatacaacagctgcattaaatattaatgatgatgttatgaatactctttcaactttgccaaacggaatgttccaaaacgggcaaagtggcaaggaccaatttatcactgcgattaaatcgggggattttcaaggagctggcaaatttttacttgatggagtgaaattaggagcatctcctctaccaggtgagatgaacaatatcggtaaacaaggcggaaatgcaaacgctgacggtttaaagagtacagctgaagcaaataaaagcgctggtgccgaactcaaaaacaatgcaaaaaatggcgcttttgacccaaatttattcaaaatgacagggtcaaataatgcatccggttttaatagtggtattttggacggaaaaggtaatgcattttcggcaggcactggcattggcaattctgctaaatctggtgctggttccgttgattccagcggagttggttctgattttgcatctggatatgtgaatggtattttgagtggcatgggtgcggttggagaggcggccgcttctttagcaagtaaagcattagcggcagttcagaaaaaacaagactcgcattcacctgctaaaaaatctaaaaaattgggcggagattttggaactggttattcattaggtatctcagaaaaaaataaagcagtgacgaaagcggcgaataatctagtagctagcgctttaggaactgaatcacaaattaagaagctgtctagtacgttgaaagacaaaatatcctcagcgattgacgcgggattacattctaagaataagagcgttggacaacttaaacaagcgaaagcactgaatagcatagaaggctatatcgggcaacaaacaaacaagctagcggcaacagctaaaaaacgtgataaagtagtcgctcaattaaaagccgctaacacaaagatggctgacttgacgaaacaaagtaaagagtatgctgcttcaatcactgaaaaaatgcaaagctatggatcaattagcaacgtagacgcagaaaacccgcagtcaatacaagcggaaatgcagaaacgcttaaaagaaatcaaagcttttcaagcgaatgtggaaaaattgcgcaaaaaaggcgttagtaaagacattataagcgacatcttagaatcgggagtagaaaatggttcatcgtatgcgcaagctcttgctaaatctgatgctaagactatcaaagcgattaatagcactcagaatcaaatcaattcagcgtctaagtcaatgggtaacacagcggctaatgcgatgtatagcgctggtattaacgcggcgaaaggtctaataaacggacttaacagtcagaagaaacaactagaaaacacagctaagagcatcgctaatacaatcactaattcggtgaaaaaggcgcttagaattcattcaccttcgcgcgtggccatcgagcttgggaaattctttactgatggacttggaaatggtgtattagctggcgctaaaggtgcggtgcaatcaactaacaaaatggttgataaagtagtaaacgctgcttctaatttgaccgttccagctataactttgccgaagatttccgcagaaaaagcgctgggcctaaaaagtgttgatctaaacagaactattacagttaagacgattattgataataagacaaaagagtctagcaatgcagatttaatcaaggcaattaaagagtccggggctaaaccagtcattctaaatttagatggcgaagtattagctaacaactctaataatcgaattggcagcatgacagacttaggactatacggaggtggcttactttgaacaaaaaaacagatttatatttaatgcaagcgaataaaattatcaagttaaacgaaaaacataactttgaaataagtgaagtaagtcgcgctagtcctcaaattatcaataattatactagctatgagtttagcgacggcaatcgttcgagtgatagtaatttcgatagcttcgatattgaatttacttgcagattcaaaacaaatggcaatatcgactatcacgttcgacttgatgaattattcgaggatatttttattagaaaagaatactacattttccatacgaaaaccccgggaaaaaaatattgcgttcatccagcacctttcgatattgataggaaaggtgctgggcatgcgcagtttacgttaagatttgaagttttcaaaggttttagcgaatcgttaggcactagcctttcgccttttgctttcagcgagggcatttggcaagcgggacaaggcattgtatcacaaaattataagtataagcacacatcaaacagatttattgtgtataacgcggggagctttgatattgaccctagaatgcacgatttaagaattactattaagaattgtcgaagtgacggcttactaacaattaacaataaaagcactggtgaaaaattcgtattcaatgagaaaatctacgcttatgacacaatcgaactggacggcagtaacatcttgaaaaacggagtgcgttgcgggcggaaaactaatctcggtcttatttcgttattatccggcggaaatgaaatcgaaatcgagaatgtaagcaatatcgaaacaacgtgggattttccgtttttatataaatgatggtgggtgagaatatggacatatttgtaagtgactatgaaaagcaatacaaagagattttaacaggctttgaccctactacattttcagaaacgtgggtcgaaaatcagcaatggcaactagatttttatgtagagaaaacaagaaataatcaagatgttttcgacttattaaatcatgaaagctctgtttatctggatggccaagaatttgttgttaagcagctaaaacgcggcgcagttgggaaaatagtttattcagaagtcacagcaacgcatatttatttcacgatgcaagatgactatcagtacaacgctatttcgggttctaagagtgcaaaagattgtttgacacatattttcgcagctgataaacaaggttttagctttgaactcattgacaaaaacaaggttttagaaaatattacacaagaaaattttgggaatggcaatttactaaagctagttcaagaagtgttggaagattataagcttgttatgctagcagacaataaacgattaacatttattccctctgaagattacggagagcatacagaaaacgaaattcgctacaataagcacacaaacgaagtcgattttgatattgatacgttatccttaagaactcaaattaagggctatggaaaagtcgacagcaacggaaataactactttccgccagttacttttaccagcccggaatcggctaaatggggcgtgcgaattcaagaaccgttatcagacgagcgttatacaacttctagcagcatgctaagacgtttgaagcttgaactacaagactatccagcgacgactggaaatatctctttaaagcttaaatacgaatgcggaaaaggcgattatgtaatgtttgtttatgaaccgctgggccttttatacgaagttcaaatagtcgcttataagaaatacatttttacaaacaaaccgccagaattgacgttatctaataacaaaaaaacaatggtttctatcatggttcaactagcaaaagcaattaagagaggagcgaaatagatggatttaaaaaaatggcaagacccactcatgaactcagaactacagcaaaactataacgataatttagtaaaactagctggaagccttgaaaaagctaatcaagatatgacacatgttaatcagcgcatatctaacttagttattaaatccggcgggaatgaatcgaacgaagtagtagacgcacgcgtttcttctctggttccagaaactgaattcacaacattaaacgatagaataaattacgcggaaaatgctttaataacaggtgtcggaaagctttcaacgaatgtttttgatctaatggataaatacaacgatatagatactattttaaagcgtttatatggcttagatagcagcaatattgaaatatttgtggatgatgcaagaggcgatgatattgcaggaactggtgaaattgatgcaccttttaaaacgataaataaagcagtaatgactttgccccgtgtattgaatagtaactctgtgaatatctggattgttcctggtcggtataatgaagatgtcgttattccgccaatcatgggaggggacatctacattaggtctacaaactttgaaacagtagaccctaccagtagcaccggatgccaagttcgaagtatttctgcgacaggaagtaacggctatttatatattgctggtttagaagaaacgaacacggcaggcacaacgaaaaactacttcattaaagcgacgcgatgcggatttgtaaggattacaaaatgccgaatggccttcaatactaaggcaatagacccgttcactgcggtttttattgatgcttgttctgctgatgtcaacggctgttattttgcctcacaaaatgttgatgttcgcggttataacactgctagagtcgaggttcagaatatcgtccatggcgcaaaaagtgcgattggtttgtatcctcaaagcgccgatattttcaatctcaatagcgggacttgggaagctgatacgcctacgaaactgagtggcgggggagtggttagaacatgactgaaaacgttattcataaaaatggtgtatatgattttaacgtcacaacgcaagaagataaaccacttcaaaaatctgttttttatacgcaagattctggcggaacagctagacttatttttaatatagataaagataatcaagatttagtattatcgtctgctgctgaattagagcttgcaatgattttagcgaaaggaacagagtcagagagtaagtatcttgtgaaaccaactattattgatggtgttaggggaattgcagaatactcacttacagactctcaaatagcacacgctggcaatgctattgctgaattgtatataaaatacaaaaacagtcaagcgatgcgggtatataaattcagttttgagataaaaaaagcattaatagatagcgactttttcccagtatcagaattttatgtggagcgctgggatgattacgaaaaaatattcgatgaatcgttcgagagattaaacactaaattagatgacgttgataaaaaagcagatgatttaaaaacacaatttgatgatatgcagccatcgcaattcgcacaaaaaacagacttaaatgcacatgtaaataatgcggatattcatgtcaccgcagcagataaaacgaactggaattcaaaagaaacagcatctagcgcacaggctaaagcagataaagcacttgctgatgcaaaaacttttttcgaactagctagtgcggtgcaaagcgttactttgacgccaaaaaacggatttgttgcaagtcagcctttagtcgctcgatacattaagtttggcaaccggtttctagttattgttagcggaattgtaggaaaagggaccgggaacgggacaggtatatgtgcaacattgccaacttttttagctcctgatgcgagctggaataaactttattccgctgcacagcagagtacagcagcaagtaatcaagcgaatatatatctaagtgtgagtgctgatataaatattgttggtgttggctcggtagacgtgaacactggacttgacggcataatttatttaactaaagaggtgacaacatgagcgagttaataaaagtttttaaatatgatgcagacggtatttttgaacgtgatgacttaattgttttggaaaaaggggaaaaggttccagatggttatacattaattgcgccgccagttccttctgtaaatccagtttttaatgtaaagacccaaaaatggagtgctggtgaagatgcaagtgttatggaccctcctccactatcagaaatagaaaaattaacacaagattatgcggacttaatgctatatgtggcagaagtcgaacagaagacggaacaaacgcaacaagataatgcaaacttactattatctttggcggaggcaggtgttttgtaaatgattaactggtatgaaaaagtaaaagattattttttaggtggctactatactgaagcagatgttaataaattcgttactttaaaaaagataacgagatcacaagcagatgtaataatcgctatgaaagaagcaaaagccgagtaggcttattttttatgttgaaaataggggatgattgggatgtatgaaggcttaacgaaagtatttgattatgctttagcaaaagaaatgtttttcgcagcgttatttgtcgcactgtttattattttgttgattattaccaaaaggatttgggatgactcaaaaatagtaagagtagaaatgaaagaagagcgggacaaaatggaaacagagcgggagaagcgggataaagaatcgaaagaagaacgagataagtttattagtacgatgaacgaacaacagcgtttaatggacaagcaaaatgacatgatgggacaacaacaacagtcaattgacagtctgtcaaaatccgttggtaagttagcgcataaggtagatttactagaacacaaaattacaaagtgaaggatgatgaaaatggagtttggaaaagagttactagtttatatgacatttttagtagttgtaacacccgtttttgtgcaggcaattaagaaaacggagctaattccttcgaaatggcttccgactgtaagcattcttgtcggggcgattttaggggcattggcaacatctttggatggttctggatcgcttgcaacaatgatttgggcaggtgcattagcaggagctggcggaaccggtttgttcgaacaatttactaatcgagctaaaaaatatggaaaggatgataaataatggcattaacagaggcatggctaattgaaaaagcaaatcgcaaattgaatgctgggggaatgtataaaattacatcggataaaacacgaaatgtaattaaaaaaatggcaaaagaaggtatttatctttgtgttgcgcaaggttaccgctcaacagcggaacaaaatgcgctatatgcacaagggagaaccaaacctggagcaattgttactaatgccaagggcgggcaatctaatcacaactacggggtagctgttgacttgtgcttgtatacaaatgacggaaaagatgttatttgggagtcaacaacttcccggtggaaaaaggttgttgctgctatgaaagcagaagggtttaaatggggcggagactggaaaagttttaaagactatccgcattttgaactatgtgatgctgtaagtggtgagaaaatccctgctgcaacacaaaacactaatacaaattcaaatcgttacgagggtaaagtcattgatagcgcaccactgctaccgaaaatggactttaaatcatcaccattccgcatgtataaggtaggaactgagttcttagtatatgatcataatcaatattggtacaagacgtacatcaacgacaaattatactacatgtataagagcttttgcgatgtcgtagctaaaaaagatgcgaaaggccgcataaaagttcgaattaaaagcgcgaaagaccttcgtattccagtgtggaataacacaaaattgaattctgggaaaattaaatggtatgcacctaatacgaaattagcatggtacaacaacgggaaaggatacctagagctttggtatccgtcagacggctggtattacacagcaaactacttcctaaaataaaacttaaaaatggaggcaacaaagatggtacaaaaaaatatcgtagtagaatcaggagtaaaagtttataaggataaaacgttcaaaaaagtagttgcagagctacctaaaggcgctatttttaaatatgaaagcggattttgcgaattcaaaacaatcaaaggctacacaaatcgcgcaaattggacctgtcctgcgatttctggtagctacgttatcgcactagcaaaagtaacgcaaaagcttgccgaaaaagttggtggcaaaggtgtcattcaaatcacgaaaggcgaaatagttcgcattgatccatctagcttgaaaaacggctatgtgaattgtgctgttttcaacgatgtgtgggagtggggattcaagattaaacttgcagatgttaaacgatgcgaaactttatcctataactcaatagcaaaattataagccaaaagacctcttagctaaaatgctgagaggtttttttatgtttaaaatatatattaaacatagaaaataaaaaataccccgaaaaaattcgaggttgctgttatattcagatgtaaaaaacgggatgtcaaacagctaatagttgaatgaaataaagaacgaaaatcgttcttgtgaatattattacatagatttttatgcaacacaacactttttaagacttgattttaagaacgtttgttcgtataataaagttaagaggtgaagtaaatgtataacttatttgatgatattttagaacattcaatagtattagcagatgcacttaagcgtaactggtcgatagaagtactgtttttaaagaacaatcatcatgtgcggtacaagtatgtagttccagtccacattgataacgaaaaacacattgtgcagcttgaaagatttgacgagcgaataattgacattaatatagaagatattgttttctgcgaggttatgacatgagactatatagctttaatgattttagatatatttgttatgttgaggggaaagatcgtgctgtaaaaaaactatttgctagtttgcggacagacaaagaaattgctatactaaacaaaagaatacaaaaggatacaattaatatagaaaatgtttataaagaatacttgcggggcataaatggggcagagcaaaacaacatataaatacttatagcttcttgtaacagcttttcaaaaggcgtaaaccgcgtaacaaagccgatttcttcccgtgaatgcgtgtaactgctcaacacaaaaccaactcttaatcagcgggtcgggggttcgaaaccctcacaacccatatatgaaaaccgcctaaacaaagcgtttaggcggttttttgtttgtaaacttttaaagtagctggtatatgtcgaaaaacattccgttcatcatattttagttgtacagtccgtcttcctgttatatccttatataagtacataaatacatcatagaaagagagctaatccatgaagatgaagaaatggttcaccgtaattttggtagtagtaatttgctgtgcagtagtattcggaataaagtggttgttatatagagacaaccttgtagaaatgatgaaagttgacggcgttctatatatagtgacgtacgagccggcacaaaaaaaggatgctttggagaaaattggtgagatagagcatagaattcgccattaccgaataccaaataaaaatttcacctctaattatttaagtgaaggaacagaactttataaagcgaaaaatggggatgagattccaaggacaattctgtttaaagagaacggagaatattacattgcatcggaaactatggagcaaaaatagcagttttttagcaaattttgattgaagtcaagcttaaaaatggtgcttctagttgtaaaaaatgaaaattattaataaaaatatgacaatataaactattggaatagtacaatagtgatggttttaataaaaaaagaagcgttatttgatgaaattttatcgaatatcgcttcttttttagctattttgatattgtttgaggaaatcgtttttttttggttctttttgttaattaagttctatcaatgattttgaagttttctgagattttgttcaaacggtaaatgttacgaaatagtgtctaagagagtgtcttttctcgtaaattaggtgtaattgcctgtacgaaaatattttgttttctaagataataagtttgtggtggaatttcagaaaggatgattacacaaatgaagtatattgaataccatgattacattaaaagagatgcgattatttacgcttatttacttgataacttttcttatgtttgcaagcaaattaaagcatgggaaagcattacgatagatagagaacacgtattgttagtaaaaagcggaacattaattgaagaaagtgatggaaagaaaaaaggaatcgttcgctgcttctttcaaaaaaatctcattttcccaactagaaatccagtggtattaaaagctctagaaacttctgaaatttgtttaataagtgcagaaggtgtatttggaaagttggaagaagatcaaattttatcaaacttcttcttacaaatagcagaaaaaaatgaacaagatttaaagaggcaagcgttacttggtattgaaaactcgaaaaataaagttgtctctactctcaattttttattagaaaataacttatctaataccacattaccagttttcccagaatggcttcaaataaatattctggccaaattagcaaactgctccatttccacgatatcttctactgtaaatgaattacacaacaaaggaatgctggatattaaatcttctccatggaaacttaaaggacgcgaaatgagacttgaatactttgaacgagatgttcaaaaagtagcggattaatttaaaaagaaaacaagaaatgaatgttttctaatggtacaagacttgaagcaacatctcaagttcttttccaagcataaaaaatatacacacaaacgaggtggaagtaggacttgaagaaaaatattttagtcgtaattattgtttcagtacttgctataagcgcaattgtttcagcatttttcctaacgcgaaatgatgcttatgctattgaaacggaagggtttacctacagccctaaaggaaaactagttactttttcaccggatgcaaagtacaacgatgcttggcttaataacgaaaaaactatttcggatggaaaagaagtaaagccgatcaatttggcgagaacattatttttaaaagatggacgaattcaatttttaggtaaaagtgtagctattaaaagtgcatcagacctaattgagatgccgtcaaaaacatctgtcactgaaagcaaaggaacgtataaagcaacagacacaaaagacaaagcgattgcacaacttccaaaaggcacagtagttaagcttgctgaaggacgttacattattttagataatgcctatttgaagaacaaaaaaggacttaacaaaaaattacccaaaaacacaatagtttccattgacgagaataagaaagttttattaatgggagaaaaaactttagaagagttagctggcgatgatgcctatattgagatggaaaataatcgttatcaatttgatttaagtaaagaaatattagttagtcaaacggataatgaagaagatattgatattcggtcgattaaagtcgaaatagatgacaaagctgaaaaccgtaatctaaaagcgacaaaagaaacaacagataaaacaacaaaagatgaaacgaaaaaacaagaagaaaaaaacaacgaacaaacaaaaacaaatacaaatacaaatcaagctacaaatgataatacaaataaggcagagggagcaaacggatctgctaatggcggggacactggaacaactactaagggtaacgcaaatgaaggtggaaccacaaaagacaaccaaaatactacagatgtcgataaagcgaatgaaattatcaaaaagctaaacgaggctgaaggactaaagacattccaagtaccaattgtcgatgttgaattagcagttgaaggacaaaaagcttcagcaaaattaaagctaacagactcttccgaacgactgcaatccttggaagcaattctttacgacagtgaaaataaagttgtgaagaaagtagcattaagctcttcaaaagcaaatcaaacttttgattttaatagtttgaaatacggcgaaagctaccaagtcgttgtgcaagggaaatataaatccgccagcgacaaaatacaagagacgattttcttccgccaaacagtagaagctaaaccagttgtattaacgccaaaaattatcgaacgcggcgaaaattatttaacagctgagctaactgcaacagagctatacggcaaaatagatgaattagtcttaagagttaaagaaaacaacagtaatgtagctacttcgaaaacggtgaaagttgatgctaataagctaacgcaaaacggcaaagtagacgttaaatttgattcgttaaatagtagtaaagaatacattattgagatggagaaattagtagttgatggtaaagaagtaactgatgataattggtatttcattgcatctacactaaaagcaaaaccatcaatggcaggaatagacctttcatatagtactgaaaaaggtgaattcactgccgtaccaatcaatctaatcgatacagataattctattactaatatacgctatgtagcttatttagaagaggattacaaagcaaacggccagaatgcaaaagaatatgcttattctgttgtcaatgcaagtcaaaagaaaacggcggtaaaagttggacgtacggttgatatgagcgatggaaattacgtttttgtagcgtacatttctggtaataataatcaatctgactttacgcttgctacaccagtttctaatgccgtagtggtcggattgaaaagtaaaccaactgtagaattttctttgaaagaagcagagcaggacaaactaacaatcaattatgaagtttttgatgcagataatacattactttacgataatttgacgcatccaaccttaaaactttataaatctgatgcacaaggaatgtacgatggaagtccagttgctactgtagatcttagaaataaaaacgagattacaaacttacttgaattcggcggtttagaaagtgaaacttattacgttgttgttatgacagcttcttataacttagatgatggcgcaggaattatggtagatcagcttattggtcaatccggagtgttccaaacgaaagaaatcgcgaaagttaatgctactttcacgttggaatccgtaacgactaaccaagctgaagttaatatcaaattatctgaagccgcgaagaaactaaactccgcgaacttaaaaatctatgataagaaaaataacacattagtaaaaacagttcctctaaatgatgattttaacaagttaatgactgaagatggtgtaacctatctttttgaagaactagctattaataaagaatatctagtaaaagtagaagatggtttagacagcggaatgaaccaagtcccagttgaaggtcaacttgttttcaaaacgaaaaaggcatcaccaataactgataaagtgctacttgattatcaaccgaataaattgaaagtaggcggactagcaggtattgaagctacagaaaaaccactgattgatgattataatgcagttagttccatcacttatcgtatctataaagtagatgacttaaatacgccacttgttgaacaagaagtttcaacagcggctgagtttgaaagacactcttactttgatctaacaaataatgctttaggtcgtggttttgattacgtaattaaagcagaagtaatttggaacgataattatgaagatcatcgtattgaaatcagttccgaaacaattcaaatcaaaaaagaaaaaccaactgttgaatacgaaattttaagaagaacagcgacagaagtaaaactaaatgtttatgtaagagacattgagggcgctattgtacctggaaaacttgaaattactagctcaactggtggttctgaacaacttaaaaatggtaaaaatacagtaacattgccgctttcaagtgaaggagcgacaactattaaaacaactggagactatgttattacagcgggcgaaccagcagtaacaactgactttatgacaaaaactttggtagcgatgaatactactgcaccaaaagctagtgcgcaaatcgcattagatgaaactggtcggtctctaaaaataacacctgaacctgatgatgtggcaaaaagtaatgtaatgaaaacaacctacagtcttcaagaagcaaaaagtacaagcccagattatacagaggctaaaattggtgacgagcaatttgatccacaaaaccttagcttgccattcgggaatgtgtggtttaacaaatcgcatgagttaacactcgatatgaaaatgaactactcagaaaaccgaatgaacaatgagaagttatttgaaaactattatgtttctattgataatagctcggcatttgtaacctcgtctaacggtggcttatctacaacgagaaacctaaatcgtgcagatgtctaccgagtaacgaaaggtccaactgactcagaaggtaatatcgctggtgttaaattcaaaaacatctggacaaacaagtacatcgcatatcgcggtggggttatgataagcaacagtgaaacagccgatccatttagctttagacgtcaagaagacggaagctatgtagcagaactaaatggtcgttatgttgacttctcgtcagggcttgtttctacggaagcagcgggctcaaaaattgatctttattcagcacaagaaggcgtttcacaagtctcgcaagcaattactactaaagctttagtagaaccaaatattactgctgaagaggttagtatttatgacagacgcgttaagttagatgttgttggtgaagataaagataatacaacagttaaaaaagataacgaaaatgagttatttgttaatgcgtacaaagaagatggagaaacacttgtcaaatctgttcgaattgacggcttaccaactcgagacattttcgttacagacctctctcctgacaaaaaatatgtcatcaaagtagaaggtaaatatgatttgttagatggtgaaggtccacagaataaagtttactattctgaaacaataaccacagagaaaagtctaccaagcatggaatcaacaagctactcatggagtccagcttatggagccagaacaatcaaaggaaataacaattttatcgatgaaagtagcgttttaactaatattgagtatcgtttatatgatgcttcaacaataaatgctgagttatctgatttagtagcgctggaacaagaattaggtactaagacgccagctgcaacttttgaaagtttatcgaaaacaccagaatttgatctgtataacagccttggtgctcagaactattctgccggaaaaacttatgtaattgcagcctttatgaaaacaagcctagctaaggcaccaattttcttaagtaatgcacaagcaatttatattaatccgccaagagcagtttcggcaccaatcaagttagaaaacgtttctacgagagaagcaacattgaaattctcttataacgatcctgacagttactttattggtggaacaaataaacagttccaatatgtattaaaagaaacaacgactggtaaaacagttaaaaaaggtgccttcacaggtggaaatacagcaagttggctaaacaccttcgagaacttagaacccgcaacaggttatacattaacaatcagtacaaaatacgataacttgggtggagatggaagtcagtcatggagtaatagtttaaactttacgactgatgctgaatatgtaacctcgaactcacttactattcaacttgatgcagcaactaaacaaatcaagttacaagcaaaagaagtgagtccgggatcaacaaccattgaaaaaatccaaatggagttctacgagttacttgattatggtggtaataacgagcgaacaagtttagttgaaagaaaaacagttactttaccaagttcttaccctggaacagtttctgcaaacttcagtgtcgcaggtaaaaagcaaaatcaaagtttcttaggtaagatggtcatcacttaccgcacacaattaaatgaagttaaaacttatgaaaaaatgtccaactttattaccttgcaagaagatgttgcggcgaacttaaaatcgtttagaaaagtacaaactactgacgaaaaagtaagcgtggcattagatgcgaaggaaatggacaaagatgacaaacaaacttacacgtttgaactaaaagatgaagctggcaaagtactagatacagaaaaagttgcagcgaaagatattgcaaaaacagttgatttatcgattaaaccaactagcaattatgcaataactgttactgatgagaaagataagccagttgctctttaccaaggaaataacgatgaaaataaccttaaagctaatattactaaagatagctttacattgatgaccgaagataccggtgatgcaaaaacagaacttactgtcactattgaaccaaaagaacttactactatggaaaaagtgcagtcgtggttcggaaaagactttaaagaaacaaaaacgattaaaaaagaagatctagatgccggggtcgaaatcgatgcaaattatcatgattcgaaagttactgttaaagaaaaagaatcaggaaaaacttttgggattatcgaactggaggcaagtaaatgaaacctacatggaaaataggtctaatcgttgcagctgttccgttaatcattatttctgtaatcttatgggggtcctttaaggaggcaagatacgatcttgtctccctccctagtaatggtgtggttctaaataatgaacaagaaacattgcaatttcaaaaaggccacacgctttaccgaagctggaatgatgaccagctaatcgctaaaaatgatgaagacgatacgcgtaaccaaattatgcaaagcacgattctttatttagacaaggatgcattaatgtttactaaaagtgtcccagtcattgatataaacggcgtgagtaccaagttaaaaggaagacaagtgtatgaacaaaaagccgcttcctatctatataaaaactccgaaatcgctgaaaaaagtgttgttaaactagctaatcgtcaatatttcttgaatgcagatgcaacactgtaccttggtggaaaagaaattaagaaagtttctaaaccgcttctactaatagataaaactggtagtgtcactatttatgaaaataaaaagaaaagccgttatttaggccatatgacattaaaagttaacgatgaaacggttttagatgctagtaatgaaacttatacaattggcgaacgcaagattgaccttgctagttttggtggaacagacaataagaaaatcgttgttaaaaaagacgaaaaagaagccgaaaataaaaaagctgctgaagataaaaccgaagcaagcgataaaacagcggctaatgacaaagagtcaggaagtaaagcaagtaaccaaaatggatcatcaaatggtggtctaaatgcaacgaagaaatacggaaatgatttaaaggctggcagtggttcatcagaaacagcctctaaaggtaatacgggtggttcacctggaaaagctcaaaaagatttagaggaaattgataattacgaagcagtccttaaaaaaatcgaggaattgaacaagaaattggagcgaaatattccagtactcagaattggatatattgcgcctggcgtaactagtgcgaaagttagctatagttactcggatccaaataataccttgattggagtaactaaaatcagtgttgtagacgaaaaaactggtaaaacagttaacactcgctatgtatcagctgttgatacagaagcaacactaacaggtctttctccaaatgggaagtatcatcttgaattcacttatcagtacgatttaggaacagataaaggcattcaagaagttaaaatgaagagcgaatcttttacaacccaatcagtttcagcagtttaccaaatgcaaagtgttacgagtacgtcaatgaaagtaaacatttctctagatgcacaaatagaagatgtaaaacgcgctcgtatcaaagttaaacaagcaaatggtgattctttctatatgaatgttggtacaaacttcattaacggtaacggagaacttctaaatgtaacagacttatctccaagtaccgcataccaattccaagccatcattgaaatgaaaaatggcgaaacaattgaattaaatagctcagaaaaatactacacaatgcaggcaactgtattaagaagtttacgagctaatttatcagtaaataaagttgttcaagttgagtatgactggaattccacagattacacgataaatcaagctactgttgaattaaaggatgaaaaagatcaatccaaagtagattacaaaatcgttaatcaagaaaaaggaaatattcgcttagtaccaattactgatgaagaaacagttgatttagaggctaaattagtccttaaaacaaccaaaaacaacacaaatgaaacaaaaactttcgaatatccaattaaacaagacattgaatatgacaaagatgcgaaattcactatttctctaacaccgttccaaacagaagataatagtgtaaaacaaacagaagaaacggaacaagaaaaggcacaaaatggcggcttaacaactccaatagaagaagttctggccccgcaaaatgccacttatgacatgaaatttaccatgcagcgcaaagcaggcgagacttatcggattgccatagaaagacgtgcagctggaacagagaatagttggactgcattcagtagcaaagaactgcaagctgacgaatctggtctagtcaatcacatggagacaatctcgaaaattgcgaaagaaaattttgattaccgtgttgcagtttatgacactaatggcgcactgcaactgtacgtatatcaagaatagtagaggggcacatcttcttcgtgccccaatctcaaacagaaagtaggaaaataataatggatttagtagttgcatgtagcgtaattggcgccgcactggcaattgggcttgcgactttaggagctgcaattggacagggaatcgcggttagtagagcaacagaaattatcggaaaaaacccgaatgcaaaaaaagaagttatgggaggtctctttttgggactcctgatgatagttgcattaatgctttttgcactggcaattgcagtcatcttgctttgggttaacccgttcatatgataggtgagagcatggaaaaattgattcaaacaatagtcctttacagtatttttggagtgggtttcttatatttactatattttaccttgcaaaaactggaaaatattttaactagctttttttacgaagttagccaagataagtcacttgaaaaagaaagtttattacgtcgactaaaaagacaaaaggtcgctacaaacaaagaagagcagaaaaataggcaattagctattgaagctgaacaaaaagagactatttttcttgaagaaatcgatcagttagttgctcgaaatagacaatacgaacaagaattacaaatgtggcaaaacgaaaaacctaaacaaattgttgaagttcctagtattgagacaactccacatgcaccatataaatcactaagtagctgtgttactgaaatcatgcaaaaagtatttgttgaatcagaagaagaggaagcgcaattatttacagaagcaattcgtgaatttgatgcactagtacggaccgaaaaaatccgtctggcacttccatataaagtacttttacgtttgttcgaattgcatacttcagaagagctacatgcatttacaaagtcgttcgaaatgttccatgagcgtgcaagtaagctttctgttaaacaaatttatcaaagtagttacttgtcgccggaacaaaagcttaaagttatgcgtgaagacggcacattagatgaattaaatcatgaatttgttgagttcctattctatatgttgacacatttctcttatcgtcaaactcgtggactttacagaaattatttagaggtttataacattcacttttatacagggcttattcgtgtagatgtggctagtgaagatgcagcaaatcattttgataagctgtggcagccaacccatacaaactataaaatcgaatatcaagtacaaaaagaattaattggtggagttattatcaattatggaacaaagtcgattgatatgagctatcaggaactaatcaaacgcacaacagaaaaaatggaagcggaagtgagactttgaaaaatattcattttgatataaacaaatacgaagcccatgtggacttggaatatttaaaagaaaatggcagggttgagaaaatctctgatggtgtaattttttcttcaggattagaaaatgcggcactccaccaagccgttacaatcgatggcagacatcgcggcgtaatcctagaactaaatgaagaatttgttggtatcggcttaattgataaaacaaatgacattttagaaggaatgagtgtttctgttacagatcattttatagaagtaaatctttttgaagatatggctggccgtattattgatactacagggaaaatgctatacgacgtaagcgatgaacagccaactgctagcagcccgctattctgtgtaacgccagcgattatgactattgatagtgtaacgcgtccgctcaatacaggacttgcggttattgattcgataacaccgattggtcgaggtcagcgtcagttaatccttggaaatcgccaatcaggaaaaacgcagattgctgtagatacaataattaatcaacacaatcaaaatgtgcactgtatttacgtagcaattgggttaaaagcagcctatattgcagaggttattgaaacccttcgtaagcatggcgcaatggattattccacagtagtagcgacagcagcaagtgattctcttactgcacagtatttaactccttatgctggaatggccgttgcagaagcgctacgtgatcaaggaaaagacgttttaattatttttgatgatttaactaaacatgcggatgcttatcgagcgattacgttgctctttaatcgtccaccaggaagagaagcatatcctggagatagtttttatattcactcgagtctcttagaacgagcggtacaaatgaatcaggatcatggcggcggctcaatcacagctattccaatgattgaaacactatcggatgacgtaacagcgtatattccaacaaacgttatttctatcacagatggtcagttattcttaaaatccgatttgttcaaccgtggtcaaaaacctgcagtggatgtcggggtatcagtttccagaatcggtggagacgcgcaacatccaattattcgtaaacttagtaagaatttaacgcttatcctttctcagtacgaggaattaaaagaattacttgattttggtaatgcacttgatgatggaagtatgaaaatggtaacagatggccgtatgctaacagagttatttaaacaaaacattttgagcccactatctgtgactgaattaatcaccattttatatgctttccaaaatggctttttaacaaaaatggcgcctgctaatgttcaatcgttcaaaggcttgttattagaaaaagctcatgcgcatcagaagtttgaagaattctcgaaccaaatagaggaaattagtgaactgaatgaatcacacgtcaaaatgttagaagagattattcaggaagcggggaggcctttcagttgagtagcatagatcaagcgcgaaaaaagattaaagcattgaactcaacttataaaattgtccacgtaacggaattagcaacccttggtaaactttctggactacggacaaaagccgaagcagcagttagttattacgaaactatcttgaaaagtttgcgttgggttagaaaaacaatgtacaacggtaataatttacaaacaaccgaagagaagaacgtcactgcccttgcaattacatctgaacgaggactatgcggagcctacaacagtgaagtatttgctgaaatagaccggctgattgaaacacttggaaatcaagttacaatcaattggatcgtagtgggcgaacaaggtcatcgctatttaacgaaactaggtcagaatattagtgaatacttgcagttctcacttgaaaatattgatttggaaacaactacagaagtaacagcagattttattgaccaaatcaataaacaagaaatggatgctttatacgttatcttcacgaaatacttcaatgcagttcattcagaagcaatgtgcgaaaaaatatatccagacattcctgaaggaccagaagcagaaaccattgaagttgattatgtgctagatattgagacagatgatgaacaagtagagcaattgttactagaaaattatctatgtggtctgctttatagtatgtttcgttattcggttgcaagtgagtactgtatgcgccggattgcgatgaaacaagcaaaagataatattcataaacagcatgaagaagccgtttttgatgctagaaaaaaagcattgcaacaaaaaacaggcgagctattagatattattagtggcgcacagacgatcaggaaggaagaagaataaatgaaaaaaaacataggaaccattattagtattagtggttttgttttaaaaatcgaatttaatgagagcgaactacctgaaatcagccatgcgcttgaatataaaacacatcaaggcacctatttagcagaagttgttcaacatacaggaattaacactgtttcagcgattgcgattggtgaagttagtggtctagcccgaggagcagaagttattaatctagggcatcctattgaagttcctgttggagaaactgtacaaggtcgtatgttaaatgtttatgggaaggcaattgatggcttaccagaaccagaagcagaagttaaatggccgatttttcgggaacaacctttacttcgcgaacttgatacaaataaagaaatcctatatacaggcattaaagttatagacttgatttgccccattttaaaaggtggtaaaacaggacttttcggtggtgctggtgtaggaaaatcagtattaatgcaagagttaattaacaatatcagtatgatgggcggaaattccgttttcactggagtaggtgagcgcgtcagagaaggtattggtttatataatgaattagaatcaagtggggttttacctcaaacaacagttgtactcgggcaaatgaatgaatcgcctggcgtacgtatgcgtgtagcacttactggccttacgatagcggaatatttgcgtgatgaagagaaaaaagatgttctcttgtttatcgataatgtttttcgtttcattcaagcaggttctgaagtatcttccttacaaggtaaaatcccaattacaggtggataccaatcgaccctttcaaaagaagttggtgacttccaagaccgcatcgcgtcgactaagaatggttcgattacgtccattcaatgtgtatttttaccagctgatgatattgatgatccttccgctgttgcaacatttagccatttagactcaacgattgtacttgagcgttcgatagcagcattaggtattttcccagctgttaacccgcttcaatcgttctcacgggcacttaatccaacttttgttggggaacgtcattatcagttggcagttcaagtcaaatttattttacaacgttacatggagttgcaagaaattatcaacgttcttggtatggctgagttgagtgatgaggataaaaaactcgttcatcgcgcaaggaaaattcgtaacttcttatcacaaccattttatgtttctgaaaaattcactggtacagaaggaatatttgtggaaattgaagacttgttgagcagcgttgaacgtattttgaatggtgaatatgatgaacgttctgagcgggaattcttgtttatcggatcctacaaagatttgaaataggaggagaggcaaatgaaacttaaaatcgtctcgccgatggggcaattttttgaaggtgatgttgagggctttgttattaacactaaagaaggtcagcaaactgtattagaagaacacatcgattgtttaagttttttcgactatagtgaaatcatcattttagatagtgcagctacagagcctatctttgttgccctcggttatttacatctcgttcaaaatgaagcgaatatcatggctcagtatgcttcaaaagatgccaatcaagctgaacgaatttttgaaaggctcaacaaacgaaaacaaatggagaacaggaggatcacatgataagcggattttttgatacactgctacaaattattgctcttctgtccgcgttttttcttattgttttgctccttcttactggtattcgatattttctatcaaaagatgaagttccattagaaaaaattcaacgttaccaattgtggcataaccgctaccaatttgatgcagaggtgacagcctttcttgtcgttattacggcgacacttctagtatgtttatctgcagtacaaataaccgccattccgttccaatttacattattaatgttttggagtagctggctgtttcatccattttcttattggaaaaaaacgcgtacgccacaaaaactcaaaaaagaaattatgcagctactgggcttagttttaattacagctttgtacttcgctggatactttgcacttaagtcaatgtatttagtacttgtgcaagtagcagaagccccttggcatatccaactcggcgtaagaagttatttaattatatgtagtttacttgtagccagtggagcactaattgtatggcaacgaatttacgctaatttactgaaatagtttaataaaagtctctaaaaatcctgtgtacagaccgtttcttgctaatgaaaacttacgagatttaatgggattaattaaagagaacgggacttgtattactggaaaaatggtctaaaaaattttaaaggagataactttatatgatgaaacttaaaagcttgaggcgtccattattattagtcatggcagctttactgattatcggtcaattgaatctttcgtccttccgagtattcgcggaagaaaaaggtaacgaatcagtttcttatgagatacaaaatgaactttcaagcgacaagaaaaaagctaaattgaagattaaaacaacccctaaaaacgaggaagttaaaatcttaacgatacaaacaccagatggtaaaaaagtagaaggtcaagaagcagaatatacagccacgaaaaatggtactgtggattttgtaattaactatcaagaccaagataaaacagaaaaaacttatactgcttcttatgaagtaaatgatatttctgaagaagtacaaaatacaccgaaaccgactgtcacggaaggaaatactcctaaaaaaggatctaacttgcttaaatcaagcgctcctactgtgtcaatgaaaattcctgattataacaaaacaaattgggagaatggagacattaaagacgtttctgtaacagttgagtttaacaacaacaatgcttctggtaaaaagattaatttcactttgccagacggaatgcgttttgtttctctaccagttccaagtagttatcaagcacctagtagcgtagactcgaatattttaagttattttggcgcaggtaatccagttggagattcgattacttcagtgactgttccaaataaagaaacaggctacaataaagcaacttatggtactttgagctatgaactagatccagctactgaaaaactaactctaaacttctctgtacaagtagatgcagctaaatactatggtcctactgacttgaagtctccaattaaagttgatgcttatatgggagaaggaagtactccagcagcatccgcagagcaaagcattcgtgccgagggtaaaactgttgttggctatgcaaatcaaaaacaggtagacacaatgtttagaaactggtatacatcttcatttttaccagaagtaagtccaagtacagccactgaagattcttataactacactaaaccttattcagttgtaaatggtatcagccaaatggatggacgtggttcaaaaatctttgttcctaaaaacgttaaaactactctttattacccagaaggtatggagtatgtaggcgtagttaatgaaaacaagagtttactaacaaacaacgaaaatagaacaatcacgcattatccaaacgaaaataaagtagaaattgactttaaacaagaaaattactacggtattattgaaactattttagcagtaaaatacaaggtaccagaaggaacagaagaagggacttatacttctcctaaagtaccacatgcagttattacgacatatgatgataaagtgtttgaaacagatgcattaactaatgatgcaagtgatacaacaacactagctgcaaaagacacatgtaaagtagtaggtaaagcagcaaataaaatggttatgctaccaagaaactactatataaatccagataacgaatcttgggcgggacttattcaaatcaataataggcaaactgccggagtgaaaacaaaccaaatttaccaaattaaatttgatgaaaactgggaagcctatactgtcaacataccttttgatggaacttacccaggtaataaagtaaaagacgtacagtataaaacgaacttaaattcggaatatcgaacttacgatggtactcttccgaaaacaaatggtaataaaatgcttactttagatgcaacagcagttggacttcaagaaggcgagtactttactgaagtaaaagctaacgttggagacttctctgtaggtttcactaatattgacacagctgccccatttaaagcagcaaattctgcttcatacgggattgttaaaccaggtattacatctgttcaatttgacgtgaatatttggaacgcagatgatgaagaaaatacaaaagtttcaggatcatccacatatacagttgctaataatataagtacggcagcaaatgggacagcttcattctataatagtgaaggcacaccaattaaaactgctcgtgcaggagaaacagtaacaactaaagcatcattagttatgcatgattatccttatggaacaagatctgttcttaataatccggaagtttatctacgccaattagaaggaactacggttaaaccatcttccattaaattaacagaccaagatggcaaagaagttgatttcacagtagaagcaaaaactgctaaaaatggcgataaagtttatgtcattaaaacaaaagatataacagtaggggaatttgttggttatccatccaaaaaacaatatttgaatatcagctataacaccacatttgatatgacattaagtaaaagcattcacactgatattcaagaattacttgcttggggcggaagtaacgtaatttctgcactaggagcgaacgtcttcctagataatggattagacgtaaaccaaaatggtagagatgcggaacgtttactttcaactaatacaagtactctaagtgttccgaaacaagatacagttgccgtagagactttcttaaatgtagccggagaaggaattaaagctggttatgtagaaggcgatgacagtactgtttcctatttcacacctggaactgacgctgattatatggttaaaattacgaatacttctagcggtagcgcaagtagcttagatatttttatcccaattccaaaaactggacaagactttggtacaaaattccaaagtgaacctttcaaatgggacatgaagctaaacggagaagttcctatgacagctcagcaaaaatctcagtttgatttaacctatactgcggatgccactgcagataattatacgtctgatagcatttacagtaatacactcactgattacggaaaagctaacatggttcgtatcaaagttaaaactaaaattgagtcaggcgaatctcaaacaatcaaagtaccactgaaagtagatgaaacatttgaatctgctacagctggtaacaaaattggtgaacgtgatgtatacaacccttactatgcagttgaaactaacacttattctggttcaatcgcaggaactcgagtaggagcagagttagtaattgtagaagtagcaggtaagttattcaaagataaaaacgcgagtggtatttatgaaaccgcacaaggcgatacaccactagcaaatgaaacagttgaattatacaaatgggatgaagctacatccacctatgaaccattcaccaaagatggacaaaatgtaacaacaacaaccgatgccgatggaaaatataagtttgattataatttaggaattggttacggaaaatatgctgtgaaattccctgaaaaagcaggttacaagcatacgttacaaaatgttggtagagataaagacttaaatagtgcagcaccaaatatgggtactgaaattggttgggttaaagatattgatccagcacaaccagatgctcagcacattaatgcagggtacatttcttacgttcctgaaacagatttaaaagttaacttaaatgaaaaaacagttcaagaaggtaagagcctgaaaatcactttaccaaaagtagctcctacaagtggtgaagcagcagaagatacaattgaaccagacattttccaaaaaatccaagctaacacagatgggtataagtggactacagctgatgcttccgtagcaacagcgaaaacactaactgatggttctgtcgcaattgtaggtggttctacgaatgggaaaacaattagggttacagatttaacaattgctcttaaagatatttttggcacagagaaaaaatcaactgcccctctttatgtaacaacagcaaacggtaaagttgctcaaaaagatgaacttaaaattggagcaactaacttcacattagaatacaaagatgcagttgtccttagtgaagcacaagcagtaactaaagccaaaacagcagcatttgaagaagtgaaaaacggtgtgaattcagacgctgaagatcgcacagatgttgttaaagtagacgaacaacaattaaaagctcttaaaaacggttctaaccgcggtggtacgtatccactaacatttactcttgaaaaaaatggtaaagaagttgaaacagttattgatgtaaaagtagaaaaagacctaacagaagtaaatgctcatgattctactatttatgttggagataactggcgtgcggctgataactttgatagtgcgctaaataaagaaggcgaaacgcttacttttgcggacatcgaggctactggaacagttgatacaacaaaagcgggtgaatatccggtcacttataaatacaatgatactactaaaacagtaactatcacggtaaaagatgatgcgaccgaaattaacgcgcatgattccacaatctatacaggcgatacttggagtgcaaaagataacttcgatagcgctgcagatagagatggaaatgaagtagctttatcaaaagtaacagttactaatacagttaatacagcacaagctggcacttacccaatcacgtatacgtatggtggtgtatcaaaaactattacagtaacagttaaagaaaataaaaaaggaattaatgcccataacgctacaatttatgtaggagatagctggacagcagaagataattttgataatgctgttgataaagatggcaatccagtagaattttcaaaagtaacagtaactgaaacacctaatgttaatactaataaagcaggaacttatcaattgaaatatacttttgatggagcttccaaaacagttactcttacagttaaaaatattcaaaccgctgttaatgcccacaactccacagtttatgtaggagaaacatgggaagcgaaggataacttcgacagtgcacgaaataaagacggagaaacagtcgcttttgcagatgtagaagtagaaggaaatgtggatatgaccgtagcaggaacatattcaatcacttacaaatacgacggtttttctaaaacaattaaagtaacagttaaaaatccacaaactgcaataactgcacatgattctgtggtttatacaggagacaattggagtgctaaagataactttgatagtgcaattgataaggctgggaaaccagtagcttatagggatattacggtggaagaagatccaacagtggacttaaatacaccaggaacctactcagtaacgtataaatatcaaggtatatctaaagtagtacaaattactgtgaaaccaagacaaactaaagtagaatctcacgatagcacgatttatgcaggagcaagttggaacgccaaagacaacttcgattcagcgatagataaaaaaggcgatgacgtcaaactatctgatgtgactgtaattggccgtgttgataaccaaacaccaggcacatatgaaatcacttaccgttatgatggtgtaacaagcgtttctcgcgtgactgttctacaaaatcatgccaaaatcattgttaatgatagtaagctgaaaataaatgcagattgggatgcgaaagataatttcgttcgcgcaatgtctagagacggtagcgaaattccaatgtctaaagtaaaagttgaaggtaaagttaatacgaaaaaagctgggaaataccaagtaacttatacgattgatcctaatgaaggaacagtagatgctggtaaagaagagctttctgttacagctacaatcgaagtagtagaaggaaaagtagcgataactccatcagaaaatagcaattcagatgtaaaacctggtaagcaaaagacagcaacataccaacaagcaataccaagaacaggggaccaaatgaatttatgggttgttgtaatgggcgcttgcctagtaggatttgcgctgttcctatggacgtttagacaaagaagacgtcacggataattgaaagaatagtttcggggaggtaggtatgtcaggtttagactagcctaccttttccggacatttaaacaagtttttctatagagagttagttatacagataatacggttcaaccgatagccaagggttttagacatctaggaggaaaggaagtagaaaaatgacctttttagaatttcatcaactaatcagccaagattcactgatttattcatggattaggaaaaatttttcttttgttcaccaggagttggaggcaggtaaggaacttaaaatgcagcatgaacaactaatcattatggaaaaaggcctgctaatacaaaaaagcgaagaagataagaagcttacttttcaacgagtattcgcggatcaacggattatttttacgacaggtggaagtcttacattaggtgctctagaagatacggtttatagcgttatccctacagacgaattgtttgagaaattggatgagcatcaattgttacctaatttctttttacaaatagctgaagattttgaggtaagtatcgaatggcaaagaaagttaatgtcggcttatccagaggaacgggtcagaatggttttgagaaaagtaattgaacgatacaaactagatcccgtgcacaatccagtatttccaagatggcttaaaatttatgttctagcaaagttcgcaaaatgttccgtctcaacaacttctatgatagtaaatgatttagctgagaagggtgaaattaatgttaaaatgactccttggatattaatgcaggattcaccagcatattgtgtctcttaataaaactataaaaaactactcaaattcaatttttgagtagtttttttgttttttagtagggttaatatgaaattaataacttttttcaatatactttattcattttttagatacactaaaatttgagtatctattttctgtattaatgagcgatacactatttaatatctttataatttagaatgataaagtattggtaaataagggttttggatgcaatactaataagttggcacagaacttgcaatatattaagcgggtagcaaaataaatgaattatattaggagggaaaaagatggtaggaattatcctcgcaactcacggtgaatttgctgaaggtattttgcagtccggaacaatgattttcggcgagcaagaaaacgttaaagcaatcactttgatgccaagcgaaggtccagaagacatcaaagctaaaatggaagctgcaattgcatcctttgatagccaagatgaagttttattcttagtggatctttggggaggcacaccattcaatcaagcaaacggtctttatgaattacataaagataagtgggcaatcgtagcaggacttaatttgccaatgctgattgaagctttctcatcacgtttcacaatggaaagcgcacacgaaatcgcagcaaatatccttgcgccagctcaagaaggtatccgcgtgaaaccagaagaacttcagccgcaagtaacagctactgaacaaccacaagcagaaatcgctgcagttggtgatggcaaaattgaattcgttttaactcgtgttgattctcgtctcttgcatggtcaagtagccactgcttggacaaaagcaacacacccaacaagaatcatcgtcgtttcagatgcagttgcaaaagacgatcttcgtaaaaaattaatcgaacaagcagcaccaccaggagtaaaagctaacgttatcccagtccaaaaaatgattgagatttcaaaagatccacgtttcggcaatacaaaagcacttttattattcgaaaatcctcaagatgttttacgcgcaattgaaggtggcgtagaaatcgaacaagtaaacgttggttccatggctcactctgtaggtaaagttgttgttagcaaagtactttccatggggaaagatgatgtagccacttttgaaaaattaaaagaaaaaggcgttaaattcgatgtgcgtaaagtccctaatgactcaagcgctaacatggaagacatcatcaaaaaagcaaaaaatgaactaaagacacaataaaaaattaaaataggaggtttattatgtctgtcatatcaataattttagtagtacttattgcatttttagcaggtatcgaaggaattctagatgaatttcagttccatcagccattaatcgcatgtacattaattggtctcgtaacaggtaacttaacagcatgtatcatccttggcggaactctacaaatgatcgcacttggatgggcaaacatcggagcagccgtagcaccagatgccgcgcttgcctcagtagcttcagcaattatattagttttaggtggacaaggggtagcaggtattccgtccgcaatcgcaattgcaattccgcttgcagtagcaggtcttttcttaactatgatcgttcgtacattggcagttccaattgttcacttgatggacagagccgctgaaaaagggaatattcgcaccgtagagtggttacatatttcagcaatttgtatgcaaggtattcgtatcgcaatccctgcagcagcacttttattcattccagcagacagcgttcaatctttcttagaagcaatgccagcttggttaacagatggtatggctatcggtggaggaatggtagttgccgttggttatgcgcttgttattaacatgatggctactaaagaagtatggccgttcttcgttatcggtttcgtagtagctgcaatttctcaacttacacttatcgcaattggtgctctaggtgttgcacttgctcttatttaccttaacctatctaaaatgggtggcggtaattcaaatggcggtggaggcggaaactcacgcgatccactcggcgatatattaaacgactattaataaaaaaaggaggagaatagaatggcagaaaaaatcgaattatcaaagagagatcgtctacgcgtagcatggcgctctacgttcattcaaggttcatggaactacgaacgtatgcaaaatggtggctgggcattctctatgattcccgctattaaaaaattatataaaacaaaagaagaccgttcatctgcgttaaaacgtcatttagaattctttaatacacatccatatattgcatctccaattcttggggtaacacttgcacttgaagaagaacgtgcaaatggtgcagaagttgatgatgtagcaattcaaggggttaaagttggtatgatgggacctctagctggtgttggtgatccagtattctggtttacaattcgtccaatgttaggtgcattaggtgcttctcttgccttgagtggaaacattcttggacctatcttattcttcgttgcttggaacgtaatccgttggggcttcatgtggtatacacaagaattcggctacaaagctggttctaaaattactgatgacctttctggtggattactgcaagacattacaaaaggtgcttcgatactcgggatgttcgtcctcgccgccttggtgcagagatgggtaaatatccagtttgcgccaattatctcgaaagttaaacttgatgaaggtgcgtatattgattggagtcatcttccacaaggtgcacaaggtatcaaaactgctttagaacaacaacaagcaggattagctctttctgaaattaaagtaacaaccttgcaaaataacttggataacttaatcccaggacttgcagcagtagctcttacattcctatgtatgtggttacttaagaaaaaaatcagcccaattatcatcattctaggtctattcgtagttggtatagttggtcacttaatcgggcttctgtaaaaataagctgatcgaaaagaggctggtgcaatattcaccgagcctcttttcgtttagatatatgacacagataaacgaatacggtataataaacaaaacaagcgaaaagaaatggagcgaatacagttggttcaatcgattaatacaaaggtagacttaacaatagatgccaccgcgtatactggacttacagattacgggaaaattatgattggcgacaaaggttttgaatttttcaactcacgtgatgtgcgtaaattcgtccaaatcccttgggaagaagtagatcaagttattgtatccgttatgctaaaaggtaagtggatccctcgctacgccattaaaacaaagcgcaacggcacatacacatttgcttctaaaaagcctaaagaagttttacgtaaaataagagtttatgtcgacccagccaatatggtgagctcgctaagtttctttgatgttatgaagcgctcgtttcggtcgatatttagcaagaagaaaaacaaaaataaataagccgatttataccgaaaagcttcaatggactgatgtctgttgatgcttttttttcgtacataataattgaacaaacagcgcattttggtacaatagaaagtgaaatcaaaagtaaacgaaggaggaacaccaacatgaaaaaaccaagaatctacacgatgtcattcgctagtgtataccctctttacatacaaaaagtggagaaaaaagatcgcacaaaagaagaagtggatgaagttattttttggctaactggctatgaccaagcttccttacaaaaagccatagatcaagaaatcgactttgagacttttttcgagcaagcaccaaaaatgaatcccaatgcctctttaatcaccggagttatatgtggctaccgagtggaagaaattgaagataaacttatgcaacaaatacgatacctagataaattagttgatgaacttgcaaaaggaaagaaaatggagaagattttaagaaaataagtaaaaagcagccgttttgaatggctgcttttttgttggttagcttttagaaactttcttttttaaagctgctaatgaattcgctacttttaaagtcgttttcacagattttcggtttaatgtgccttgataatgtctgattttatttgtaagttcatgatttttctttagcgtcagctgtaatttttgtgtagtatctgtcagttgtttttctaattgttgatttttttcttgtgattcagtaattttctgttggtattttttgttttgctcagaagttgtttttttcagttgggtgagttggttatttacgaggttgacgcggtatcttgtgctaaaatcatgtctttcttttaataagttggtggagatttttactcggtttagcatttcttgaggatttaatatggaaatggggtctggacttgatgggaaagtaatggagtttataagttcatccataggagctgattttctgtttttatcgtgtttgtagatatgattgagaccgtttgtatctaagaaatcaatatagttatcaaaattccttgcttggactttttcggctgatttcaggtccactttagtcagtaattcttggaggttgcttgttttttccaattcatcgatggtgacgtgaggaagcgcatggtaggaggctagttcacgcattctagcatcttggacaaatgaaatattaggtgttccgactattgttggaatgacatttccatgtaagcgagagccaatgctaaaatcaatatttttcacaaaatcgaaccaactaggcatgctagtgaaatattttactcgaccttcttgataatacttatgttggatatttgttgggtagccattgatatcactagagatatctggaccgccagcatacattaaatggaattcgtctaggtgttgagggataaattggtaatctttatatgtattaatcaagttgtttaagaactcgatagctatatctgaagaggttggagatgcgttgatagcaatggaggattgttctgttaagtggagttctctgatttttatttctcgaccaaatgtataaagggaaggacagccgattactcgatagtctataccttcattaaatccgagtttttttaaataatctgctgtaatctgtcctcgaactcctatttgagccgatttttcaaggactgcttttacaaaattagtaacatcttcatcaaaagtgaaaccttcatctaactgaggttcatagtttgctcgtaaacctacccctgtgactacaaccgggatttttagcttacgaatcaactgagtataattacggagcgcgggtcgaaaatcttcacggaaagcatcagctagaggcacaatgtacaaatcgtaatgttcattaattttttctgctaaattaggattagaagataacccatcagcgtgtatttctacattgtcattccataaagtcctataaatgctgtattggtaagctagattaccattattaaatcctgttcgatcctttaaataaatatcttcaggcatgtatacgtttgtagggcgcatacctgacctaatgagtattcttttcactaaaaaaccacatccttaacctagttaatatttaaagtatatcaaaatattaattaagttaacaatttccgggatgaagttatttaagtttatttttacacgaatcaaagaagaaaccgatttgttccactagtccttcgttaaccgaataaatatgcgttgtccctttctttcttaaattaattagttgtgcttctttaagcagtttaatgtggtgtgacatggttgatttggaaatattgtatgtttcgccagagaaacgtttttctttgctttttagtaaacataggaaaatatccaggcgaattggatcgctcagggcttggaaaattaataataaatctgattttgatagctcatttaactttttcatatgattatcatatcataacttacattttaattgcgcggaacttgctgttatgttatattatgatagttcgaaaaaaatcgaactatcaaatccgaaagaagttgttggtaaatgttgcatattgaagcacaaatgacgataaaaaaagagcaaatagaagcttttttgcaggcagctaaggaagttattgccgcgtcacaagcagaaacaggaaatcatggctatgaattagtacaatctactgaaaatgagacagttttttatatgctagaaaaatgggcggatatggatgctattcaacaacacaatgaaagcgagcatttcaaaaaatttcagaacgccgctactaattttgttgcaaaaccacttgaaatttcagttttaacgccacttgcgcgataaggaggagaaagagatgacttatttaaataatgattttgaagacttaatgaaaaaccgtcgttcgattcgagaatacgatgaaacggtgaaaattagccaagaagaaatgaaagctattttggaggatgcggtaactgctccgtcatctgtaaatatgcagccgtggcgctttgtagttgtagaaagtgatgctggtaaagaaaaattaagttcattagtacgctttaacacacgccaaaacgaaacttcttccgcaatgatcttaattttcggggacctacaaaactttgaaaatggcgaaaaaatttacggggaagctgtgaatcgcggtttaatgcccgccgaaataaaagaacaacaaatggcaaaattaagccagtactttgaaacaattccgcgttcggaagcagaacgagttgtattaattgatggtggtctagtggcgatgcagttaatgttggttgcacgtgcgcatggttatgacacaaatccaattggtggttttgagcgtaaagaagtgacagaagcgtttaacatggatccagaacgctacgtcccagttatgctcgtttctatcggaaaagctaaaaattctggctacgagtcatatcgtttaccaatcacagacgtaacgactttcgcttaaagggtggaacaagggaatagccgatatttccttgttcctttttgttcttcttggtataataaaaacaacataaagccgaggaggaaaagcaactatgacgatcaaaataactcgtaaaacaggtattggcggcggtattactccagtgaaaattagaatcgaaaatgaagaaattgtaaaactcgacaatcatcagtctcatttttttatgcctaagatggagaaaacaaaggttcgcgtgactgattggttctttgggagtcaggaagtagttttggaaaatagtaatgatgttattgtgcggattaaccgtaaagcactaatattaaattattcaatgttcccgtttctaatttacggtttagttatgactagtttggcttctacgttaattgcactcggtctctttttggtatcaattttttattcgcgaaagcattggtttgaatttgtgaaaattaaataataattaattgatagtataagccaagtgcttgtactatttttttatctgtgtaagtttttattccatctgtgtatcttaggaacaagcttgaaaccgctaaatgacaacgctttcttttggcatgataattgcatgttatacagttgctcagaatgaatctttaattggagggaggaacttagagaaaagaaacattctggcaaccacacaaaaaggggtacagagagacaaacttagaactaccgaaatgaggtttataaatcaaaaatcggggtgaagagatgaataagaagatgaaaaagctttttagtattacttctgttgtgttgttagtattatcgttagtggttgtatcaattggtgcagagtcaaaacgggcgaaagcggctgaaaatgtaccacaatatcgaaatgttatgtattacggtgattggtcgatttggggaggagaagggaatttttatccgaaagatattccagctgatcaattaacacatttaaattttgctttcttggattttaatagtaatggagatttagtttttactgataaagatgctgctgtcggagcgcctgttggacaagagggagttcagtggggcggagcgaatgcgggtgtattgaatgcgattcaagatttgcgcgctcaaaatccgaatttgaaaataggggtttcggttggaggctggtctaagtcgggtgatttctcgacagttgcagcagatccgacaaaacgggctaattttgtcaaaaatgtgatgaaatttgtgaaatatactaatatggattttgttgatttggactgggaatatcctgcttcggtacgggatgctgaccttgttgataataaaaatgatgaaggcacgccaaatgcaaaacctgcggataagcaaaactttattacacttttacaagatttaagaacagctttggataaacaaggcgttgatattaacaagaaatacgagttatcggtcgctttaccagctgcaaaatctactttggaaaatggagtggatgtagcgaatctgtttaaagtagtcgattttgcgaatgtgatgacctatgatttaaatggtgcttggacaccgaatagtgcgcatcatacagcgctttacggcaatccgaaagacccgaattacaatagtggtttttctgtggaccaaaccgtaaaatacttaaaagaaaagggagccgtttcgaataaaattgttgttggggcagcattttatactcgaggctggaataaagtagctgcgggaacagacactgcattgccaggacttttccaagcggctgaaaaaacgaataaggatgcagatggctcgctcacttatggggcaaacaatgaaaacccaattaaaactggtgatgggggccgtgctggtggagtttgggcgtatagaagtattgatgctctaaaagccaagacgccaactttaaaagaatattgggatgatactgccaaagcgccgtatctttatagtaaggaaactggggagttttacacatatgacaatacgcgttcaattggctataaggcacagtatgtaaaagataataatctaggtgggatgatttcttggatgcagtcgcaggataaaaccacgacttcaactaagcgcgatgaacttacaaaggctattaaaaccggattgttcggtacaagtgcaatcccgcaaaacgcaatcacatatgcgaatttaaatgtggtagcaactgtaaaaccttatagtgaaaatggagtcggatacgaaattacgattactaataatgaaaaagcggatgaaacaaatgaagtcttgaaatcaacagagctatcttttgaaacagtaaaattacctaagttttatattccagtaaaagccggcgaaacgcttactgctggagattataaagcaggtacggttactacttcaggtggcaatacagtagttgatttagcttcggtgtatgatgcacagcaaattccgcaaggcgcatcttatactttccgcttaaaatcgagtgcatctagtgtggatgtaaataatatttctaaaattgatttaacacaacggatggtaaaatcgagtgtcgaatttggtaaacaaactatttttggcgggggaactgttgtacctgatccaagcgatacagaagctccaacagtgccaaaatcactcgcatcttctaatgtaaccgataaatctgttactctatcgtggacagcttcaacggacaataaagcggtggctggatataaagtgtaccgaaatgggaccgaagtgggctctgtttcaggaactacttttacagatagtggcttaactgcaaaaacagcgtacacttacacagtaaaagcgtatgatgcggctgggaatttctcggcagcaagctcggccttaactgtgacaacgcttgacgcggcaacaccaccagcaactccagcatgggacgctgccaaaacgtacaataagggagacagggtttcttataaagggaaaacatatgaagcacagtggtggactcagggaaatgagccaggagctgaacagtggggtccttggttgttaataaattaatagacaaaaacagagattcttttaggagaatctctgtttttatttgaattcctctgataataaccagtcaacaatataaataattggaattccatctatttgagttgtttcataatatctaccagtgacaacaatctttttataattatccttaatatttaaaagattatctgtttcatgcctgttatttggaaattcataagctacttggatgtataatgtttcgtctagctttctagcaacaaaatctatttctttactatcaagtttaccaacgtctactgtatagcctctacgtaataattctatataaacgatattctctaagcgattactatagttcccatcttttctaccaaccgcatttcttcttaaaccggtgtctattataaaatattttccgttagttctcagatattctcgcccacgaatatcatattgttttgctctataaaataaataaccattctctagtaaatccaaataacgatttacagtatggacagttgtgtcaacgccctcactttttaaggtgtttacaattttcgaggcattaactaattggccaacattatctgctaaaaatcgaatgatggattttaaagcggtagcatcttttacccccgctcttaatgcaacatcattcaaaacaatagtgtcaaaaattccggataagatagtatctttgatagattcttcggcaataacaacactcggaaagccgccgtatttttcgtattcattataagcgctgtctacttttcgagaatcagcttcaataccttttacatgtaaaaactcagaaaatgaaaatgggtaaatggggatttcgatgtaacgaccgcttagaagggtagctatttcaccggaaagcatattagcgtttgatccagtgatgataatatcactattgaagctcacacgaataccattaacaacgcgctgccaaccttcgaccatttggatttcatcaaatagtaagtaaacctttttatcatctttgggcaacaattcgtctaatttttgacgaaatttttcttctgttgttattgtttgatattcaaagctctcgaaatttatgtgtataatatgattttccggtatgccttctttcaataaatactctttataaagcattaataataccgatttcccagaacgacgcacacctgtaataacttttatgaaatcggaatccttgaattgaataagttgcttgagataattaggtcgtttaaacatttacatccctccaatctagtaaacttctatttagtttttattttaccattatttgcagttaacttcaaataatggatgaaattagtgatttttgaagtttgaaaaatgctgatttggcagttttatgatatattatttagtttcgatgcgcaaaataaaaggtaactagaatctctagttaccttttttctataaagcttgcaacatatcaaattgtgattggtataaattatagtaatagccatgttgtgccatcagttcttcgtggctgcctgcttcttgaattcgaccattatcaatgtaaaagatgcgcgaactatttttgattgtcgaaagcctgtgcgcgataatgaaggaagttcggccttccagtagtcgctcaagcccttcttggagtaagatttctgtttgtgtatcaatacttgaagttgcttcatcaaggataaggattttcgggtcggctaaaagagcacgggcaaaggaaatcagttgtcgctgaccggccgaaagagtgctaccccgttcttttacttcggtatagtagccatcttttagaccggaaatgaaatcatgggcgcgaacgactttggcagctgcgataatttcttcttcggttgcatctagtttgccgtagcgaatattttcaataattgttccggagaaaataaaagtatcttggagcatgacgcccatttgtgacctaagcgacctgagcgttacttcctcgacattttccccatcaactaaaatctccccggaattaatattgtaaaaacggctgagcaaattaataattgtcgtttttccagcaccagtcggaccaacgagtgcaattgattcgcccgcgtcaacatgaaaattaattccttttaaaatgtctacgccttcctcgtaacggaaataaacatctttaaagtcaacatttccgacgattggtggcatttttttcgcatttggcacgtctttaatatctggttcgacatccattgtttcgaaaatccgctccaaataagtcgttgcggtaataagcgaattgtagaagttaccaatattaataacaggattccaaaaattcccaacataaccgataaaagcaatcagtgtcccggtagaaacgtccacaccgtaacctttgattccaacgaagtaaattaaacaagtcgtcattacggcgatattttgaactcctggccaaagcaagaattgaattttcaccgctttcatccaagaacgacggtactcattacttacctcggtgaaaatctcaaaattctcttcttcccgcgaaaaactttgcgttactttaatcccagcaatgctctcgtggatataagcgttcatgttggattgtttattgctaagaacctgatacgccttacgctgagccgttttaataaccataacaatcacgaaaagaactggaattaatgctaaactatacaacgttaaaacgggatcaatcatcagcataaagccaagtgttacaatgacacttaaaatatcagaaatcaaattaataagcccgttagataataaatcgctcagcatattgatataattaacaacccgaatcaagattttcccgtgcggacgactatcaaaataagaaaaaggaagtttttgcaaatgaccgaaaattgccgttctcatatcctttaaaatatcttgtccaataagcgtaatcgacctaattcggtatcgcatacaaagcccagttacaatgacagaaacaatgaaaataaccgcaatccaaaatagttgagtcatgtttttgtttgggatcgtttcatcaatcacaactttggttagatatggcccaatcattgtcgcaacatttgccagtaagattacaaaaagtgtgatatagatagatttttgatagggttttacatatacgagaatacgtttcaaatgtgcggcgctgaatgctgtttctagttcttcatcaatatcaaatttatttctagccattcacattcgcctccgtcccaagttgtttattgtaaatatcaaaataataacctttttccgctaataaacttgcatgtgttccacgttcaataatttcaccatgatttaaaattaaaatttcatcagcttcttttacagaagatatgcggtgcgcgataataaaggttgttgtattttcggtgattttctttaattcgccttggattttcacttctgtttccatgtcaaccgcagaagtggtatcatccaaaatcaaaatagatggattttttaaaagagcacgagctaacgatatacgctgcttttgcccgccggaaagcccaaccccgcgttcaccgacaatcgtgtcataactctctggcattgtctcaataaagtggtcggcatcagcaattcgcgccattttccggacatcttccatcgttgcttcgggtgctccaaatgctatattaccttcaatcgtatcggaaaacaggaaaatatcttgcatcaccgtagcaatgtgatttcgaagttcccggacatgccattttcgggcatcaaccccgtcaattaaaatttcaccagaagtcggatcgtaaaagcgacaaatcaagttgacgagcgttgatttccctgacccagtttctcccaaaatagccaccgtttgacccggagaagctttcaaagaaatatttttcagaacgtccgtatttgggtcatcttcaaaatgaaaactaacattattgaactcaacatggccttgtaatgatggcgccggtttttcagcgtggataggaattttagcattcgttgccatcatatcttgaattttaaacgaagaagcgatgaaacgttgtacgtcattaataagccagccactcatgcgcatcgggccattcagcatccatagaaatccattaaaggcaactagatctcccagcgtcatttgtcctttgattactaaataaccaccgaaaataagcgtgataacaactagaactccagcgagcgagtcaagcactggcaagtaggctctagaaacatctgcggaatctaaattgcgttttttgaagtcttcattatgttcgtggaatttcttcatttcaaaatcttcccgcgcgaatgcttttacgacgcggtttccacttatattttcttctaccattgaattaagccgcgaaaagctttctcgaatttcataaaaaactggttgtgctttactcgacattttcatcgttaaaatggcaatgagtggcgtgatgataactagtgcgagcgttagtttccagtcaatcgtggccataataataattgcaaagctaaacaggaacacgttttccaaaatattgtacgatacccatgaaacaaaatggcggatcgcatctgtatcaccagtcatccgcgccataatatctccaacacgcgtattattgaaaaaatcaaaatcaagtgactgcaactttttatacaaatcttcccgaatttgaaaaagggaattttgcccaattcgctcgcacataatctgataggaataacggcaaatagttcgaataatggtcgaaactatcatgattaaaagtagcgggataagtaaattcggtttgttttgatagacaacatcatcaatcactttcccgcctagtaacggataaataatgctaataccagaagcaataaaaattaaaataaatacaccaaccataagtaaacgatatttccggacatattgccaaatccatttcatactctccattttttcacatcctttaacattcatatatccatttagtttacactcctaatttcgaaaaagaatggtttatattcgctggaagcatggacaatgttatataattaaaagataattgtaagcgttatatttaggaggtgaaacgatgctgaaaataaacacaaccacatttaacccgcaaattttgtatatagctaattgctataccaacgaagtacgagtgggcgaaaatcatcatcatgactttttagaaatctccattatttgtgagggaaacgttatttatgatattgaaggggagcgagtcgcattagaaaaaggggatatgttgatttttaatcctggtgtaaatcattacgatataaccgaacctggtatgacaaatgcgcaacttcacattggttttcggaattttgcactggaaggatactcgcgaaacactttcccatttaaaaaagcctttttacggaaaaaagaagatgaatctgctattttatccatttctaaacaaattatagaagaaaaagatgctgaaaaacctggatatgacttgattttaaaagcttttgttatgcagctaattatccatgttttgcgggaagctacgcccgaacaacttgaaaataatggcgtgaaattatccaccgatgagcagcaaaaacaaatgctcgtcaatgaaattattcattatatggaaaaacaccacacagaagatgtctcgctttcgacactctcgcaaacaatgtacatcagtcccgcctatatttccaaagtttttaaagaagaaactggcgagtcgccaattaattatctaatcaaaatccgcctgacacgtgcggaagagctactgaaaaataaagatgtaactgtgaagcaagctgctaacatggtcggctacaacgatgcctattatttcagtaaacttttcaaaaaatattatggcttcccaccatcggaaaactggcgtaaatcaagttaatttaaaatactgaatgataaaagcggtattttgaaggaaaattagcaggtgtttttcgaaatgcctgctttttattggattaaattttgcgattagtactaaaaatgtattagaatagaaaagagaaatgggaagggtgatgggacacaatgaaatttcaactttatattcaaccaaagttagatattcttcaaggtaacattgtcgaatacgaaatacttttacgcgacgatagtgaagttcctagatttcctttgtcggagttagaagctgtacttgcggacgaagaattataccttacattttgtgagtggtttagtgacgctttctttgatgttctaaaaaaatatccaaatgatcgctttgcaataaatatagcgccgcaacaacttttttacatggaaacgctccatatgttagacaaactaagaagtgagagtcatcgtattactatagaaatgaccgaagatatttttgatgttcccgctcataagcgacatttaaatgctgatgataaagatgcttttattttaaacaaaattaaaataattcacggcctaggttaccatgttgcagtagatgacgtagggtgtggactcaatagtttagagcgcgtactgagttatctcccttacataatcgagctcaagttctctttgattcattttaataatattgatttagaggatttacttttattcattaaagcttgggcgaattttgcgcataaaaataacctcgattttgtggtcgagggcattgaaacaaaagaaaccatggcaatcttagaaagccatggcgtctccattttccaaggttatttagttaataaaccatttcctgtttgaaaactatctatttgatcaaggagtttttcgtgtgagctaatagtaatcggttttttggatgctagcagcccatttacgagtaattcttctaatgattcagtgattcgagcgcgactagaacggcaataatcagctaaaaatgtttgtgtgatataggaaggtaaaacgatcgggccttctgtttgatggagattcagtagttcaataatttccacaaaaatacgagtcactttgattattggtggttgattaatatttttataatttttggcagtaaataaatatctaactattacatcatcaagtaccagatggaagaaatgtgggtttgcatacaggtaattaaggaaaaactcacgatcaatgaacagcgcccgcccgttttctagtgcgcgaacacggtattcagtaagctctggagccgtttttgtttcgagtaaactttccattccaaaaattgcgttctcagaaataagtgcatttatcatccagcgtccttcattagtaggtccctctaaaacagcagtaccttccaaaatcacgcctatttgaggtggttttttttcgtaatctttaaacgaatgaataatatctccttttttaaaagacaccttgctagagtaatcgctcgaaaaaatatcagaaaaatcggtagtgtgaagcatggttaaaactcctatacgaatgaaatttttatctaccatttaactgtacttctattcctatgaaaaagaaactaaatcaaagctgctgtcacaatttagacaaaaaaaagacactcattcgctacatttgcgcaaaaatatataataaaaagactctagtgatagagtcttcattaaaatttcttataaacatcaatagagttgccaaaattgattaaataatcgccgcaatcatacattggaccatatttttccgcataatgagaaacggtacggcgcaaaaattcctcggtcacttctaaaaattcagcaacctcgaaatactcttttaaaccaagataaaaacaagtaatgatgtcttccagtggaattaattcttcgtaacccttgcgacgagcaaaaagttcttgttttttatctgaaaggctttcttgttttgtaatatttcctaccgtgtacttataatgcatcaattcttccactaaaatgcaacctttttcaatagaagatttatctttacttataaaaatcattccattcaaatataagccaggtaatttgtaaggcattttttcttctctaattgttacctcatcttggtatttgtttaccaatttttcgtacaataaaatcacatcccgcgatggagttttttcttcatctctatataagctaaaatatctcgcatttcttcctctgtaacatcgtcatcaatatgggccgcaatcgtcaccgagcgttcgtcaacaggtggtaaatttctttcaggaaaaaagtcatctaatcgcttgttgaagatttttgcaagttcaaataaaacatcttgatttgctttacggtcgccattttcgtaacgactaatagtttggcgcgtcgtatgaagcttttctgctagtgcttcttgatttaggcctcgttcctcgcgatattgttttattttatttcctacaaatttatttaactccataataattgtcctccacatgtttatggctccagtatagcatttttagcaccaaaatggaactttttcgaacatatttgtcggataaagtttacctgtaaccaaaatggtgctataatatgtttagagctagaaaataaatgaggttgatttttgcaccaaaagcaccgttttggtgacaaagactaacttacaaatttatgagatggaagtgggaatggatggatagaaaacttttaaaagaaaagcaaatccaactaatttttcaactggaacaagaagaaaatagatttattcggaaacgtttaatagaagagttggagtattttgaagcactaggggatagagaaaaaggacttttaacggcggaacaaaaactacttattttaacaccaaatgaataccgcgaacataaaaaaacaaagtcagatgtagaaatcagcaaatttattggagtatcaaggtcctcacttgccgaatggaaacgaaaaaacggcttgaatagaaaaaagcaacgaccagttcagcaggagatgattgatgtattggcttttcatttggataagacgaaagaagagattggctctttaccggcttctgccattgagtgccagtatgaagcattcgtgattaatgaagcacacaattaaggagtgatcaaatgcaagttttagttttaccagaaaataaagatattaattatataaaaactgtccaagaagtgaaacgattttttgcagactttcagcgtttccgcgtgattacgggattatcccaaaagccatttatagaaagtaatggtttactagagacgccacattttggatcggtggcattttctgcaaggcataacatagaattaataaaggaagcgcgtttgttagtacaaagatatacagaaatgttaaatcaaatggatgatttatatcgaaaaattttaatagagtgttatgtggaaaaagagaaagatatagcagtaatgatgagtctgccttatgaaatagctcagtttaaacgtataaaaagacgagcagttctagaacttgcaacaataatggggattttagtaaggaaatgatgatacttttttgatattttacagtagcattttaccgttaatataaaagtaagccaattgtccagcaagcggatgacaataaaagctgcgtcagaatgaaggtgcaccgattttctgatatacatgaggttttaaaagaaatttgtttttattattgggttttaaatccgttgagataaacaaatattctatttttggaaagtaaagtttggaggaataaattattaaaaatggtcttgaccgaattttactttctatttttaaaggagtgagcgcttggtgaagagtttgagcttcgtgagagttttggaagcagtgagaacaatgcttcaggaaaaaggcggactagatgtttctattgtaatgcatgaccaagtggaattgccttcaacgatgatggagatgattgatcaagaggaagaagagagccgcacttcctggaaagaaaaataccgctttgccgttcatcattatacaaatgaactggatttagcgggtgtcgaacagattgataattttatccaagcgggttttaatttgcctgaaggatacaaattaatcgcagttcgtcatttcggaaaacaaaatttagttaaagaaaatacgttgattcatgcaaaaactagttttgaagtaagtatttgtcgtgaattaaaagtaaaaatttaggaggaattattaatggcatttgaagaaaatttatattgtgattatacaccgggagctgctaaagcggtcgcggggaaagacgtaatcttagcaatttttaacgcagcaggagataaattattagcggttgcaggacaacagggtctaactgttaaccgttcaaaagatagtattgaaatcacatctaaagatacagtaggtggatggaagtctaaaatcggcggtatgaaagaatggtctattgaaaatgatggtttatacgttgctgatgcggattctcataaagaattggcgaaatatttcgaaagtgatagtccggtctgtgtgaaagttattaaccaagcatctaaaaaaggtctttttggcggcttagcaattgtagcagactacagttttgaggctccttttgatgaagcgatgacttattctgtaaaactagacggaatgggagcgcttgttgatttaactattactgagggcggagatcaaatgcccggcgaaacaccagcagcaccagcagaataaaatagaaagccactgaaataagtggctttcccttaggaggaaaataaatgtttgaagtgaatgatactaattatattttacgattcaataaacaaaaagtgaaaacggtggaactaacgtcaggaattagtctagtagcggctttgactgcaaataaaggaattttgagttaccaagtgattgaaactctttttgcttctggactagtggaagaaaaaggtttagtgccagtaaaacaaaaagaagctttggagatttttgataagttagtggaagaacagggcttaatttcgcttaatgtagcagttattgagaaattacaagaggacatgggttttttgttccgttaaagcagattgagtttgaatattttggcgcagagaacgaagaatctgatagtgaaagcaaccatgattttgacctcgaaaaacaattcgcgtttttcgttgttaattttcaaatgtcaaaacatgattttgaagcattaacagaagttgagaaaaatttcatcatgaaagaatgggaaaacaaggtcatttttgagtctactatgcttcgaaatgccgtcttgaatgctgaacaaaatctcaatcgcaaacgaaattcgcgttttattgatttgcataagaagcgccagaagaaagcagatgttaattatacagtaaatgcacttcaagcaatttctgagaatgaagcgcttgaaggtaaagcgtggattgaccggatttacggtgcaaatggcctacgcagacctaaaaataaacaagaaagggggaaaacgaatggcggattctaaaaaaattacatttgaaatgaacgagagtgtcttaacagctcaatttagtaggttagatgaaatggcaagcgttgtagagcgacgattttcagaattaaaaatgacgattgaagatgttggaaatgccgatccaggttcgaaaattaccgagtctttgggcggattgcaatctggtctcggcactattagttcagcgtttgggcaattaggttctagtagcgaggcaattacatcaggatttggaacagcggttggttctgttggcggaattacggatgcttttaaaaacctaggttcaagtgtccagaatggtacgttattttcaagcttgtccactggaataggtggtatgagtacaatgcttggtggagtaactggtggagttcaaggaattacgaatctagctagtggttttatggaattgaagaatcacttgggcggcttaatgtcttctattggcggtgtcggaggaattatgggcaaactgacttctccaatggggttagttattatcgggattgtagcgttagtcgctgcatttacgtacttgatgacgacgaatgaatcattccgaaatactgttatgtcagttgtcacgcaggtagctcagttgtttggtcagctagtggctagtctgatgccgattatcatgcaaattatcacagcagtcatgcaaattggtgcggctttaatgccgatagttatgcaatttattagctttttcgctcaattgttagctcaattaatgccatttatcaatatgcttattgcaatgctaatgcctgtaattatgcagattgttcaagttgttatgtcgctagtttcggcgcttttacctagtattatgacggttattcaaggcattatgagcgttatccaattcttgattcctataattatgaagatcgccacggtcgttgtgcaaattgttgtaacaattatttcttatataagtaaaattatgccgattgtcatgatgattataggtgttattatttcgattattactacgattattagttatattgttgttattgcaacgacaatttcaaatgttattgggaaaattataagctttattgcaagtgttattacgtcgattatcgggattgtgcagccgattattggtttcattaccaatattttcagctctatcgttacagttatcggagcagccttccaaatggtgtttgcagttgcatcaaaaatttggaatgcaataatggcaacaatttcaggtattattgatggaataaaatcagttattacagggatttctacgacagtttcttccgtgttcaatggagtcaaacgaattatcaccggtgtttttgatggtattaaaggcgcttggggtggtttaacagaatttgttgggactattttcgatggggtttcaaatgcaattcagacagttgtagataatgtcaaaggatttgtgaacgtggtaattcgagggattaattcagcgattagtttaattaataaaatccctggtgttgaaattggtaaaatcccgcaattaatttcaggtactacaaatttccaaggcggttttgcacgaatgaatgaaggcggtcgcggtgaaatggtggtgttaccgtccggatctcaagtaatcccgcacgatgcaacgatgaaatatgcaagagaaagtgcgcgtggtaataaatcaatgctttatacaaatcaagggactgatttagctagggtagaaaaccttctagaacgcttactacaaaaaaatccagttattaaaatggacgataaagttgtatctgaggtagttagtcgtaaccaggcaaactcgtttgatcaatacaattatacaatgggaggtgcggcttattcatgagtgacttatttttagaactaaatggaaaaattcattcgcttagtgaaacatttccgggactttccgttcaagaagtagcgaggcaaagtccgcaattgagtatggaaactgctgagatttctggaacggacggagttattccaggtactatccaatttaaaccttttattttttcagcaaaatgcaatttacaggcacttgatataccggattatcatttagcagttagagaaatttatgagttcttatttcagcgagatagttactatatttggagtgatcaaatgccgggaattcggtatgaagtgcatccaaaaccatttgattttagtcgtgaatcagatcgggttgggcttctcaatttagagtttgatgtttttaagggctatgcggaatctcgtggtacaagtctggacccaatgacttttgaagtggacttatggcaaatgggcatgaatttatctaaccgagatgatttgttttatgtttttaaagagaatacatttcgcgtttataatgcaggaagcgaccgagttaatccgttgatgcgacatgagttagacatagctatgacagcaaatggaatcccgactattaataatttaacaaccggtgattcatttcaatatcgtaatgaactcaaaaagactgatgttttgctgttaaataatatctatccgcttgtaaataatcgtcgcgttggaaaagacacaaaccacggcattattacccttgaaaagggatggaatgaatttgaaattaaaggtgtaacggatgtaactattgcttttaattttccgttcatttatcggtaggtgataactatggactatttgatcattcaaagtatggatagagaagtagaagagattttaacagatattgattatggctctttttcttatgactatgaaaaaaacacgagtcgttccatctcgtttacagttaataaaacaaaacaaaatgctgatgtattcaatctggttggaaatgaggcaattctaacctatcaaggtcaacaatttgtcataaaaaaatgtactcctaaggccgttggaaaaacgatttctaaacaaataactgcccagcatataagttatacagtgcaagatcatgttcagtataacgtgaaaacgggacgaaaaaaatattcgattcagacggtaatggaatttgcgctaaaagacaatgagctaggattttctcatgaaatacaaggtagttttccattagcggagttagaagatttaggaaataaaaatggattagaattagtgaatttatgtttggaagaatttggagcaatactatttgcggataataagaaactttatttttatgatgaagcgagttggtatttgaaaacagagaagcaattacgctatttatacaatacagaagatgtttcagtggatacaaatactgataatttaaaaacagagataaaatgttatggcaaacaaaaagaaaatgccgacaagctaacgggtgataataaatatatggcggttgttacttatacttcgcccaacgtatctatttatggaaaacgaatggctaattcaaaaaccgacgataaaattacgaataataacgacttattgatttttgccaaaaaacagattctggatgttccggaaacctctttaacgattacttatagaggagatgaagcagttacagaacgagatatttggtactttattcatgaaccaatgggatttgaaacggaagtgaaggttacgagaattaaatcagctcatccgtggagtaagaaatttcaagaaatcggttttagtaattcgcggcgtgatatggtacgaattcagactcaaattgcaaatcaagtgaaaaaggctagcgtagatacaaataagattaattcgttttcaagcatcgcaatgaatgcatatgattcgcggattttaacggaagtagtaggtgttgtagatggcgactgaaattagagttttaaaaaatgtggatgaaacagttttctatccgaaaacacatgtaactgctgtcgagggtctgaatgaagtttcaacaaacgcttctggattaatgactccaactgataaagtcaaattaaatggaattgaagcaaatgcagaaaaaaataatgtgactgcaagcgatatttcaaattggaataaaaaacaagatgcgattttagtttcggaaaatggttctaatttcaaaataacagtgacgaatacaggcgaactaaagacaacgaaattggaataggaaggaggttgcatatgaagttagatttgtggaaatgggaaatgcttcttcaaggtcgtgaatttagaaataaaaccaatgacaattggcagaaactaatggattggtctaactttatttctacgggaatagatacgatttatacctacgtaaacaaagcagatgctaccttaaatgccaaaattgaaacagttgataaagcagtgaatgcaagagttaacgagttgattagtgggacagaacagctaagtgaagttgttgatgccagagcagatgcatttggcactaggtatccggttttaagagaacgtctaaaccaagaacagcaaatttttaacaagaaaagcacggcacattttgatgtggataatgttataggtatggataaacaagatattggtttgttgaccagtaaatcaattactgaagcgcaaacagtttgttttttaaatatatcaagcttcaatgagaatgcggatattgttcttgaaaagactagtgaaacgagcttttcagaaagtttaacaagtttagtttttgcaaaattagggacgaatgaacgttaccaaatggagtcaactggtgcgtaaaggaggagtgaagaatgactgaaattaaacgaatgctacaaacaaaagacgataattctaaagaacaattttatccagagacacatgtggcgggaattgttggacttacagaatatgtttctggtcagattccgactggtgtcgttagtgtcaatggaaaggcaggcagagtattactagaagcagaagaccttcatgctgctaagaaaatccatgaacatgaagtcgcaacgtacacaacagatggatttatgagttcttttgataaacaaaaaatagatcaattagtatctccggaagcaggcgtaacaagtgtaaacggtaaaacaggaattgtcgacttatttgcagctgatgtagaggcggcggaaataaaccatactcatccggaagcatcagcaagtgaaagtggctttttatcaaaagaagataaagaaaaactagatgcgatgccagtaatcgcactggaaactattaaggaggttatagaatgactaaaattgtaaaaatgtcagagaaaaatgaacatggaacgttggagcaattctatccagaaacacacgccgaggctgttaaagggcttgtgagtgttacagaggaagaaaagacgacttggaacgagaaagaaactactgcgggtgcggaacaaaaggcgaatacagctttgaatagtgcgaaagaatatgtagatacgattgggaaaggaacagtgatttttaagggagcaaatattatgggtgcgggtcaaaaatatacatggagttcttccaaactgaaatttggaatcactttactattcagtcgttatgattcagcaaataatactcctttagattattattatcactcagttttcttgtcgaaagctcaattagccgaattagcaggtaaaggtttgttagttcctatgccatcagcgatttacggggaaagaaagtatttatatgtttctgaaacagaagtcgctggacacaatgataatactaataatgcttcttgggcattacgccagctaactgtaatgtaactaaaaaggaggttttccatggaaatcatactaaaaattgggattttaggttttggcgcggtatttggatacttgtttggggaagtggatttattggtaaaagtgctggtgtgctttattgtagctgactatatttctgggctactcgcttcagggtatctgggggaacttagcagcaaaatgggtttcaagggaatcgcgaaaaaaattgctatcttgattttagtggctattgcgcatcaaatagatttgattctgggaacgcataatacgacgcgggatgcggttatctttttctatttggcgaatgagctgatttctatattggaaaatttcgttcgaatgggaatgaaggtcccggaagtattgaaaaatttaattttgattttcgatgcgaaatcaggggacgaggaggaaaagcatgacaaagatatggattgatgccggtcatggcggcaaggattcaggggcgactggtaacggacttgttgaaaaaaattgggtactatcagttgcgaatcagcttcaatcagaattagtaaaagctggttttgaagtaggtatgactcgaacaaatgatacattttatgaattaagtgaccgagctaagaaagcaaatagttttaaggccgacttatttatttcgattcattttaatgctggtggtggcaaaggctttgaagattacatttatacatcaacaccagctgggacagtagaatcacagaaaataattcacaaaaatattatcgctaaaattaccaaacatggtatgcgtgatcgtggaatgaaacgagctaattttgctgtgctgcgagaaacggcaatggatgcaattttgctggaggcaggtttttgtgacagcagtgatgcaactatacttgcaaaaaaagcatatcaaacggatttttgtgcaggaattatctcaggagtacaagagctttttggtactcccgtaacgaaatatcgagcagggaaatatttgacaagtaatgatgctatttcaggcaaaaatattaaaggttatttagaagccgggacaaaagtttttgtttataaagaaacagcaaaaacactcaacctaactactacaaaaggagttccgggaagctgggttctaaaaacggaagtaaatacgggtaaaagataaaaaaaggagcgactgataggtcgctccttttttattaacttctcttacgcaaagtataaagcgcggtagctgttaaaataactccaaacacagttgcaagtccagctgtgtcaccagttgttggtagggaagtgttggaagatgtccctgagttagatgtatttggtgtggaggttgttgggtcttcggtagttgtagttccgccagtatttccggagccattaccgttatctgtaccactatttccatcagttccgccgttatttccgttgccattgtccgttccgccattaccgtttccattatctggaggggtagttgaagttgcttcttgaacagttgcttggaaagttgtgctgtagccgtttatgtcagtgattgttgttgttacttggtcgccttttttaaggtttaaagaagtaacatctacggagaacttaccgtttgcatcagctgttgcgttaggtccggcagcaagcgccattcttgcattagcagttgctttttgaacagagacagtagcacctggtaaagtagttccagttagatttttgtctttttcagctaatttattgatttttgttgcgtctttgattgctttgatagctgcatcttcagtttctttgtcgatttcagcttgggatttgtagactttacgtccttctttttgagctgtaatgacttttccggcagctttttggtctttaatgtagttgatgaatgtttctgtatctggatcgattgcagttactagatttgcttttttgaaggctgagaatccatcgccaccgccaaataggaagtcattgattacgactttatatttttggtcggcttttaaaggagtgccgtcttctgttgtaacgctcgcaactttgtaagcatggtctagatcatctgtatctgtgaaagtatattttaatccagaaatttgtaggaaataagtttggttgcttaaatattgttggtttagagcttccaaaatatcagcgcccgtcatttcgactacttgaagaatgttaccaaatggttgaacagcttgtgccgcgccccatgtgatttcgttttgaccatttgcaagacgagtagtaagatcagaacggattccgccgttgttagtcatagcaaagtcgacatcggcgccggctttgtttgccatgtaacgttgcgcatccgtaatcatgttaccaagctcagattctttatcatcaattgctttgttgtctggatttgtgtcacgagaaataacgtctttgtttgctagtccgatagtttcgttaataacaccttcaatgcggcttttcgcatcttcggttactgcggtaatatcggcatttggtgtgacgcttctcgagttatatgtaattttagcgtcaggtggtgaaacgaaatcgccagttgttttatcaagttcgccagttacatctgaaaaagctttaccattgttgtaactttggacgatacgagtttttccaactaatccgtttgtgtattggtgattgtgccctgcaaggactaaatcgaccgagttgtttgggtctaattggtttgctttggtcatcatattcgcagcttccccggctacatcttgttttgttccagtgtttgggttcccagtggaaagtgctggaacgtgggatagaacaacgattgcgttaacgccttggcctctaagttcagcagagtatttaacgattgtttctgcttcatcaaggaaatcgtagtctttaatatgatttgcaagaactaaattaggaatttctgttgtaacgataccgatgaagccaactttgacaccatcaatttcttttacatagtatggtaaaaagccttctgcgactgtgtttgttcctttgttgaccacgttagctgcgacgattttcatgtcacttttaacgcgtggataagcttctacgattggtccgaatttgtttgtagaaactccgtccaaaattcgtttgtattcaggtaatccttcatcaaactcatggttacctaatgtgccgacttcgaaattcattttttggagaactttcattgttggctcgtcttgaagtaaacctgatactgctgggcttgcgccgaccatgtcgcccgcttggacacgaatggcattgtcagttgtagttccaggattagcttgtaaaaatgagctagtagcgttgtccaagttagtagctaagtaatccgcgccgccaattggtgagcccgatgcatctttagaggctgtttcaagcgctccgtggaaatcatttattcccaaaatttgaatgggaacggtatctgctgctgcttgtgctgttgtcccggtgaatggtacagtaagtccgattgtgagccctgctacgagtaaaacatgtgtggttttcttgaaaaatttgttaactttcacactctcccttttttcgccagtggcaattttgtaagcgctaactcaaaggtgcctagctataattgtagcaaagaggaatcaccctagcaataggaaatgtggattttgtgtaaatgtaacgataatttttggctatattttcatttcggttgaaaaaagggtaaactatagataaaggagggataagatggatatctctagtacggaaatttgggatgcgattagaagaaatagtttcttactgtattatcaaccaaaagtagatgccaaaacgaatgagcttatcggatttgaaggtttaattcgactaaaaacagcgacggcgattctagctccagcggatttctttgaagatattgcccttttaaatgctacgcgagaaatgcaggattttgtggctgaaacagcaattgaacaaattaatcagctagggggacgtttttcgatttcgattaatattccggcacattatgttgtaagtagtaattatatgacttttttatatgattatgtgaaagaacatttaaagtatccggagtgcttagaaatagaaattatcgaacggggcgaaattacggagctagctgttgcagataaaaacttacgtaaaattaaaaaactcggcgtcacagtgagcatggatgattttggaaaaggctacagctcgctggcatatttgcgcagtttaccaattgatattgtaaaaacggatatgtcatttattgctcttttaaaaacggatcgaaagcaacaaattattattcaagcaattgttaatttatgtcatgatttaggtgggaaagtcgttacagaaggcgtagaagacatcgaacaagtgaagacactgcgcgaaatgaaagtggattatttccaaggctattattttagtcgaccactaccaatgaaagaaattaaagaaaaatattcgattgtctgagatgcctaaatgaaaaaattggttggtgtgagaatggtaatttaccaaattcacaccaaccaattttgtttttatttgattaaattgtttgaagcatcttttacaacaacgtcatgcgcgccgccttctacgatagaagtagaagaaacaagcgtgatttttgctttttgttgtaattcagggatatttagcgcgccgcagttacacatagtagagcggactttgctaaggctgatagcaacattgtctttcaaggaaccagcgtaaggaacataagaatctacgccttcttcaaaagataatttcttgtcgccgccaaggtcataacgttgccagttacgcgcgcggttagctccttcgccccaatattctttcatatatgtgccatttaaattcactttgttagtaggactttcatcaaaacgagagaaataacgaccaagcatgataaagtcagcgcccattgctagagctagcgtcatatggtaatcataaacaatgccgccatcggaacaaatcggaatatatacacctgtttcttcaaaatattcatcgcgagctttagcaacatcaattagggcggttgcttgtccgcggccgatacctttttgttcacgtgtgatacagatggagccaccaccaacgccaactttaacgaaatctgcgccagcttctgcaagataacggaagccatctcggtcaacaacattccctgcgccgactttgactgtatcgccgtatttaccgcgaacatagtcaagtgtgcgtttttgccattcggagtaaccttcagaggaatcgatacacaaaatatctgcgccagcttctactagagcgggaacacgttcttcatagtcgcgtgtgttaattccagctccaactacataacgtttggaggaatcaagtaattctaatttattttctttatttgagtcgtagtctttgcggaacaccatgtgaaccaagtgttcgttatcgtctacaagtggcagggcatttaatttgtggtcccaaataatgttgttagcttcttttaaagtggtcgattttttagcagtaactagtttttcaaaaggcgtcatgaaatctgctactttttcatcaggactcatacgcgtcactcggtagtcgcgacttgtcacgattccaagtaatttaccgtgcgctgtgccgtcttctgtaactgcaactgtagaatgaccagttttttcttttaaatcaagaatgtcttggagggttttatctgggctgatattagaatcgctaatgacgaaaccagccttatgatttttcacgcgagaaaccattgcagcttcactttcgattgattgagatccgaaaacgaaggatacgccgccttctttagcgagagcgattcccatgttatcatcagaaacagcttgcataattgcggaaacaagcggaatgttcattgtgatagcagattcttccccttttttaaattttacaatcggtgtttttaagctaacgtttgttggtacacattcagcggacgagtagcctggaactagtaaaaactcactaaatgtgcgggacggttcttcaaaataaaatgccattatttccactccttcttctattgttaaatatacttataaaatatctttattatttcaataactggcttgaaagtcaatgactgggatgctttttcgggacgttttcttttagtagatgagtggaatatactaagagtaaggaaactttggcgaaggaggtaatcagatggaagaagaaacattattagaacaaggctaccgtaagtatcgcggggcagatgtagatatttattttaatacgaatatttgtgcacattccggtaattgtgtaaaaggtaacgcagaactttttaatttggatagaaaaccatggattatgccagataacgtaccaaaagaagaggcaaaacgggtgattcatacttgcccaagtggagcacttcagtatatagagaaataggaggataacaaatggaatataaaaacggtgaaaatagaatttatgcggtaaatgatgaaggtgtcgaggttggtgaagtgacttttgtgccaactggggaagatatgtttattattgaccacacaggcgttgatgatgcggctcgaggtcaggggatagcgcaagaacttgtaaaacgtgcggtcgaaaaagcgaaaacagaaggaaagaaaattgttccgctttgtccgtttgcgaaagcagaatttgctaagaagccggaatatcaagaagtacaagctgcaaaataagaagcgtagactaggttttatgcctagtctatttttatgaaaaaaatttagaattccagttttctcttcttgacatctggttcttttcagtgtatctttaattcacagtaaacttataggaataatagtattacaatttcttatccagagtggtggagggaatcggcccagtgaaacccggcagcggagcgcaagttctatgctaattccgatcagaagtaatattctggcagataagtagtagcttttaatgaggcgcttcgattctgaccaaaaaacagaggaagcgttatttttagcgcttaaagaggggagtttttgttagatgaagaaatttttattagtagcggttatctcggtttttgccttggtgttaacggcttgcggaggctctggcgctagttcagacaaagcaaacggttcaggcaaagcgaaagacggcggctctctaattatcggtgttactggagatccagaagttatcaatccgaactacgcttctgatcgtgtaacattaacgattcaacaagctgtatacgcaccgctattttgggaagttgacgggaaaccggcacttgcaaaaagcttagatatttcagacgacaacttaacttacactgtgaaactaaaagatggtttaacttggcatgacggcaaacctttgactgcagatgacgtagtatttactgtaaattctattttagatacaaaacaaaacagcccgaaccgcggcaactttgtttttgatgataaacctgtaaaagtagaagcagtggacgatacaacggtgaaattcactttaccaactgttgctccagcctttgaaaatacaattaaaacattcttcccaattccaaaacacatttttgaaggggtagaaaacatcgagaaaagtgataaaaacaaaaatccaatcggctcaggtccgtacaagtttgttgaatacaaaacaggcgaatatgtttccctagaacgattcaacgactattttgacggcaaaccaaaattggataaagttactttccgaatcacaaaagatcaaaacgcagctaatttagccttacaaaatggcgaaatcaacttaaaatcgattcaaccttctgatagaaaaaaagtagaaaaagcgagcgcggtaaacattatcacttacccggaaaatcgcttaagctatgcaacattcaacgaaaaccaaccagcacttaaatcaaaagaacttcgccaagccctttcgtatgcgcttgaccgtgaagaaatcattgatgcggcttacggttcagatgaatacgcaaaaccagcttcttcgttcctaacagaaaacacgaaatacttcacggataaagtagaaacatacgatcaagacattgccaaagcgaaaaaattagtaaaagaaagtggttttgatacaagccaaaaactaactgtttactatttaaacaacagtaaatcacaagaaagtatcgcgctttacttacaacaacaatacaaagaaatcggcgtgacacttgacttgaaaccaacagatccaaatgcactaagcaacatcacacttgaccgcaaaaacgcagactactctatcgcactaaatggttatatcatggggaacgatcctgatgcatataaatctctatacctaagcgatgcgccatacaactattcaaactaccacaacaaagacctagatgcgctttgggaaaaaggtgctgtaactgcggacgataaagaacgtcaagaaatctatgaaaaaatccaaaacaccattgctgacgatgctgtaatttatccaatttcttatgataatgcagtgctagctcttgatagccgttacggtggtcaaaaagctgcaacaccacaaccagtaacaatgttccgtgatctttctaaactatatttaacggaataataattaaaaatcattcgtaaaaaatctggcctgccatgcttgtttttggcaggttcaggtttttacttgtcatttttagtgttttagataggagataaattatgctaaaaacaatcataaaacgcgtattgcaaattattccgatgctgtttattatctcgattatttcgtttgcacttataaaattagcgcccggggatcccgtgaattcgtttgttacgcctgatatgaatcctgatgatgtggagcggattagacagagcttagggctggatcaaccgatttatgtacagtattttatttggcttggaaatttgctccaaggtaatcttggttattcgattgtaaacagccaaccagttttacaacaaattttagagagaattccggcgacacttggtttggtgggaacttcgctcgttctgacgttattgttgtcgattccacttggtttggttgcggcgaattatgaaaatacgtggattgataaagtgctaaacgggatttcttatattgggatttcgattccgattttttggtttgggatgattttaatagatgtgttctcgattcaattagggtggctcccaagtctagggatgcgaacgattggggtcgactccttctgggatatggcggaacatgcgattttgccagttataacgctgactttccaagggtgcgcggcatattatcgttacgtccgctcgaatacgattaaccaattaaaagaagaatatgttttattcggttatgcgaaagggttatccaaagtacaaattatggggcatcatgtcttgaaaaattccttgttgccagtcataacactacttgggatgtcacttccgcaagtcattacaggcgcttttattaccgaaagtattttctcgtggccgggaatggggtcgcttggaattaatgcgattttccaactagattatccagttattatggcaattacacttttttcagcgctattattaattattgggaacttgctggccgatttagcttatatgattgtcgatccacggattagggaaatggggtgaggaattcatgatgcgattagatttttcgaaaaaaacaatgcaagatttcgagcgggatgcggaagttgttcatgctaccagagagcggagtttttggcgttttatgctggctgaccgccgcgctgtttttgcgacgagtgtgctgattcttattacagtcgcttgtattttcgcgttcctttcgccttatgaccccaatgctctttccgttcaggacaaactgatgccgccaaattcctcgcattggtttgggacggatgaccatggtcgggattacttgacgcgtgtcttgtacggcggccgggtttcactacttgttggcgtgtttgcgatgatgattgccgttgtcgttggaacactcgctggtaccgttagtggctactttggtggattcattgacaatatggtaatgcgttttcttgatattttcatgtcgattccatcatttttcctactaatgattttaaatgcgtacttaaaaccgggaatttcgaatattattatcattatcggattgctttcttggatggaagtggcgcggatagtccgagcagaaactctgacgctaaaagaacgtgaattcattttgtactccaagtcttcgggtggcggatttttccacattatgttcaagcatattattccaaacgcgatgccatccatcgtcgttgcagcttcattaaacgtcgctacagccattttaaccgagtcagcactaagtttccttggcctcggtgttcaacagcctaacgcttcgtggggcagcatgctgaacaatgcgcaaggctacgtcggcgaagcaacttacttggcacttttccctggattattaattttaatgacgattctttcatttaacgtgcttggcgatgtgctgagaaaagggttatcacgtagatattaaatgtaaaaacactttgattttttcagtcaaagtgtttttttgttttttaaagaaaaggtacttaaaatagaaacgtaaaaaacgtgtttaaagtcttttttaagagatcaattcacaaaattttcacaaaagtcgttcgcgaacactgttataattaaaaggataggaattccttaacatagacagagatgaggctgagaaatgagtgaagtaaaagtcagagaagcaacattaaaaaaacacgcgacgaagctagaatctaaagcaaaaacaattgaatatttacccatgaaaggcgggaatatggcatatagtcgagccaattctatcaatcattttcgaaccgcgctgtttgacttagtggaggcggtgggcgattttcaaaatgtggtaggaacggatgccaaaagattgaaagaattaggcgcatcatttactcgcaaagaccaagagcttgaacgaggcatgggattgggaggtaaataaatggatgcaaagagccaacaaatggagacacaactacaattgctgaaaaaagaacaatccgcggccgaagattttttgcaagatttacaacgacaacaaaatgaacaagagtggttagcggaagattttgcacgtgtccatcaagaagaacgggagtcgctggagcttctgcgcgaagtttggcaaggcgcagaatcaagaagtttcggctactatttggcggatttacaggaagaagaaaaacagaagtggcataaaaaaatccaagcgaaccaagaagaacaccaacaaaaaatcaccgcttgcaaaaaaaacatctaccaattagaaaatcaacaacaagatttacaaaaggagttgttacagtgagccgaattgacatcggagaaatacaaacctttgcgcaccaactacatacagctaatgaagccggaagaaaaagcattaaagacatcaaaaaagccgtgaaaaactataccgaagacggcagtttaaaaggaaaagcgatcgatgcatcgaaaaattattaccaaatgacctatttcccattatgcgatgcgataatcgaagccatgaacgaaagtgaagaacggttagctcaatatatagctgatttccacgcccaagtggatggttctgcggatgcgaaaattgatgcggacggtttatacgaactcgggaaaatgattgatcgtattgaagcgaaaaaagaggcactagcccagcggatgaataccggaacagaagggcaaatgcaaagttatcgctcccagctaagcatcgcctacaaacaggaaaatatcttagaaaaatacttggcttttgaacaaagtcatggtggtttttttgataatttaaccgatttagtccgaggaattcagcaaaccattcgcgaactccagtcgaacattcaatttaacagtaaaacgggtacctatgatatgagcaaactgaatttcaccaccgtgacccggatgcaaaacgccttaggaaaagcgctaaaaaacaacgaaaaaacattcaattttgacgaatatcaaaaaacgtaccgtggccaaatgtgggtgttaatgaaaaatggtatagtagacgtagaagcaacgaacgcgtacaatgccgctgtgcttaacggggaattaccacatgaaagcaatgaagcgcaggaagaagccgagttgctgcgggcagttattcaatcggtgaaagaaggaatagacccggttactggacaagagataagtaaagcacaaggatttggtattattagtggtcttattttccgctatactgctggaggttataaagggaagaagattaagattcctaagaatatattagataagataaagaaatcccataagtctaaatcaatcttgacatccgaaatggaagccaaaattttagagggacaacgtaaagggactacaaatggaattaatggtggacattcatccgatattaataacaataacccaaatttcgcaacggaaactgtagaagtaaatcaagatggcactaaagtaataaaattcactaaacaatttccagatggaaatatttcaaaaataaagacgagtacgatttttccggaggattggtcagataaagatattattgattctatactgaaaattagtaattctactgctatcggacaacgaaagattgatgggttaacacttcatagaggtaagattgatggggtggagattgatgtaattaaaaaaggtaatgaaataatttcaggataccctgttggaggcaagccaactccaggatttgagacaataaaatagatttagaaaggaacgtgtagaacttgtttggaaaattagatacctatttacttgattttatcaatgaaaattcatcggaagacttttggtatgattatgcttatttacaggcacaagaccttttaaacaattttactcaaagcgactgggcggaattgcaccaaaatattgatactaaaagtgatttatggaaaataagagtagcctattgtattgatgaagatacggggatgaatggctttgaatttcttcttagtttaatgaatgatagtgatgatgtcgttgaatatgcaatagactcactaagatcgtttgattcagaagaatataagaatatcatacattcaaatcgcatgttaaaaataaaaacgcaaaaactattagaaaatgctagccttccagtaaaaagagttttagaagattttttacaacaaaacaaataaaaatagaaggaaatcaatatttgatttctagttctgcccataaagtcttaataattgacgcagttagcgaagaaaatggagtggataaagagcttactcgattagaatgttcgcttgaagactttacttttttactgaggaatataaaagatgttctgagatatgaagagaagtagatggtgaactgccttgttattcgtcactattttgggatggacgctgaggaaattgatataactttatacaacaaaacccagcaatttttaaaattgctgggtttcttccaaactggcgaattacttctccacccgaataaacttataactataaggcgaaccaaaagcatgtttctgaacgcccgtaatatccgtacgttgcaacactgctgtttgatgttgataaagtggtaaaatcgccgcgtcatcatcaagcagaactttctcagaagctacgaacgcattccaacgttcttctggtttcgtcgcgagcgttgtgtctgttgattttacaagtttatcataagcgggactattgtagctcatatggttattaaagtaatcggataagaataaactgctatatgtccaagggtccttaaaatcaggcatccaagcagccagtgacaagtcgtaattaccgtcagaagttagctgtgtcgcgctcttcgaaggcatgtttttcactttaatcgtcacacctggtaaattatcttcaaactgcgctttcaaatatgcgaaaatggttttcgttgtttcttgatcatcgccgagcagttcgattgttactttatcagttccaagttctttttgtgcttgtttccaatattttaaagcttcttctttgttataaactaaatggtcgccgctatctgtgcggaaatcagcgcccgttgttggattttgaacgaaatcttttggaagaagtccgttcgctgggaatgagccgtcaccgagaatgcggtccgttagttgtttcttatcaacagctaaattaagcgcgtgacgtaaggaattgttcgcaagcggagtcgctttaccgtcacgtttttggttcatgcgcaagtaacttatcagcgcatctttttccgtttgaaaatctttcttgtctttgtattgtttggcgaaatcgcctgaaagtggcacgcggtcagcctcgtttgtattataaaggttcacaccagcgttaatatctttcgcgacttgcacattgatttcgtttactttgacattatctttgtcccaatattggtcgtttttcgcgtaagtccatttattcgtaatgttgccgccccaatccttcatgacaaaaggaccgttgtacaaagtgtgcgcactatctgttccgtatttgtcgccttgttttttcacatagctttctttttgtgggaaaaatgtttcaaaagaaagaagtgaaatgaagtatggaactggttttttaagtgtgatttcaagtgttgttgggtcagttgcaacgacaccaaggtcagttacaggtaatttgccttcattgatttcagtggcgtttttaatcgaatctttgaaaagcgcggaatatcctggtgcggtttttggatcaacggcacggcgccacgcatagacgaaatcatcggcggttacttgtgaaccatcggaccatttcgcgtttttctttaatttaatggtatatttcgtttggtcagcgctgatttctggcattccatcagcaaccccaggaacaaagttatctttttgatcaagtgtgtataatccctcgaagacttggttttgtgcggtgaagctagcaaagtcttcttcagctgtcgtatttaaagtcagtaattcactggtttcaagaaatttaattttgtccggggaagtttttgtcgcagatttatcattgtcatttccgcaagctgtaagtaaaagtactgtcaaaatggcaaaaataggcaatgttttctttaaaaaatgcatggttttctccccttctatctgtgtatttatcgttattataagtattccgataagataagtcaagttaatggtttcttgaaaaaactgcttgacgcaaaaaaaatcccatgataagatattttgtgcaaataagaatgattacgttttacgatgcgtaatcaaaatttacatagtatggctttaaggtttaaatcgtaatcattacgaaaaaggagaggtaatatgaagaaatggtcgtttttagttgtaacagtcttggcgttcgttttagttttggcaggatgtggcgcgagtgctgataaagcaagtggtgataagctcaaggtagtgacaacattttatccaatgtatgattttaccaaaaatgtagcgggagataatgcttcgattgatatgttaattgatgccggaactgaaccgcatgattacgagccgagtgccaaagatattgccaaaattgaggcagctgatgtttttatttataacagtgaagacatggaaacgtgggtaccaagcgtacttaaaagcctagattcgaaaaaattaacgataattgatgctagtaaaggaattaaactattagaaggtagcgaagaagaagagcacgaccatgaccacggcgaagaaggtcatcatcatgaacatgatccgcacgtatggttaagccctgtccttgctgaaaaagaagtgaaaaacatccagagcggtttaagcaaagcggataaagcgaatgcagatacatataaaaagaatgcagaaaaatatacggacaaattaaaaacactcgacaataaatttaaaacagcttttgaaggagcgaaacaacgcgatttcgtaacgcaacatgctgcattccaatatttagcaaacgaatatgatttgcatcaagtagcaatcgcgggtctttcacctgaccaagaacctagcccagcgcgtttagcagaattacaaaaatatgtaaaagaaaacaatatcagcacaatttattttgaagaagtagcatcgccaaaagtagcagaagcgcttgctaacgaaacaggtgcaaaattagaagtactaagcccaatcgaaggtattaccgataaagaacagaaaaaaggcatggattacatcgcttatatggaacaaaacttacaagccttgcaaaaaacaattaaataaggaagcgataaaaatgaaatatattgatatagccaatattggttttaaatacgaatctgagccagtacttgaaaatatttcatttcaagtcagcgcaggagaatttatcatactaacaggagaaaacggagcagctaaatcaacactgctccgtattattttggggattttacaacctgataaaggttctgtcactttctccaagaagaatacagacggcggacgacttttagtaggttatgtaccacaacaaatagcttcctttaacgctggatttcctagtacggtcctcgaattagtaaggtcaggtcgctttccaaatggtaagtggttcaaacggctgacggaaaaagatcatgcccatgtcgaaaaagcattaaaatctgttgaaatgtgggattatcgtcataaacgtatcggtgagctatctggaggtcaaaaacagcggatttgtttggcgcgaatgtttgcaactgatcctgatatattgattttagatgaaccgcaaaccgcaatggataaacaaagtaaaattcgtttttatgatttattaaaacatgaagcacaagtgcacggtaaggcgattttgatggtaacgcatgatagtgaagagatggaagattatgttgataagcatattcgcctcgttagaaaggaggatgtgtcatggaaatgtttctctatggatttatgcaaagagccttccaagcttcaatgattattgctattattgctcctcttttaggggttttcttaattatacgaagacagtcacttatggcggatacgctttcgcatgtgtcgcttgcgggagttgcttttgggctggttttaaatgtgaatccaagtgtgacaacgcttattgttgtagtaatcgcagcacttgggatagagtatttacgcggggtttatgcaacttactcggagttgtcgattgcaatccttatggccgggggacttgcggtggcattagtattgatgagtttggatcagggcggaattacaacaagtgtacagcaatatttatttggttccatcgtgaccatcagcaaagctcaagtacagcttttagtcattctagggattgctattgttgtattgtttctggtgtttaaacggtttatgtttgtacttacttttagtgaagatgttgcggttgcagaaggtgttcctgtacgcttgatttctcttttgtttagcgttgttacgggtattgcaattgcggttattatgccaatagctggggcgctactcgtatctgcacttatcattcttccagcagctattggtatgcggatttcaaaagggtttctcatgtgtgtagttagcgcaatattaattggtttaataggaatgttttcggggctagtatcttcttatcaattaggaaccccaccaggtgctaccattacgctgatgtttatcattcttttcataatagcaaccgttgtattaaaaatagcgcgaaagtaatttctatatatatgtttctccattttgaagcattaggtttagctctttattatgaattatccaggaattatcctgtttttcgatttgattagtcgttttcaaatattgtaaatctttataaaaacagctttttgaaaggttgctatacgaaagtaaatgacttgttttaattgcgggaggtaagataactgtatcatcctcagtaggaataccatgaagtcgagcaagattggaaaaagtaagcataagtttttcagaagccggactactcgccattaaacttttaaagtaaatatgggtagtctggtttttcatgatgaaaaattgaaaaccgaaattctcggggaacatagatagaaagtattctatatcaagttttgagtatctatataagaaacatttcgagagtgttttatatcgaaaacgattaatgctatggtctagtaacgtaaaataatttaaaaaagctccttcaccttgaatggaataaattttgggttgttctttcccatcgtttaaaaataaagccacataaccatcaataataaggtaaacatagttgtctaaatctgcgctgttgtttagtaaaatggcgttttttggaacttctattttttcaaagggtattcttccgtcatgagataggtgaatgaattcgtggtaattatacaatgacttaggcataatgattactccaatctttttttatgtctttacttttgtataaataattgtatcagaaacaaaaaactcgattgtatggagtaaagtagtatttcacgaataaatgtttctaaaatgtgaattatttaaatcatataatgctgataagcacaaaaaaatgttatttaattgatagtgttgactatttttggacttttgggagaaaaaattaaaattgatgcgaacgtaggttctgtgttataattctactggaaaatagaggaggattattgatgaaaaacgtacagatctcagtgaggcgcttagtagaatttgtcttaaaaagcggcagtattgatagccgaatgactagttcagatcgcgctttggaagggacgaaaattcatcaattactccaaaaagaagcaggagaaggatacgaagccgaggtatcattaaagcttgtacgagtaatagatgacatttcttttacacttgaaggccgagcggatggcgtcataaacggagaaatgatagatgagattaaaactaccgaggtagaaatggatgaaattactgaagactttcgcccgctgcactgggcccagctcatttgttatggattcatgttagcggagaagtctgatttagcagaagtcacgcttcaattaacgtactatcaagtagccgataaagaagtgaaacaattcactcgagtcatgagtcgtaaggaaatgagtacttttgtggacgatttgctttcaaaatatgctatttgggcaaaaatgtctgcagcttgggaaatgaagcgaaataaatctattcaagaattaactttcccatatgacagctatagacgtggtcaaagagagctagcaattgccgtttatcggacagtgatggatgatgaaaagctattttgtgaagcgcctacaggcattggaaaaacaatgtcgacgctatttcccagtgtaaaagcaatgggcgaggggaaggcagacaagcttttttattttacagcaaaaacaattacgagacaggttgccgaagatgctttagatgaaatgcgccgtaaaggactaggggcaagaagtgttacaatcacagcaaaagataaaatatgctttttagatgaacgaaaatgtgacccggagcactgccaatttgcgcgtggctattacgatcgcttgaatgaagcgttgttcgatatgctgcaaacagaagaaactataactcgatcggtcgtcgaagcatttgcccggaaatatactttatgtccgtttgagttatcgcttgatgtggcgcttttttgtgatgtaattgtgtgtgattataactatttatttgacccagtcgtttatttgaaacgtttttttgcggatggacctggcagatatacttttctagtggatgaagtgcataatttagtagaccgagctcgttcgatgttctcggcgacattaagtaaatcaatcatcatgcaagtaaaacgtgaattagacaaaaaaaccgataaaaaactactaaattcagtaacggcaatgaataaaataatgattgccctaaataagcaactagccgaagaaaataaaacgatctatgttaaaaaagaagccttgtccgattggaatgaagctgttttaaaatttagttatgtagcaaaagactggttgccaaaaaatacagaggcaaaagctcaagcagatgtactggagctttattttgaaagtttaaggtatttaaagattgctgagttatacgataagcgctatgtcactcaaattacgcggaatcggtccgatgtgctgataaaacaactatgcttagatccggcgtttttactatcagagaaattgaaattaggtgctagttcagtacttttttcggcgacgcttagaccgattgattactacacgaatttacttggtggaaataatgatacaagtcgtcttacttttgcgtctccgtttaaacagaataatatgcatttaatggtagcggattatattagtacaaagtatcaaaggcgtgaaaatagcttggaatcagtgattgatgcgctttatgcgatgctttccgggaaaaaaggcaattatttgtttttctttccatcattccaatatttagaaacggcatttgaattgtttagcgaaaaatatcccgaagtgcgagcgcaaaaacaacaatcttttatgaacgaagcagagcgcgaggaatttctagcagcttttgaaacggggcgtgaagaaacgttcgtcggtttttgtgtcttaggaggcgttttttctgaaggcgttgatcttcgaggggaacgcttaattggaacggcaatcgtaggcgtgggacttgcgcaaatgaacgttgaatctgatttaattaaagattattataatgaaacaatcgggcgcggatttgattatgcgtatcagattcccggtatgaacaaagtccttcaagcggtaggacgtgttattcgcggcgaaaaagatcaaggcgttgtcttactgatagaagaacgttttgcaacagaacggtataaagctttgtttccggctcattggaaccatgccaggacagtgaaaaatacgctgcaaatcgagcgagaagtaaacgaattttggcggaacaactgattttctagtagaatggatgtaatgagtcgatttaggaggaaattatgtataaaattattgcgatagacattgacgggacgcttttaaacgatgcgcacgaaattaccccagctgtacgcgaggcgattaaagctgcaaaacaaaaaggggtcaaagtagtgctttgtacagggcgcccacttgctggaattaaaaaaagcttgatagaactagatcttttagacattggtgattatgcgattacctttaatggagcagttatcctagaaacagcgacggaagaaccattagcagatattactttaaataaatcagaattagaggaaatttatgcattttgtcatgcgcaagatgttaatgtaacgtattttgacggaaaaaacatgtatgtaccaagtcgaaaaatcaccgaaattacatgtcaggatgctttgttgcttcaaacgccactctatcatttgcctgtagaagaagcacctgagtcaattcatgtctccaaagtgatgttattagatacgccagaaaaaatcacggatgttattaaaaacttaccagagacaattaaagagaacttttatgtagttcgaagtgttccttacaacctagaattcttgcaaaaaggcgtcaataaaggttctgcactggaacttctcgtgaacaaacttggcatttctcaaggggaagtaatgagtattggcgatcaagaaaacgatattacgatgatagaatatgcgggaatgggtgtagcaatgggaaatgcaacagagcatattaaagaaatcgccaattataccacaacaacaaataatgaagacggggtagcaaacgcaattcaaatgctcgttctcgaccgttaaaagaaaaacattccatgtgagtttttctttagaggtataaatattgacagcgctttatttaatgagcgaaaatagaagatacaaaactaacacaatgtggaagtttttttggtaaggttggcagaaaatcatttattcatggaagtttttctctcgaggctatcttgccaaaaaaacgttcctttgttattgttttaggaatagtttgacatttaaataaaaaggagtgaatgtgcttgaaaatcacaaaaattaaaacacacattttaccgattcagctaagtgctacttttaagacggcgcttagggaagttagtcatgtgaacgtggtacgagtttatattcattttgataacgggattataggtattggagaagctgctccaacgcatgtaataacaggggatacggaagtcagcattttgagtgcaataaatgatattttcggtccttttttaattaatcgcgaactagacgaagaacttacaattttagatgaaatgaaatctttattagtacataattcaagtccaaaagccgccattgatattgctttacatgatgcgctggcaaaagctcattcaaagccattatatgaattcctcggcggtggcttagcggggcttgaaacagattataccattagcattgggacgccagaaaaaatggttcgagatgcagaaaccaaagtagcagaaggatttcagtcccttaaagttaaattaggtcttgatccagttgaaatagaagtagcaaaaatcaggcaaatgaatgatgcgttaggcgggaagattccttttagaattgatgcaaaccaaggatggactgcggatgaagccattcaaatcctaaatgagtggcaagatattccaattgacttcatcgaacaaccagtaaaaagttgggattttaccggtatggcaaaagtgactgcgaacactagttttccaatcatggctgatgaaagtttatttggctttcacgatgctaaacgacttttagacgaaaaatgctgtaatttgcttaatattaaattgatgaaaagtgcaggaatcaaagaagcgcaagcgatacatgatttagcgggcagttataatgtggactgtatgattggtacgatgattgaaggatatgcaagtttatcagccgcagctcatttcgcggcagcttccaaacaagtgaagttttatgatttagatgtgccgtttatgtgggatttacatggtaaaaacatcgctgatattggtcttgaaattggccgtggacaagtgcttttaacagaagaagatgggattggcattccagcttattaaagaaagtagggataatatgaacaaattagttagtcaaagtaatgcatttctttggaggaaaaatgaaatgaacccggttttagccaatattttagaggctagaaaagaaactgacttggttcaaattaaccaagaagatgcgatgaaattatatgaggatagccttgttgactcagatttgctttataacgactttgtaattgtcgacgaaatcgagggcgactgggcaaaagtagtcgttccttcccaacaaagttttcaagatgagcgcggttatcctggttggatgcttctttctgacttagaagatacagataaaactagcgatactggtgagaaaatcgcagttgttgtgccaaaagcagaaattacatacgaaaatggggaaacgcgcactgtttcatttggcacacttttcaccaaaatcgctgaaactgatgatagctacacgattgaaacacctcatggattagcgaccgttttacgaactcaagtagatttacaacataaacaaggcgacaacattggcatcactgtggtgcaaatggcgatgcaattccttgacttaccatacgtttgggcgggaattagcagtgctggttttgactgttcaggatttgcgtttactctttaccggacatgtggaaaatatatcggccgcgatgccacagagcaatctttcagaggggaaaaaattgattacgcaaacgctgaaccaggagatttgctgttttttgcttatgaggaaggcaaaggggaagtccatcacgtgggagtttacatcggaaatgacgagatgattcattcgcaaacaccaggatccaaagtaattttaactaaaatcgcaggcagtaagtacgaaccagaactttgtgtgacctcaagacatcgataaagggggtggatgaaactgactaattatcaagaaattaatcaagatttcaacataattgattcaaaagcactttttatatcagatggggaaaaggtgctttttgcagaaaatgaaaaccagctttttactgctgcaagtgtcatcaaactaccgatttatttatattttttcgaaaaaattgccaaaaaagagttagacttacaaacggatttccaaattccaagcgaaaaagtagtagctggagcaggaatcatccaaatacttccgcaaaaaagaatttggacactggaagaattactgcatttaatgatagctgtttcggacaatacagctaccaaccaattaatcgagctagcaactatcaccaaactacaatcatggttacgtgaaaacaactgggaagatggaattcagctggaacggcaaatgatggatttcacgaccgtaaagcaaaataaaatcagcgctaaggcagccgtgaccattttccaaaaaataatgatgcttagtgaagcttatccagacttaaaagaaactatccggcgtccgctactaaatcagcaatttcgatccaacctagtgggcacgttggaagaagccggaatttcggggcttcaaatgttaaataaaacgggcgaactaaaaaatatccagcatgatgtggccgtttttgagtataaaggaaagaccagatttgcagccgcactgacgaataacacgggattagaagcgaatgcgacagcttggatgcagacagtcggcaaacaattattttctgagatgacataaaccaaaatagggggaactaaaatgaaaaaaagattagcgttagtttgtattatgattctatctatctcaacctttttaatggcatgcggaggaaataaagacgaagcgagcaaatcacaaggcaaaaagacactgaaaatcatggaaaacgctgaagtttcttccatggactcaactttatcgcaagacgttccaagtttcactgaacaaggacaagtttttgaaggtctttatactttaaacgacaaagaccaagcagttccagcaattgcaaaagatatgccgaagttaagtgaggaccaaaaaacatatacaatcaaactgcgcgacgatgccaaatggtcaaacggcacgaaagtcactgcaaatgatttcattttcgcttggaaaaaactagcaaatccagacaccgccgcccagtattctttcctgcttgatgggaccgttaaaaacggaaccgacgttgtaaatggtaagaaaagcgtggacgaactaggatttaaagcccttgatgactatacaattgaaattcaattagaacaaccagtaccttatttcacttcgctcctagcattcaactccttttaccctcaaaatgaagattacgtaaaagagcagggtgataaatacgcgcagagcagtgaaaacatgatttacaatggtccttttgttatgaaaggctggacaaacacagaaaaagcttggactttggaaaaaaatcccgagtactgggataaaaagaacgtgaaatccgacaaaatcgaagtgagcgtagtaaaagctccgaacacagcagtaaatctatacgacactggaaaacttgatgtagcaacactttctggcgactacgcttcacaaaaaagcaacgacaaagactaccactctgagctagatgcctacgtgactcacctaaaactaaatcaagaactggatgggaagaaaacacctttagctaacgaaaacttaagaaaagcactttcccttgcagtagataaagaatcacttacgaagaaaatcttggcagatggctcaaaagcaatttatggctatgttccagaaaaatttgtcacgaatccagaaactggcgaagatttccggaaagaaagtggcgactacatgaagcaagacaaagctgaggcgaaaagctattttgataaagcaaaacaagaactcggtggcggtgaagtgactgtagaactgcttaactctgatttagaatcaagcaaaaaagtcggcgagtacctacaaagtcaactagaatccgcattaccaggcttaaaagtaaacttgaaaaccgtccctaaaaagaacttattgcaactaacacgtgagcaaaaatacgaaatcgttttatcaaactggggtcctgatttccaagatccacttacattcctaggaaactacacaacgggaaacacatataatgcgagcggatattcaagcgccgactacgataaaatgataaacgcaacttcaacaacactcacaactaaaccagaagaacgctgggaaacctttatcgatgccgaaaaattactaatagaaaccgatgcagcaatgatcccgctctatcaaactgcagtatgtaatttgaaaaaagatactgtaaaaggaatcgttcaccataattttggaacaagcttttcctataaaggtgcttacgtagaataaaaggagagagcaaaatgaaactttggatttccgtagatatggaagggataaatggccttcctgatgatacttttgttgattctagtatgcgaaattatactagaggacaaaaaataatgacagaagaaactaactgggtagtagaagaagctttaaaagcaggatatgatgatgttatcgtgaatgatagtcattcaaaaatgaataatatattgatagaagatttacacgaagaagcaagactcatcactggtgacgtaaaacctttttcgatggtgcaagggttagattcaagcgcggatgcggctgtttttatcggttatcattcgcgcgctggtcaaccaggcgtaatgagccactcgatgatctcaggcgttcgtaatttttatattaatgacgtggtaattggcgaatttggcttaaatgcatatgttgcgggagcatacggagtcccggttattctcgtttctggcgatgattatattgcccgcgaggcgaaagaactcatacctggaattgagacagctgttgtaaaagaagcggtatcccgttcgtccgcagtagctttctctaagtcaaaagcagagaaaatcatccgcgaaaaagtggcgctttcgttaaatcataaacaagccgctgtactggtaccgccagaaaaaacagtattaaaaatagagttctgtaattacggtcaagcggagtgggcagcgcttgtaccaagaactaaaatcattgatgaaactaccgttgtgttcgaagcggaagatatattagaagcgtaccaagcgatggttgcaatgacggagcttgctatgaagtgcgccttttcataaaacaaagccgaaactttctatagaggagtttcggctttgttgtttaattaattacaatcttacaaatcgcctcctcaaactgtcactaaatctccataaagttgttaattatagtgcgatacttccgggaagtgaggtagattggagttactctattgtcatatgatatttgataataacaaaacttcaattgtaaaggatgaatttgtaatgagtaaaaacggaaatcttttaaaaagagtagggttagcgtttctaagtgttttaatcatagctagcacggttttccaaacgaccattgtaaaagcagcaacgagttacggatctgagtttttaaatacagtagaacttttagataaagatggtacgccaaaaacggattttggctattacgataatatgaatgtgcactacacttggtcgattcctaactcaaccaatgtaaaagcaggcgactcaatggatttcgcattaccaagccagttagcacttgcgacagatcttgcttttaatgtgaaagacagtaaaggccagacagtcggaaccgccactgtaaaacgagcaactaaccaagtaacagtcgtatttagtgattatgtcgaaaaacattcagatattaaaggtgaacttgatttttggactacatttaatcaaaaagtaattactgggaacgaaaaaattaatttagaatttccaattgaaaatagcacaattaatgtagacgtcaatgttggtgaaaaaacacctgttagtccaacagaaacgattttcaaatatggttgggttgatgctaacaatccgagtttaattcattgggttgtccgcgtgaactatgctcaaaaaaatattcctaatgccgtttttactgatattatcggtgcaaagcagacgttgaattttgactctatcaaagcttttcacggaacctattcaactgatcgcgtattcacagcaggcacgccgatttcaaataccaatttttctaagacaagtgatggttttagcgtaacattgggaaatttaacggactcggtacaaatttcatatacaacaactgcgacagatggcgggaagtctactcaatatgataatactgctaagttatcgggcgaggattttgtaacgaaacaaacgtcaacttggaccccagcatccggtggtggaggtggagcggacggcacaacgggttcggttacactaacaaaacaagatgctaaaacgaaagcaacccttgaaggggcagaatttaaattagtcgatgcaaatggtactattttacaagaaaatatcacaacagatgcgagcggccaattaaacgtttctaacctcaaattcgctacctaccaattaatcgaaacaaaagccccgacaggctataaactggatagcacgccagtagaatttacaattggcgaaaataataaagaaattacggtaacaaaagaaaataccctggacactggcgcagtagaacttactaaagtagatgccgcgacaaaagccatacttgcaggagccacattcgaattgcaagataaagacggcagcgttcttcaaacagacttaaaaacagatgaaaatggtattttaaaggtaactgacctagtacctggcaattaccaatttgtcgaaacaagtgcccctaccggctataaattagatagcagtcccgttccatttgaaattattgcagatgaaacagatcaaatagtaaaagtaacaaaagaaaacatcttggaagtcggcgcagtagaacttactaaagtagatgccgcaacaaaagccctacttgcaggagcgacattcgaattacaagataaagacggaaagactttacaaacaggcttaacaacagatgagaatggtgtgttaaaagtcactgatttagtcccaggcacataccagtttgtagaaactaatgcgccaattggttatgaacttgatgctagtcccgtcgttttcgaaattatctatggagaaaataatcaggttgttaaagtaaccaaagaaaataaggcagaaaccacaccgcctccaacaccgctaataccatcacaaccagtgccaattgaaccaaaagttccaattgtccctgaaaagccagtgcaatcagaaaaaagtgaagaaagtccaaaattatacaaaatatccgcagctaaaaagttaccaaaaacaggcgatacacaaaactgggcgggattgggaatgattcttctagccctgtcaataagcggttttcttataaaacgaaaataaaaaagaagacctagataaatcatctaggtcttctttttaggtcaataattattactaaagttcacaaaacgttcacaaataggtggaatttttccgaaaaaacgtcaatcgagataaattttacggtatactcacaatgaattagtaagaatattttattgggattaatttgaaaaggatggtttttatgaaagagcgcgtcattttaaaacgtaatctaaagaaaataggtttagcacttcttagcgttatcttacttgcaaatgttttatttcaaactaactttgttaaagcagcaactgactatggctctagttttttgcaatcagttgaattgttagatgcagatggtaatccaacaactgattttggttattatgatagtgttcaagttcattatacttgggcaatccctaattcgagtaatgtgaaggcaggggatacaatgcaatttgtattacctccagaactacaaatagtaacagatttagatttttcattgaaagaccataaaggcaatgtagtaggaaatgtagtcgcaactaaagacaccggcaaagtagtcattacttttacagactttgtagaaaaaaactcagacgttagcggttatcttgatttttggagtaactgggataaatctttagttgaaggaaacgaaaaagttccattagtatttccagtaaatggcactacagaaactattaccgtagaagtcggcgggaaaaatcaaatcgatccaaccgaaactttatacaaatatggctgggctaatgccaaaaacccggaacttatccagtgggtagttcgagttaattatgccaaagaaaacattcaaaatgctgtttatgaagattttgttggacctaaacaagtaattgattttaattctatccaagcagtacacggcgagtttgaccctgatgataatttcaccccaggagctgcagtcccgtcctcagacatcattcaaacaacagatggttttaaagtaaacctagggaatttaacagattctgtaaaaatttcttactatactacctccacagataacggagcctcccctagttatacaaataaagggaaactaactggcgacaactatgttacccaagaaatcgaagtggcgaccccgacatctggcggtagcggcggcggagaaggaacaaccggctctgtagaattaactaaaacagacgataccgtggagagaaaccctctagcaggtgccgaatttaaattagtcaactcagcaggaacagtaatgcaagaaaaccttgcaactggtaccgatggaaaactagctatcacaagcttgaagtacgacacatatcaattaatcgaaacaaaagcaccagcgggatacgtattagatgcgtcaccagtagaatttacaatcgatgccacccaccaagctatatttgtttcaaaagaaaataaggcaattaaaggctcggtttcactcataaaagaagatagtgaaacaaaagcaactttagcaggtgccgaatttgaattacaagataaagccggtaatacgttgcgctcgaatttaatcacggataacgctgggaagctaaatatcacagatcttgcgcttggtgattatcggcttgtagaaacaaaagcaccagttggctatattcttgacgccaccccggttaactttactattagtgaagcacaccttaatttaactgtgacaaaagaaaacacgaaagaacctgaaatacctggagttccagaaaaacctataattccaaataaacctgatattccggaaaaacctactgtgccaaaaacaccagtagtaccagataaaatagtaagttcagatgagcaaccaacaacattaccaaaaacaggagatagctcatttgctagcggcttcggaatcctgctcgtagcgctttctaccgctggattaattgcatttagaagaaaataacaaaaaaggaaccaaaagcacagagatagtcgctttcggttccttctttatattgtccgagtttgatcttgtaaaacagcttttaatgagtgataagctggaattgataaatttaaatccactcgatttatttgttgtgccatttttggttgaatgccagatatgaaagcctcgacacctaaaagcttgagaacagttactaaattatttagcatgtctccaagtgcatcgtcaaagtaagttattcctgataaatcaatacaaagttgctcaacgcctagttgaacgcatttcttagaagtaatttcagttaatttatctgctctttcgcggtcaattcctcccattaaaggaagtatcgccaatttgtcagttatagaaataaccggagtgctaatttcctcaattaaacgatgttgttgttctaaatgtttcacaatatcgttataatacattgcagaaaaagcttcattgattcggtcaaatccgtgattaaccatcgctaagctggaagaaaaatcacatttagaaacctcatcattatggatgcaaaaatcgttaactgccgaaacaaattcacggcgtagtttatctagggtagtaattacttcaggcaaaggaacttcattttccatacgacgcgcgtacatgttatcaagccatttatcaagtttcagaaagaaagcctttttacctgtgaagtaagaaatgattaggtcagctgtttgttcgctatctgcgcgaagttcatctttatatcgcggggaataaacgaaactcgtatacgtattttcattttcataaattttcgaaagccagttgttaataatttcctctgtatgggcccttaaataaagttccatacttccattcgcttcattcataccagacaacccctttaagtctaagtataatacttttcttttattctatgctcaaaaaggtgtactgtccatttatattttggaaaaaaagctaatttattgaaaatgtaatattctttaacaaatcagtcgttatttttttgttaaaattccgaagctatttaagccttgtcatggtataatattacaatatggatagaaaggaagttttttgtgggattacaggatgaacttacaatgatgcaaccagtggtcatgaagattttttcaaaaagtgtccgcgaaaaccgattatctcacggctatttattagaaggctcaagaggtacaggcaagaaacgcacagcactttggttagctcagagtcttttttgtttggagcggactgaaaccaaccttgcttgtggcgagtgtgccaattgcatgagaatagcgagtcataatcatccggatgttcatttgctagagccagatggagctagtattaaaatagatcaggttcgcgcgcttaagcaagaattaagtaaacgcgggatggaatcagatcaaaaagtagttatcatttacgatgcagaaaaaatgactgtgcaatcagccaatagtctgctgaaatttatagaagaaccagaaggcggtttgttattactatttttaacgacaaatcctgggcaaattttgccaacaattcaatcaagactgcaacctgtcacgtttaaatcgctaacttttgatagtctcgtagcttcactaacgactgcgggcatttccgaacaaaaagcgcggatttatgctagtattactggtagcgtagaagaagcgaagacgtttgaagagggtgactggtttagtgatgcaagaaatgttgtcatcaagttatacgaaggaatacaccatcaaggaacgagcccattaattatcattcaagaatcatggatgccactatttaaagagaaagataagatggcgcttggactcgaattattgttactgctttaccgcgataggctgcatcttacgcttgatgagaactacgaacctatttgcactgcgcaaaaagaaatgctcggacaagatgcgctacgtaagtcactgtccgaaaccacaggggaaatcgagaagattctcgctgcgaaatcaaaactggattccaatatgaacacgcaacttctaatggagcagttagttcttgaaatccaagggaggtaatcgccatgcttaaaattgtaggcgtccgttttaaagacgttggtaaaatatattatttctcacctggagatctggaaatcacagaaaaccaaggtgtcatcgttgaaaatgcacaaggtatcgaatttgggaaaacggtcattgaaccgcgctatgtggacgaagaagatgtcgttttaccgctaaaaaaagtacttcgtgttgcaacagaagcagattataaatgtgtcgctgaaaatggcgactcttgtcagaaagcctttttactgtgtgatgaaaaaatccgtgagcgtgaattagatatgagcttggtggatgtggattacacgtttgatcgaaacaaaattattttttactttactgcggaaggtcgcgttgattttcgggaactcgtgaaagatttagcgtctgttttccggactcgtatcgaactgcgccaaatcggcgttcgtgatgaagcgaaattgcttggcggaattggcccatgtggtcgtatgctttgctgttccactttcctaggcgacttcgaaccagtttctatcaaaatggctaaagaccaaaacttgtcccttaatccaacgaaaatctctggcttatgtggacgcttaatgtgttgtttgaaatacgagaatgatgaatatgagcaagcaaaacgtgaaatgccagatgttggtgtaaaagtaaaaactccagaaggcgtagaagcacgtgtttcgggaatcaacttgctgtctagaatcctacaagtgagtttgcccgaagaagagacggttatagaatacgaattggatgagttacgtccatataacgaatttctaaaacaaccggcaaagtcttgaggtgaaaaaattggataaaaaagctatttttgactcagtcagcaatatggaggagcaaattggcgaattgtatcagcaacttggagatctaaagacaaacttaggcgaaatgttggaagagaataaccggttaaaccttgagaatgagcatttacgacgcagactttctttgacggatgaagtggctcctgaaccagtggccgaagaagaggcagttcatggagtgatggcgccgaatcgcaaagaagcgatgcaacaaatgattgaactcggggaaggttatgataatcttgtccaactttacaaggaaggatttcacgtttgcaatgtacatttcggcagtccgcgtggcaatgatgaagattgtttattttgcctatccttgcttaacaaaaaataacatgacgggcctttctcgattcaggagaagggctttttgctagaaaaggtgaatcatttggaaaaactcaaattaataggcgatgaaaggctcgattatttactagcagaaaatttgcggattattcaaagtccatcggtattttctttctcgatagacgcggttctcctcgcgaaatttagttatttaccaatccgtaaagggaaaataattgatttatgtagtggaaatggtattattcctttactacttagtacacgaacaaaagcgcaaatagttggcgttgaaattcaagagcgacttgcagacatggcgaaaagaagtgttgcttataatcaactggaagaccaaatcgaaataatcgaatacgatttgaaccatattaccgatttaattccaaaagagcgcgcagatattgttacgtgcaatccaccgtattttgcaaccccatctacaagcctgaaaaacgaaaacgaacattatcgtatcgctcgtcacgaaattatgtgcacgctagaagatacaattcgagttgccgcaagtcttttaaaacaaggtggtaaagcgaattttgttcacaggccagagcgcttactagatattattgatttaatgcgaaaataccgcttagaaccgaaacgcatccagtttgtccatccacgaatcgaccgagaagcaaacacggttctcgtagaaggcatcaaggacgggaagcctggcgtgaagtatgtcccccctgttatcgtgtacgatgagctaggtgagtataccccggttattaaggagattttatatggcgaaagcgaatgaacatttcttttacgtattaaaatgtagcgataattcttattatggtggctatacgacggatgtaatgcgccgagaagccgaacacaatgcgggaattagatgcaaatacactaaaacacgccgcccagtaaaagtcatccattttgaaaaatttgaaacgagaagtgaagccactaaagctgaagcggctttcaaaaaactatcgcgcaaaaataaagacagctacttaagcgaacgggaggaggagtcgaagtgatacagagccaaaaaagttttagcggagacattcaaggggcgctatacttagtcccaacaccaatagggaatttagaagatatgacattccgcgcaatccgaatgctaaaagaagcagatattattgcagcggaagacacgcgaaacaccgtgaaacttttaaatcattttgaaattacgacccgaatgacgagttaccatcagtttacgaaagagaataaagaagataacattattcagcggatgctagatggcgaagtggttgcgctggtcagcgatgcgggtatgccttctatttctgatccaggttatgaactagtccaaaatgcgctaaatgcaaatattccagtcattccattaccgggcgcgaacgctgctttaaccgccttgattgcttcaggtttagcgccccagccgttctatttttatggtttccttcctcgtcaaaataaagagcgcacgcaggcaattgaaaaactagcagcgcgcgaggaaacttggattttatatgaatcaccacatcgtttaaaagaaacgttaaaagcgatcattaaaatcactggaaatgaccggaaaatggttttatgtcgcgagcttaccaaacgttttgaagaatttttacgaggaacagttgaagatgcgcttaactgggcaaccgacgaagaagttcgtggggaattttgtattattattgaaggaaatgcgaacccacctttagaggaagaactactttggtggcaggaattggatattaaaacacatgtaagtaccgtgatggaacaagaaaatattagttctaaagatgccattaaaaccgttatgaaagcgagaaatttaccaaagcgcgaagtctacgctgcttatcatgaaataaaataaaaaatcatgcgagagatcttgttctagatctctcgcatgatttttttaaatcgtatcaccaaagcgacgtttgatttcttccattaactccgcagctccttctttactaagagtcagcttaccatccacaaattttttattatcaacagaaaactctccagtaacatcacaaaccaagccagcagaatatttttttaatacaattgcatcttcatcagtaaaaatttctaaagggtcttttacgtttaaattcattgtgcgtctgatttcaatcgggataacgacacgacccaactcatcgatttttcttaccattccagttgatttcattttctcaccttcttgataattttaattcattttaacagattatcaatataataggaatgaattcgaggtgaaaagggtatagaccataagcagaagaattagggggaataaaaaatgaacatagttatcgcattaattccggcagtgatgtgggggattatgccgttagttgtttcgaaaattggcggtaaaccgaggcaacaaattattggtacaacattcggggcactagctttcgcaatcggcgtttttatttttacaaatccagaatatacagcaacaatcattattgctagttttatttccggggcattttggagcttagggcaaatgaatcagttccgggcctttacgcaagtgggcgtttctaaaacaatgccactttcaacaggaatgcagttagtcggtacctcactatttggtgtttttgctttccatgagtggggaacaacatcgaagctaatcctaggtttttccgcgttagcacttattattatcgggatatttttaacgagttatcaacaacataaagacgaaaattccggccaaaatatgaaaaaaggaattgtcactttacttatttcatcagtaggttatgtaggatatgtcgttatcactcgttggtttgatattagtggatgggacgcgattttacctcaagcaatcgggatggtagtcgcaggattattattttccatcaagtccgaagaaaaacgttttacaaagcaaacatggttaaatatgattccaggggtgatgtgggctactggtaacttggctctacttttctcaaacaaattggttgggatcgctacaggtttttcactttcacaaatgggtgttgtaatttcgaccattggaggaatccttttcctaggagagaaaaaaaccaagaaagaacttattttggtcattatcggggttatcttagttattatcggtggtacgatgataggaattgctaaaagctaagaccaagcttccggtttgataaaatgctatacttaaattaatctaaattaaaggtggttatggtgaaaatgaatgcgaaattagaagtaaatggtgagcttgtaaaagaatcttatgtttatttattgtcgcggtatctcgttttacgtcaagaaaattttgatacgaaagaagataaaattccatataacacacttaagcataattcggtagctccagcagatgcgaattttgtgaatcctaactttgatgtggtttattcagaagcttggatcgctgtagatgacgataatgctgttattttagaagtaccagaaattaaaaatcgctactatactgtccaacttttagacggctggggcgaagtggtaacaaatatcaatgaacgtaactacccagatcatccatacggaaaatttgctttcgttaaaaaaggaacaaatccttccgttccaagtgacgctgtaaaaatcgaattaccatcagagaaagtaaaagtactccttcgcgtagaacaaaaagacgatcctgaaggcgcagtaaaacttcaaaaagcattcaaattcgacgcaccagataatataaaaatcaaagaaccacttgagattccacatttcactaatgcagatttcttattagaagaaatttattccaatttagaagaactactagcaacgtatccagataaaatgccaaaagcggctgaattccaagataaagcaagacaagttgcagcttatattgagcttggcgacgagcaaaaagcagaagtaagaaaccttattgtaaaagaagccattccttattttactgacggggcaaaaggtttcggaacgcaaaaaggcggatggtcagttacttatgtggcaggcgccttcgaaaacgacattttagcacgagcgattattaattacggaggtatctgggcgaactcgatccaagaagctttatatttcatcgggcaacaaggtacggacggcgaacttttaagtggagataaagtatacaaaatccatttcccgaaagatcaacttccaaatggccttgcagaagctttctggtccgttacactctacggcgttccagactatcatgttattccaaataaactaaacaaattcagtatcaatgactatactggtcctaaaacaaatgaggacggaagcctatcactttatattgcagcagaaaaaccagcagatgttgatcctggtaattggctgccaagtaaagctggcaaaggattctcactaaacttccgactctatgttccgaaaaaagaagtattagaaggaaaagtattcttaccaccacttgaagtcctttaataaacgaaaaaagctaagtatgaaactatcgatttcagatagtaacatacttagctttttttatttctttttaaataatagtaaaggggcgctaattaaaagaagtagagctccgaagatagtggatgatgtactttggtcagtatcaccagtttttggtaaagagttataggttgttttttctattgaatgactagaactagtagtagctggttttacagtgaccggattatgagctaccgggttatctggattaacagagtcaactgatttaacgggatcaaccgtaataggtgttggtataacggcagcttttttataaatatagtcaattgtttgttcagtatcagtgaaagtaccagttgcatttgtaggtgtggtttctaaagtataaccagcaatttttttgcttgttgattggtaattactattgagaactccagttaatgtatctgattctgcgattttatttccatcgatatcaagataattcactgtgatatttgccccggctattggagcaggagttgctacgtgaactgtaacttttactacatttgaaacgttgcctgccttatcggttgcttgaacattgacggaataatcgccactaactgctaaattaacagaggaagtaaaatcgcttgagaggctaacagtggagtcgtaattatcagtaacactagcattaatatatgttaaaaattgttcttccgtaacactgcttccagggctgtacgtgatttcagttttatcagctttaacaacaggagcattaatatcttttggttttaaagagccagtagaggttgacttgttaccggccttgtcttgacttgtaatagtggcagttgcaactaaggaatcgattttggcttctccaccttcacctgaataagaggttttccagtcgaattttacttttgctttggataaactgtcccaactggttactttgtcgaatttaaaagtaacggtattagtggaactgtcaaagctagttgtccctacttgatttgtaatatcttccccaccaacagaaacgtgtaaatccgtatagttcatgcccgttggtagagctaattttatttccagtttatagtcttctttggtttgattcgttaaatctggaaatgtaatggttgatgtatatttatatggaaaattctcattggtgttttgaagtaatgaaatatcatttgtatcacgagtatcagcaagtgcagaaacgggcgtaagtgctatttggccagccagagtgcttaaaatgataaggctagcaatagtttttttcttagtaaacatttgttaaataacctctttcttgatgttgaaatttaattcaatttaattgtagcactaaattttggagcacaagtgtactagtggtagtataatgcggcacactttgtcgaaatagtggctaatgagaatcataaaaatataaaacgttcatttaaactttggcgattagctctattaaatacttttactccgaaaacctctatcatcttcctgttatttccgctataatgaagtaattgaaaactaaattaaacggcaaacaaggaggaaaacgatttgaacattatgattgcgctgattcctgcattactttggggaacagttccgctaattattacaaaatttggcggttcgacacgacaacaaacaatggggatgacgctaggggcgctcacttttgcagtaatcgttttcttctttactgacccggtttatacacttaaaacagtaggaattagttttataacagggtgtttatggactgtcggacagatgttccaattgcgcgcttttaaaatcatcggcgtttcaaaagcgatgccgatttcgaccggaatgcaattagttggaacaacactttgcggtgttattctatttcatgaatgggatacgacgttacgcattattcttggatttatcgcacttgcgcttatcgttggagggattttcctaacttcctatgcggaaaaagaagaagatggaactaacgctttaaaacaaggcttaattacattagttatttcatctttagggtatgtagggttagtcgttctcattcaagggtttaaaatcgacggaattaatgcgattttaccgcaagcgattggaatggttttaagtgccttaattatgacgcatagtggtggcacggaaaaacgttttaataaacgtacattgttgctcattataccgggaatgatttgggcagcaggaaatgtagcgatggtacacgcaaaccaacttgtcggagtcgcgactggtttttcactttcgcagttaggtgttgtcatctcaactattggcggcattgtactattaaaagaaaagaaaacccaaaaagaaatgctttatgttattgtgggcgtagttttagtcgttctcggcgggattttaatcggcgtcgcaaaaggcgcttaattaattatttcgtttagcgcgaaaaatgatataatgatactaattgttttatttttaaggagggaattgtgttgcctgaagagaaaaatacgttttatattacaacaccaatctattatccaagcggaaaagcgcatatcggacatgcttatacgactgttgcgggggacgcgatggctcgttataaacgcttaaaaggatatgatgtgttttacttaactggaacagatgaacacggtcagaaaatccaagcaaaagcaaaagaacgcgggatttctgaacaagaatacgtggatgaaattgcagaaggtttccaagaactttggaaaaaactagaaatttctaatactgattttattcgtacaacacaagaccgtcataaaacatccgtagaaaaaatctttgaacaacttttagagcaaggcgacatttacttaggtgaatacgaaggttggtactctgtttctgatgaagaatactttacagaaacacaattagaagaagtatacaaagatgaaaatggtaaagtaatcggcggaaaagctccaagtggtaacgaagtcgagcttgttaaagaagaatcctactttttccgcatgagcaaatacgcggatcgtttagtagaatattataactcgcacccagaatttatcctacctgaatccagaaaaaatgaaatgattaacaatttcatcaagcctggcttagaggatttagcagtatctagaaccacttttgattggggtattaaagttcccggaaatccaaaacacgttgtttatgtgtggattgatgcgctttctaactatattactgcgcttggatataatacggacaatgatacgaaattccaaaaatactggcctgctgatgtacaaatcgttgggaaagaaattgttcgtttccatacgatttattggccaattatgttgatggcactagacttaccacttccaaaaatggtattcggtcatggctggattttgatgaaagacggtaaaatgtcgaaatctaaagggaatgtagtagatccttacatgttgattgaccgctacggactagacgcgcttcgttactatttattacgtgaagttccatttggttcagatggtttatttacaccggaagactttgttgaccgcgtaaactatgatcttgctaatgacttaggaaacttacttaatcgtacagttgcaatgattaataaatactttgatggtgaaattccagcttatcaaggtaatgtaacagaattcgatcaaacattagtagatttcaaaaataacgtcgtgaaagaatacgaaggtagtatggaccatatgcagttttcagtagcattaaaccaactatggtcactaatttctcgtacaaataaatatattgatgaaactgctccatgggcactagctaaagaggaagataagcgtacagaactagcgagcgtaatgacacatttagctgaaaacttacgtatcatcgcagttttacttcaaccattcctaacaagaactccaggtgaaatcttcttacaactaggcttgcaagaagaaaacttgaagaaatgggatagcatctatggctacggcgaaattccagaaggtacaacggtagtgaaaaaaggtacgccaattttcccaagactcgatgcagaagtcgaagttacttatattcaagatgaaatgaaaggctctgcaccagctcctgctgaagaaactgcagaagttgaagcacttgaaaccccgcaaatcggtattgaagatttcgacaaaattgatcttcgggttgcggaagtaaaacaagtagacaaagtgaaaaaagcagataaacttctttgtttccaattagacttaggtgaaggtaaactacgccaagttctttcaggtattgcagaattctaccaaccagaagagttaattggcaaaaaagttatcgttgtttccaacttaaaacctgtgaaacttcgcggactaatgagcgaaggcatgattctctcaggagaaaaagatggaaaactaagcgtaattgaagcaaatagcgcacttccaaatggcgcaaaagtaaaataataaaaacgagccctaattcgctggagttagggttcctttttttatcgaaaaaaacttttaaaaaaaagattgcataatgcaaacgattacaatataatgtaactatacttacttaattcaatgaacgaagtaagtgctcatccagaagtaaaggagccggactatggatatcttaagaaaagggaacaaagacttaattaaagatataaatcgctataccgtgctgaatttaatccgtgaaaaaggagaaatcacacgtacagaaatagctaaaaaatgcgattttgggatgtctacattaacgtatattctagatgacttgcaacaagaaggcattattctagaaggtgcggaaacatcatctactgggggcagacgtgccaaactagtaagatttaataaagattatggatttgttgttagtgtcaaagtagaagaggaacaacttctttttgcgttaacagacttaaatgcagaaattattaaaaatacttccataccattttcatcagagaaaaaaccggaagatgcaatagacttaattgctgaaaatgtaaagaaaatgtgtaaaaacagagatatgaaaaacttgctaggcgttgggattgctatttcaggtctagtgaatcgtaaaaaaggaacagtaatccgctctactatgctaggctgggaaaacgttgccttagaagcgatgttacatgttcatttccctgatattccagtgtatgtagataaaaatataaactgctacacactcgcagaactttggttaggtgaagggaaacaatccaataattttgcaaccgtttcagttggtgctgggcttggtttatctgttgttattaaccgtcaaatttattacggtgcgcaaggtggagccggagaatttggtcatacaacaatccaaccaggcggatacaagtgccactgtggtcaaaaagggtgcttagaaatgtacgcatccgaattttacttccgaaaccgcggcgaagaaataaaagaagcttttcctacatctgaattaaatgattttcattttgataatgtagcaaaaagcgcgcgtgctggtgacgaaatggcgatagaacttatgggtaaaatgggagaatatttaggatacgggattcgaaatatcattaacacctttaacccagagaaagtaattattgtcggggaaggcttacaccacagagatttattcttaactaaaattgatgaaattgcttcacagaactttttttcaggggctggctttgaaacggaaattacaacaacttctctagaggatcctgcgtggttacaaggtgcggctttactagtcatccaccaactattccaagtgccaatctatgaagaagaacaaactttattacgttaaaagtacataaattatttcgggaggttatttttacatggttggtatgactagaaagaaaacactattttggctatgcattttcttgttgcccaatttattaggttttctcatttttattgctatcccaatccttggctcgctcggtattagttttaccgattgggacttagtgagtacgattcactttactggatttgaaaattacaaacggttatttaatgacccagaattttggaagtcatttagaaatactatcacatttatcatcggttacttgccaagtgtaatgattcttggtctagcttgtgccttgatgttaaaccaaaaaattaaacttagaccatttttccgagcagtgtacttcttacccgtgattacttcatgggtagctgtttcactcgtttggaaatggcttttcaacccttcatacggtctcatcaattatttcttatcattaattggaattgctggaccgaactggttaacagacccacaaacagcgatgattgcagttattataactagtgcgtggaaagatattggtttcgttatggtactgtttttgggtggtttgcaaaatatttcaccttcctattacgaagctgcaaatatggacggagcgtcaaaacttcgccaattattctcaattaccatcccgcttcttactccaactacattctttgtgacgataatttcgcttatcaactcattccaggtgtttgaccaagtgatgattatgacagaaggtggaccaagtggagcgacgatgaccttagtccaaaacatttacaatcatgcatttagatacttcgaaatgggctatgcttccgcgatgagttggatattgtttattgttattttcatcattacaattattcaaaataaacttcaaaaaaggtggtccaattactaatgaaaacagaaaaaagtggttcaccaaaatggcaactaataaaaaatattcttacctatacgattatctgtcttggtggaattatcatgcttatgccgtttgtttggatgatttcaacagcctttaaaacaggtgcggcaaacatggttctaccgccacaatttattcccaaagaaccgacaaccgcaaacttcactcaagtatttgaaatgttcccaatgttaagatttttaatgaactcagttgttgttgccgttgtaacgacacttggtcaaatgctgttttgttcgatggcagcatacgcatttgcgagaatacctttctggggccgcgataagttatttttactttatttagcgacaatgatggttccagctcaagttacgatgattccgcaatttatcttaatgaaacagtttggttggttagattcttatgcagggctgattgtaccagcgttattcagcgttttcggcactttcttattacgccaagctttcatgggaattccaaaagaattagaagaagccgcatttatggatggggcaaatcattttactattttccgaaaagttattttaccacttgcgaaacctacatttgcaacacttggaattttaacttttatgcaatcttggaacagttatttatggccattaatcgtgacaagttcacaagaaatggcaactttacctttaggattatctcttttacaaggtagatatggaacgaattacggcttaatgatggcgggtgtacttattagtgttatcccgattctagcagtgtacctttttgctcaaaaatatttcatccaaggaatggctatgagcggaatgaaagaataaaaaaccaacaaaaaaggagtgttacaaatgaaaaaaggtttattattgttaatggtagttgtactgtctgtatttggtctctcagcttgcggcggtggtagtagcagcggcgataaaacggaaataacgtattatcaattctctgccccagcggatggaaaagcacttgataaaatggtaaaagaatttgaaaagcaaaaccctgatattaaagtaaacgttcaaacaatcgcatttaacgactatttcactaaactacaaacacaaatcgcaggtggcgatgctcctgatgcctttgaacttaactacgaaacattcatgcaatacgctgaaaaaggtgttcttgcagatttaacaagctatatcgaaaaagataaagattttgatccatctactcttaataaacaagcgtatgatgctttcaaatatgacggcaaacaatacggtatggtagaaagtttctccaacgttgtaactatttataataaagacctttttgacaaagccggagttgaatatccaactgctgactggacttggaaagacgaagaagctgcagcgaaaaaattaacagatgctaaaaataaagtttggggaacttcccaaccagtaacaatgaacgaattcttcaaagtagctgcacaaaatggtggttcaattttcgataaagatatgacaaaaactactattaacagccctgaaaacgtagaagcattaactcacttaactaatgaagtaacagaatctaaggttgctccttcaccatctgatttatctggacaattaccagaagacttattcatgaatggtcaaatcgcaatgcttcatacaggtatttggttattcgatatgttccaagatgcaccatttaaatgggacgtacaagtagaagcaggcaataagcaaaaagcgactcacttcttcgctaatggaatcggtgtttctaaagactcagataaaaaagaagcagcgttcaaatttgcttccttcatgagtgcaaataaagaagcggcaaaaattagaattgcaaacaactgggaactaccagcaaccgaaaataaagaaattttacaaccgtatctagatgcgactcctccagataacagagaagcagtttttgagtccttacaatatatggtattacctccagttgtaaaagattggaacaaaattagtgattatacaaactcagaatttgaaaaagtgctaaacggcgaatctacaccagaaaaagcactgaaaaatagtgaagataacatcaacaaaacaatgggctttaaataagtaacgagagtggcagggacgtttgtaagtacctttacaaattagactgccactttagtatatccaagaaaggaaataaaacatgtctaaattcacaaaattaatgcagggttacttgcatttaatagaaggaaaaaatgaaaatatcaagccaatcctactggaaacaaaacctgactttacaactgattcagtacttgaaaccgcgtcttggctatggcttagcagtaaaatcaaccattatgacagagaagaagtagagccagtaattgcatttttagttgaaaactggaatcgtcctgaaaagtctatttggggttcaggtgaaaatgatatttatttagcaactatttcaagtgtatactctgcattattagatgtgaaaaacacttttccaaaaccggagttacaacaaacaattacaattatccgcgactattgttttgataatttattaaaaggtgatagcatccttactggctttaacacgcgaaaagtgtcaaccgaccagcttttatccgtgcttccgtttgggttattttcgcccgaagatcttgtaatggtggcggctgttggcaaaatggaacaacaattagtgcaagatgatggagtactgccttattcaggagctccgaaagttaattcctttgcaacggctctaatggcgctatatttcttagaaaaaagcgaccaagataaagcgttacactatttgaatatggcaatgaaaatggaagataatgatgaacttggcgcgatttttattgaaattaatcaagctttccgggcgatggaaagtgaagtatcagcacatatttcacacgatcctttcgggaatgaaaatcgctatgagcagcagttaactgaacgtacgccacattatcccgaaacagaaatgcatttttcggctgcgtgtgaagtaatttctggaatcgaagcaatccaagttgaacttgtattaaaagaaaaagactggaccattttatgtgagaaaaaagagaaaaatgatgtccaaatctgggaagcactcgttccgccgttagaagaagttggcgaatatacctattatttccgggcgacaatgaaagatcaaaccactttgacatcagatgattatactgtcgaaccaatctggaaacactggtcagaagaagcagcaatttgtgaaacagagcaaggcttaatggttttatttaaagaaaatccatcaagtgtcatcccggtcgagttcgccgtgaaatcagatgaacttgtaatcggattaaaaccttcatttgaagcgagcaatgttaaaacaaaatcatcgggccaattgaaaaaagatgatttagagattatcgtttcaaataatccagtgcgtcttgaggttcactttaaaggcaaattaattttagaatcgcataaaatttacccagcgttacaatggtataccgataaaactggcacgattaacaaagtaaaactgcatttagacgcgccaaaagaagaagagtattacggcttcggtgaacgatacaatgcattaggtcagcgcgggaatgtgcttgattgctttgtttataatcagtaccgcgaccaaggaacaagaacctacatcccgatgccgttttatcatacgaatcgtgattatagtgtgttcgttgataccgctcgttacacaagttttgatttaggtaaccaattagcggacaagcatacaattacagtcgaaataaatggctgcgatacagatatatgtcttttaatgggagatattcgtagtgcagttgctaattatatgaaaaaaactggcaagcctgcaatggttccagtctgggcgcttggaccgtggatgtctagtaataactgggaccgcgaatctgtcgttcgaaatgaagtagaaacaacgcaagagttgcaaattccgtcaacggttgtcgtattagaacaatggagcgatgaagcaacttattatatgttcaatgacgccgaatatgatgaaaaagcaccttcagaagcatattcttatgatgaaattcggttcccttcatggggcagatggccagatccaaaagggatggttgactacatccatgacaacaaaatgaaattaattctttggcaaattccgattcaaaaatacttaaaccgtcaacaacacccactaaaagaccgtgaagaagcctatatgattgaaaaaggatatgtggtgaaaaatccggatggctcgccgtaccgtattccggaaaactggttcaccgaaagcttgataatggatttctccaatgaagaaggaaaaaaatggtggtttgataaacgacaatatttgattgatattggcgttgatggctttaaaacagatggcggcgaattcgtttttggagaaggattgcagtttgctgatggtagacgtggcgatgaaatgcgtaatctttatccaaatgactatgtggaagcttattatcaatttgcgcaacaaaatgatggcatgacatttagtcgcgctggctatacgggcgctcaaaacttcccggctcactgggctggtgatgaaagatcgacttttgacgcttttagaagatcccttattgctggactttcagctggattttctggaattccgttttggagctttgattttgcaggatttaatggtgacattccaactgccgaactatttatccgttctgctgaaatggctactttctgcccaattatgcagtatcatgccgaaagtaaagccgaattcaaccaagaccggacaccgtggaacattgcctcaaggactggtgatgactcggttattccaatataccgtcatttcgcgaatgtaagaatgaacattttaccttatatttataatgaatcgttaaaatgcgtcgaaacaggcttaccgatgatgcgtgcgcttctactggattataaagaagatcctcgtgtttctgatatgtatgaccagtacttatttggggaagcaatgctgattgcaccagtgattgaagacggcgtgcgctccagagaagtttatctgccagaaggaacttggtatgatttctggaacggaacaaaagtgaacggaccaactctacgtaaatgcaaagcggataaagaagaaattccagtattcattcgtggcggtaaagccgtgctatgtaacgttgatgccactttaaaactcggctcatgggttggaaatacagtggaggaatacgatacaccattactcaaagtttatttagacggcgatttcactgaagaaattactgaccatttatcagaaaaatggctagtaaaagttaccgaaaatgcggatgaagtaactatctccgttcaaacaaatacgccagaatacgaagttgaagtaattggaacgaccaaaaaagtacaaataaagaaaggaagataacgatggatgcttccacaagttttgctattttaccatctaacgtaaaacaaaaaacagctttcccgagaaaaataaaccaagtgaaaacagctagttgggcgaataattgcctaactggcacacttgatgtcggtcatttcagttgttattttgttaatgaaaaaattgcacgcgtaacagtgaatccgtttggtgaagcggatctgacaccttctattgcggcaattaacgacacggaaaaacaagctgccgtgttcactgaaacaaatgatcattacgaacttcaatttgcagataaaaaacttatcgtttcaaaaaatcctttccaaattataatgaagcaagctggaaaaaccattttccaaacagaaggactggcaattaatcgtgataaagaacaccaaatttctatccaaagtaagcctggaaccgcgatttttgggctgggtgaaaaaacaggagcgttaaataaagctggttccattattagcatgtggaatacagacgtatacagtccgcataataaagatacagtggaactatatcaatccatcccatttatgattgcagatacggaggaaacaacgtacggcctgttttacgataattcacatcggacagaatttgattttcaaagttttgaagagatgtatacgattttagcagaaggcgggcaagcaaatttatacgttatctttggtgaagatgtcaaagaagttgtcgcaaactacacgaatttaacaggaaaaaccccacttccgccaaaatggtcattaggttatcatcaatcaagatatagctacacatcggaagaagaagtagagcgaattgccaacacttttaaagaaaaagaaattccgctagactgcgtatttatggatatacattatatggatgattttcgggtgttcacttttaacccggatacttttccaaatggaccagaactaattgcgcgtcttcgtgaacaaaacattgatgttgtgccaattgttgatccgggaattaaaaaagatgttaattattccgtatatcaagaagggatcaagcatcattatttctgccgtaaacttgaaggtgcgatttattatggtgatgtttggccaggtgtcagtgctttcccggatttcctaagtacgactgttcaacgctggtggggagatttgcatcagttttacacagacttaggcattcgcgggatttggaatgatatgaatgaaccctctgtatttaatgaaagtaaaacgatggatttagatgtcgtacacaatatggacgggaaaaatgtaacccataaagaagcgcataatttatacggattgtatatgagtaaagcgacttttgaaggattaaaacgccttgtgccaaacgagcgtccgttttcactcactcgtgctggttatgcgggagttcagcgttattcagcagtttggacgggggataatcgtagtcactgggagcatttagaaatgtcgctgccgatgattatgaatttaggtttatctggtgtcgcatttacaggtgcggatgttggtggattttcttctgactgtacgaaagaaatgctaatacgctggacacaagccggcgcgtttttaccatattttagaaaccattgcgtgcaagatagcatttatcaagaaccatgggcatttgggctagacgcggagaaaattgtgaagaaatatattgaaatgcgctacacctttttaccgtatatttatacagaattccaaaaaactgcggagaatggcttgccgatagttagaccactttatatggagtttaaagaggaacgcgatttaattcaagtgaacgatcaatttatgctaggtgaaaatatcctcgttgcgccaatcgttcgcgaaggccaagtgaagcgtttagttcgcttaccaaaagggacttggtttaattattggacgaaagagcaagtagaaggcggcgactatattatcgctgacgctccgattgacgttatgccaatttatattaaagcagggacgattttaccattaggtaccagcgttcaaaatacaaaagaagcacaagatttggcattagaaatatacttagataacgacgaggcaagcggatacgtgtataatgatgatggcaaaagctaccaatacgaaagcggaaaaatatccaaaacagctttcactgctactttcaaaaacggcgaagtacagataaatggtgaccatcacggcgaagaaaacttacaacaaaaagttactactatagaagttttcggtaaaaaaatagacaaaattacaagggcgggaatttaatcgatgaaagaaaaagactggtggaaaaaaagcgtagtttaccaaatctatccaaagagtttcaatgactcaaatggcgatggagtcggtgatattcaagggattattgagaaattagattatttaaaagagcttggcgtagacgttatctggctatctccggtgtatgattcgccgcaagatgacaatggatacgatattcgcgattaccaaaaaatttacgaagaatatggcgatatggcaacgtttgacaatctgttacaaggtttacatgatcgtgatatgaaactcgtaatggatttagttgttaaccacacttccgacgaacataaatggtttgaagaatctcggaaatccaaagacaacccttatcgtgattactatttctggcgtgaagaaaatgaaatcaacaactggggctcgattttcagtggtccagcatgggaattggacgagaaaacaggcgagtactacttacaccttttctctaaaaaacaaccagatttaaactgggaaaatcctaaattacgccaagatgtatataatatgatgaaattctggcttgataaaggtatcgatgggttccgcatggacgtaattaacttcatttccaaaaacacagctttcccagatggaccagttgcagaaggtcaaatttacggagatgcaggtaacgatttttgcaatggaccacgtattcatgagttcttgcaagagatgaaccaagaagtaacttccaaatatgatgtaatgactgttggcgaaatgccaggtgctagcacaactgacgcgcaaatttatacaaatccagcaaataatgaagtggatatgatttttacatttgaacatatgaacctagactccgatggtgataacaaatgggatctaaaaccaatttatttaccagatttaaaagaaaatatgtccgagtggcaagtagcgcttcaagaaaacggctggaacagtttatattggaacaatcatgaccaaccacgtattgtttctcgttttgggaatgataatcgtttccgcgttcgttcggcgaaaatgcttgcaacatgtctgcacatgatgaaaggaacaccgtacatttatcaaggtgaagaaatcgggatgactaatgttcattttgaaacgctggaagaatatcgagatatagaaacattaaacatgtataaagaacgtaaagagcaaggacacagccacgaaagcattatgcagtctatttacactaaaggacgcgacaacgcaagaacaccataccagtgggataatagcgaaaatgctggcttcacaaccggaacgccgtggcttaaagttaacccgcgttatacagaaatcaacaacgaagaagcgctgaaaaatccagattcgattttctactactaccaaaacctaattaagttacgcaaaacaacagaaatcatcacaactggtaattatcgcctgttgttaccaaaagatgaagcgattttcgcatatgaacgttatacagaaaatgaaaaattagtcgttttatgtaatttcacagaagaagagcaagttcttaccgatgaaaatattttaaacgacatcaaaaaaggctccgtacttgcaaataatgttcctgatattatagaaggaactttacgaccatacgaagcgatagtttatcaaattaaataaacagaccagaaaagccacttgcgttttaagtggctttttttgtttgcatcaaaaattatagtataatagaaggaaatgattttattaggaggaattctcgtgctatttgatacgcatgtacacctcaatgacgaggcttttgatgatgatatagaagaagtaataaaacgcgcaaaagaaaacgacgtgacccgtatggccgttgtaggctttaataaagaaacaattgaccgggcacttaaattagccgataaatatgattttatctatctaatcgtcggctggcatcctacagacgctattaccttcacagacgaagatttagaatggttacgcgatttagcccttacacacccgaaagtagttgctttgggcgaaatgggcttggattatcactgggatacttcaccaaaagaaacccaatttgaagtttttagaaagcaaatacgtttagctaaagaagtgaatttaccgatagtcattcataaccgcgaagccacagaagatgtagttcgcattttgcaagaagaacatgccgaagaaataggcggaattatgcattgttttggcgaaacagtcgaagtaatggaagcatgtttagcaatgaatttttatatttcattcggcggaacagtcacttttaaaaacgcaaaattacctaaaattgcagcccaagctataccaattgaccgtttattaatagaaactgacgccccgtatctcgctccaactccaaatcgtggaaaaagaaatgaaccaggatacgtcaagttagttgccgaaaaaatcgcggaactgaaagaaatgaaatatagcgaaatcgccacgcactcaacagataacgcgaaaaggctttttaaaattaaagactgattgtaatataactgtaatataaggccgagtctgtaacccaatcttaagcttctagaagataaaaatcactacttggacaaaaacccttatttcatgcctacgaccagagacgtagaaaaatgacacatttctgttacatttgacactttttaaaaattttatatttgaaaatggctttataccaacgtttatgctttaagtttgcgaaggtgtgaacaaactatagaaaaaattgacagttctttagtcccctgtatataatcactagcgaagtagaaaggggagaaatacatgaccatggaaaacagcagtaacgtagcccaatcatcaaaatggaaattaccaatcatgattgcaggatttgttattgtagtagcattggttttttatttcgttttcgaaggaactaaaaacgatatcactatagtaaacgctggtgaaaaaattgaatcaagaacacatgctaaaacagtttctgaagcattagatgaagcaggaattaaagtaagtgcacaagatgaaatcgcgccaggaaaaaatgcggaaattaaagacggtatggaaattaaatatcttccagctcgtcaagttacaataaatgataatggtacaaagaaaaacgtttggagcacaaaaacaaacgtagcagacttgcttaaagacgaaaatattactactcgtccacaagatgttttaaatgttgcattagatactaaattaaaaaatggcctagaggttaacattaaccgtgccattgaactttccttacaaaacggaactaaaaaagatacagtatggacaactaagaaaaaagttagtgatttactaacagagaaaaacatcaaacttgataaagatgaccgcgtgtcacctgctaaagacagtaacttaaaggaaaaaatgaccgtacaagttacatacgtcaattcaaaagcagaaaagaaaaatgaacaaatcaaatttgaaacagtttataaagaagacgatagcctaaataaaggcgttgaaaaagtcgttcaagaaggtaaaaatggcgaaaaagttgtcgagtataatgtaacttttgaaaatgacaaagaaacaaaacgcgatgtcattaaagaaaacgttacttctgaaaagacagataaagtagttgtacgtggcacaaaagaaaaagcgaaagtatcacaaatcgcaaatgcttcatcttcaaaagcaaccacttctaacgcttcatcagctccatcaggtggtaaaacttatcgtatggaatcaacagcatattcaggtggcggtatgacagcttatggtattaacctaagtgctaatcctggaatgaaagtaatcgcagttgatccaaacgttatcccactaggttctaaagtatgggttgaaggttacggcgaagcaatcgctggagacactggcggcgttatcaaaggaaatatcgttgacgtttatttcccaaatgaaagccaatgctactcatggggtagaagaatggttactgtaaaagtgttaaactaatttcgtataaaaacgaggctgactcatagggcctcgttttttctttgcccaaaatgtggtatgatgtatttacttattttataaaaaaggatgttatcaatatgagcgggaagcctgtaatacatgagtttattgttgtagaaggacgtgacgatacaactgcaatcaatcgttcagttattgcagatactatcgaaaccaatggctcagcactttcacaagaaacaattgaaaagattagacacgctcaagaactgcggggagtcattatttttacggatccagatttcccaggcgaaaaaattagaaaacaaattgattctgcggtaccaggatgtaaacatgcatttattaatcggcaagacgctctaccaaaagcaggacgtggactcggtgtagaacatgcgagcagcgcccatattagagaagctttagagcactttcatacaagcagcgtaccaactgaaaaacaatatatctccaaagaaaccctgattcacttaggccttctaggtggaacaggagcaaaagaacgtagagaaaaactcggcaacattttaaaaatcggctatacgaatggaaaacaattgcaaacaaggttggaatcatttgccattagtgaagaacgattagtagccgcgtgccaaacgattatgcaggaggaagaaaatgagtaaagatattgcaactcccggaagaactacggaaattttaaaaaaatatggtttcttatttaaaaaaagtctcggtcaaaattttctcatcgatagcaatattttgacacggattaccgatacagctgaaattacgaaagaaacgaatgtcatcgaaatcggaccaggaatcggcgctctaactgagcagttggccaaaacagcaaatgaagtcgttgcgttcgaaattgatcaacgtttgttaccgattctggatgacacacttagtaactacgataatgtgcgcgttgtccataatgatgtgctcaaagccgatgttgctgaagtgatcactgaacaatttgcgaaacctgaactgcctcttaagattgtggcaaacctgccttattatgtaactaccccgattattttgaaattacttcatgataatatcccagcagactcaatgacttttatgttgcaaaaagaagttgctgaccgaattagcgcagttccaagcacaaagagttacggtagcttaaccattgctatccaattttacatggaagcagaactagcatttattgttccaaaaactgtctttatgccgcaacctaatgtcgattctgccgttattcatctaaaacgccgtaaagaaccattagcaaaagtaaacgacgaagagtttttctttgaagtaacaagagcatcttttgctcaaagaagaaaaacgctatggaataatttagcatccaagttcccggccttaaaaccgcgtaaagaagagttgatagaaggtttaaatgcaattggtatagacttaattagacgcggagaaacgcttgatataccagaattcgctaaattaagtaactttcttgctgatttcctcgcagaaaaataatttttttcaaaaagagcgctttcttagttgacagctagcccttccaactgttaaaatatttggttattgatttcgaagcccatctgtgctataattgatattagtgaggtggaaaataaatgccaaaaaccattgcaagcattaagacgaatttagattctagattaggtaaagcattgacattgaaagcaaacggcggtcgtaagaaaacgattgaacgttgcggtatcctagctgaaacatatccatccgttttcattgtggagcttgatcaagatgaaaacaactttgaaagagtatcctatagttatacggatatcttaacagacgcagtagaacttgtatttacagatgataataaagaattagctttataatgaagctgaagtaaccgaaccgtttagtatggttcggtttttgctttacatagaaacccttttggaccgctagctacatattttttctttcatatgatagaatagaaaaagagattttgaacgcggaggccaagaaaaatgaaaataagcataacagcaccagctaaaattaatctttcgcttgatgcgctatacaaacgtgaagatggctatcatgaagtggaaatggtgatgacaacaatagatcttgctgacagattattcttagaacgcttagacgaggataagattgtgctagatgtaaaagcgcattttattccggaagatcgtcgtaatttgatttatcaagcggctctcctcttaaaaaatcgttttaacataaaaatgggagtgcgcatcacaattgataagcacattccagtttcagcgggattagctggtgggagttcggatgctgctgctgcgctcaaaggtttaaatatcatttgggagctcggtctttcgatagaagaattagcagaaataagttccgaaatcggctctgacatagctttttgcgtatatggtggaactgctcttgcgactggacgtggagaaaaaatctctgcattgcctaatatgcctggttgttggatagtactagctaaacctagcattagcgtgtcgacaccaacgatttataaagaattacaagtagataatgtagaacaccctaacacagaaaaaatgattgaatctatcaaaaatggtgatttagacggaatttttgcttcaacaggaaacgtattagagtctgtaacgctagaaaaaaatccacaagttaagcgaattaaggaccggatgttagcatttggtgctgaggcggctctaatgagtggtagcggcccgacagtgtttgcgctcatcaaacagtattcaagagcgaaacgtgtctataatggcttgcgtggcttttgtgaggaagtttatatggttagaccgtggagtgaaagcgaaaacgatacgattaattaatggatgagaggggtcagacaaatgaaaattatttttaatgcagatgactttggaattagcccaggagcagtttatggtattttagaatcgtatagacgaggtgttgtaaaatcaactacacttcttgctaacagcccggcttttgatttggctgtagaagtagcgaaagaaaatcctggactggatattggtgctcatttgacccttacattcggttatccgttacttcaagggttagaaacattaacggacgataacgggcgtttccgcaaaaactatacggcgcttgagtctggtttagctaacgtggatatggaagaagtggagcgcgaattaacagcacaaattgagaagattttgggcgcaggaatcactatttcgcactttgatacacatcattccatcgaaccgttaatttatccagttcaacataagttggcagaaaaatatggtgtaagtattagacgtcattcagatgtttctgattttggcgccattaaaacaccagatttattcgatacatctttctatgcagatggcgtatcttttgaaacaattaaaaaaatagtacaagagcatatcggaacaaacgatgtcgtggaagtgatgactcatccagcgtatatcgatgaaacgctgcgagaaatatccagttatgtagagccgcgcatcaaagaagtttccattctaacttcaagagaattacaagcatatttaggccaacaagaagtagaaattattagtttccgtgatttataaaagcattggcctgtcaaaggatgtttatttgacaggctttttaatactttaaaagaataaaagttgtcaattttatagaaaacgttttataatagagaaaatacggacaaaatacgtgaaatagctttttaatatacggaattttatcaaagggagagagattatgaagattcgtcgcagtgaacgattaattgatatgacgcagtttctattatcgcatccgcgaaagttagtgccgcttacgatgtttgctgaacgttatggctcagctaagtcttctattagtgaagatttggttatcataaagaaaacatttgaagatagagggattgggacacttgaaactgttccgggtgctgctggtggagtacagtatatttcaatagcgggaaatgacgatgtgcttgattttgtacatacgttgtgtaaccgaatcgcggaacctaaccgtctacttccaggagggtatttgtacctttcagacctacttggggagccagtgacgcttaaagcaattggtaaaattttagctaccaaatttaacaatcaaaaaatagatgcaattatgactgtggcaacaaaagggattcctattgcacaagctgttgctgagcatttgagtgtacctttcgttatcgtgcgccgagatagtaaggttactgaaggttctacagtgagcattaactatgtttcaggctcatctaaacgaatcgaaaaaatggaactatccaaacgaagcttagcagaaggatctaacgtagtaatcgtggatgactttatgaaagctggcggtacgattaatgggatgaagaatttactagaagaattcaatgcgcatttagtaggtattggcgttctagttgaatctgaatatgcagaggaacgtttagtcgatgattacgtttcacttgtcaaaattaaaaacgtcaacatgaaagaaaaacaaattgaagtagttgacggaaattactttaataactaattgataaaccctagaagaattttctagggttttttattttcgttaagtgatactaaaaacaaatcagacttgcgatgtacttcactcagttaacttttgtggtagaatgaaacctatcattgctacataaaatacagggcttctattcataagaagcagaaggagaacattcatgaaaaaatgggttaaatggttaattgttatcgtaattatcgcagtggttgccgcgggtgcggttttcttgctgtcaaaaaatagcggttccgtaacacaagaaaaattagttacagccaaagtgaaacaaggggatatgaaaatcaacgctacaggaacaggtgcgatttcgccgcaaaacacacaagttccagattatgatgagcttcaactagtagcgcaaatggatgaactggatattcctaacatcaagaaagaccaagaagttaaaatcacagtaacagcacttcctgacaaaacatacacaggaaaagtaaaagaaattgcagaacaaggtcaagtccaaaatggcgtgtctagtttctctgtgattatttctcttgataaaacagacgatttgaaggccggtatgactgctgatgcctcaattttagtaaaagagaaaaaagatgcactttacgtaccgattgaagctgttcaaaaagacagcgatgataaatattatgtactagttccagaagaacaagaaaatggcaaaacgaaaaaagtgaagaaatttgtagaaactggtcttcacaacgaagataatatcgaaatcactaacggcgttaaaaaagaccaaaaagtaatccttcctacacaagaaacttccacagttccaggtgctcctagctaagttttttgtatatacgtattagataaatagtatgaaggagggataaacatgccaaaaccgctaattgacatgaaaaatttaacgaaaacatatacactaggcggagaaacgtttaaagcattagacgatgttacttttaccgttgaaaaaggtgagtttttatccatcgttggtccatctggatccggtaaatcaactttaatgaatatgattggttgtttggatgttccagatgaaggcagctatcaccttgataatgtagatgtatttaaattaagtgacaacaaattatccgaaattagaaataagaaaatcggtttcatttttcagcagtttaacttgcttcctaaattatctgcttttgaaaatatagaattacctttaatttatgctgggctaagtgtttcagcacgcgaaaaagctgcaatcgaatgcttagaaaaagttggtttactagaaaaacgaaaaaacttaccaactcaactatcaggcggacagcaacaacgtgtagctattgcgcgcgcacttgccggtaatccacaaattcttttagcagatgagccaacaggagctcttgattcaaaaacaggtaaagaagtaatgggtatcttacaggaattaaacaaagcgggaaataccattgtaatgattacccatgatccaaccatcgcttcttacggaacaagaagtattcgtattcaagatggtaagctattccacgaggaggcgaaaaaagcatgaacgttctccaaagtatgaaaatggcgtggaaacaattaaaagcaagtaaacttagatcatttttaacgatgttgggtattattattggggttgcatctgttattctgttagtctcgctaggtaatggtgtaacgaaagaagtagacgaccaaatgggcgatttaggctccaatttaatcacagtagttaatagttcggtaaatccaaatgacaagtatacttatgatgaagtaatgaaatatcaaaatatcgatggcgtaaaaagtgtatctccagagctatctggtcaagttaatgcaacatacgattataaaagttcaagcaataaagtcattgggacgaatgaccagtacaaagcggctcgtagcttagaaatgaaagaggggcgcttcctattaccgattgatacggaatatggccagaaagtagctgtaataggctctacggtagccagtgatctatttggtttcggtaatccaatcggtgaaacaattagattgaatggcatgccttacaaagtagttggcgttcttaaagaaaaaggcgcttctatgatgggctcgagtgacgaccaaatctttatcccgatttcttcggctcaacgattactaaaagatacaaatgtccgtactatctacgtagaaacaaaatctgctgaagatgttgattttgtagtaaatacattagaatctcgcctcgctattaagtttggcaatgaaaaagaacaagaagaaaatgcttcttctgctcaaatgggaccatcttatcaagtcattaatcaacaagaaattcttaacgcgttcaatacaattagcactacgttaactactgcgcttggtgcaattgcggccatttcgcttgtagtaggtgggattggaattatgaatattatgcttgtttctgttagtgaaagaacgagagaaataggtataagaaaagcgttaggagctaaaaaacgagcaattctgctacaattcctaatagaatctattgttattagtgtttgcggcgggattattggaattcttatcggcgtttcaggcgcattgatattcggctcagttgctggcatatcgtcaggaataacagctggaaccattatcttctcgtttgtgttctccttatgcatcggcgtaatatttggtatcgcccctgcgaataaagcatctaaattaagaccaatcgacgctttaagatcagagtaacgaaaaaagaaatccggaattgtgtatttcggatttctttttttaactaaaattagtgctttaagttgtcttgtcatctatatttaatgtttttgtcacaattaagcgttttcaaatcggggtttagttcttttttttactagaaaaaagaaaaaagttcttgaatcatgcattagaataggattttcagggtatacactatttattgacttattcagatgagatgaatagagacatctaaaattgtaaatatatgatctcagaaaaatcataaattctctgtaaattgtatacaattatttttgagaaatcataattttaacaccattttactagcgttcttgcccataaaatagtatgatgattacatcttgatactgtgctagcaatggtttcggcgtttttgttactttagtgataaaaattgtatacaaaacaaaaacttgaagaaacaatctgaaaatgtcaatgattttcaaagaaaaactattttttttggtttacaattcacaaagttgtcaaatttagttttttttattattatgttcatagggaagaattttacgttaatattgcttgcttataaaagtgattttttctatgggggaatttttctcgagtgtgtacttatgttgcatgtgagcattgtttactagcagcgcaactagaataaggtggtgaagataatggagattacagatgtgagattacgacgtgttgagacagatgggagaatgaaagctatttcttcaattacgattgatggtgagtttgttattcacgacattcgtgtcatcgatggcaacgagggtttattcgtagctatgcctagtaaacgtacgccggatggtgagtttagagatattgctcatccgattaactcaggcacccgtgcaaaaattcaagaagccgttttagctgcttatgaagtagcggacgagccagcagtaaacgaagaaagttctgcagacgaaagtgttgtagaagaaaactaaaaaatcctcggttaggaagaacgttgttgggaacagctgggggatacttacctgagattttagctgggataagcagattctttttgagagaggcaaatgggataaggagtgactaataatgcaagtaacagatgtgagattacgtcgtgtagaaactgatggaagaatgagagcgattgcttcaatcactttagatgaggaatttgtagttcatgatattcgcgttattgatgggaataacggattattcgtagctatgccaagtaaacgtggtgttgacggtgaattccgtgacatcgctcacccaattaattccgatactcgtgcaaaaattcaagaagttgttttagctgaatatgagcgcgttggtgaagaagaagcaactgcggtaacagaagaagaatctgaatccgtttctgctgaataattaaaaaaatttccaagggctagcttagtgctagccctttttgtgtagaataactatgaaaaaaatcataaatagccttggtcttctattttggctatggtataattaaaagcagattgtaaaaacagggaggagattttaagtgatgttgcaaaaacagatgtattcaagcaaacatttttgtagcacaagtgtaaaatcctcttttagtaagcaaataaataaccacactgtatctttcggaattttcaaacaaataaaactttaaatttcctctttacctaaaaaacgtaggtaggggtttttatttgggcgcattcttgaaaaaaagcaaattttacgttatcattcatagtggatgaatagtgaatattggaggttctatataatgtcaaaacgatatgctgtagtgcttgctgctggccaaggcacacggatgaaatcaaaattatacaaagtattacatcctgtttgtggaaaaccaatggtcgaacatgtagtagaccaaatttcgacacttgatgttgataaagtggttacaattgtaggtcatggtgctgagaaagtgcaagagcatttagcaggtaagagcgaattcgtgaaacaagatgaacaacttggaacggcgcatgcagtacttcaagcgaaatcagaacttgcaggaaaagatggtgtgacgttagttgtttgtggagatacacctttaatcgaagctagcacaatggaagctttattaaaatatcaccatgaaaaaagagcaaaagcaactattcttacaaccgttattgaagaccctacaggatacggacgtattatccgtgatgatcttggtattgtcgaaaaaatcgttgaacataaagatgcgacagaaaaagaacaacgcatttcagaaattaacaccggcacatattgctttgataataaagctctttttgaagctttggaaaatgtctctaatgataatgtgcaaggcgaatattacttaccagatgttattaaaattttaaaagatgcggacgaagttgttgcagcttacaaaatggagtccttcgaagagtcacttggagtaaatgatcgaattgctttagctgaagcttccaaattaatgcaacgtcgaatcaatgagaatcatatgcgtaatggagtaacacttgttaatccggaaaacacgtatattgatatagatgtaaaaataggtcaagatacagttattgagccaggagtaatgcttcgtggcaagactgtaattggtgatgattgcgtggtaacgagcggttcagaaatcgtaagtagtgtaatcggtgaacgcgtgcacgtcagaaattcctcgatttttgaaagtaaagtcggtgatgacgttcaaatcggaccatacgctcacttgagaccagaatctgatattcataatcatgtgaaaatcggaaattacgtcgaaaccaaaaaagcagttgtcggtgaaggaactaaattacctcatttcatttacatgggagatgcggaaattggtaaaaacgtcaatgttggttgcggaagtattgctgttaattacgatggcaaaaataaagcaaaaaccatcattggtgataatgtctttgttggatgtaattcgaatttgattgcacctgtcaaagtgggagatcgtgctttcatagcagcgggctccacaattacaaaagatgttcctgaagatgcgttaggtattgctcgcgcgaaacaagataacaaacttggctacgcgaaacatttgaatcacggtaaataatttcctattggaaagtttaaaattttaataaaaaatagtggaggctgattatgtcaaacgagtattttgatccaaagttgaagattttctcgctaaattctaatcgtgaactagctgaagagattgcgaaagaagtaggtattgagttagggaaatcaagcgttactcattttagtgatggagaaatccaaattaacattgaagaaagtatccgtggttgtcatgtatatgttattcaatcaacgagtaatcctgtaaaccagaatttaatggaacttttgatcatgattgatgcgttgaaacgcgcttccgcagcaacaattaatattgttatgccttactatggttatgcacgtcaagaccgtaaagcaagaagtcgtgaaccaatcacagcgaaattagtagcaaacttaatcgaaactgctggtgcaactagaatgattacacttgatatgcatgcaccgcaaatccaaggtttctttgatattccaattgaccatttgaatgcagttcgccttctaagtgactatttcagcgaacgtcatttaggtgatgatttagttgtagtttcacctgaccacggcggggttacacgtgctcgtaaaatggctgaccgtttgaaagcgccgattgctatcattgataagcgtcgtccgcgtccaaacgtagctgaagtaatgaacatcgttggaaatgttgaaggaaaagtttgtattatcattgacgacattatcgacacagctggaacaatcacgcttgctgcaaaagcattacgtgaagctggcgcgacaaaagtatacgcatgttgttcgcacccagttctttctggcccagcaatgaaacgtattgaagattcaccaatcgaaaaactagttgtaacaaactccatcgctcttccagaagaaaaatggatcgataaaatggagcaactttctgtagcagctcttcttggtgaagcgatcgttcgcgttcatgaaaatgcttctgtaagttctttatttgaataaaatttaaaactaaaaaggatttttctgtgattattcatagagaaatccttttttaatttaaaatcgtgtttttgattaaaccagttaataatcaagacgggaaatatacactttatataaaatctcccttttgaaagtctatttttatctttgctttaaatgagggtgtgataactttaattcgggataaatggttggggaaagcaggagttagagcagttttgaactcgttgtttgagatgattattacaaattttgcacaggagatttggtggataaagttcacagaatgtctattgtaatggctctgtttgttaggtactcttaaatagtacaaaagactaattaggaggaacagctatgaaattgctaaaaaagggaacaacagttttatttgtaatgattatggcagttatgttagtagcatgtggggataaggaagaaagtaagaccttttcactttctcaaaatggtgtggattcgaaattaacttacacttataaaggggacaaagttactaagcaaactgctgaaaacacaatgttatatacttcaatgggcattaaaacaaaagaagaagcagaaaaaatgcttaaagaaacaagtgagaaattccaaaacattgaaggattgaaagaaagcattgaatataaagatgacaaagctattgaaacattagaagtagattacacgaaaatatcttctgaagaccttaagaaattacctggtatggcatcaaccggagatgtgtctaaagggattagtatgaaagaatctgaaaaaatgttgaaatctcaaggctttaaagaagtcgaaaaataagctagtagtaaaaaagaagtatccgaccagtcggatacttctttttgcttaataatcttgcgcttcaataacaacggcagtaccggaagcagtaaccattaacatgccattatctgcaccgagcacttcataatcaatgtcaacaccaataacggcatttgcaccaatatctttcgcgcgttgttccatttcgcgaattgcttcctcgcgagcgttaataagttcatcttcatagccttgcgaacggcccccgaagaaatttctaagtccggctccgatgtctttcataaaattaacaccagtaatgacttcgccgaaaacgatttttttatactcgataatttgtttgccttcaatatttggtgaggttgttacaatcatggttttatccctccagttttcttttatcatacctcttagtactttttctagtcaaaggatatctgcttaatttacccgatttcgcgctttttcaatataagaaattgcatctggaactttacaagaagtttttcctaggtttacgtgaacttttccaactgattttgcggcttcaattgctttttcatgcaaatcgtctttgtaaattccgcaagtgataataaagccgttcattgaatagcgagttctatttgattcggattgtaatgtttctttcgcgcgttggagtaatgcctctgcttcaggcaagttgttaatatgctcgctataaatctgccagcccatggatttagttaaatcatactcgctctcaatccacttctttgcaaaaaggagtgcatcatcacgtttgcttacgatcgatgctagtccaaaggtgagttgtgaccatgtttcgcgaaaagctacattccatttttcgatttgctcggtagttactttgtttggattgaccgcaagtaaaccaagataaattaagtcgctgttatttgattcgattagctctacggccagttcatggtttttagttaatttttcacggcggataattttctttaagtctccaatttttagtccgtaaagatctaatgaatccgggcaaccgtgattacgaaaaattttaatcgtattggggttttctaaggcttgtagctcggtgtcaagttggtcaaaagtaatcatacgcgtcactcctctcgaataaattaagtataacaaaaaagcatgcaaaatcgcatgcttttaggaattaagaatattagtcgatttgtttcattgcatcgtctagaacttttttaagtgtatccgcggagtttttcatttgttctttttctttgtcgtttaagttcatttcgacaatgtggcgaactccttggcggttaactactgctggtgcgccgatgtaaatatcattcataccatagtggccatctaaataaacggaaagtggtaaaatcgcattttcgttatttaggatcgcttttgtaatacgagcaagagccgcagcaacgccgtagaatgtagcgccttttttattgataatttcataagctgcatcacgaacgcttacgaaaatagtatccattgcaccttgttcgtcttcgttaatccattcagtgattggaaggccaccaactgttgtatggctccatgctgggaattgtgtgtcgccgtgttcgccgaggatataaccatggacgttacgagcatccacttttaagtaatcggcaatcgacatacggaaacgtgctgtatcaaggcttgttccagaaccgataacgcgttcttttggaagacctgagaatttccatgtagcgtaagttaagatgtctactgggttagaagcgattaagaagataccgtcaaatccgctcgccataacttcatccacaatgcctttcatgattttgatattgcggtttactaggtctaaacgagtttcaccaggtttttgtgcagtcccagcagtgacaacaactaagtctgcatcgtggcagtcgctataatttgctgagtagattttcttcggtgtggaaaatggaacggcgtggcttaaatccattgcatccccgattggtctgtctttatctatgtcaataatgccgaattcttgtccgatacttaagtttacacaagcaaatgcataactagaaccaactgctccgtcgccaactaaaataattttttgatgatctttcatttcgaattcctcctataaaaaatctatttactagtacagtataacatgaatttttcatttgtgaagcattgaacgtcctgaatttaaaaaagttgttataataaatttatgaaaacgctatagtacagtttgaaagcgtctgcattaggagcggttcgctattttctgtttaccttttattgagaattataaaccttttaaagagaaataaggcttttgctttgttttgctatttttctaaagggtagatataatatagatgtaccaaaattgaatgagtggagtgattttttatggcaacaacattagaggtccagaaaagagaaacaacgcaacattcagaagtaacgagattgcgtagtgaaggaaaagtgcctggaattatttatggttacaaatcggaaaatgttccagtttccgttgattctttggaattaatcaaagcagttcgtgacaatggtcgaaacgccgtattttcagttactgtagacggcaagaaattaaacgttttattacatgaatatcaagtggatccgttaaaagacgtattagtgcacgttgatttactagctgttgatatgaatgaagaagttgagactgatgttcgcgtggtattagttggtgatgctccaggcgttaaagctggcggtgtacttcaacaaattatccatgatgtaaaagtttcagcaacaccagaaaaattaccagaaacaattgaattagacatttcttcattagaaatcggtgatgttttaactacaaacgaccttcctgaaaacaaagattatgtcgtgcaagcagaggaagaagaaacagttgttaccgtttctgctccacgtgctgaagaagaaccaacgactacggaagcaccagaaccagaagctgtacatggtaatgatgaagaaccagttgaataattttttataaataaggatggaagattcgcatttgtttgcgatatcttccatttttttttgttataatagctgtatgaaggaggcggtttcatgcttgataaatcagtaccacatatttctgttgcaatggtaaatcatagtgctaccaaatatcctgagttcagtttgccagaaggttattcgtttcgtttttatagagatgggatggaggaagactggtgcagattgcaactagaaactggccaagttccatcgatggaaagtattcggatgcgttttaatacagaatttggaaatgaaaaagaaaaattagccaagcgttgtgtctttgtagaagccccagacggcgaaattatcgggaccgcaatgctttgggatggaaatacatttggcgagatggcaagccgcattcattgggtcgctgtactcgactcgcacggcggaaaaggtatcgccaaagccttgttatctaaaattctcggcttaaacaaaagtgatttcgtctatctaacaacgcagacaggaagttaccaagctatttatctttatcaaaaatttggctttgaaaaattcgtggatgaaactcctgaaaattggaaaacagaaaactttcaagcagaaaacgaaaaagcttggcaaataattgaaaataaaattgcggaatacaaggcttagttggaaaactttcaaccaatggaaatccgtgttataatcaaaaaaacatcgaaacaaaaaccagttcattcgtgaagtggtttagttcatgtaaggagaagcttttatgaaattaatcgcaggactcggaaatccgggcaaaaaatatgaacgtacccggcataatgtcggttttatggtagtagatgagctgagttttcgccatcaaaccccttggaaaaaatcaaaatttaacggtatggtaagtgaaattaatgtgggcggcgagaaaatgattctagttaaaccactgactttcatgaacgcttctggtgagtgcattcgtccgctaatggattactacaatatccagatagaagacgttctaattgtatatgatgacttagatttaccagttgggaaaatcagattgcgccaaaaaggtagcgcaggtggtcataatgggatgaaatcaattattcaacacgttaagacgcaagagtttaatcgtatccgtgtgggtgtcagtcgtcctttaaaaggggaagtcatccattacgtattaggagattttccaaaagcggaacaacctgatattatcgcagcaattcaaaaaagcgcagatgctattgaagattttgcgcaaacaccatttattgaagtaatgaataagtataattaaaaaatagactatccgagaggcgtggcaatgcttttgccacgtatttcggtctttcttctagcgtgtgatttaatcttgcattgcatagaatgaattttctgacaaaaaaggagctgttttcccttgaaaggattacaacaattaatatatgaacaaaaagatattcgcgcggtcttaaacgcgcttgatgaaaaagaaaaatcacaacttgtcacagggctgacaggttcttcgcgcgcgctttttgcgagtgtggtggaaggcgcatcaaagcgaccagttgtgtttgtaacgcataatttgtaccatgcgcaaaaattatacgacgatttactttctttaatagatgtggatagattgtttttatatccagcagatgaattaatttcttcagagttaagtatttctagtccagaattgcgtggtcaacgtgttgaggcgctcgacttcttattatctggcaaaccaggaattgtaattgttccagttgcagggcttagaaaaatgcttccacctgtctcgttatggaaacattttaatatatctatcgttgaaggcgaagaaatcgatccagatgtattgcgccaaaaattagtcactatgggttacacgatgagtggaatggtgaacaccccaggagaattcagtgtccgcgggggcatcattgatatttatccgattacagaagaatttccgattagaatagaacttttcgataccgaagtggattctcttcgtttctttgatgtggagacacagcgttcgacaacacgtgttgaagaattccgtttgcttcccgcgacagaaatcatcttagatcaaagctattatcctgacattgttacccgtttagaaaagaaaatgacgcttacgttaaatgaactaaaagaaaacgaagataaacaagcactcgttgaaaatttagaagaagatttagaaatgttgcgttctggcgtaaaaccagacatgttctttaaatatattggtttagcttatccagatccagcttcacttttcgattatttgccaaaaaacactgctatattactcgatgaatttgcgcggattttagaaaccgaagaaagtttggagcgggaagaagctgagtggcagaccgaaacattaagtcgcatggaaacagttcgcgacgttcaagtaagccattcattcaaaaaattattagatgaaaaccattcgcccaaaatatacttaacgcttttccaaaaacaaatggcaagtatgcgcgtgtcaaaaacgaccaatatcgtttataaacaaatgcagcaatttcatggccaaatgaatgttttaaaaacagaaatagaaagttggcataaaaataattatgccgtagttattttagcgccgaacttagaacgtgccgaaaaaatgcaacaaactttagcggattacgatatggaaagcacgattttgaaaaaagaatcggatgtaccaaaatatggtatggttcaatttgtcatcggaacgttccaaaacggttttgaacttccgcttgcaaaagtagccattattagtgaaactgaactttttaataaaaaaatcaaaaaggtgaaaaaacgtcaaaaactttctaatgcagaacgaatacaaagttattctgaattaaaagttggcgactatgtggttcacgttaatcatggtatcgcccgttatgtcgggatggaaacactagatattaacggcgtgcacaaagattatttgctgctagtttaccaaggtgaggataaacttttcattccagtagatcaacttgatttagttcaaaaatatgttggtgcagaagggaaatccccaaggttaaacaaactaggtggtgctgaatggaagcgtgtgaagaagaaagtacaagcttccgtccaagatattgccgacgatttaatcaaattatatgccgaacgagaagctgaaaaaggttatgcatttagtgcggatgacgaaatgcagcgcgaatttgaagaagcctttccgtaccaagaaactgacgaccaattgcgctcgatttcagaaatcaaaaaagacatggaacgtccgcgcccaatggatcgacttttggtgggggatgttggttacgggaaaaccgaagtggctttaagagctgctttcaaagcaattatggatggcaagcaagttgcgttcttagtcccaacgactattttggcgcaacaacattatgaaacaatgaaagaaaggttccaaggtttcccaatcgaaatcggacttttaagccgtttccgtacgaaaaaacaacaaacagagacgttaaaaggaatgaaaaatggcacagttgatattgtggtcggaacgcaccgcctattatcaaaagacgttgagtatcaagatttaggcttgcttgtagtcgacgaagaacaacgatttggcgtaactcacaaagaaaaaatcaaacaaatgcgatcaaaaatagatgtgctaactcttactgcaacaccaattccgagaacacttcacatgtctatgctcggcgttcgtgacttatctgttatcgaaacgcctccagcgaaccgttttccagttcaaacatacgtagcagagcaaaataacgttttagttcgcgaggcaattgaacgtgagttggcgcgggatggacaagtttattatctttacaaccgtgttgaatcaattacgcaaaaagctgatgaaatttctgcaatggttccggatgcacgtgttgcaacggctcatggtcaaatgggtgaatcggaattagaatcagttattttaagtttccttgaaggagaattcgatgtcctcgtcacgacaactattattgaaaccggagtagatattccgaacgttaatacgcttttcgtgcaagatgctgatcgtatgggactatcacaactgtaccaattgcgcggacgggtaggacgctggaacagaatcgcatatgcttactttatgtatcaaaaagataaaattttgcgtgaggaagctgaaaaacgcttatcagccattaaagagtttaccgagttaggctctggatttaagattgcaatgcgcgacttatccattcgtggggctggaaatatccttggagcgcaacaacacggctttattgattcggtcggcttcgatctatactcgcaaatgctaaaagaagcaattgaagcgaaaaaaccgaaagaagaacaaaaacaaatcgttccagtcgaaatcgacattcaggcagatgcctatattccagaatattatattactgacgggcgccaaaaaattgagatgtacaaacggttccgaaatattgaatcattactcgacctggaagacttgcaaagcgacatgattgaccgttttggtgagtatccagaagaagttgaatatttatttacgatgacagaactcaaagtacatgcgcttgaagttggaattgaatcagttgaacaagaacaaaataaaattacgatgctattttcagaaagcggaacagctggaattcgcggagacatcgtcatgcaaattattggcgaatttggtcgtatggttggagtaggcatggaaggaacacagctgaaaatcacaataaatgtccaaaataaacctttaaaagaatggctatatcaagtgaaaagtttagcagaaaaacttcgtggagctatgaaagaacaagtatctaccgaaaagtagtgcattattaagaagaaaggaggtggcgggatgtcagaacgttccatgaagggactaatgaaaggagcggcttggctaaccgctgcctcgtttatctctaaattacttagtgcagtttaccgagtaccttttcaaaatatggtgggagatgttggattttatatttttcaacaagtatatccaatatatggaattgcgatgacacttgcgcttggaggcttcccggttgttatttctaaaatgctggcagaagcagagggcgatttaagaagacagcaaataattatgcgagctgtctcacggatgcttcgaattgtaagcatcgtgatttttgctttcttattcatctttgcaggtttaattgcaatcatgatgggcgatccagccctttctgagttaattcgcgttattagttttgtgtttttacttatgccacaactcgcgttcatgcgtggttttttccaaggtgagggagacatgataccaacagcaatttctcagaccgttgaacaaataattcgagtagcgatcattttaattggtgcaggacttgcgctcaatttagaacttaatctatatgacgcaggctcgatggcgatgagcggtgcattttttggcggggttgccggaatctttattttgcgccatttttataataaaaaagtcgcgcttggaggaggattacaacctgctgtatttgcaaataaagaagaaaaagtggggattggccgggcttttttacggcaaagtgtagcgatctgtgtggtcagttccatgctgattttatttcaattagtggattcttttcaagtttaccggttaatgagcgattcgggaattccggaatttatcgctaaatcactcaaaggtatatacgaccgcgggcagccaattttgcaattaggacttgtgttatcaacggggctcgctcttgcgcttgttccaatgattactgcggcaagggttcaaaatcaacaaaaagaactcaaacgctccattttattagcggttaaaattactttgattttgtcgggagcagaaactgttggattaatcgttattatgcgccctttaaatcaaatgctatttcaaacgccagatggaacctttgtcttacaattattcatgcccgccgttttcctaagttcattaattgtaatgctgagtagtattttacaaggcttcggaaaaatcatcgtgcccgcagttggtgttggaatcggtcttattgtaaaatggattacaggcagcatactaataccacgacttgcaactattggcgcgtcaatctcaacgtgtatcggcctactgatagtcctaatcatctgttacgtttcgttaaaacagaccattcgtgtaccatttgtagagaaaacaatgattttaagattagttgctgcgttagctttaatggcagtagttccgtgtttgttcgaatggttcgcaccgttaagtactagactcggaagtgcattccaagctataacaagtgctgctattggcggaagcgtttttcttgtttttgctctgaggtacaaattgctcggcccgaaagatttcgttttccttccgtttggctccaaattactcgcacttagtaagtttgttgcacggaaataataatataaagtaggtgaataaaatggcaacaactatgcgcttagataaatatttaaaagtttcaagattaattaaaagacgaacagtagcaaaagaagtagctgaaaaaggacgcatcgctgtcaatggagtaacagctaaaccaggaacaaatgtaaaatctggtgacgaacttgtgattcgctttggtccgaaaatcgttacagcaaaaattgaacgcttagaagaaaatgcaaagaaagaacaagcaacagaaatgtatacaattttaaaagaagaacgcacagacgaaagcagatagaaaaatcgtttgaaatcgcgcacgttagccgatttcaaacgattttttattgcgcataataaagtacaaacaattttttgcaaaaaagtcaagaaaaatatcataaaaaaagcggattccaatagacaaatgcctgatttattgatattattttaagcaagaaacgtttttttctctaccgaatttcacagataagagcaaataagaacatgggagggacgatgtatgaaaaaagccgaatcaaaagtagcgagaatagaaaaccgctatattaaagataccgcaacaatgaaaaaaactcgtaatcgtcgccgtattgccctgttccgtagacttgcttttatggccattatctttgcagtcgttggtggactactaactattacgtataccaaacaagttttagccctcaaagacaaaaaagaaaaacaagtgcaagtagataagaaaatggttgcaatgaaggatgaagaagaagcgctaaatgaccaaatcaaaaaacttcatgatgatgagtacatagccaaattagcaagaagtgaatattatttatccaaagatggagaaattatttttaatattcccgaagaaaattcgaaacaaaaagagtaagtcaaagccgagccgtcattctccatggtagaatcaaaggaaaatagagttgagtatttttggagtttgcgagtttgactgattgacactctttttattatagctataattaagcaatagagtgatattttaaggaggacgcatttttttatgtcgatcgaagtaggcaacaagttacaagggaaggttactggaattactaattttggagcatttgtggagctagaaggtggcaaaacaggtttagtccatattagtgaggtagcagataactatgttaaagacattaatgacatcttaactgtaggggatgaagttactgtcaaagtaatgaatattggtgatgatggcaagattggtctgtccattcgtaaagcagtagatcgtccggaccgcccagaaaaaagttatgatcgtaagccaaaatacagcaaaaaacctgctggaaactatgtgaaaccagccgagagctttgaagatataatgtctaaattcttgaaagatagtgatgaaagacttactactatcaaacgccaaacagaatctaaacgtggcggccgaggagcaaaacgcggctaaaacgctaaaaactaattgtaaagtatagaaggatgcaccgtattggatcataatacggtgcactttttgataaaatgtgagagccgaatttcgaaggaagggtttcttgaatggatgacaccaaaaaacgaatacataaatatatcgagaaacatgacttaatccgatccgatgataaattgcttgtggcagtttctggtgggccggattcttttgcgttgctccattttttatggtcagctaacttagttccaaaagaagctatcgccgttgctcatctaaatcaccatttacgagaaaatgcagaaaaagagcaactcgccgttcagactttttgcgaagagcgggatattccattttttatagaagaagtagatgtaaaaaaacgtgctgagaagctgcaaaaaggcattgaagaaacagcccgtattgtcagatatgacttctttgaaaaagtaatggccgagaacaatataaataaacttgtacttgcgcatcacgcggatgatcaaatcgagacaattctcatgaggttagttcgtggtagttctagcattggttggtcaggcatacaaccaaaacgtgaagtgagaggcggttatgccattcgccctttcttaccaattacaaaagctgaaatcatagaatacgcaaccaaacatgctttaccatatgaaatcgatgaatcaaataccagccaagaatacactagaaatcgttatcgtacacagctattgccctttctatctaaagaaaatcccgccgtttatgagcacttcaaaagattttccgaagaaacaagcgaagattttcagtttttagaagagttagcaagcaatttattaaagaaaaatctcattcaaaacggcaaacaatcaacacttttactcagtgactttaaaaatgaagcgaatcctttacaacgtcgcgcaattcatttactattgatgtatctgtacaatgatgatggccgtgttattacagtcaatcacatctaccagattatccagatgattcaaagcgaaaatccatcaagctctattgatttaccaaaaaaactcactgttataagatcatacaacgaactccattttcaatttggagaaagacatgctcctcctgagttttatcatcaattagaactaaatgaccgcattgaattagacaataaagcaagcatccgtttaaagttaaaaagttctgttgttcaaacaaatgggctaaatggaatgctactggatgcagaagacatcacacttccattaatcgtccgaaaccgtgtgaacggcgacaggatgacgatgaaaggacaagcaggtagtaaaaaactaaaagatattttcatcgatgccaaaataccaaggcaagaacgcgacaatttacccgtaattacagactatactggaaaaatcctttgggtgcccggcgtgaaaaagtctgcatatgaccgagaatttagtcgtagcaaaaagcaatacattattaggtacactcgaaatataggaggaaacgagagcatgcataatgatattcagaaagtactgatatcggaggacgaattacaagagaaaattcgtgaacttggtcgtgagttgacagcggaatatgaaggacgtaacccattagtggtaggcgtgttaaaaggcgcaaccccttttatgactgatttacttaaaagaatagacacatacttagagatggacttcatggatgtttccagttacggaaatggtacagtatcatcgggtgaagtgaaaattattaaagacctgaatgcttcagtagaaggtcgcgatgtacttataattgaagatataattgatagcggtcgtacacttagttacctagtagacctaatcaaatatcgcaaagcaaaatcagttaaactggttactttgcttgataaaccagctgggagaaatgtggcaattgaagctgactatgtagggtttgttgtacctaatgaatttgtagttggatatggcctagactatgctgaacgttaccgtaatctaccatatatcggtattttaaaaccagaaatttatagcgagtgaaaataattaacaaacagaactattttttgttaaaatgtaatagatatctttttcgaaaacaaaaagaaaaaaattgctggcaaacatgcaaaatagtgggcaatctagattcggtatgctatcattagtcttagttttcgaaggtgaaaattgtatcaataaatattaaaaaatctaaattaataatagaataacttcgtgagagaaaaagcgaaacggatatgtttttaataatcaggggaagaaaacattgtttctcaatctgctattagtaaaaaacaacttttaaaggggtaaaagtccagagaaagtaagaatccaagctcttacgtgggaggaggtaaggaatgaacaggttttttagaaatgcgatattttatgtcataatattccttgttattatcgggattgttgcttcatttaattcaaataaagaggcagccaaagatattagctattcagaatttgtgagtaaattagaagatggtaaagttaaatccgtagaaatacagccagaccgcagtgtttatacaatcgaaggagaatttaaatcaagcgataaaagctccgacgacaaaaaaaccggtcttggccaaagtaaaacaagcagcactgctttcacaacatacgctttaaatagcgatacttcacttggcgatttgcaaaaaacgcttgataaagaagacgtgaaaacaacagtagtacctgccaaacaaaacagcggttgggttacattcctaacttctattgtaccttttgtaattatcttcatcctcttcttcttcctaatgagccagtctcaaggtggtggcggcggtaaagttatgagctttggtaaaagtaaagccaaactttacaacgacgacaagaagaaagttcgcttcacagatgtagctggagcagacgaggaaaaacaagagcttgttgaagtagtagaattcctaaaagatccgcgcaaatttgcggaccttggcgctcgtattccgaaaggtgtccttttagtaggtcctccgggtactggtaaaaccttgctagctcgtgcagttgccggtgaagcaggcgtgccattcttctcaatctcaggttcagactttgtagaaatgtttgtcggtgtcggtgcaagccgtgtccgtgatttattcgaaaatgcgaagaaaaatgcaccatgtatcattttcattgatgaaattgatgcagttggtcgtcaacgtggagcaggaatgggcggcggtcacgatgaacgtgaacaaaccctaaaccaattactagttgaaatggatggtttcggcggcaatgaaggtatcatcattattgcagcaactaaccgtgcagacgtacttgacccagcacttcttcgtccaggtcgttttgaccgtcaaattatggttgatcgtccagacgtaaaaggccgtgaagcagtacttcgtgttcatgctcgtaacaaaccacttgctaaaagtgttgatttaaaagcaatcgctcaacgtacaccgggattctctggtgccgatttagaaaacttactgaatgaagctgcacttgttgccgctcgttccgataagaaagaaatagacatgagtgacctcgatgaagctagtgaccgcgtaattgctggaccagctaagaaaaatcgagttatctctgaaaaagaacgtcgcacagttgcatatcatgaaggtggtcacgttatcgtcggaatggtacttgatgaagcggaagttgtgcataaagttaccatcgttcctcgtggacaagctggtggttatgccgtaatgttaccaaaagaagatcgcttcctaatgacgaaagctgagttaatggaccgtattactggtttactaggtggacgcgtagccgaagaagttacttttggtgaagtaacaactggtgcaagtaatgactttgaacgtgcaactgaacttgctcgccgcatggtaactgaatggggtatgagtgataagattggaccacttcaattcacttctggtaatggtcaagtatttatgggccgcgattttggtagcgataaaggatattccgataaaatcgcctacgaaattgatacagaagttcaaagcttaatccgctactgttatgaccgcgctaaaacaatcattacagaacaccaagagcaacataaacttatcgcggaaacattactaaaagtagaaacattagatgctcgccaaattcgttccctatttgatgacggtgtaatgcctccagatatcgatacgattgacgtagaagcggaatatccttccgaaaaagacgaagaagtagcaggtaaatcttttgaagaagaaaaagaagacttgaaagaagaaaaagtcgaagaaacacaagatgaaccaaaagaagtaacttcggaagatgctccaaacattgagcaaactccaaacgataaaaaagacgaataagatcaaagaggctgggctttcccagtctcttttttgaagctatattattcggatttttaagtaaaacatgttatgatacgttagaaaaatcttctaaaggacggtatttaaacttatgatacttgtaatagacgtgggaaacactaactgtactgtcggagtttataaagaacagaaacttctaagacattggcggatgacaactgatcgtcatcgtacttccgatgaattaggaatgacagtcttgaactttttttcgtatgcaaatttaacgccttctgatattcaaggaattattatttcgtccgtcgttccaccaatcatgcacgcaatggaaacaatgtgtgtacgctatttcaatattcgaccgctaatcgttggtccaggaataaaaacaggcttaaatctaaaagtcgataaccctcgtgaaattggttctgatcgaatcgtaaatgctgtcgctgcttcagaagagtacggaactccggtaattgtagtcgattttggaactgcaaccactttttgctatattgacgaggctggagtctaccaaggaggcgcaattgctcccggtataatgatttcaaccgaagccctatacaatcgtgccgcaaaacttccgcgggtagacattgcagaatctagccaaattattggtaaatctaccgtggcatcgatgcaagcgggtattttttacggtttcatcggtcaatgcgaaggaattatcgcagaaatgaaaaagcaatctaatacaagtccggttgtagtagcgactggcgggctagctcggatgataacagaaaaatcttccgcagtagacattttagatccgtttttaacattaaaaggtttggaacttctctatagaagaaacaagccaaccacagaaaaataaaaggagttttatataatgagcgattatttagttaaagcgttagcctacgatggcatggcgcgtgtatatgcagcagtaacaacagaaacaatcaaggaagcacaaagaagacatgatacatggtcagtttcctctgccgcacttggtagaacgatgactggaacacttttccttggagcaatgcaaaaagaagaccaaaaaataaccgtgaaaatcgaaggcgacggcccaatcggtccaatcgtagctgatagtaacgcacaaggtcaaattagaggttacgtaacaaatccacacgtccacttcagcgaactaaatgaggctggaaaactagacgtccgccgcggtgttggaacatccggcatgctttcagtagtaaaagatttaggctttggagaaaatttcactggtcaaacaccaatcgtttcaggtgaaattggcgaagactttacttactatttagcgacatctgaacaaatcaattcatcagtaggtgttggagttcttgttaatccagatgatacaatcgaagcagcaggcggtttcatgctgcaacttcttccaggtgcaacagacgaaatcattgatgaaattgaaaaaaatctctctacattaccaacagtttcaagaatgattgaagccggagaaacaccagaaactattctagctaaactcgcaggcggcgaagataaactacaaattttagaaaaaatccctgttgcatttgagtgtaattgctccaaagaacgttttggtagtgcgattatttcacttggaaaagaagaaatacgttcgatgatagaagaagatcacggtgccgaagcagaatgtcatttttgccgtaacacctacgatttctcagaagaagaattagaaaaactatacgaagaagcgaaatgatgaaaaaagagcgcctgactgggtgctctttttttaaaagtgattaaacttgacaaaataggtcggaattaattaaactatatgaaagacctaaaaaagataggagtgctttaaaaatgacaattgtaaattcgatcactgatttaattggaaagacacctattgtgaaacttaatcgtttaccagaagcaggtagcgccgacgtatatgtgaaattagaattccaaaatccgggtggtagcgtaaaagatcgtattgctaatgcgatgatcgaaagcgctgaaaaatcaggtgcattaaaaccaggagatacaattatcgaaccaactagtggtaacactggtatcggactagcaatggtagcagcggcaaaaggttaccaagcaatcttcgtaatgccagaaacaatgagtatagaacgtcgtaaattacttcaagcttatggtgcgaaattagtgttaactccagggccagatggcatgaaaggcgcaattgctaaagcagaagagcttgcaaaagaaaataattatttcgttcctcaacaattccacaatccagcaaacccagctgtccatgaagaaacaactggaccagaaatcgttgaagctttcggtaaagacggcttagatgctttcattgcaggagtaggaacaggcggaacagtaactggtgtaggacacgtacttaaaaagaactacccagatgttaaaatctatgctcttgaaccagaagaatccccagtacttagcggtggttctccatcgcctcataaaatccaaggtatcggagctggttttgtaccagatacattagatacaaaagtttatgatggcattttgaaagtttcgagtgaagatgcgcttgaaacagcacgcgaagtagcgaaaaaagaaggtatcttagtaggtatttcttccggagcaactattaaagccgctctagaccttgcaaaagaacttggtgctggtaaaaaagtgctcgcaatcgttgcaagtaacggcgaacgctacttaagtacaccgctttataattttgaagattagtaatccagagagcctagattttctaggttctttttttatgataagaaataaatgcatttcttactattttctaatcaaatgcacagcggaaattttctttttctagttaaaatgtatttataagctaacaacaacaaaacattttcattctttccccttttagaatggaaatcccaaactccctttttagccagtgtggtttactccctttttccacactggttttttaatgcaaaaaaatgaaaagaaaaaccgagaaatctcatgaaactttaacaaaaatcacagtgtatccaccaaaaacttggttaatatatagtcataagctaacaacaacaaaacattttcattcttcccccttttagaatggaaatcccaaactcccttttttgaccagtgtggtttactccctttttccacactggttttttaatgcaaaaaatgaaaagaaaaaccgagaaatctcatgaaactttaacaaaaatcacagtgtatccaccgaaaacttggttaatatatagtcataagctaacaacaagcaaaacaattcattctttcccctttttagaatgaaattcctaaactccctttttgaccagtgtggtttactccctttttccacactggttttttaatgcaaaaaaatgaaaagaaaaaccgaaaaatctcatgaaactttaacaaaaatcacagtgtatccaccaaaaacttggttaatatataatcataagctaacaacaagcataacattttcattcttctcccccctattagaatgaaaaccctaaactccctttttttgaccgatgcggtttactcccttttccgcatcggtttttttgtgcgctaaaatcactgaattctgctataataaatctcggaaagaggtgttggtgcttgaagaagtggaaaagggatcacctaggtatggtcatgggaatattgaatgttacgccagactctttttcagacggcggaaaatatatgcaagtagaagaagctgtagctcgagctgtacaaatggcgaaagatggagcggaaattatcgacattggtggaatttctactcggccgggtttttcggaagttacaccagaagaagaacttgcacgaattattccggttattaaagctgttagaaatgctcttccagatatatggatttcagttgatacttggcgagcggaagtagcggaacaagccgttttagctggagctgacatgataaatgatcaatggggtgcgaaaaaagaaccgaaaattgctgaagttgcagcgaagtatggtataccgatttgtttaatgcataaccgagaaaatacgcaatatcaagatttcttagaggatgtgaagaaagatttattagagagtgttgcaatcgctaaagcagcagctgtgccagatgaacatatcattttagatccaggctttggattcgttaaaacaccagctcaaaatttagaagtattgcgccgtattgatgaaattgtcgcacttggctatgaagtcctgcttggaacaagtcgaaaatcaactattggtttggtgcttggaactactcctctagatagaatggaaggaactggcgcaacaacagtttacggatttgcaaaaggatgtacaattactcgtgtacatgatgtacttccgatagctcgcatggtacggatgacagatgcgattactggtaaattagatattacaaaattataaagaggtgctttgattggataaaatttatttaaatgaattagcgttttatggttatcatggagttttacaagaagaaacaaaattaggtcaaacatttagagtatctctaatccttggactttctacaaaaaaagcaggtcaatcagatagtgtagatgacactgtaagttatgcggatgtctatgaaaccgtgaaaggaatcgtagaaggtacgccgtttaaactaattgaagcccttgctgaaaaaatcgcatcagaagttttaacagactatccgcttttagaagagattacggtcaaacttattaaaccaaatccgccaattccaggtcactatgattctgttgcagtcgaaattaaacgtaagagaagtgatttggatggctaaagcttttttgtcgattggtacaaacataggggaacgtttagataatctaaatgatgcactaagaggcctagctgattctgaaaaaatcaaaattactaatgtttctagcgtttatgaaacagatgcggtaggttatgaagatcaagcagcatttttaaatatcgcagcggaagtcgaaacggactttacgccaaatgaattactagacttttgccttgctctcgaacttgaattggggcgagttcgattgtttaaatgggggccgcgcttaatcgatattgatattctattatacgacgatgttaaaatcgatacagaaaagctaaaaatcccacatccttatatgaaagaacgcgcttttgtaatgatacctttaatagaaatttcaccagaaaaaagcaatcttttagagaatccagcaattttagaagaacaaggcgttcgaaaaataaaaaatcaagtgaactggtaaaattggcacttgcagaaaaaactgattatgataacatatcactagcgcaatttaagaggaaggggtttaccaataatgtttaaaatcggtaacgtagaaattaagaaccaagtagttgtggcgccaatggccggtatatccaattccgcatttcgtctaacagtcaaagaattcggagcaggcctagtttgctgtgaaatgattagtgacaaaggaatcgcataccgtaatgctaaaacacttgatatgctatatattgatgaaaaagaaaaaccactaagcttacaaatttttggtggtgagaaagaaacgcttgtggaggctgcgaaatttgtggctgaaaacactacagcagatattattgatattaatatgggctgccctgtaaacaaaattatcaaatgtgaagctggagcaaaatggttacttgatccaaataaagtttatgatatggtagctgctgttgtggatgctgttgataaacctgtaacagttaaaatgcgtatcggttgggacgaagaacatgtctttgctatcgaaaatgctctcgcggctgaacgtgcaggcgctgcagctgttgcaatgcatggtcgtactcgtgtccaaatgtacgaaggtagtgcaaactgggatgtgcttagagatgtaaaacgcgagctaaaaatcccgttcatggcaaatggtgacgtaagaacacctgaagatgccaaacggatcctagaacatacaggagctgatggcgtaatgatcggccgtgctgcacttggaaacccgtggatgatttacagaactgtgaaattcttggaaacaggagaactactaccagaaccagaaccacgcgaaaaaatggaaacagctatgcttcacttaaaccgtttagtcgaattaaaaggtgaaaacattgctgtacgcgaatttagacaacacgcagcatactatttaaaaggagctcgcggtagtacccgtgcaaaagtagctgctaaccaagcgacaaaacaatcagaaatggaagcaattttaaatgaatttgttcttcaatacgaagaaaaagcattagcaaaacaagattaatcattgttgcctcgagatttcggggcaatttttaaatttatactagaaaaacaagaccaaaaaagcgtataatggaaacatctgtagaaatgaatagaataggagtgtacctatatgagtaacgagaatcatgaagaactaaatgaccaactcatcgtccgtcgagaaaaagtggacacattgcgcgaagaaggcatagatccttttggtgagaaattcatccgttccatcagcccggaagaaattgaaacaaaatttgctgataaatcaaaagaagaccttgaagaagctgcgattgaagtttctgtagcaggacgaatcatgacgaagcgtgtcaaaggtaaagtaggtttcacgcatattcaagaccgtttccatcaattacaaatctacattcgtaaagatgctattggcgaagatgcctatgcaattttcaaattagctgatttaggagacattattggtataaaaggaactattttccgcactaacacaggggagttatccgtaaaagcaacagagttcactttactttctaaatcattacgcccacttcctgataaatatcacggtttaaaagacgtagaacaacgctaccgtcaacgttatttagacttaattacaaatgaagaaagtcaaaatcgttttgttatgcgtagtaaaatcttgaaatacactcgtgattacatggataatcaaggtttcttagaagtagaaacaccagtactccataccattgctggcggagctgccgcaaaaccatttattacacatcataatgcacttgatatggaattatacttacgaatcgccttagaacttcatctgaaacgcctaattgtcggcgggatggataaagtctatgaaatcggtcgtgttttccgtaatgaaggaacatccacacgccataaccctgaattcacaatgctagaatcatacgctgcttatgaagattatgaagatgttatggacttagtggaaggcttagtatcaacagtatgtaaacaagtaaatggaacaacaaaaataacatacggcgaatacgatgtagatctgactccaaattggcgtcgtatccacatggcagacgcagtaaaagaatatgtaggcgtagatttctggaatgtaacatctgatgaagaagcacacgaactagctaaaaaacatgatgtagcagtaacagaacacatgacgtatggccatattcttaatgaattttttgaaacatacgtagaagagaaactaattcaaccaacatttgtatatggtcatccagtggaaatttctcctttagctaagaaaaacaaagaagacgagcgtttcactgatcgttttgaattattcatcgttggtcgtgaacatgctaatgcgttctcagaattaaatgatccaattgatcaaagagaacgttttgaagcacaaatgaaagaacgcgaacaaggaaatgatgaggctcacggaatggatgcagatttccttgaagcattagaatatggtctaccgccaacaggtggactaggtataggtatagatcgcctagtaatgctattaacagacgctccatctatccgggatatattattattcccaacaatgaaacatcgcgattaacaacgaatccagagctgattttaccagttctggattttgctatttttttagaaaaaaacaaatttgccaaagagaaactttttcttaaaatatgcttgcaatacctataaaaacatgatatatttataaacgttccagttaaacaaagacaaaatgttcttcaggaaattaaatttttttgaaaaaacttcttgactttaactactggatagagtaagatataagagttgctgctaaacacggcgacgaagaaaaagtgacctttgaaaactgaacaaagaagaagacgaaaagcaatgagacgtaaagtctcactggtaatcgcagggcagaaaacagaaagctgttttcaacaaaaacaaactagtaatttaattgctagcgaagtcaatttgacgcaaggaatcttattcacggtgttgaataagtattcaaattcaatttatattttaaagagagtttgatcctggctcaggacgaacgctggcggcgtgcctaatacatgcaagtcgaacgaacggaggaagagcttgctcttccaaagttagtggcggacgggtgagtaacacgtgggcaacctgcctgtaagttggggataactccgggaaaccggggctaataccgaatgatagagtgtggcgcatgccacgctcttgaaagatggtttcggctatcgcttacagatgggcccgcggtgcattagctagttggtagggtaatggcctaccaaggcaacgatgcatagccgacctgagagggtgatcggccacactgggactgagacacggcccagactcctacgggaggcagcagtagggaatcttccgcaatggacgaaagtctgacggagcaacgccgcgtgtatgaagaaggttttcggatcgtaaagtactgttgttagagaagaacaaggataagagtaactgcttgtcccttgacggtatctaaccagaaagccacggctaactacgtgccagcagccgcggtaatacgtaggtggcaagcgttgtccggatttattgggcgtaaagcgcgcgcaggcggtcttttaagtctgatgtgaaagcccccggcttaaccggggagggtcattggaaactggaagactggagtgcagaagaggagagtggaattccacgtgtagcggtgaaatgcgtagatatgtggaggaacaccagtggcgaaggcgactctctggtctgtaactgacgctgaggcgcgaaagcgtggggagcaaacaggattagataccctggtagtccacgccgtaaacgatgagtgctaagtgttagggggtttccgccccttagtgctgcagctaacgcattaagcactccgcctggggagtacgaccgcaaggttgaaactcaaaggaattgacgggggcccgcacaagcggtggagcatgtggtttaattcgaagcaacgcgaagaaccttaccaggtcttgacatcctttgaccactctggagacagagctttcccttcggggacaaagtgacaggtggtgcatggttgtcgtcagctcgtgtcgtgagatgttgggttaagtcccgcaacgagcgcaacccttgattttagttgccagcatttagttgggcactctaaagtgactgccggtgcaagccggaggaaggtggggatgacgtcaaatcatcatgccccttatgacctgggctacacacgtgctacaatggatggtacaaagggtcgcgaagccgcgaggtggagccaatcccataaaaccattctcagttcggattgtaggctgcaactcgcctacatgaagccggaatcgctagtaatcgtggatcagcatgccacggtgaatacgttcccgggccttgtacacaccgcccgtcacaccacgagagtttgtaacacccgaagtcggtagggtaacctttatggagccagccgccgaaggtgggacagataattggggtgaagtcgtaacaaggtagccgtatcggaaggtgcggctggatcacctcctttctaaggaaaaggaaacctgtgagttttcgttcttctctatttgttcagttttgagaggttagtacttctcaagtatgtttgttctttgaaaactagataagaaagttagtaaagttagcatagataatttattatttatgacacaagtaaccgagaatcatctgaaagtgaatctttcatctgataggaagtatcatcgctgatacggaacatcagaaaaacaacctttacttcgtagaagtaaattggttaagttagaaagggcgcacggtggatgccttggcactaggagccgaagaaggacgggactaacaccgatatgctttggggagctgtacgtaagcgttgatccagagatttccgaatgggggaacccactatctttagtcggatagtatccttacgtgaatacatagcgtgaggaaggcagacccagggaactgaaacatctaagtacctggaggaagagaaagaaaaatcgatttcctgagtagcggcgagcgaaacggaaagagcccaaaccaagaagcttgcttcttggggttgtaggacactctatacggagttacaaaagaaagttataaatgaagcggtctggaaaggcccgccaaagacggtaacagcccggtagttgaaatggctttccctccagagtggatcctgagtacggcggaacacgtgaaattccgtcggaatccgggaggaccatctcccaaggctaaatactccctagtgaccgatagtgaaccagtaccgtgagggaaaggtgaaaagcaccccggaaggggagtgaaacagttcctgaaaccgtgtgcctacaagtagttagagcccgttaatgggtgatagcgtgccttttgtagaatgaaccggcgagttacgatttgttgcaaggttaagcggaaaaagcggagccgtagcgaaagcgagtctgaatagggcgcataagtaacaggtcgtagacccgaaaccaggtgatctacccatgtccaggatgaaggtaaggtaatacttactggaggtccgaacccacgcacgttgaaaagtgcggggatgaggtgtgggtagcggagaaattccaatcgaacttggagatagctggttctctccgaaatagctttagggctagcctcgaggtaaagagtcatggaggtagagcactgtttggactaggggcccttctcgggttaccgaattcagataaactccgaatgccatgtacttatactcgggagtcagactgcgagtgataagatccgtagtcgaaagggaaacagcccagaccaccagttaaggtccccaaatatatgttaagtggaaaaggatgtggggttgcttagacaaccaggatgttggcttagaagcagccaccattgaaagagtgcgtaatagctcactggtcgagtgaccccgcgccgaaaatgtaccggggctaaacatattaccgaaactgtggatgaacctcttcggaggttcgtggtaggagagcgttctaagggcggtgaagtcagaccggaaggactggtggagcgcttagaagtgagaatgccggtatgagtagcgaaagaagggtgagaatcccttccaccgaatatctaaggtttcctgaggaaggctcgtccgctcagggttagtcgggacctaagccgaggccgataggcgtaggcgatggacaacaggtagagattcctgtaccagtgctaattgtttaaccgatggggtgacacagaaggatagggaatcgcacgaatggaaatgtgcgtccaagcagtgagtgtgagaagtaggcaaatccgcttcttgcgaagcatgagctgtgatggggaaggaaattaagtacggaagttcctgatttcacgctgtcaagaaaagcctctaggaagagtagtactgcccgtaccgcaaaccgacacaggtagatgaggagagaatcctaaggtgagcgagagaactctcgttaaggaactcggcaaaatgaccccgtaacttcgggagaaggggtgctctattagggtgcaagcccgagagagccgcagtgaataggcccaggcgactgtttagcaaaaacacaggtctctgcaaaaccgtaaggtgacgtataggggctgacgcctgcccggtgctggaaggttaagaggagtgcttagcttcggcgaaggtacgaattgaagccccagtaaacggcggccgtaactataacggtcctaaggtagcgaaattccttgtcgggtaagttccgacccgcacgaaaggcgcaacgatctgggcactgtctcaacgagagactcggtgaaattatagtacctgtgaagatgcaggttacccgcgacaggacggaaagaccccgtggagctttactgcaacctgatatggaatgtttgtaccgcttgtacaggataggtaggagccgaagagacgtgtgcgctagcatacgaggaggcaatggtgggatactaccctggctgtatgaccattctaacccgccacgctaagcgcgtggggagacagtgtcaggtgggcagtttgactggggcggtcgcctcctaaagagtaacggaggcgcccaaaggttccctcagaatggatggaaatcattcgcagagtgtaaaggcacaagggagcttgactgcgagactgacaagtcgagcagggacgaaagtcgggcttagtgatccggtggttccgcatggaagggccatcgctcaacggataaaagctaccccggggataacaggcttatctcccccaagagtccacatcgacggggaggtttggcacctcgatgtcggctcgtcgcatcctggggctgtagtcggtcccaagggttgggctgttcgcccattaaagcggcacgcgagctgggttcagaacgtcgtgagacagttcggtccctatccgtcgcgggcgcaggaaatttgagaggagctgtccttagtacgagaggaccgggatggacacaccgctggtgtaccagttgttccgccaggagcatcgctgggtagctatgtgtggcagggataaacgctgaaagcatctaagcgtgaagcccccctcaagatgagatttcccatttcttcggaaagtaagatccctgaaagatgatcaggtagataggtttggagtggaagtgtagcgatacatggagcggacaaatactaatcgatcgaggacttaaccaaaaaatgaaacgaagttacctaactgaaccctttcttctctagttttgagagagcaatctttcaacaacttcatattgtctggtagttatggcgagaaggtcacacccgttcccatcccgaacacggtagttaagcttctctgcgccaatggtagttgggggcttccccctgcgagagtaggtcgctgccgggcaatagtaaaagtcctaattatttagggctttttttgttataaaaagataaataaattgctaaaaggtacaggtatctagtataattaaagtcaaaaatagtcaaagtcagtgatttggaaaatatggaaaggagattccttataatgaaaaatatttctgatattatagaagcttatttaaagcaagtactggagtctagtgaagcagttgaaattaaaagaagtgaaatcgcggataagtttgaatgtgtgccttctcaaatcaactatgtaatcaacactagatttacaatggaacgcgggtatattgttgaaagtaaacgcggtggtggcggatatattcggatcatcaaagtgaaaatgaatgataagcttcaattattagaagctattatatctatggttcatgataaaaaggtatctcaatctttttctgaagatgtaattttgaggttacttgaagaagatgttataacgaagaaagaagcaagactgatggttgctgcacttgatcgtgaggttttaattttacctctgccagatagagatattttgcgtagtaggatactcgaatcaatgttagttgctttgaaatatgattaaggtgtgatggctatgatttgtcaaaagtgtggggaaaacaaggcgataattgcgcttcaacagttaaatgaagctgggaaagtggagtcgttatacttgtgcgagaattgtgctactaaggaggcgcttgcttctgaaaaagaccttgttaaagcaatggatacttttagtgaagtagctctggattttttgacgttattacaaaaagaagaatctgctcagaaaaaagtggtttgcgaaaattgcaatctaagctttgaggagtttttacaaactaatcgggttggttgtgcggagtgttattcggcttttgaggagcaattagttccgattattggtcgagtgcaaaatggttataaaaagcatgttggaaaagtacctgtggaaattgaacgtgcggaagatgtgcagaatgagataaaccgtcttcaagataagttggcggacttagtgaaaaatgaagaatttgaggaagctgcagttattcgtgatgaaataagggctttgaaagctgggggtgaggataaatgaatgtatttgaacctcggctcagttcttggttagaaaatgctggtgatgacgatgatgttgtcctgagctcacgtattagacttgctagaaatttaaaagatgagcagtttcctatttatgaccaaaaggaagaggttgttgataatatcgcggaggtatttgatgataatttcactttaatcaaaatgaatcagatttctaagttgcaaaaggctcttttagttgaaaagcatttaattagtccttatatgatgaataaaagtgaatatggtgcagttctcttaaatgaagaagaaaatgtgagtattatgttaaatgaagaagatcatttgcggatacaatgcatgacaccgggattaaggttgtttgatgctttagaggcagcattgcaaattgatggatatgtggaagaaaaattaacttatgcttttgataaacagtttggttatttaacgagttgtgtgacgaatattggaactgggatgagagcttctgtaatggtgcatttgccagggcttgttactacgaaaagaattaaaagtgtgattgaagcgattaggagcctcggttttgtggtaagaggtatatacggggaaggtagcatgcccgctagtagtatttttcaagtttctaatcaagtgactttaggcaaaactgagacggaaatcgtggaagatttaacgcaagtcatggaacaaatcattatgcaagaacgtgtggctaggactactttgaagcaaaaatttcacattgcacttgaagatagggtttttagatcatatggtttattaatgaattgtcgaattatatctatgcaagaagcttcggatgctatttctgatattagacttggtgtggaattagggtttttcgagcatatttctcgccaaaaaatgaatgaattggtactattctcgcaaccagcttttttgagaaaagaagcaggacgagatatggatgaattagaagagaaagtaatacgggccaaagtgattcgcgagattttgggcgataaataattaggcttatgataaggaggaaacaacaatgatgtttggacggtttacgcaaagagctcagaaagtactcgcgttgtcacaagaagaggcgatgcgtttgaatcatagtaatttaggaacagaacatatacttctaggccttgtaagagaaggcgaaggaattgcggcgaaagctctctatgaacttgggattagttctgaaaaagtgcagcaagaggtggaaggcttaattggtcatggggaaaaagctgtgacaacgattcaatatactcctcgcgcgaaaaaagtaattgaactttcgatggatgaggctaggaaactagggcatacttacgttggaacagaacatatcttacttgggcttattcgtgaaggagagggcgttgcagctcgcgttttaagtaacctaggtattagtttaaataaagcgcgtcaacaagttttacagcttcttggtggcggagatgctacaggtgctggtcgacaaacaaatacgcaggcgacaccaactttagatagtttggcacgtgatttaacggttattgctcgggaagagaatttggatccagtgattggtcgttctaaggaaattcaacgtgtgattgaggtgcttagtcgtcggacaaaaaataacccagttcttattggtgaacctggtgttggtaaaacagccattgcagaaggtctggcgcagcaaattgtccgcaatgaagtacctgaaaccttacgcggaaaacgtgttatgacgcttgatatggggactgttgtagcaggtacaaaatatcgtggtgaatttgaagaccgtttgaaaaaagtaatggatgaaattcgtcaagctggtaatgttattctatttattgacgaactgcatacgttaattggcgctggtggggcggaaggtgcgattgatgcatccaatattttgaagccacctctagctcgtggtgaattgcaatgtattggtgcaacaaccttagatgaatatcgcaaatacattgaaaaagatgcagcgcttgaaagacgtttccaaccgattaaagttgatgaaccgactgtagaagagtctatccaaattttacatgggttgcgtgatcgttatgaagcgcatcaccgagttgcgattacggatgaagctcttgaggctgctgttcgtttatctgatcgctatatttcagaccgtttcttacctgataaagcgattgatgttattgatgaatctggatcaaaagttcgtttaaaatcttttacaactccaaaaaatgtaaaagaaatggaaaacaatttatccgaattgaaaaaagaaaaagatgccgctgtacaagggcaagagtttgaaaaagcagcagcattacgtgataaagaacagaaactcaagaaatcattagaagaaacaaaagcaaactggcaagagaagcaaggtcttgatcatagtgaagtaacagaagatattgttgcagaagtagttgctagttggactggaattccggttgctaaactggctgaaacggaaacaaacaaacttcttaatatggaaaaacttttacatgagcgagttattggccaagatgcagcggtaaaagccgtatcactcgctgttcgccgagctcgtgcagggcttaaagatccgaaacgtccgattggctccttcattttccttggtcctactggggttgggaaaacggaacttgcacgtgcacttgctgagtccatgtttggtgatgaagattcaatgattcggattgatatgtccgagtacatggagaaattctcaactgctcgtttagttggggctcctccaggttatgttggttatgaagaaggcggtcaactgacagaaaaagttcgtcaaaaaccttattctgtagtgcttcttgatgaaattgaaaaagcgcatcctgatgtatttaatatgttgttacaagtgcttgatgatggtcgtttaactgattctaaaggtcgcgtggttgattttagaaatacagttattattatgacttctaatatcggtgctcaagaaatgaaacaagataaatccatgggctttaatgtgattgatccacttaaagatcataaagcaatggaacatcgtgttttacaagatttaaaacaagctttccgcccagaatttattaaccggattgacgaaacaattgtattccattctctacaagaaaaagaattgaaacaaattgttacgcttctgacttctcaattaactaaacgcctagctgaacgtgatattcatgtgaaattaacagaaggtgcaaaagctaaaattgccaaagatggttatgacccagaatacggggcgcgtcctttgaaacgagcaattcaaaaagaagtagaagatatgctttctgaagaattacttcgtggcaatatcaaggtaggcgataacgttgaaattggtgtgaaagacggaaaattagaagttaggaaaaaagcagcgactaaaaagaaagctgctcccaaaaaagtaaaatcgaaataaatgatggaccttccttaaatacttaaggaaggtttttttctgaataagggctaaaaagatagaaagaagcttgaaaatacgaatttggctaaaaggcttaacgcgaacagatgatctgtggtaaaatgaagcatatgtatggagggatgtagaaatggctaaggcaaaaaggacgaccaaatttgtgtgtcagtcatgtgggtatgaatcggcaaaatggatgggtaaatgtccgaattgcaatgagtggaatcagatggtagaggcattagagccatcgaaaaaatcacgctcagcttttaatcatacaggagaaccatcaaaggcgactccaataactcaaattgcaagtgaagaagaagctcgggtagaaactaatatgcctgaattaaatagagtgcttggtggcggagttgttccgggatccatggtgcttgttggtggcgatcctggtattggtaaatccactcttttactacaagtgtcggcacaacttacacttactaataagaaagtattatatatttccggggaagaatcaattaagcaaacaaaacttcgtgcggagcggctgcaagtttccggtgataatttgtatgtttatgcagaaactaacttagaagcggttcaagaaacaatcgactttgtaaaaccagattttgttgtcattgactctattcaaactgtttatcaccctgatgtcacgagtgctgcgggaagtgtatcacaggttcgagaatgtacggctgctttaatgcggatcgctaaaatgcaaaatattgctattttcatcgttggtcatgtgacgaaagaaggcgcgattgctggaccgcgtttacttgaacatatggtagatacagtgctttattttgaaggagaacgtcatcatgcttatcgaattttacgcgcagtaaaaaaccgttttggctcgacaaatgagatggggatatttgagatgcgtgatattggtcttgtggaagttgccaatccatctgaggtgttcttagaggaacgtctagaaggagcctcgggatcaacagttgtagcttcgatggaagggactcgtcctgtgcttgtagagattcaagcacttgtatcgccaaccatgtttggaaacgccaaacggatggcaactggaattgattataataaagtttctttgattatggctgttttagaaaaaagagtaggtttaatgttacaaaatcaagatgcttatttgaaggcagctggtggagttaaattggatgaaccagcagttgatttggcggtagctgttagtgtggcttctagttatcgtgataaaccgacaagaagtacggattgttttattggagaacttggtctaactggtgagattcgccgtgttgcaagaattgaacaacgcgtacaagaagctgccaaactaggcttcaaacgaatttttatccctaaaaataatgaaggcacttggaaagtaccaaaagacgtgcaagtggttggcgtagaaacgattggagaagcattgaagaaggctttaccagactgaaaataaatacttcagcgattccatgagtactatttgcggtatagtcttttaatagtgtagaatagtgctatatgtatgtttggtaatagcccgattatatgtataaatataaaaatggaaagggggaaactaaatgcttacatgggtaattcgagtgtgttttttaatccttggcgggactacgggagtcttttcactaccagcactatgggtgaaacttgggataggacacattttgctaattaacaatccttatactgatgctttgattggtgcacttatattttatcttattactttctgggcggtgaaatatgtagaagccgcacttaattggttggaggaaaaattagctaaaattgctattgcaacgcttatttacggggggttaggtttatttgttggtttagttattgcgtttttcgcgagcaatgctttaagtcaaacaaatataccgcttttaaattcggtagtaccagttattttaacgttagtactaggttatttagggttccgtattggaattagtcgtcgcaatgaatttgggaattttgttaacaacagaaatgcgaagaagaaaacgccagaagaagagcaaaccgaggagaaatctaagaaaacctataaaatcttggatacgagtgttattattgatggtcgtattgctgatattttagctaccggatttttagatggaactgttgttataccactttttgtattagctgagcttcaacacatcgctgactcttctgatactttaaaacggacaagaggtcgacgcggattagatattttaaatcgaattcaaaaagaagactctatccaagtggaaatgtatgaaggtgactttgaggatacgccagaagtggacagcaaacttgtaaaacttgctaaagtaatgggcgggattgtcgtaaccaatgattataatttaaacaaagtatgcgaatttcaaaatgtacctgttttaaatattaatgatttggctaatgcagtaaaacctgttgtattaccaggtgagaaaatgactgttcttatggtgaaagatggtaaggagcataatcaaggcgttgcatatttagatgatggaacgatgattgttgtagaagatgggcgtaaatttattaatgaaaccattcaagtagaagtaacaagtgtgcttcaaacgtcagcaggaagaatgatttttgctaaaccatcctgattggaaggagtaaacaagcatgaattatgagctgatttttttagcagcaggacaaggcaaacgtatgaacgcggaaaaaaataaaatgtggctggatttagttggtgaaccaattttcattcatgccctgcgtccttttttggcggataatcgttgctcgaaggtgattgtcgtgtgccaagaaacggaaagaaaacatgtgagaaagttgatgcaacaacttgatgttgcagaagatagagtcgaggtcgtaaaaggcggaagtgagcgtcagtatagtgtagctgctggacttgaatgttgtggtttagagagcgtagtgcttgtgcatgacggagctaggccttttgtgacgctagatattattgatcgtctgttattaggtgtgaaacaaaataaagctgctatttgtgctgttcaagtgaaagatactgtaaagcgagttattcacgatgttgtaaaggaaacagttgatcgtgataatctctggcagattcaaacgccacaagcttttgaattacacattttacaaaaggcacatcgtctcgcaaaaaaagaccaatttctaggaactgatgaagctagtttggtcgagcggattccataccctgttgctattgtccaaggaagctattataatataaagctgacaactcctgaagatatgccacttgcaaaggcgattttaggagaacttggagggaaagtaaatgattaggattggccaaggatatgacgtacataaacttgattatgaccgtgaactgattattggcgggattaagattccatacgaaaaaggtttgctaggtcatagtgatgccgacgtacttcttcatgctattacagatgcaatcattggtgcaattggtgctttagatattggtcattttttcccggatacggatatggcttataaagacgcggattcagcagagcttcttgcggaaatttggcgacaggtggaagcagaggggttcaagcttggaaatttagatgcgactattatcgctgaaaaaccgaaaatggctccttatgtggagttgatgaaacgccggattgctgagttacttcacgcagaaccatcccaagtaaatgtaaaagcaaccacgacggagaaattaggatttacaggtagagaagaaggaatcgctagtttagcggtagtcttacttgaaaaataattaaaggagtgaataattgtgagtgaaacaaaacgagtacgtgtacgttatgcgcctagtccaactggatttttgcatattgggaatgcgcgtactgccttatttaactatttatttgcaagacataatgatggagactttattattcgaattgaagatacggatgcgaaacgtaacgtagctgacggcgaagaaagtcaaatgaaaaacctaaaatggctaggtatggactgggatgaaggtgttgatgttcctgggaaatatggtccttaccgtcaatcagaacgtcaatcaatttatgaaccactaattcaacaacttttagataaaggcttggcgtataaatgttattgtacggaagaagaattagaagcagaacgtgaaaaacaaaaagcaaatggtgagatgccgcgttatagcgggaaatgccgtcatttaacaaaagagcaacaagcagaaaaagaagcacaaggttttaaaccaagtattcgtttcaaagtaccagctaatgaaacaattacttttaacgatatggttaaagatgatgtttcttttgaatcgaatggtattggtgattttgttattgcgaaaaaagatggaattcctacttataattttgctgtagcagtggacgatcatttaatggaaatctcgcatgttcttcgtggtgatgaccatatttcgaatacaccaaaacaaattttaatttataatgcttttggctgggaacctccaattttcggtcatatgacacttattgtgaatgaaagcagacgtaaattaagtaaacgtgacggttcgattattcaatttatcgagcagtatcgtgaccttggatatttaccagaagcgttatttaactttattgcaatgcttggttggtctcctgaaggggaagaagaaattttctctaaagaagaatttattaaaatgtttgatccgaagcgtttatctaaatcgccagcattgttcgataatgttaaattgacttgggttaataaccaatatgtgaaaaaattaccgctaaatgatgtagtagaactttctttaccgcatttacaaaaagccggtgttgtatctgctgatttagatcaagcagaacttgactgggtgcacaaattagtttcgctttatcacgagcaaatgagttatggtgctgaaattgtgccactttcagaaatgtttttcgctgatgctgaatcgattacttttgacgaagaagaaaaggctgtccttgccgaagaaacagtgccgaaagttatttctgccttcaaaaaagaattagaagcgctagatgttcttgaagcggcggaagtaaaatctgccatcaaacgtgttcaaaaagaaactggcgtaaaaggtaaaggtttattcatgccaattcgtatcgtgacaactggtgaaatgcatggtcctgaattgccacttgcaatcgaagttcttggtcttgaaaaagtactaaatcgtttagatacatggttacaaaataattgattttaaatgaaagtgcctcggctatttacggggcacttttttattttgatatatttcagttgcaaggaattttattgctgttataatagaactaaatatacggaaaaagtgctgatgggaagaagtacggaattctaagcttaaagagagagtcgccgcggctggaagcgacttagctgaacactcctgaaatgcctccctgaattctgatgggaaatttagtatcgtcagacgaaatgtgggtcgttacccccacccctagagttggagtatctgctaaaattagcaatactcaagtcagagtggaaccgcgcaaagcgtctctgtattagaggggctttttttgttggcgtaggttcaatgaaaaaatgtacgaacttgaataaggaggcaacaaaatgccaactcgcttaaaagaagatattgcaacaattataaagaatgaccctgcgacgaagactttttttgatgcttttttaacgaatccgggattgcacgcactttggtggcatcgtgtggccaactttttttatcgtcacaaaatggttttgtttggaaaagtattatcgcagactgctcgtttctggactaatatagaaattcatcccggcgcaacaattggtagaaggctttttatagatcacggtgcagggattgttattggagaaactgctgaaattggtgatgatgttacgatatttcacggagttacgcttggcgggaccgggaaggactgcgggaaacgtcatccaacggtcggtgatagagcgcttgtttcagcgggagccaaagtacttggaccagttgatattggagcagatgcgcgaattggtgcgggtgcggttgttttaaaagacgtaccaccaggtgcaactgttgtcggtattccagccaaagttgttcggcttaatgggcgtacggtagggcacgcggttcctaaaatggatgaactgacgttacgaattgcagaattagaaaatatagtagaaaaacttttaaaggaaaaggagtagatctgattgtcgatacaaatttttaatacgttaaaacgagagaaagagccttttaaaccactcaaagatggcgaagtgaaaatgtacgtttgcggaccaactgtttacaactacattcatatcggaaatgcacggccgattattgttttcgatacagttcgacgttattttacgtatcgtggctacgatgtgaaattcgtgtctaattttacggatgtggatgataaattgattcgtgcggcaaatgagttgaaattgacggttcctgaagtggcggatcgttttattggggcttactttgatgatgtggatcaactgaatgtggcgaaagcgactgtgaatccgcgtgtaacagaaaatatggatgaaattattcaattaatcagcaccctaatcgaaaaaggttatgcttatgagtcagctggcgatgtatatttccgtacgaaaaaattcaaagattacgggaaactatctggcaagaattatccgaacctacaacacggaagcgcgggttgaatataatgagcgcaaacaagatgaacttgatttcacactttggaaagctgctaaaccgggtgaaattttctgggaaagtccgtttggaaatggtcgtcctggttggcacatagaatgctcggcgcttgcgaaaaaataccttggcgatacgattgatattcatgcgggtgggcaagatttagtatttcctcaccatgaagatgaaatcgctcaatccgaagcagcgactggaaaaacattcgcaaaatactggatgcacaatgcctttttaaatattgacggggagaaaatgtctaaatcacttgggaattttattacgctacatgatgtgttaaaagataatgacccaaatgtgattcgtttcttcatgttgtccgtacattaccgtaagccgattacattaaatgatgctattttagaagatgcaaaaaatggcttagagcgtttaatgattgcctatcaaaatattgaccaccgcattcaaacagatgacggagaatacgtggaagaaacccacgaagatgaatggttggagcaactgacagaattaaaacaagcatttgaagatgacatggatgatgattttaatactgccaatgcgattactactttccatgagcttgcgaaacgtgcgaatatttatctttcaaaagaaacagtttccattaatgttttgcgtgaatttttaagtatgatgcgtttatttgcagaagtgctaggcttgaaattagaaaatacgcaaactgattcactggatgatagcgaagtagaagcattaattgaagagcgtctgcaagcgagaaatgaacgtaattttgcacgagctgacgaaattcgtgacattttaaaagaaaaagatattattttggaagatactgcgcaaggtacgcggtttagacgggggtaaatcatggcagaagtgaaagactacaagcaacttaatggcctcgcgcttgcctacatgggcgatgcggtgtacgagaaatttatccgcgaatatttacttgctgctggtaaaacaaaaccgaatcaactgcataaaactgcgacaaaattcgtttctgcaaaagggcaagctgtggcgcttaaagcgatgattgcagaaggttttttgacagatgaagaggatcggattgccaaacgtggccgaaatgccaaatcttatacaataccaaaaaatacagatcctggaacgtatagcatgtctacttcttttgaagctgtacttggttatctttatttagcgggtgacatggaacgacttcaagaatggatggaaaaagcgctagaaatagtagaaaaaggagtggaaaataactaatggaacaagaaaatgagcaagagtggattggtgggagaaatcctgtccttgaagtattacgatctgatagagatattcacaaaatctatgtacaagaaggttcgcaaaaaggcgttttaaaacaagtattaactttagcaaaagaacgtaaaattcaagttcaatttgtaccaaaacaaaaaattgagaaggttgtaagtggtgcacatcaaggggttgcagctcaagtcgcggcctatcaatatgctgaactggatgatttatttgcagcagctgaagcaaaagacgaaatgccgtttttcattattcttgatgagttagaagatccgcataatttaggatctattatgcgtacggcagattctgtcggtgcgcacgggattattattccgaaacgccgctctgttggcttaactcaaacggtagctaaagctagtactggtgcgatggagtatgttccagtggtgcgcgtgacgaatatggtacggacaatggaagaattacaaaaacgtggactatggatttttggaaccgatgcgaaaggtagtagcgattaccggacaatggatgtggatatgccacttgctattgttattggaagtgaaggattcggaatgagccgcttagtccgtgaaaaatgtgatttccttgttcatttaccaatgcgcggaaaagtgacatcacttaatgcctctgttgctgcaagtttgttactttatgaagtttatcggaaacgtttccctctggagaaataatgatggaacaaattctgcttgttgacgggtataatgtgattggagcttggccagaattgagtttcttaaaagatcgcgatttggaagcggcgagagataaactaattgagtggatggcggagtaccaaagctatacgggataccgagttgtagttgtgtttgatgcgcaatttgttcgtggagtaaagcgaaaaagcaagaagcatcaagttgaagttgtatttacgcatgaagatgaaacggcagacgaatatattgagcaaaaagcaattgaatggaaaaatgcgcggacgcaaattattgtagcgacatctgattatacagaacagtgggctatttttggacaaggtgcgctacggatttcttcacgtgaactactttttgaaattcaagaaatgagtaaacaaatcggacagaaaatcaaacgaattcaggaaaaaatgccaaaatcaaacctcaatctagattctgatattatttcccagcttgaaaagtggagaagaggcgaggagtaagggattgacgggctgtttctgactatgtataatgaagcaaccaaagaagaaatcctgtcgaaaaggagccgattagcctagtggagaattcagtaaatcaagaagaaatggcgatgcttgaactagctagaagcggtgatacggacgcgttagagtattttttcagtaggtatcagtcggttatttactggaaatcgacgcaatattttttacaaggtgcagagcgagatgatttaatccaagaagcaatgattgggcttttcaaagcaattcgtgattacgatgagtcaaaagaagcctcgttccgttcttttgcggaaatgtgtataaataggcaacttctttcggcggtgaagcgggcatctaggcagaagaatatccctttaaacaattcagtttcgctcgacacaccaatggctgaagatgatgtagactggactttactagatgtcatttccgaaaaagcggccgaaaccccagaagattttctaattaaaaatgaagatttaacacatgtagcgcgtcaacttgaacaagtcacaagcgaatttgaaaaagaagtattaaaacaatatttagaaggcaaaagctatcaagaaatggcgcttttcttcaataaaaaagagaaagctatcgataatgcattgcaacgagtaaaaaagaaaatgatgaagcagcttgaatgaaaaaataattgactagccaagagccaagtgttatatttatatggatgaaatgtgcctactttttggcatggcatatttaatgattgcggagttgagataatttatgaagaagaaaacatccctcgcttgttctgagtgtggttcaagaaactatacagtcaatgttagcgggacacagaaagaaactcgcttagaagtgaagaaattctgtcgacactgcaataaacatacattacatcgagaaacaaaatagacgatatggaggttttggtatgtctgcaatagcaagattctttcggaatgtttcatccgaaatgcataaagttacatggccaactagaaaagaacttttaacatacacagtaacagtagttatcacagttattttatttgctttattctttatgttaattgattttggtatcgaacaaattattaaacttatcgtgtagtgctaggaattttacaaagataatgatatactattacttgagacaaaacccgtacaactttcgggttttttattttggattatactaaaaggaggatggcggcaaaataggattgctgccaactaaacaatggaaaaaaattggtatgtagttcatacttactccggttatgaaaataaagtcaaagcaaacctagaaaaacgtgtagaatcaatgggcatgtcagataaaattttccgagttattgtaccggaagaagaagaaacagaagtaaaaaatggtaaaacaaaaacaatcaaacgtaaagttttcccaggttatgtattagtagaaatcgttatgacagatgattcttggtatgtcgtgcgtaatactccaggagttactggatttgttggttcttcaggttctggctcgaaaccaacaccattacttccagaagaagcagatcgtattctgaaaagcatgggtatggtcgaaaaacgcgctgaagctgactttgaaatcggtgaaacagttatggtcaaagaagggccatttgctgacttctctggtaaagtggatgaaatggacaacgacaaaggtaaagcgaaagtcatggttaacatgttcggtcgtgaaactccagtcgaagtggatttcaatcaaatcgaaaaactttaaaacttacaacctctacattatttgtggaggttgttttgttaaggaggcgaacaaatggacaaggctaagcagatatatttggattttaaacgagaagctatatttttagatctcgatttccctttattcttaggtaatggtccagggtgcggtgaactttgtatggattatagcgaacaagatggctatatgctttacggntatgaacgcggcgaacgaaacagtgaattcaaaacaactgattttgaagagtttaaatatgaagtttttctgcatatttgttggtacatgggaatggagtttgaactgcgccatcgtaaagaaggcatcaaacgcgacgataacatccttgaaacggatacccgtaaaatcgcttttgaaaaaacattgcagttattaaaaacagtaaacccagcttggattgataaggctgcgcaaggttacacagcgtatttgaacttatggcggaaaaaccaaaacgtctatttcgataaaacgaccatggaattcaaagtaaatctctaaaaaaatcttgcaacgaaacgcttaagatggtatcatgtataagtacgtttttgacgtatgttttaacgtgggaggggaaatatcagccccagtcaaccacatcacggacttaaggaggtatgtctcgtggcaaaaaaagtgattaaagaagttaaacttcaaattccagcaggtaaagcaaatcctgcacctccagttggacctgcattaggtcaagctggcgtaaacatcatgggattctgtaaagagtttaatgctcgcacagccgatcaagctggtcttattattcctgttgtgatcactgtatttgaagaccgttcgtttacgttcatcactaaaactccaccagcagctgtattacttaaaaaagcagctaaagtggaaaaaggatccggtgaaccaaacaaaacaaaagttgcatctgtaactcgcgctcaagtacaggaaatcgctgaaacaaaaatgccagaccttaacgctgcaaatgccgaatctacaatgctaatggctgaaggtactgcacgctctatgggtatcactatccaagactaatcgtgtgtttcacaatttgacaattaagaaggaaaagaaatggctaagaaaggtagaaagtatcaagatgctttaaaacaaattgatgcaaacaaagtttacactgcagaagaagcagttgaacttgctaaaaaaattgacttcgctaaattcgatgcaactgttgaagtagcattccgtcttggcgttgaccctaaaaaagcggaccaacaaatccgtggtgctgttgtattaccaaacggtactggtaaaactcaacgcgtattagtattcgcaaaaggtgaaaaagctaaagaagctgaggctgctggagctgattacgttggtgaatctgaattcgttgaaaaaatcaaccaaggttggtttgaatttgacgttatcgttgctacacctgacatgatgggtgaagttggtaaattaggccgtgtccttggaccaaaaggtttaatgccaaaccctaaaactggtacagtaactatggacgtaactaaagcagttaacgaaattaaagctggtaaagtagaataccgtgttgataaagctggtaacgtacacgctgcaatcggtaaagtatcttttgatgctgctaaactagtagaaaacttccgtactgtgaatgacgttctacaaaaagcaaaacctgctgctgcgaaaggtacttacgtgaaaaatctttccgtaacaactactttcggacctggaatcaaagtcgacccagctagcttataaaatttaacttgaccagccccttgtcttttgataagataggctagttgaaacaatcaaatatccttaccgtagacagttggcgcgtttatcgcttaaatatgccacccgagggatttcttttgaagtgtgcgtccgcgcgcatttcacaaaaacctctggcgtctacggtgtcagaggttttttgttgctgatcaaacggaactagtgtctgtttaattagatttaattgttggacggaggtggaaaaatgagtaaagttcttgaagctaaacaaagtgcagttgaagaaattaaaactaaattatcagctagtgcgtctacagtaattgttgattaccgcggcttaaacgttggcgaaatcactgacttacgtaaacaattgcgtgatgctggtattgaatttaaagtctacaaaaactcactaactcgccgtgctgttgaagctaacggttacgaaggtttagaaggagctctaactggtcctaacgcaatcgcattcagtaatgaagacgtagttgcgcctgcgaaaatccttaacgatttcgctaaagatcacgaagcactagaaatcaaagccggtgttattgaaggtaaagttgcttctcttgaagaaattaaagcacttgcaacactttcatcacgcgaaggattgctatctatgctttgcaacgtacttcaagctccatttcgcggtcttgctatcgctactaaagctgttgctgaccaaaaagaaggacaagaagcataatctgttctacccaggggaaaccctacaaacaaatctcggttaaatccgaaaaaattatattattggaggaatttcaaaatggctttaaacattgaagaaatcattgcttccgtaaaagaagcatctgtattagaacttaacgatttagtaaaagcaatcgaagaagaatttggcgtaactgctgctgctcctgtagctgtagctgctgctggtggcggtgctgctgagcaaactgaattcactgtagaactagcttctgctggagattctaaaatcaaagtaatcaaagtggttcgtgaaatcactggtcttggcttaaaagaagctaaagaattagttgacaacgctcctaaagctcttaaagaaggcgttgctaaagacgaagctgaagaaatcaaagctaaacttgaagaagttggcgctacgtagagttaagtattaacttaaagaccttagatacttgttatctaaggtcttttttattgcaattaatcaagtttaagatgagttaccaaaaatgctacatccgagtaagattttatgctaaaatagctagagatacgaaaggaaggtgcggttcttgactaacaatcattactacacaaacgacgaaacaattaaacacaaccgaaaaacatggcaagtgatgttaaaaggttttaatatgagttttacaagtgacaatggcgtgttttccaaaaatacggtcgattttggttcgaaattattgattgaatcttttgagttagaaacgaaaatagggaaaatcttggatgttggttgtggttatggtccgatggggttaacggtagcgaaagcgttccctgatagccaaattgaaatggtagatgttaatttgcgcgcactggaacttgcgaaagaaaatgcggaaatcaataaaattacgaacacgcatatctatgaaagttcggtttatgataacgtaactgcgaacgattaccaagcgattattagtaatccgccaattcgagctggtaaaaaggtggttcacgcgattttagaaggtgcttacgatcacttgcgagaaaccggagaactctggattgttattcaaaagaaacaaggcggtccatctgctgaaaagaaaatggaagaagttttcggtaacgttgaaacagtggcgagagataaagggtattttatttttagaagcgttaaaaactaaaattcaggtagttatggaattttgcaaaatacttgaattaatgagtgctaattaaatttcaaaacataatgaaaaagaagcggcaaatattataacatgtcgcttcttatttttctagaaaaatatttgacataggtggagagatgttgtattatagtataatgccaaaagaatctataccgtttttttgcgctgcattttatttcaaaatatgacaaaaaatgaagcgtttacgcggtttttggtgctataaataaacatggatgtggttttcagaaatagttgatgaaatccgctttctttttgtctaaagcagcaattttttctttttgaagttccacttgatttcgacctaggttttgtctgattgcgattatgcgaatcagatgtacacaaggtagcaggaaacttttgatgaacgatgtttaaggctgatgaaggagtatggaagtacttacttttgaacgatttaacttaaacatcgggtgcggggggttccactgtttttgtgcctaaaagagaagtcagtgtgcttataaattttttaattaatttgaggggtgaatagtttgtcaggacattcaggacatgatgtaaaatatggacggcatcgtacgcgtagaagttttgcgcgaatcagtgaagtacttgaattaccaaacttaattgagattcaaacagcttcttaccaatggttcttagatgaagggctacgtgagatgttccgcgatatttcgccaattgaggattttgcgggtaatttatctttagaattcattgattacgatcttggagaaccgaaatactcggtagaagaatctaagaaccgtgatgcaaactatgcggctccactacgcgtgaagttgcgcctaatcaacaaagaaaccggcgaagtaaaagaccaagaagtatttatgggtgatttcccactaatgactgaaatgggtacgttcattattaatggggcagaacgtgttatcgtttcccaattagttcgttctccaggtgtttacttcaatggaaaactagacaaaaatggtaaaaaaggctttggttctactgtcatccctaaccgtggggcttggcttgagtatgaaacagatgctaaagacgttgtacacgttcgtattgaccgtacacgtaaattaccagtaactgttttacttcgtgcactaggctttggttccgatcaagaaattattgatttaatcggggacaatgactacttgcgcaacacgcttgaaaaagacaacactgacaatgctgaaaaagcacttctagaaatttacgaaagattacgtccgggtgaacccccaacagttgataacgctagaagcttactagtttctcgtttctttgatccaaaacgctacgatcttgcaagcgttggacgttataaaatcaacaaaaaattacatctgaaaaaccgtctattcaaccaaacattagcagaaactttagtggatccagaaactggtgaaattatcgcttctaaaggtgacattttggatcgtcgtaatttagatcaaattattcctaatttagaaaacggtgtaggtttccgcacacttcgtccaactgatggagttatggaagatagcgtactcgttcaatctattaaaatctatgcaccaaatgatgacgaaaaagaaatcaacatcattggtaacgcgtatattgaagaaaatgtaaaacacatcacgccttctgatattatttcatccattagctacttctttaacttgctacatggtgttggcgatacagatgacatcgatcacctaggtaatcgtcgtcttcgttctgttggtgaacttttacaaaaccaattccgtatcggtttatcccgtatggaacgtgtagttcgtgagcgtatgtctattcaagatatgactacaattacaccacaacaattgattaatattcgcccagtagttgcttctattaaagaattctttggtagctcgcagttatcccagttcatggatcaaacaaatccacttggcgaacttacgcataaacgtcgtctttcagcgcttggacctggtggtttgacgcgtgaacgtgctggttatgaagtacgtgacgtgcattactctcactatggccgtatgtgtccgattgaaacgccagagggaccgaacattggtttgatcaactccctttcttcctttgcgaaggtaaataaattcggctttatcgaaacgccttaccgccgcgtagatcctgaaacaaaccgtgttactgataagattgattatctaactgcggatgaagaggataattacgttgtagcgcaagcgaactcgaaattagacgaacaaggtactttcacagaagaagaagttatggctcgtttccgttcagaaaacttagcggtagaaaaagaacgtattgactacatggacgtatcgcctaaacaggttgtatctgttgcgactgcatgtattccgttccttgaaaacgatgatagtaaccgtgcgctaatgggagcgaacatgcaacgtcaagcggttcctcttatgcaccctgaagctccatttgttggaacaggtatggaacacgtatctgcaaaagactctggtgcagctgtaactgccaaacatgacggtattgtagaacacgttgaagctcgcgaaatctgggttcgtcgtgtatctctagtggatggcaaagaagtaactggcggaattgataaatatacattacgtaaatttgttcgttctaaccaaggtacttgttataaccaacgtccaaacgtagcagaaggtgaccgcgttgttaaaggagaaatccttggtaacggtccatcaatggattccggtgaacttgctcttggtcgtaacgtactagttgcgttcatgacttgggatggttataactacgaggatgcgatcatcatgagtgaacgtcttgtaaaagatgacgtttatacttcgattcatattgaagaatttgaatcagaagctcgtgatacaaaactcggacctgaagaaatgactcgtgatattccaaatgttggggaagacgctttacgcgaccttgacgaacgtggaattatccgtgtcggtgctgaagtaaaagacaacgaccttctagttggtaaagtaacaccaaaaggagttactgaattaactgcagaagaacgtttattacacgctatctttggtgaaaaagcacgtgaagttcgtgatacttcattacgtgtacctcatggcggcggtggaatcgtgcttgacgtgaagatctttacacgtgaagctggcgacgaactaccacctggtgtaaaccaattagtacgtgtttatattgtacaaaaacgtaaaatccacgaaggcgataaaatggccggacgtcacggtaacaaaggggttatctcccgtattttacctgaagaagatatgccatttatgccagacggaacacctgttgacatcatgcttaacccacttggggtaccatctcgtatgaatatcggacaagtacttgagctacacttaggtatggctgctcgtgctttaggaattcacgttgcaactccagtatttgatggagcgaatgaagaagatgtatggagcactgtggaagaagccggtatggcccgcgatgcgaaaacagttctttacgacggacgttctggtgaagcatttgataaccgtatctctgtaggtgtaatgtacatgatcaaacttgcccacatggttgatgataaacttcatgcgcgttcaactggaccttactctctagtaacgcaacaaccgcttggtggtaaagcacaatttggtggacaacgttttggggaaatggaagtatgggcacttgaagcatatggtgccgcttatacacttcaagaaatcctaacgattaaatccgatgacgtggttggtcgtgtgaaaacttacgaagcgattgttaaaggcgaaagcgttccagaacctggtgtgccagaatccttcaaagtactcatcaaagagcttcaaagtcttggaatggacgttaaaatgctttccgcagacgaagaagaaatcgagatgcgtgacatggatgatgacgactttactaatcaaaatgatgccttcaatatcgtacaaccggaaaatgcagccactgaaaagactgagtaattcggttcgataattgagactccaaaacaataagaaacaatgatttgttttttgcaaaatataaaattaagcgatcgctaagactttccctaaaagtctgggaagtgtgcgggaatccccaagcgcttcctaaagcgaatgctccaaactaatttaggaggttgggcacttgttagatgttaataattttgagtatatgaaaatcggtctggcatctccagataaaattcgttcatggtctcacggtgaagtaaaaaaacctgaaaccatcaactacagaacgcttaaacctgaacgtgacggcttattctgtgaaagaatttttggaccaatgaaagactgggaatgttcttgtggtaaatacaaacgtgttcgctataaaggcgtagtttgtgaccgttgtggagtagaagtaacgaaatcaaaagtgcgccgtgaacgtatgggccatattgaactcgcagctcctgtttctcacatctggtacttcaaaggaattccaagccgtatgggtcttgttatggatatgtccccacgtgcattagaagaaattatctactttgcatcttacgtggttacagaaccaggcgatactccacttgaaaagaaacaacttttatctgaacgtgaataccgcgtttaccgcgaaaaatatggtaaaggtttctcagctggtatgggcgcagaagctatcaaaaaaatcttagccgatatcgacttagaaaaagaaacaaatgatttaaaagaagaactaaaatctgcacaaggtcaacgtcgtactcgtgcaattcgtcgtttggaagttatggaagctttccgtaattccggcaacaacccaagctggatggtacttgacgtgctaccagttatcccaccagaaattcgtccaatggtacaacttgaaggtggccgttttgcaacaagtgatttgaatgacttatatcgtcgggtaatcaaccggaacaaccgtttgaaacgccttcttgatttaggtgcaccaaacattatcgtgcaaaatgaaaaacggatgctacaagaagctgtcgatgctctaattgacaacggtcgtcgtggtcgtccagtaacaggtccaggtaaccgtccgcttaaatccctttctcatatgcttaaagggaaacaaggtcgtttccgtcaaaacttactaggtaaacgtgtcgattattctggtcgttccgttatcgtagttggacctaacttaaaaatgtaccaatgtggtcttccaaaagaaatggctcttgaattattcaaaccatttgttatgaaagaactagttggacgcggtttagcacacaacattaagagcgctaaacgtaaaatcgaacgtatggctccagaaatttgggacgtattagaagaagttatccgtgaacatccggtactacttaaccgggcgcctacgcttcacagacttggtattcaagcatttgaaccaacgctagttgaaggtcgcgcaatccgtcttcaccctcttgtatgtacagcttacaacgctgactttgatggtgaccaaatggcggttcacgttcctttatccgcagaagcacaagcagaagcacgtattttaatgcttgcagcgcaaaacattttgaaccctaaagatggtaaaccagttgtaacaccttcccaagatatggtgctaggtaactactaccttactttagaacgtgaaaatgctgtcggcgaaggtactatcttcaaagatatcaatgaagcgcaacttgcgtatcaaaacggctatgtacacttacattcacgtattgctgtatttgctggttcgattccaaatgaacgtttcactgatgaacaacgcaaacaattattaattacgactgttggtaaactgattttcaacacaatcttaccaaaatcgttcccttatattaatgaaccaacgaaattcaacttagaaatcgaaacaccagcgaaatatttcgttgatacaacaactgatgttcgtgctcatattgcggcacaagaactaatcgatccattcaagaagaaaatcctcggtaacattatcgcggaagtcttcaagaaattccatattaccgaaacttcaaaaatgcttgaccgtatgaaagatcttggtttcaaaatctcgactaaggccggcatgacagtaggtattgcggatattctaacacttgaagaaaaacatgaaattcttgaaaaagcacatgatactgttgaaaaaatcactaaatcattccgtcgtggtttgattacagatgatgaaagatacgaacgcgttatcggtgtatggaatgctgccaaagacgaaatccaaggaaaactgatcttgagtttggaccgcttaaacccaatcttcatgatgcaagattccggagctcgtggtaacatttccaactttacacagctagctggtatgcgtggactgatggctgacccatccggacgtatcgtagaattgccgattacatctaacttccgtgaaggtttaacggtcttagagtacttcatttctacccatggtgcgcgtaaaggtcttaccgatacagcccttaaaacagccgattccggttaccttactcgtcgtcttgttgacgtggctcaagatgttatcattcgtgaagacgattgtggcactgaccgcggtcttacaattaaggctatccgtgaaggtactgaaatcatcgaaccacttgaagaacgtctggaaggtcgttattctcgtaaaacaattcgtcacccagaaacaaaagaagttattgcacgtgaaaatgacttaattacagaagcaattgcaactcaaatcgttgacgctggaattgaagaagtaactatccgttctgcattcacatgtaatacaaaacacggcgtatgtaaaaaatgttatggtaaaaacttggcaactggtacagaagtcgaagttggagaagcagttggtatcatcgctgcccaatctatcggggaaccaggaactcagcttactatgcgtacattccatacaggtggggttgccggagacgatatcacgcaaggtcttccacgtattcaagaaatctttgaagcacgtaatccgaaagggcaagctatcatcactgaagttggtggtgaagttgtttctatcgaagaaggtcgtgaccgtcaacaagaaatcactatccaaggtacagatgaccgccgttcttacaacattccttacactgctcgcttgcgtgtagaagaaggaagtattgttgaacgtggggaagctctaactgaaggttctgtggatcctaaagccttgattcgtgttcgtgacgtattatccgttcaagaatatctacttgctgaagtacaaaaagtttaccgtatgcaaggggtagaaattggcgataaacacgttgaagtaatggttcgtcaaatgttacgtaaaatccgcgtaatggatactggtgatacaaacatcttaccaggtacattaatggatattcatacgtttacagaagccaaccgcgatgctatcttaagtggtagccaaccagcaacaggtcgtccagttcttctagggatcacaaaagcttcccttgaaactgattccttcttgtctgctgcatcattccaagaaacaactcgtgtcttgacagatgctgcaatcaaaggaaaacgtgacgaacttctaggacttaaagaaaatgttatcctaggtaaacttgttccagctggtacaggtattggtcgttaccgcaaactgaaatccgaagttatcaaggaaacagctgaagtaactgacgaaatcacaaatatttaattttataaagccaagtgtgtcgttcgcgcgcacttggctttttttgttatactctagaaaaaggagtgaagtgatttgattacacatgttatttgggatatgggcgaaacattaaataccgtaccaaacacaagatacgaccatcaccctctcgatacttacccggaagtagtgctgcgcaaagacgccaaagaaaccctcgaaaaagtaaagcaactcggattcaaacaagcaatcctcagcaacaccgcaacgagcgacacagaagtaattaagcgcgtactaaccaatttcgacatcatcgattattttgatttcatttacgcatccaattccgagttacaaccagggaaaatggaaaagccagataaaactatttttgacttcaccttaaatgaacttaatattgataaaacagaagcagtcatggtcggaaatacgtttgaaagtgatattattggcgcaaatcgtgcaggtatccatgcgatatggctgcaaaatccagaagtctgtcttcaagatgagcgtttgccccttgtcgcgccaccatttgttatcccagtttgggacttagccgatgttcccgaagcccttttattattaaagaaaatttcttcttgacctgtaatgcattacacaaagtaaactaaaaaagtagaagatattagccggaaggggcgaacgaaatgactgaagtgaaaaaacaatttccaaaaggatttttatggggtggagcaactgctgcgaaccaagttgaaggcgcttacgatgtagatgggaaaggcctttccacagcagatatggtcaaattcattccaaaagaagaacgcacgaaagatcatgcattagatgtatctaaagcagaaatcgaagcaattatcgcagggaaagtagaaggaagattccctaaacgtgaaggcgttgatttttatcaccgctataaagaagacatcgcattatttgccgaaatgggctttaaaacattccgcctatcactaaactgggcgcgtattttcccgaacggtgatgacaaagagccgaatgaaaaaggtcttgaattttatgataaggtgtttgatgaattattaaaatatgacattgagccacttgtaacgctttctcactatgaaacgccactaaatctaactttaaaatacaacggctgggctgatcgtcgcgttatcggatttttcacgaactacgcagaaacagttttcaaacgttataaaaacaaagtaaaatattggctaacttttaacgaaatcaatgttatttcacttagcgcatatactggtggtggcgtacttttagaagatgctaaaaacccactagagctttcttaccaagcggggcatcaccaattcgtagccagcgcacttgctacaaaattggcgcatgaaattattccaggatcacaagttgggtgtatgctagcgcgtatggcgacatatcctgcgactaacaaccctgatgacatcttaaaagcacaatacgaaaaccaacaaaacctatttttcacagatgttcatgctcgcggtgaatacccaagctacatgaaccgcttcttccaagaaaacgacattaacatcgtaaaagaagttggcgacgacgaaatcttaaaagcacacacggttgatttcatctcattcagctattacatgtccctatccgcaacagctagcccagaaggcgaccgctctgctgggaacttaatgggtggcgtgaaaaatgaatacttggagtcctccgattggggttggcaaattgacccgaaaggcttacgctggacattaaacgatctatatagccgctatgaattaccacttttcatcgtggaaaatggcttaggtgcttatgatacagtagaagaagacggcaaaatccatgatgattaccgaattgactacttgcgcaaacatatcgaacaaatgaaagaagcaattgcagacggcgtagatttaatgggttacacaagctggggtccaatcgacctagtaagtgcctccacaagcgaaatgtccaaacgctacggcttcatctacgtagaccaagatgactggggcaaaggaacattagaacgctcccgcaaagattcattcttctggtataaaaaagtaattgaaacaaatggtgaagatttagattaatagaaagttaacagtcccgctttggcggggctgttttttatttttatatcaattaatgggatgagagctaagataacccccgggatatatagtgatgtagacgtttgcctttttccataacgggaaaacataggatggaattcaaagaaagagggcgtaaacatggaacgagaaagaaaaattcaaatcttaaaagacattgtaaatattgattcgactaatgggcatgaggaacaggttgcgaactacttacagaagttgtttgctgagtatggtattgagtctaaaaaggtgcaatatgatgtagaccgagctagtcttgttagtgaaattggttctaatgatggcaaagttttggcgttttcagggcatatggatgtggttgatgctggcgatgtatctaaatggaagttcccgccttttgaagcaacggagcatgaagggaaaatatacggacgtggcgcgacggatatgaaatcaggtctagcggcgatggttattgcaatgattgagcttcatgaagaaaaacaaaaactaaacggtaaaattaaattattagcaacagttggtgaagaagtcggtgaacttggagccgaacaactaacgcaaaaaggttacgcagatgatttagatggtttgattatcggcgaaccgagcggacacagaatcgtatatgcgcataaaggttccattaattataccgttaaatccactggtaaaaatgcccatagttcgatgccggaatttggtgttaatgcgattgataacttgctgctattttataatgaagtagaaaagtttgtgaaatcaattgatgctactaatgaaatattaggcgattttattcataacgtcaccgtaatcgatggtggaaatcaagtcaatagtattcctgaaaaagcgcaactgcaagggaatattcgctcgattccagaaatggataatgaaacagtgaaacaagtgctagtgaagattatcaataagttaaacaaacaggaaaatgtgaatctggagttaatatttgattatgacaaacaaccagtatttagtgataaaaattcggatttagtaaatgttgctaagcgtgtagcaagtgacattgttaaagaagaaatccctttactcggtatttccggaacaaccgatgcagcagaattcacgaaagccaaaaaagcatttccagtaattatttttggaccaggaaacgaaacgcctcaccaagtaaatgaaaatgtttctgtagagaattatttagagatggtggatgtgtacaaacgaattgcgatagaatttttataaatgctgcgaaaactagttctgacagtgcttttggcgataaactgaatcttaattaaaacacattttagttttttaaaagaataaacggacgaaaaatcgtcacttttaaagagaattatgctctgaaaggtctttttttagcaaaaaataatgttgctcctcgtgttaatattagttttaaatgcaataacttagtacattaattattagataggagactactatgaacgtaagaactttactagttcgtgttggagtaatattaactatggctttaggaattagtttgtggctaggcacgagtccgggaattgacgcacaagcagcaagccttgcacaaccgacaccgattaatgaagtgtttcctgacactcaaatggctttaacaatggcgaataaactagggaaaacaaaagttactgatcttgtttcgcaaagtgaattggatagcctgaccgaattgagatctaatttaccaatagcttcaattgaaggaattcagtatctgacaaacttaacagaattaaatataagtaatgctgaagtaagtgatataagtgctttgaaagatctaacaaaattaacaaagttagaaatgtatcagaataatattagtgatataaacgttttggaaaacctgacgaacataacagatttagacttacatgataatcagataacggatataagccccgtaagaaatttgactaatttagttgtactaaacttatcttataatcaaataagtgatattagtgcagtgtcaactctaagtaaactaaacgatttagggtttactgataatcaagtaagcgatattagcgcagttgctgggttaaacaatctatctagtttgagtttgggttataaccaaataagcgacataagtatactgacgaacttaaccaatttagatggtctgagtatagaccataatcaaataagtgacttaacgccaatagcgaatttgaccaatttaactttcgtgggtttgcataataatcaaataagcgacttaactccaattgcaaatttaactaatttaacaagaatgtatttatcaggtcagcaaataaccaacaatccaataccttatcacagcaatattgctattcctaacaatgtgaaaaataataaaaatgatgttatcgcaccacttgtaataagtaatgaaggaacctatgacaattctaatgttgtttggaatctagctgattatgttaataaagtgagttatactttttcacaacaggtaacgattggtagtgccacagaaactttcaatgggacagtaacacagccattagagttatatactgtgacttttgatgtggatggagtaacaactaacgagacattagaggcagataccctactaaccgaaccaacaccgccaacaaaagaaggttacacattcacaggctggtatgatgcaaaaacaaacggtactaaatgggattttgaaacggataaaatgccggcgaaagatattaccttatatgctcagtttagtgaggataaaggcccagcagatgatgatactgacaaagatacaccaaatgaccctgctataaacgatggagacgcggtgcattctttggatagttcagaaccacctgctgaggtaaatgtaaatatatcactaccaaaaacaggcgatagtcaaaacccattagttattttcatgggactgtttctgcttggtacagggattatttcgcttcacaaaatacgcaattaaataaaagtctagtatttgtttgtaaacaggtgctaggcttttttcttgcttttaataaagtttagtactaaactaatagtatcaagaggaggggacgagcatggttaagaaagaagaacggctaggggttttgctttggtttcgatttagtcgattttataatcggaatatgaagctgaccaatcagaatttgcgagcagcagggatttcgacggcgcagtttgattgcattgcccagattggtttggacaacgagattacgcagcaacagcttgccgaaaaattagttgtaacgaagggaaatgtcacccaactcctcgcaaaattagagcaattaggctatattacgcgaacaaaaacgggacgcgagaaacatattgccctcaccgaaaaaggccaagcgtgttaccgcgaaaatgtgccaaaacaagaagcttttcagcaatctcaatttgataaattaacaagagacgaacaaaaagaactactcaagttattaaaaaaattaggagagtgattatcaatgaaattagcgggaattcaccatgtatctatttttacagcgaatgcacgagctaactttgacttttatacaaaaataatggggctgcggttagtgaaaaaatcggttaaccaagatgacccttatacgtatcatttatattacggagacgaaatcggttcgccggggacagcgctaactttctttgaagttccaaatatggccaaaaaccacccatcacgcaatgcgatttccggacttagtttgcgcgtgccaaatgatgaggctttgcactactgggataaaagactcgatgagcatcgcattttccacagcaaaccaatcgaccaattcgggcgcaaaattattcgtctaaaagacacagatggcttaccagtgagcttaatttctgatgaaacaagcacacaatttacagaagtttccgcttgggaagatagcccagttccagccgaatacgccattcgcggacttggcccagtgcgcttttccgttttcaaaaaagaaaaaacagaccgccttttgacaaaaatattaggcttcgagcggattggtgcctatgaagatgatgataaattagttacagtattcaaaactggcgacgttggacttggcggcgaagtgcatgtggagtcgcgacctgatctagaacaaggcaatttaggcgctggcgggattcatcatgtggcgtttcgtgtaccgactgatggtgatttaattggttggacagaaatgatacaagaccttggctataaaaattcgggctatgtggatcgtttttatttccactctctttatttccgcgaaagcaatggcattttaattgaacttgcaaccgatgaaccaggtttccaaaccgatttcacgaaagagcatggaacctatgtagatttaccgccacatttagaagaacgtcgcgaagatattttggcgcatttaaaaccacttgatacggataaataataagaaaaccttgaaaatatgcccattcatgatacaattttagaagaatgtgtaattaggaggcagaattttggcagagggtttacgaacgatttattttgtaagacatggtaaaacagagtggaatatgactggacaaatgcaaggctggggcgattctccgctagttgcagaaggtattgacggggcaaaagcagttggcgaagtgttgaaagatacaccaattgatgccgtttatacaagtacaagtaaacgcacgcaagataccgcggcttacattcttggcgaccgcgaaatcgaaattcaacctctggaagaactaaaagaaatgagctttggaacgtgggaaggcattagagtaactgaaattgacgaacaacaccctgaagaacgcgcgaaaattctccatagcccagaaacctacaaagcagaagtgaacggtggcgagacttattatgagcttgcagaacgactgttagaaggcgttgaaaaaatcattgcagaaaatccaagtggcaacattctcgtcgtttctcacggcatgtcacttacgttattattatacttgctacaaggcgggaccattgaagatcaccgcaaagaagcaccaagaattttgaacacaagtattagcatcgtagaataccaaaacggcgaattttctcttaaaaaattaaatgaagttggtcatttagacttaaaataagttgaatcttgggcatatctcattggaggtgtgtcctagatttatacataagagaaagctagaaaaagggagaaaacatacatatgaagagaattgtcaaaatttttctacattattttttaggaattttaggaattattttaatcagctgtgttcccgcgatatttagcaaagtgacttcgtggtcatcaagcacgtactgggaggctcttaagtcgatttttacagcgattttccacccggctaaatgggaaattagttaccaaggaagcgcagaagtttttcatgtgtcgttggcagattttatcaccggaccatatttctactccatgaaaattatcgtagcgagcttgctaatttcagcgctcattgcctatttgctagtaattgcaacatttcgcgggccaaaatggttgcgccgaggcttaagcggattcctatcgatacttcaagcgtttccagatttttcctttattttccttattcaaatggccgtcgtctacatatatcaacaaaccggcgtgttcaccttgaacttttacagcttaaacggcgagcaaatttatgcagcaccaatcgtctgcttgtccatcataccaaccgtgctcttttataaaatgatgatgctcctcatgaaaaacgaatggcaagctgactatatcgagttagcacgcgggaaaggcttaactgatagagcgatactacttcgccatgccacacccaatatgatgcaaagcctgttttatcaatccaaaaccatcgtttggtttattttaagcgcctacctcgttgtagaatttttattcggtatcgaaggcgtgctctactacttactagcgggatttagcccattaaatattttcctagtattagcactcgtgttcaccccattttacttcttttacgcactaatagatctatggattagccgcgggaaaaataccgagagcgcaaatgtgactcgaattccgctgcactggaatagtttccataagacctttacggaaaaagcaaaccttaaaagcaaatggcgcaactttgtagtaacgaccgggcagctcctaaaacgcccctctttcagcataccgctggcaacacttagcatcttactaatcgcaagccttatttacgggcttatgggagacaaaatcaattcgctcaaatttatcagtgatgcgaccggacgagtaaccgatatggcgcctttcaagccaaacgcgcaagtatggctaggcaccgaccaagccggcaactccattctcgaccaattgctagtcggcatcaagtacacgctacttatagcggtcatcattgcaacactacgtgtcgtgattggctatattttggcagtaccgctcgcattttttagcaagccgcgaacccgcaattttgttcaagcgatagcggacgggatgcattatttaccactgtccctgctcgtctttattatcatggtcaacgaatttattagctattctggcgttttcgaaaccagcctatttacacgcataaccttccaaattttaatcatggttgtcatcgttttaccaattacagccaaccgaatcagcagcgaaatttcccaagtgttgaaaaaagagttcgtcctgagtgcactcgtttttggcggaaatgcccgctggattttaaccaagcatatcaatccacaaatctggtcgaaattaattctaatttggattgaacaactcattcaaacgttgcagatgtttgtccatctagctatctttggaattttcatcggtggggcaatcatgggagcggatgacggcatgctcaacccagttattcctgaattatctggtttaatcgctaatgcgaaattcgtgttcgccaaccaccaattctggataattttaccgccattagttgtatttatgattttaattctttgtttccaaatgatggcaaattcgcttttgaaaagagaagaagaaagtaaaaaagcctagttcgttttcagaactaggcttttattatttatggagtgactgtttgatagacagttactgtgacagaagggatagttggatattgtttatttaaaaagtaagcggaattatcgcctgcattttcccaagtaagtgtatcatttgagtaagttcctggagtgtaccaaacccaatcatgtaatgttactccgaagttatctttaattacaatattagtggaatcaccgagcgcaacatctggaaggtatacattttgtccagcagcttcaaacaattctaagcgatgacctgccaatgagctgaaatcactaatctgattttcttcaatttttattgacttaattgttggaatggtactgagaggtgtaacatctttaatttgattaaaattagcattgaagtattctagttgtgttttatttcttaatggctcaatagatgtcagttgattgctgtcggcataaaaaacttggagattatcgaattctgaaaggacactgatgtctgatatattatttgctgaaatagataaattagttaatagaggagtatcttttagcgccgaaatatcttttagttgattgctacttagatttaatatttttaaattagttaaattttcgaaggatggtaaggtggagatctggttaacacctaattctaagttatttaacttaggtaagttcattagcggagtaatatctgtaatttgattgtagttaagtgatactatttctagttctgttaaattagcgagattatctaagttactaatgttattttggcttaaatctacaagttttaagttgtgtaaatattccatccctgttaaatcttccacgccgaaagctatatagaccattgttttaatagtatctagttgttcttgggtgacgactgtatcctgggaaacacctagttcctgtgcgactttaaaagctagagcatcatctgggaaaatttgatcaaccgtggctggaggagcttcttgtaaatttttttctggggcagttgcaatgtttgttgtagcagcatttacttcgacttgctctgctaaaggactaaaactaatcaaggtcgtacatgcaagacttgctagaataaattttttcatgtcatcctactccttttctataatataaatggagtatagcatgcaaattatttaaaaataaaaagcaatcagatatgaacattgcataaaaaaaccgctaaaaagagtatgcttctttttagcggtttttttctttattcaaattcctctatagacttatctaaccagacctcataccattcaagaaagcctaaacgttcttcattgccaaagtaaaaatcaggatagacgccattgtcattatttctgtcatccacccaaatttctccataagaagggccatttacaacaaggttaatcgaaacgccacaaccaaagttagcgatacgcagaagtccaaaaacttctttatcttggaagcatagttcttgccaagcgtcataatcttcatcggacattccttctttataaccaggagcaatccagtcatctgtatgtggaaaaggctcacttagcgtttgcaccccgtactttttatccttgtaatcaagtgatgaacaaagcccgtcctcaagcgtttctaaaccataataagggcccattccgccgttaccaattagctctagaaaagcacgataatctggaggcaacgtaatttgatgctcattttcaaacgtggtaagagtttgattagataaaggttcgttgagtttataggcgtggctttctgaaccaaataaattcaaatcgggatctttttcttttaacgcagtgatttttgcttggattctagctagccgatcttgaaggtcagccatcatttataaatctgctccattagtttcaatcacttgtttataccagtaataacttttcttcggaatacgtgtcattggcgcatcatcttccacatcacgatcaacataaacaaaaccgtaacgtttttgatagccatttaaccagcttagaaggtctgtgaagctccaagtacaatagcctaacatatcaacaccatcactgattgcatcgcgaatagcggttgcgtgtgcgctcaggtagtcaatgcggtagtcatcatttacttctccgtccactaatttatcaaattcacctaaaccgttttcggtaattaaaattggtaaagcatagcggctattaatacgacgaagcgcaatttgtaagccttttggatcgattgtccaatcccagttggttgttttcacgaaaggattaacaacttttttgtaaacgccagggacaccagtttctttcgtgctcccttttttaccagtgaagttcatttcgttattttgaccaacaccatcaagcgggttgtaggctacagttgcggattgatagtagttaacgcccatgaagtcaggttttgcagaagcaagaagttccatatcgccgtcttcaataactggcgcaatatcgttttcttctaaatatttccaaaccgctttcggataacgaccaaaagcgtacatatccatccagaaatagctgtttaattcttctgcatcatcagcagcttgaacgtttttaggatctgtgtcgattggataatgtggtgtgtaagcaaaacttggtccgatttttccatcaggaacgatttcgtggaaagctttgataacactagcgttagccaagttagcaatgtggtttactgcgtacattctttttggatcgctaacttttggtgggtgaagtgcttgcccgtaacccatgcctacaaagatattttgttcgttcaaggaaacccaatatttcacgcggtcgccgtaacgtttgaatagtgttgtggaataatttgtgaaatcttcaatcacttggcgagattcccagccgccatattcatcaaataatgcttgcggaatatcccagtgatacaacgttacaagcggttcgatgtcatatttaagcaactcatcaattaagttatcataaaatttcaacccagcttcattcacttcgcctttaccatttggaaaaatacgagtccaagcaatggagaaacgataagcttttaggccagcttctgccattaattttacgtcttctttataacggtgataatggtcaacagctacatcgccatttgtacctttgaaagtagttccaggaatacgaacatactcgtcccaaactgatttacctttgccgtctgcgtcccatgctccttcgatttgataagctgcagatgcagaaccccataagaaatctttcggaaatggtgaacgtttttgatgttccattaatataacctccattaaagcgatttttattaaaaaactctactaatatattttaaagtatattcttttaaaaagatagttaaaaaacgcagattcggaaaggaatctgcgtttttatattatttatccagcacaaatttttgaattgcttttgctacgccactatcattgttcgatgcggtcgtatagtcagctaattgcttaattctttctggcgcattgcccattgcaattccaagtccagcgaattcaagcatcgttacatcattttcttggtcgccaatacagataacttcgctttgtttaatccctagtttttcggaaagttctttgaccgcgttgcctttactagcgtcgcgatttagaatttctaagtagaaaggggtgctgcgaactaaatggtatttttcacggaaggattcaggcattttcgcaataccagcttccagttcgggtgcttcttcaataaacattgctttcgacataataaaatcttctggaacgttttcgatttctttataaatcagttggcttccagtaagataggcttcgacaattgtgtatttcccgatttctcggttcggcgtgtaaagcgctttgtcatcaaagaaatgcatgtgcaaattactatctaagctcacttgataaatttcttttaagtcgtcgatgccaagcgttaagtgagaaataacttcttttgtatacgtatcttgaacaaacgcgccgttaaagctaatcacgtaatcgccttcttcacgtaattcaaggtcagttaaataattttctacaccaacgagcgggcgtccagtacaaagaaccacttttacaccttttaattttgcttggcgaatggcttcttttacttcatccgtaaccttatgatcatctgtcagtagtgttccatcaatatcaatcgcgattaatttatacaatatactagctccttttccatcataaactcattctagtatagcataaattaggacggatttccggctatctattgaaacgacagggaatttatggcatgattgacatggaaacttgataaaagaaaagagtgaaataatgaaacgtaattatcatgtgaaatttttaaatgaaaaagatgtagaacttgcagaggcagtttgcgcggcatcagaagattattatttaattgaacaaaataaacccgcatcaaaaagcgatgcattaaaaattatcacagaaattccagacgggaaaacgagattcgataaatttatactggcggtattggatgaaaatgaaaaaccaatcggcttagtagatattgtttctgattatccgagaaaaggtcgctggtttattggcctattattattaacaccagacgctcgtggcaatggccttggaaaagtacttcaccaaactattaaagaatgggcaaatgatggtggagctgattccttagcacttggagttctagctgaaaatgaaaaaggacgcggatttttcgagcatctaggttattcgaaacaagaaacgaaacaagcgacatatggtggaaaagagcaagaagttgatatttacactattgatattaaataaaaaaggatgcagcgtatatgctgcatccttttacttatcttatagcatcattatttctttctagaagtgcttccatattaacatgccattgtagttttacttttgaaataataccagcttcttttaattcttttaattgagaatagaaaaatgcttttgaaagcgtacagtagtttttaataactgttgtgctgactgctttagggattatcgctacgccgtcttcaggttgtatatccaggattttaataagcatttcaaaaacaaaagctaattggtcttttttatcacgatattgtagaagtgatttataatagccgtgtttagcaatagatcgcataattgtatactggaagccaaagttttcagggaatagggaaagagaatactcaatgtcttttttcttgtagatgatgatttcgcattctgttaaagtttggtacgtcaaaacaagaggtctattttggaaaatggtgtagtaacccatgaaaaaattagaagtaaatatagaataaattttatcattgtcaaaatcgatatatcctgctaatataccggattttaataaataaacgcagtctttattttcgagaactaaatcatttagtaccgtgtgttctggtatagtaatgctgttggattttaaattgtactgttccatcattgtaacaaattctttgtgattaaatggataggccatcttttatttcgtctccttcaggttcagttgtatgtacacaagtatattgtatcatcgtacaagtgaataaaggtactaaaaaaagaccctttaaatagcttgtcttatgcaattacccgtttgtgagaaaagtaatcgtaatatttttgccacatttgtgaggtaaaacgtctaaaaaaataaataacagcaaagagctaggaataacagcagttgtgcattcctagctcttttaaataatttattttcctattgtataattagcgccattaccagtaacaacgatggttttgttgcggtctgttcggtaaacttttgcttttgctttggttaatgtggtaaccgtttgcgaggtagggtggccgtagccgtttttaccaacgcttattatcgcatattttggttttacaacattgacgaaagctttactagtagctgtttttgagccttgagtgcttacttttaacacgtcagctcgtaaagttttcttcgcttttatcatatctgtttctgcttttgtttgagcatctccagtgagaaggaaggtattttttttataagttaggtgaaggacggcgctccaattattgcgatctgtttttccgtatgtttttacaggacctacaaattgtgcgtttacacctttaattggtaatttcataccagcttttgccgttttgattggtagtttcttctttttggctgtattgacaaaatctttgtaagcagctgttgtgtttgtggagtttggcgcatagaggctcttgactttaatgctattcattacttcgggcagaccgccaatattatctgcatctgggtgagaagcaaccatgacttcaatatcttttacttttaatttcttcaaataattaactacaatcttcccttttcctttgttgccggcatcgattaaaatatcttcgccactaggagccttgatgtaaatggcatccccttgaccaacatcaatgaaatgcacttttatcgttggtgttgcggcttcggcttgaatggagcttggtaccgaaatcccagctactaaagctaacactagaaacaactttaaaatcccttttttcatcccttttcctcttttcctatgaaatgaattcttttagaaatttgtaaaccccgtctgcttcattcgtgtctgtaagttgatttgctgctgctttgacattatcgcttgcgttagccattgcaacaccagttcctgcatattgtatcatgccaatatcattttcaccatcaccaaatgtgataattctttctctaggaataccgtaatattttccaagcgcttctacagcagtttttttgtcagaattagcagggagaatctctaaattattatggtgagaggaaagtacgcgaattccatttgcttgatttaacgcttgacgcacatcggctagtcgagacgtatcgtcctctgaaactacgatggcgtttaaaaattgattcatgttttcatcaaaaacatgcgaatcattaatagaaacaagtgaaaaactattatgtccagtatcaagtcggcttttatcagcaagctctcgaaaaaactcaggtggttcttttgtgtagaataatgtattcgtagagaagaaaaataatggtaaatcaaaatctcgcataatatcatatgtttcacgaatggctttttcttctaaagtagtttttagaaactcttcgtcacgaattgctgcgtaagatccattggatgcaataacatgaccagacttactaacttgaaaacctacttcacgggcggaacgatacatccgtccagtagaaattgaaaaaatatgaccgtcattttctaaagtttggattaaatcacgtgttttttcagaaacagtctgatcttggcgcagtagtgtaccatcaatatccgaacaaattaaatatttattagtcaaataaaatcatcctttttagttaataacataagtataccatgtgcgaatcggaatagttatatatgatacaatagtttttgacaagttcgaaaataaatatttgggggaattccacgatgaaaagacttaactgggcaattcttggaccaggttcgattgcgcaccaatttgcggaagggatgcaagggttaaatcgcgaaatctatgcagtaggagcacgaagtttagagaagggacaagtttttgcaaatcaatacgggattgaaaatgtatacgatgattttgatgcgatgcttgctgatcctatgattgatgtagtgtatattgctacacctcattctaaccactacgaatttattatgaaaagtttacataatgggaaacatgttttagcagaaaaagcgattactgtaagcagtgcggaactgaatgaaataaatgcattagctaaggaaaaagggctaattgttaaggaagccatgacgattttccatatgccgctttataagaaattacgagaaatagttgattcaggcgtaattggtaaacttaaaattatccaagtagctttcggcagtgctaaggaaaaggatccgaaaaatcgtttctataatatggatttagctggtggggcattacttgatattggtacatatgcattgagtttcgcgcgttactttttaagcgcggcacctgatgaagtattaacgacgatgaagaaattcgagacgggcgtggacgaacaatcaggtattttactgaaaaataaagaagaagagttggccgtagtgtcgctttctttccgagctaaagtaccaaaacgcggtgttatagcctgtgaagaaggatttatcactgtagatgagtacccgcgggcagaccgagcaactgttacttacaccgcgacaggaaaagtagaagaaatcgaagcgggtgaaacagataaagcattagaatatgaaattacagcaatggaagaaagtattgcaactggagaaaatacaatctatcaattaacgaatgatgttatcgcgattatgagtgatgttaggtcgcagtggggaattaaatttccttttgaaaaataagaaaatccccgccacacttggcggggatttttaagtatattagtcagttaagttatcttctgtttctgggtcaaagaagtgagatttagacatttcaaatgctaaagttaatacttcatttggttggtgttcagagcgagcatcaacacgagctacgaattcgtgtgtaccaacgcggctatgaagcatgaattcagcaccagtaagctcggcaacaatagtagtcgctttgaaagtgtaacctgggtttgcttcaataacgattggttcatcatgaatgtcttctggacgaataccgaaaacgatttctttaccgtcaaatcctctgtctttaagaagtttaagtttaccttctggaacagcgatagtgaaatcatcaccgataaagttagaaccttctaaacgacctttgaagaagttcattgctgggctaccaataaagccggctacgaacatattcactgggtgatcgtaaacttgttttggtgaaccaacttgttggataacaccgtctttcatgataacgatacgagttgccattgtcattgcttctgtttggtcatgggtaacataaatcatggtagtatctaattgttggtgaagttttgtgatttccgcacgcatttgcacacgtaatttcgcatctaagttggaaagtggttcatccattaggaagacttttgcatcacgaacgattgcacgacctagagcaacacgttgacgttgaccaccggaaagtgcacttggtttacgttttaagtattcagttaagccgagaatatttgctgcatgctcaacacgttttttaatttcgtcttttggcattttacgaagttttaaaccgaatgccatattatcatatacagtcatatgtggatataatgcgtagttttggaataccattgcgatgtcacggtcttttggcgcaacattgttcattactttaccatcaatagatagttcgcctttagaaatttcttctagaccagcaatcatacgtaaagttgtagatttaccacaaccagatggtcctacaaaaacgatgaactctttgtcatcgatttctaaattaaagtcagataccgcagttactttgttatcgtatattttataaatatgttctaatgataattgtgccaacttacttcgcctctttctattttttaacttgtgtttattgtatatgaaaacgctttacaaaaactatggcaatttgcacaaagaaaaaattcatctgttgggcaacttgcataagtagcaaaaaaataaaaagaagtaaagtgacaaaagaccttttatgtgaaagatttttcatggcttttaattctttagtcccaattcaaaaaaatccccagatatcattacaaaaaaactttatcttgtgttatattattatagcagacacaatatatagttagtgggggattatcatgtacgtggaacaacttaatgaacaaatggtgataaaaagggatggccgcaaagcaaactttgatttaattaaaattcgtaatgccgttgaagcatccatgaaagcaattgaattagaggacgaaacttttttagaagagattttgcttgaggttgtaagtgaattacctaacaagacagatatgaccatcgatgaaatccagcaatgcgtcgaaaatactttaatgaaatcgacgtatcctgatgtagcgagggcttacatagagtatcgtcacgaccgggatcacgagcgcgaaaacatcacagatatgcacaaaagcgtcgaaaaattactacaaaaagacaaaacagtagtgaacgaaaatgcaaataaagatgcgactgttttcaatacacaacgcgatttgacagcaggagccgtagcaaaaagctatgccttaaaatacatgctaccaaaacacgtatcgaacgctcatttaaaaggggaaatccattttcacgatttagactacagtccataccatgcgatgacaaactgttgtttaatcgacatcgaaggaatgttatcaaaaggatttacgattggtaatgccaacgtagaaagcccgaaatcaatccaaacagctacagcacaaattgcacaaataatcgcaaacgtagcaagttcacagtacggcggctgctcagttgaccgcattgatgaagttttatccgtttacgcgcgcttaaactttgaaaaacacaaaaaagatgcggctgaatgggtcgttccagaaaaacaagaaggttacgcagcggaaaaaacacgcaaagatatttacgatgcgatgcaaagcttagaatacgaaatcaatacattatatacaagtaacggccaaacaccattcgtcacactaggctttggtcttggtgaagattggtttgcccgtgaaattcaaaaagccatcctaaaagtgcgtattggcggggttggtaaagataaacatactgccattttcccgaaattagtattttcgattcgtcgtggaactaatttaaatgcggaagatccgaactatgacatcaagcaattagcgctggagtgttcctcaaaacggatgtatccagatgtacttaactacgattcactcgttcgtttaacaggcgatttcaaagtaccaatgggttgccgttcatttttaccagcttggaagaacgaaaacggagaacatgttaacgcgggaagaaacaatcttggggttgtaacgcttaacattccgcgaatcgctattcaaagtggcggagacaaagaacgtttctgggaaattttccacgaacgtatgaaaacagtcaaagatgcgctgcttttccgtttaaatcgtgttcgtcaagctcgtccagaaaacgcgccaattctttataaatatggagctttcggtaaacgactacaagacggtgaaaatgtagatcaactgttcaataaagaacgctctacgatttctatcggctatattggtctttacgaagctgcgactgtattttatggcggcgaatgggaaggcgacaaagaagcaaaaaactttacgcttgatattgtgaaagaactaaaagcctatgctgataattggaaagatgaatatggctactggtttagcgtatattcgactccaagtgaaagcttaactgaccgtttcaaccgtttagacaaagaaaaatatggcgtaattaaagacattacagataaagactattaccaaaactctttccattacgatgttcgtaaaaaaatcacaccatttgaaaaaatcgattttgaaaaagattatccagaattttgctctggcggattcattcattattgtgagtatccaaaaatggttcacaatacgaaagcacttgaggctgtatgggattactcctatgatcgtgtagcttatcttggtacaaatacaccaattgataaatgttacgaatgtgattttgaaggtgaatttgttcctacagaagaaggctttaaatgcccaagctgtggaaacactgatcctgaaaaagcagatgttgtaaaacgtacttgtggttatttaggtaatccgatgaaacgtccaatggttcatggacgccacgtagaaattagcaatcgtgtgaaacatatggagaacttaggtgaataatccaaaaccgtgcgaatggaagtcgaatgaattatccagagggtatatcgccgactataaagcattcaactttgtcgacggggagggcgtccggtgcagtttatatgtatctggatgtcctttccactgcgaaggctgctacaacaaggccgcgcaatcatttaaatacggcaaaccttacacaaaagaattagaagacgatattctaaaagacatcggacatgagagcgttcaaggtctgacgttgcttggcggggaaccatttttaaataccgccacatgcctatctgtcgtgaaacgaatccgcgcgacatatgggaaaacgaaagacatttggtcatggacaggctacacttgggatgaaatgatgcaagaaacaactgacaaactcgaacttttatccttaatagatgtccttgtagatggccgctttgaacaaaagctattcgatccaaacttagcattccgcggttccagcaaccaacgaattattgacgtacaaaaatcacttgctgctgatgaagtagtgttatatgaattgtgaaaggagccctctatcacggagggcttttttaataaatgtgaacacttatttaggcataaaatacgctaaaaaagctagcaattgactaatttttaacgtaaaggttcacaaaaagctcacaaaatgaaaacgcattgatgatataatgaaagaaatcgggtgaatagttcgaaaaattcgaaaacggcattgaatgggcttaattaacattatttctagaatggagagaataatattttggaagatattagtttgaacatacataacctaaaaaagaaatacgacgacaagaccataataaataatttgagtattacaattaattttaatcgtaaaataactttaataacgggaatgaatggttctgggaaatcaacattagcaaaaataatagcgggaattattttacctgacgaaggaatattacaaatttcaaatcataccaatttttcaaaatggacaaagagaactacgtactatttatcaagtgcagaacgaggcatgttttataaattgaacggcagacaaaatattgaatatttaacatcattaaaaggtacaaataaaaacgatgtgttaaaaaaactatctacttactgtgagaaattaaattgcaaagatattttagaaatgccagcagaaaagctatctacaggtcaaaaaaagaaagtatttatcttgtctgcgttatgttcgaactgtcagctattattattggatgaacctacaaacgggctggatgatgagagtttttatgcatttattgaaattctagctaaattaaggctagaaaaaaagatagtattaatttctcatgataaaagatttttagatatgccgaatatagagagaataatttttgaaaaaaacggtgagatttattgggaaggatgttagtatgatggattattttggggcttgtataggaacacttaaagcaaatattcttattctttttaagtacaagaaaaaccttgtttcggaattaataatgtttactggtgtatatctggcaatattaatgttaaatgatagcagttcagtaactaagttttatggtgcttctgcaattcaggggcctattcttttattaattggatatatgttttgggcattttctgatatggcattatcgagtacggccaactggattagtacggatgccaagatgggactgctggaacccaaagtccaaagtatattaccttatcctgtacaatcatttttgttacttttaatcagtattttagaaacaattatcattcttttggtagttgtccttatttccattttcgctgacaaaattagttggtcgcaagttccattcatttttttatccgtcatcatccttttgccgtctgttataggaatgtttggaatgggtctggtattcggcggttatgcggttaaagagaagagtttaggaaatttcgtaaacttgtttgcgggcgccttaatcattttttccaatacatttatcgtgggtctaccaaaaatcatttatatcataccatttacttcgggcgtggattttacgagtaatctgtatgtttctggcaaagtcgatttaggtctcctaagtataaatttatttattaatacaatttggcttattgtaggactgatattctttaattattcgttaaaaaaagaaagaactgttggtagttttgatactttttaaaagataactaatcgtcttgtaagaaaaacgaaaaaactccatctataacgcagatggagtttttatacatcaatttctcttgcttttaaataatcatatacctctttattctttagaacccattctctatcgtttttccatatttttccctggtcttttaaacgcgctaattgtttgtaaaaactgctttttgaaagattactgtaagcggctataacactagtgcgcatttcttttggtaaaatgacactgtctttttcatatggagtgccgtgaagttttccgatgttgataaaagatagctctaacttatcggaggaacttgtttcggatgaaaggcttttgaagaaagcatggcgagccaagtcacgcataatgaaaaattgaaaaccaaagttctctggaaacattgagagaaaatactctaaatctttaaacgtgtatttataaaccgtacaagtcgatatcgttttaaataaaaagtcatctacatttccttggaatagactatagtaattgacgaaggagccttttccaagaatcgtgtaaatactgtttgattctgggttcatagaaatggaaacaaatccgtcgataattaaatagacatgactatttctttgatcggctgtattaactaattcagtattttttggaacttttaatttttcgtagttgatgttaccttcgtgagataaccgaatgaattctttgtggttaaatagtgcatccattgttagcagctcctttactctttcgttaactataatatataataacaaaattaacaaaatttaatccacataaatgataccaaattgccactttattggtggaaatttgaagatttaatgagaaattgtaaaaaaacgctattctgattttagtatagttcaggacgacggtcggtaaaaacaggaattatccctctagtttcagcgactaaattcaagtcgatttcagcataaatattgccttcttcttcgccaccatgaacaataacatttcctagtggatcaataacgagcgaatgaccgttaaaatgattatttggatcatcgccaacccggttgacagcaacaacaaaagcttggttttcaatcgcacgagcaataagtagttgttcccattgtttaatgcgttcagctggccactgtgcagaaacaaaaataacttctgagccttctgaagtatgtttgcgaatccattcaggaaatctaatatcataacaaatgaaccctgcacaagaaataccatctagtcgaaatagatttttatcatttccaggttctaagtataagtgttcattcataagttggaataagtgtacctttttatatgaagaaagtagtccgccatatttatcaaaagcgtacatcgtgttggaaaacttgcttccttctgaaatagaaaccgagccgccaattatagcgatttggtgtttttctgaaagcccagctaaaaattcttttgttctctccccatttaaatcagcaaccccagctaattcatttaaagcataacctgtattccacatttctggtaaaactgctatatcggccccattttcagcagcttcaacaattgctttttcaatccgcgcatagtttgcatccggatatttaaaaactacatcggtttgacataatgccaacttccacatgttcttcgctccctttttcttttaaaaataacataagcttggtggcgagtccataccggaacactacgcaccaagctcttagtagtaaaattaatcttttttaagacgtctagataagaaatttccgaatgattgtagtgcttgtaccatgataattaatataatgatggttgtatacatgacagtcggctcaaaacgctggaaaccatattgatatgcaatcgttccaagtccgccagccccaacaagtccagccattgcagttgcgccgataagaccaattgtagcaatcgttaaaccgagaacgataccagaccgagcttcgcgaataactacgctccaaatgatttttggcgttgaaatccccattgcttggtaggcttcaataacaccacggtcaacttcaagtagggcagactccatcaagcgagcgatataaggtgcggtgaatacaacaagtggcataatcacaccttgaatcccaatagtagtaccaacaacaaagcgagttaccggaatcattaagaataataaaataatgaaaggtaacgaacgtaaaatattaattacccagttcaaaatactatatacaactagattttctgattgaccgcctttacgcgttaatgttaaaaatacgccaagtggcaacccaattgctagtgaaattacaagtgtaatcccagtcattgtaagagtttctaaaaatccttgccaaagtatcggtccccattcttcaaaaaacaaactcatagtaactcgacctcctcaacaacgactccagattctttcaaataagcaatagctttactatattcggcttcgtccccttttaaatgaacgagtagttttccaagtgttccgtttttcaaatgatctattccaccagctaaaatgcttggaagaacgtcgaatttgcgtgacacaagagcgagcgcaggttcatcagcctcatcaccaataaaatgaagcgaaactaattttccggtcgcgatatatttttcaagcaaatcttgcgggatgtcgaaactagcttccgagccaacaaagcgttttgttgtcgcgtgttttgctttggtgaaaatatcaagaacggtaccttgctctactaaatggccattttccatcacagcaacccggtcacaaatacgttgaatgacatcaagttcatgtgtaattaagaaaatcgtaatgccaagctcagcgttaatcttaagtaacaactgcaaaattgcttctgttgtttcaggatccaaagcacttgtcgcttcatcgcttaaaagaatttctggttcatgcgcaagagcacgagcaatcgcaacacgttgtttttgaccgccagaaagctgacttggataattgtttcttttatcctctaagccaacaatcgacaagtatttatttacgcgaatctcgatttcgtcttttggaacaccttctaattttaacggtttggcaatgttatcatagacagttgcggttttaagtaagttatatccttggaaaatcataccaattttccgacgagcgacacgaagttctttacttgagagggtagacaaattcttcccgtcaattaaaacttggccggcatcaggacgttcaagcaagttgatgcaacgaacgagggtactttttccggcgccactgtaaccaacgacaccgaaaatttctcctttttcgactgtaatagaaacatttttgacggcttctacggtttttccatttacgttaaatgactttgaaacttgatgtaattcgatcaaaataaaacaactccctagaatgcaggtactacagacccattaaattctttttcaataaatgcttttacgtcatcagaatggtagtatttttctaatgttttaacgacttcatcatctttgttttcgctacgaataacaaatacgtttggatatggattgtcttttgttggttcatggtaaattgcgtctttattaatagaaagtccagcacccattgcgaagttagtattgatagctgctgctgcaacttcatctaattgtgcagggatttgagaagcttcaagttcaacgatttcaaggtcaagtgggttttcagcaatgtctttttttgttgctttttcttccacgccatcttttaatttaataatgccagcatcttcaaatagttttaaaccacggtattcgttacttggatcgtttggaacgacaattttgtcgccttttttcaggtcttttaagtctttaatatcgttagagtaaacacccattgggaatgctactgttttaaaagcaacgtctaatttgtagcctttatctttcttttgttgctctaaaaacgggattgtttggtagttattcgcatcgaggtcaccgtcgtttaaagctgtatttggtgtattataatcatcaaaagttttgattttgatttcaaggccgtcttttttcgctaatttttgaacttcttcagcgatttgttggtgaggtcctgctgttgttccaatggtgatttcttttgtgcttaaggctttatcgtcacttccgcctccacatgctgctaaccctagaataaggcttgatgcaagtaaaattcctaacccttttgttaattttctcatctttttttcctccctagtatgttgattatttatccagatttattcatgaaagcaataaaaaaacttctctatttagaatagagaagtggaaagtcgaacatatccagctcctcttatctaccaaaacggaatacaccattttgctggaattagcaccttcactttacgcttaaataaagttaggttgccgggcttcatcgggccagtccctctgccgctctcgataagagaaaatattttagaaaaacctgttagttaaaaatatacgcattttaagataatttgtcaatgcttttttaagttttaaaaaaatcatactggacaaatacttcagaaaactttactattttaatcaatgaaacttgaaaaggacgggtgccaaatgaaaatttccaaacgcttgcaaaatttaccagatcaatttttttctagccttgtagaaaaagtgggaaagaaagtggcagaaggtcatgacgtgattaatctaggtcaaggaaatccagaccagccaacacccaagcatatcgtggaagcaatgaaaacagcttcagaaaatccaatgaatcataaatattcgttgtttcgtggaaaacaggaacttaaacaagccgtggctgatttttatgcgcgtgaatataatgtaaccatcgatccaaatacagaagtagccattttatttgggacgaaaacagggcttgttgaactgccaatgtgtttaatggatccaggtgatgtaatgcttttaccagatccgggctacccagattatttatcaggagcagttttaggagaagttcagttcgaaacaatgccacttattgctgaaaatgactttttaccagattttaataaaattcctgaagaaattgcgaaaaaagcggagttgatgtatttaaattatccaaataaccccactggcgcggttgctacgactcacttttttgaagaaacggttgcttttgctaaagaaaacaatatcacgattgcacatgattttgcttatggtggtattggttttgacgggaagaaaccgattagctttttagaaactccaggggcgaaagaggttggaatcgaactttatacgctttcgaaaacatataatatggctggctggcgcgtaggatttgctgttgggaataaagacgttgtcgaagcaatcaacctcattcaagatcatatgtatgtaagtttattcgcaggtattcaagatgctgcaattgaggctttcacaggcgatcaaacttgtgtacaagaattaaatgctcgttatgaaagccgtagaaatgcatttatagctgcttgtgataaaattggttgggaagcaattgctccagcgggctctttttttgcatggatgcccgttccaaaagagtttacaagtagtgaattcgcggattacttattaaatgaagttagtgtagctgttgctgacggaagtggtttcgggactttcggtgagggttatgtacgcgtaggacttttaatggatgaaaaacgattagaagaggcagtggcgcgaatttccaagctacatttatttgataaagtggcacaaaattaagagattatgtgattttaagagaaaatagcttgtaataattcagataattaactgtatgtgttataattgattagtaagtctattcttagcatgttgttttatgaagacaggccggaatttaaagtatttagtgagatttttttgcattaaataaaaagtatctgtcccggttaaagccggcgaaatccaggaatgagaggactgtaaaaaaatggcagaaaagaaaattcttgtagtagatgacgaaaaaccgattgcggatatagttaagtttaatctaaataaagaaggctttgatgtatattgcgcctatgatggcgatgaagcgttagaacttgtagaagaagttcagccagatttgattttactggacattatgcttccaggtcgtgatggtattgaggtatgtcgtgaagtacgtaagaagtatgatatgccaataattatggtaactgcaaaagattccgaaattgataaagttatcgggcttgaacttggtgccgatgattacgttacgaaaccatttagtaaccgcgaattaatcgctcgtgtgaaagccaacttgcgccgtcatagccaagtaagctcaaacgctgccgaggaagaagaaaacagtgaattagaaattggttcattaattattcatccagacgcatatgttgcttcaaaacgtggagaaacaatcgaacttacgcatcgtgaattcgaattacttcattatttagctaaacatatgggtcaagtcatgacaagagaacatttacttcaaacagtttggggctatgattacttcggtgatgttcgtacggtcgatgttactgttcgacgtctacgcgaaaaaattgaagataatccaagccatccagcgtggttagttacaagacgcggcgttggttattatttacgcaatccagaacaagaataaataaacaagaagtggtcgccaagtaaaaaacttggaggaccactttttttgggtatatccgcatacttaataattatttttataaataaattgacccaaataacaggaaaaacaatacgtctaccccataacatatggtatactaatttaaatatattaccccgaataggagtagaaagacttatgcataaaatgagattttttcagtctgtacaatttaagttagttattatgtatttgctattaattattgtagcaatgcaagtaatcggcgcgtattttgtacgtgagctggaagggcaactggagaagaattttcaagattcaatcacgaatagcatcacgttgctggattataatgctagagaagaaatcataaaaaatagcgataactcagtgaagctacaaaatgatattcgagagcttttggtcgactattctcgtgcaagcagcaacataatcgaagtaagaatagtagatgacaaaggcaaaattctcgggacttccaatttagataatcaaggcatcgtttggcaaaaaagtaacgatccccttgttaaacgaaccttatcactcggaactacatctgaggataaaatttataaagacgaatcaaataaaaataaccgtgtctgggtgaacgtatcctccatcaaaaataaaggacaagtgataggggctatttatcttgtcgctgatattgaaagtgtatataaacaagtggatgatattacgaacattttcattactggtactttgattgccatgatcattacagcggtacttggaattttactatccagaacgattacgaagccaattattgaaatgaaacgtcaagcctatgcgatggcgcgaggaaactacagccggaaagttaaagtctatggtgtggatgaaattggcgaactagcagattccttcaatacattaacaaaacgtgttcaagaagcacaggccatgacagaaggagaacggcgcaaactttcctccgtacttgcctatatgaccgatggagtaattgctacagaccgccgcggaaaagttattcttattaacacgccagctgaaaaaatgctacgcgttaagcatgagagtgccaatggtcgatcaattattgatgtactagatattggtgatacctaccaatttgaagatttgatggaagtcgatggttcattaacgatggaccgtagcacgcttgataaaccatacgtactgcgcgctaatttttccgttattcaaagagaaactggatttaataatggtgttattgcggtactacacgatattaccgaccaagaaaaagtcgatcaagaacgccgcgatttcgtttctaatgtgtcgcacgaattaagaaccccgcttacaagtatgcatagttacttagaggctctaagtgacggggcatgggaagataaagaaattgcgccacgtttccttgaagtgactcaaaacgaaacagaacgaatgattcgtcttgtaaatgacctgcttaaactttcaagaatggacggaggaagagagcaattagaaaaaagtttcgttaatttcacagacttcttcaaccatattatcgatcgttttgaaatgatgaaaaaagaaacaatcatgtttaaacgccacattccaaaagaaccggttatcatcgaaattgatgaagataaagtaatgcaagtattagataatattatttcgaatgccaataaatattcaccggacgggggtcgaatttctttctacttgaaaaaatttgaagatgaaattgaagttagtatagctgacgaaggtttaggcgtacctgatgaagatttagcaaatgtattcgaccgctttttccgtgttgataaagctcgctcgcgggaaatgggaggaacagggttaggactagcgatagctcgcgaagttatcgaagctcatggtggccgaatttgggcagaacgcaacaagtccaaaggtacgataattaaattcaccctgccatacagtgacttaccggaggatgattgggaatgatgaaaaaaacaggatttcgctcatttttattaacagttctagttgtgctcagtatcgtcttaagctactttatttggaagggacaacctgattacgaagcgattaacgttaaagaagttgaaaaaacaaccattgataaaacgatgacaacatcacaagtatttaaaccatataaattagctgttaatgcaaatgaaattaattaccaaagcttagactcagacttgttaaatgagttaatggcacaaggcaaagcatttagtttctcagaagtagttcttgccaataaaaaaagtaatgaagaatacgagaaattaatccataaaaatgggacgatagagattattttccctaacaatattccgttttcaatttttgctcaaaattttcaagtggaaggagaagggctagaatctgccttctttaatcgtattgtatttgatataaataacacggatactgggcttcattccgtttattttgccaatgatgaccaagaaaatatttaccaaagctccttgcaaaataaagatattgataaaattgaaaaaattgttaaaaagaacgaaagtaaactcgcgcaaaacgataaagttatttccaacaaacgcaatctgttcttaagctccgaaaaaacaaagctaaatcgcaaaaaatacattacagattcgcttgaaatcaatctatttacctcagcgctatttcaagattcaggtacagttaagagcgaaggaaatacctatacagacggctctagcgtcattgaaatggatacagaaaataaggttttagaatatgtgaatccttctcaagagcgcactaatccagaagatttaaacaacgtcaaacgagctggtttgattcaagatagtttcaatttcgtaaatgatcatgcgggctggactggggatggcgcttattatttcaccggttacgcagccgaaagcgcaacgaccaattttagtttgtttatagataatttacaagtttataatgaagatggtatggctgatatttctgttacagaaggcctcgaagcagtttataaatacatgcgtccatttttccgtttagatacggacgttcctggagagaaaaaagaagtaactatggagtcgtcttattccgtctacaatgcactagttgaaaatcctaatgtgaaagccgaagaaatagaagatattgttcctggctatcacatgacaagaagtgaatcatctggcatgaaccgcattgttacattagagccaacttggttatataaatatcatgataaatggttcatcttccaaccagaagcagaaaaggcgggtgaataaagatggattggcgtaaaacacaaatgatttttattgtaacgctcctcattttaaatgtctttttagcagtgattttctttaataaacaattatcagatgatccagacacattaggaaatgaaactttagaagaacgattaaaagcagataatatttctcatcctgatttatcaagtaagccaactagtggagctatcttcactaccgaacaagccgcttttacgacaaaagatgttagtgatttgacaggacaagcaattacactcaaagacaacaataaacaaatatattctgtcctacaaacacccataaaagctggcaaaaaaggcaacaatcctgattttcaaaaattcatggaatccgatgtgtatcgcggcgagtcttatgagttttggaactacgacaaagatgcgcgaacacttactttcaatcaattaatcaataataatatggttctttttgacgaagctgggcaaattatcttttatttagataaagatgatcgagtaatttcttacgagcaaacgtggatgtccaaacaagatgatttaaaagacaagacaaacttaatgtcatccactgatgcgttagaagctgtttaccaacacggtgagttaaaacaagacagtgacgttgtttctgcgactttcggttactatacgaccgtgcaattgccttcagggaatgtctatttcccagtttggtgttttgaagtgaaacattccggcgagactagttacgttcttgtaaatgcaaaagatgaacaagttattaaccaatccgaaaataaaacaacaaccgagccaaccacagaattatccagtcgtcaaaaagcaaaataaaatcagagtcaacctaaatacatgaaatttaggttggctttttcaaccgattggcatgcaattttaccgaattagcgttacaatggaagatatataagcctttagggggataaaaaaatgttcgcaaataaaattctaactgaaaaagacacggaccaaatccgatttagtatattagccagtggaagttcaggaaatgcaactctagtagaaactggcgaccaaaaaattctcatcgactgtggtttaagcggcaagaaaatggaaggtttattcgcgcaagttggtcgagatatgaatgatttagacgcgattttaattactcatgaacactcagaccatattaaaggccttggtgtgcttgctcgtaaatataaactccctatttatgctaatgcaaaaacatggaaagcaatggataatatgattggcgaagtttcttctgaacagaagtttcaatttgacatggaaacagtgaaatcttttgggagcatgcaagtagaatcctttggtgtatctcatgacgcgattgagccgatgttttacatatttcataaggggaataaaaaatttgtaatgataaccgacacaggatatgttagtgatcgaatgaaagggcatattgcaggcgctgatgcatacctttttgaaagtaatcatgatgtagagatgcttcgaatgggacgctatccttggaatgtcaaacgtagaattcttggcgacgagggacatgtaagtaatgaagatgcagcaatagcaatgagcgaagtaattacagatcaaacgaaacgaatttatttaggtcatcttagtaaagacaacaatatgaaagaactagcgcggatgagcgtaacgcaaacgcttatttcagaaggaatcgatgttggtggcaagctagagatttttgataccgatcctgataacgctacgtctatcttcactatctaagtttcaccatttttttaaagctttttcattgttttttcatatttgcggtttactatggaagtatataaatgcgaaatttgcagagaggaaggaagacatggacgagaaagaaaaaaatttaaatgaaaacagcgagaacgagagcacgccaaaaagagaggtcgaggagactttacatacaaaagatagctcgcaaccagtccaagaaactcctatagtagaaggcgtgacaccagaaggagagcaatttgccggagcaacagaagaagctgctgaggcaagctctaccaatgcattttttgaggaagcaagcagtaaagagcctgaaccagctagaccagctccaggaccaagacgtcctagtggtgcaggtggcggcacgattccaccgaatagagtgaataacggcggcggtggcagcgggaatcagcctccgaaacgcaacaaacacttacttggatactttttaactgcacttattggcgttattattggcggacttattatattcttcgtagcatgggataacggcgataacgcagatacaacttctaactcaaataataaaccgactaaagtagaaaaagtttctgtaaataccacctctgatgtaactaaagcggttgataaagtacaagatgccgtagttagtgtactgaattaccagtcatcttcatctttagacggaacaacaagttctgaaaaagaagcttcatcaggttcaggtgttatttataaaaaagcaaatggaaaagcatatatcgtgacgaataatcacgtggtagctgatgcgaataaattagaagtaacatttacaaacggtaaaaaatcagaagcaaaattactaggaacagacgaatggaacgatttagctgtccttgaaattgatgataaaaatgtcagcacagttgctacgtttggcgattctgattcattaaaacttggtgagccagcgattgcgattggtagcccacttggaactgaattttccggttctgtaacacaaggtattatttccggtttaaaccgtgctgtaccagttgatacaaacggcgacggaacagaagactgggaagcagatgttatccaaacagatgcagcaattaacccaggtaacagtggtggagctttaatcaatattgaaggacaagtaatcggtattaactcgatgaaaatttcaatggaaaatgtagaaggtattagctttgcgattccaagtaacactgtagagccaatcatcgaacaacttgaaactaaaggcgaagtagagcgtccttctctaggcgtttcattacgtgatgttgatacaattccagaaacacaacaaaaaaatatcttgaaattaccagatagcgtagattacggtgcaatggtacaacaagtagtatctggctcagcagcagacaaagcaggacttaaacaatatgatgttattgttgaactaaacggtgaaaaagtaactaactccatgacacttcgcaaaatattatatggcaacgatgtgaaaattggcgataaagtcaaagtgaaatactaccgtgacggtaaagagcaatcaacagacattaaattagaagcagcaaaaacaacaacatgataactaaaaccatcctcttaaaaaagagggtggtttttttctgtggaaaacttgtggatagtgatttttttcagatatagatatggtagagaacaagaattcggctactaaatataggcggttattgtggatatgtggataacttctgtggataacctgtgtgtaagcagtgaatatcttgtggaaaagaacaattttgataattaaatcaataaactcagatttatttttgaaaaaaacacattttttgcgaaaatataggtcaaaaagcaaaaatgtggatagaaagccatttatccacaattgaaagataaataaggcgaaaatgtgaaagcgaaaacaactttattaaatatataaatcgatgagagtgattgtggcacagttggttagcttgttttcaaaatgtactttcgatacaaaataacaagtatttttgcttgtggataagctgtggatagtgaaaatggggtatcatatatattgtatggaatatacgttcggacacaaaatagagaatcggcttgtggatatgtggatagtttttgtggataagttgtgtataagggcgggataacctgtggagtaagtttttttgtggtaatttcttttttcattttggctagtgttgcgggtgctctttgaggtatgataaaagtattaataaagatgagggtgacgtaaatgaatatccaaattgtgacagtcggtaaattaaaagaaaaatatctagtccaggggattgctgaatatttaaagcgactgagcgcatatgctaaagtgtcaattgtcgaagttccagatgaaaaggcaccagaagtgttgagtgatgcggaaatgaaacaagtgaaggataaagaaggtgtgcggattttagcgaagattccggatgatgcccacgtgatagcgctggcgattgatgggaaaatgaagtcgagtgaggaatttgcagcggatttggataaactggcgacttatggtaagagtaaggtggcgtttgtgattggtggatcgctggggcttagtgaggctgttttgaagcggagtaatgagcagatttcgtttgggaggttaacgctgccgcaccagttgatgaggttggtgcttgtggagcaggtttaccgggcgtttcggattgttcggggggagccttatcataaatagctagccgcttgaaaggggtgtaatcaacaacttaacttttgaaagctggtttacttttttcgataagccatttttcaccatttgaaattgtatgatctgcatgataaattaatgtttttcgaagtgctgcatattctgtgggtaatgtttcatagtttagaaaatgatagtttagtgcgatgctttcgggaataattccaacgccaagttcattattgcagatttcgacaagtgtttctggaatattgatctctgatatggagacatttgggatattaaaatcattaatgagagcagccagggcgcggtatgaataacattgtttgctgaagacgtataatcgttcttccgctaatattttttggactgattttccagctgtgttgcctgcgaaaactagtttatcccatgagagcgtttgtgagatgatttggctatcttgaaataaattttctttttcgagttcagcgacataagcgatggttagttctctgttagctatttttggtattaattcacttgtacttccgctaacgatagataattttttatttggaaactgttgatagaactctttaatgattgtgttaaattccataggcaaagaagattgcgtaataccgattgagatcgtttcttcttcattattgataatatcaatcgtttcctcccataatagaatcatttttttgaattgttgatagattttttcgccctctttagttagttccacaccattcgagtgccggaagaaaagttgagtttggaactgtttttcgatattttttattttattggacatattagactgtaaatgatgcagttcattcgctgctgcagaaatactctttagttcagctactttattaaatgctttcatgttttcaatatccataatttgctccttttgatatcaaaaataatgataccggcatatgatttacgcatttcaaatgatggcacagatagattatactttatttacagtacaaattcaaatggggggttatgttatgaatacaaccattcaacaattagttaaacatgtttcagtaagagaatttaaaaatgaaagattatcagatgaaaccaaacaacatttattaacagctgcgagaagtgcctctagttcgcattttgtgcaatctttttctattttagaaatcacagatgaaaagctaagaaaggaactagctgaaattacgaatagtgcttcttatgtaaaccaaacggggaccttttatgtgtttgtaggtgatttataccgacaatcaaaacttttactggagaataatcgaactttggatgggttgagaaatatggaatcattactcgtctcggtgatagatgcaacgattgcagctcaaaatatggttattgctgctgagtctcttgatttaggaatttgctatatcggtggaataagaaatgatattgaaaaagtagctgaattgctaaacttaccaccatttacgatacctgttttcggattaactgtaggggttccggtatataaaaatcaagtaaaaccacggctattactagaaaatcaagtaggtgaaaatcagtacccatatgaacaatttacagatttaaaagcgtatgaggaattgaccaaagattattatgctttacgtgaaaaaaatcagcatcaaacttcatggggagacaagaatgtagagttttttgaagaaatacgaagaccagaaatagcgggatttttgaaaaaacaagggtttacactggattaattaattttcgttgtagggtgtataaaaaataataggattaaatttatgaaaagctggaagagtattttttccggctttttatttgatttgggctattatttagtgatagaaagcttaaactagattagattgggatagatttgtataattaatagggaatttaaattgcactattttatcctaaataaatttcataaaaggaggattcaaatgaaatttctaaaaaaatacgggttttactttttattactcggcgttttgagtgattttctaacgccttacatacttggaatcttttacccagaattaaaccaaatgacgcgggttatgagtgtgtttggggatgtggctagtccggtgcggggagcgtttttggtttggtcggtggtgtctggggtgttctttgtgctcgcttttccggcgatttatcagagcgttgttaaaacttcgcggactttggcgattttgcttgcttctgcgattggtttgtatgggattggcgattgtatttttaccgggttgtttagtattgatacggagcaggcgagttggacgttttcgacttgggttcataatattggctcggggcttggttatgcgggatttttgatttttccgttgtttctggtcattctttaccggaaaactggcgataagacccgcagcaatatctatctagttttactcattgttagtttgctgtcggccggtgtttatgggcttgcgcggattcctgctgtgaatgacttgccggttttagataaaattggattttgtcagcgaattagtttcttctttaattatttgccgattgttgtttttggaattgatcggattagaaaaccctagattgtttaagaatctagggttttttgttcgcaaagttcgataaattgctggaaatcttcttgtttggctaatttttttacaaagctgcgttcgtttaagatggttacgagttggccgaataattcttcaaaagagttgtcgcgttcttctttcatggtgagcaggaggacgagtttgacgcgatttccaccccagtcgattggtttatcaagtgcgcatactgcgacggcatttttctttgcgcttcgctggatggcgtgcgggattgcgtagtagtttccgtagcatgtgctagataattgttctcgttcgaacacttttgaaacatagtcggagtcgcagtagtcgaatgcagttaactgttcgcaaagaaacgtaattacttcttcttttgatttgaagttttgttttgggaagaaaagctcttttttgaaaaattttctagaaatcgaatcggcttttggcttagtttctaaaatatgcttgattttctgcaaatctgcttcggttaaaagtaaatcgtaatgatagactgggatgtcggttgttaagtgtaatggttcggcggtaataattaaatggatttctttgtctaaggtgaattgttttatgtcgaaaatggattgggaaacgagtaaatcaatcgaaaaatcaggtattttctttagttgattatgaattaagcgttgactgcctgcgccgtatggggtaactaagagtatctttctctttttgccgtgattaattgtttctgaagcggacagaaagtgtaacgcaatataagcgatttcgtcatctgggaaagtgattgcaagctctttttgaataaaggcagaggcataaacactgacgttataaataaatgggaacttgttttttaattcttcggtgagtgggttggttaaatattgtttgtgattggctcttttgtaaagggctgaaatgtgggccactagataggtggctattttttcgtcagctgaaaagtcgatatggaaattttggtccactgcttcaaggagccgagtgacaacgctgccaaaaacttttgcgtcaatggtggaagttgtcgctagtttgccagaatatagccgggcgatatagcttagttcttgggttggaatatcgatgtgcagttcttcttctaacgtttcggttaggtgctctgccatttcaaggctagttttatcttgctctagtaaagcggttcgctctatatagctgcccatactaatgcgctcaattaaaacggcgatatgcaaaatgaacgaaatcgtcgaaaaatcattcatgaaaaattcgttctttttgtggtaggcaataataagctcggaaagttgttttagattgcaataatcgaagtaatcggcgtatttatctaggcttaattgatggttttcgatttcctgattgaggaatagattgaagatgcagcgcttttcttcttcgccgccctcggttattagttcgttgttttttcgaataatacatagcgactcatctttttcagcgataaccgcgttaagctctttaataatacgagctaacgtcgattcgctaatgaaaaattgatctgctaaatcatagaaattggtatgatcttgttcgattatatggcgtaataattcaaaatgtaagttttcgttatttttggatagattcatttgtgaaagttgctcatttggtgttaaaaaatagccttttccagcttttgatgcaatgattgtggaactaaatgactggttaatttgaataatgtcatttcgcacagttttggaagaaacgcctaacatttctgaaagtgcttttgctgttactgtcctttggctgtcgttaagcttttctaacaatgaacgttgcctttctgaaatagtcattatatccccccctaattctcccttaacctattgttattatacaacaccaaatagagaaagagacgagttttttgtcccaatctctatttaagtggctatcaattagcagcgatgttctcttcttcggcttctttttctaaagcaacgagatttttctcatatacttttaggaatgggtagtacattagaccgtttaggaaaatcaggatgaatacgagaacgatggctcgccagtccatggtggatagaaatgctccaattggcgcgggcatttgccaagagaagacggcgaacgtttttccgacaatcccgaaatacatacaaagataagtgatgacaccgttgaatacggatgtgaaaatgaacgggaagaagaaaattggattcagcattaatggtgttccgaaaatcagtggctcagaaattccgaatatggaaggtaagaagccgactttcccgacggtgcttagttgtttggatttggatcgcatcattaaaaaggcaagtgcgagaacggaaccagaaccaccaatgataacgaaatacgtccagaacggtgtcgtgaaaatattcgtcaaatcttggccagccattttttcagcggcgttgattgaaaggtttccgtcacgaattgggcctagaattccggcaagtgcggcatcgtgcacaccgaagaaccagaataggtgaactaggaaaatacttagaatcgtgaatggtaagctatcggctgctttgaagctcggtgccattttttcatataagaattggatggcagttgtgtctagcaggttgaaaatgataaagataatcgagaaaaaggtcattaaaataataccaggaactagggctgcgaatgtctcagatagtgaggctgggacgctatcgggcatggttattcgaccgacatttttcttgcgcatccagtgataaccttctacggtaacgatggcgacgaaaatcgaaagtaatattccgcgtccgtcaaggaaactaatgtcgacttctttgccgtcccaacccattttgattggattaagtacgagcataaagaaaccggcgatagaaaacataagtgggcgtaagaaatcttcgtggtagtgcttgcataaataatacgtgataccgacgcaaatatataacgacatggcgccaagtgtgattccactaatccagtttaagattaaatcatatttttcagcgaagttagcccaggcaagcaggaagccgtttttcgtatcatctgtgactggagccgctttcaaaataatcggaattgaaccaaacaatgtaattggcagcatggacataaaggcatctctggttgctttcaaatggcgttgctggctaagtttgttagccagcggggaaatatattgatccattttttcgctaatggtattaaatcgcatgtttttatcctcctattaatttctggatgtcttcgtaaacccctttgccatccatgatgccgtattttactggtgaaatggcatggactgggacgctgacggcctgtttaatttgtggcataaggaaacggatttgagggccgataagaacgaggtcgacaccgtccaaataatcggtatactcggattcgctataagcagtgacgtttaatgtgttgccagaagcggcttcgatttttttcgcaagcattcctgtagacataccagcattacaaactaacatgatatttttcattttcctgctcctttttttaaaattctcttcgtttgatgagttttccctgactttcaatcatttctttgaaccagtagtaggaagcttttggttttctgatttggttgttttcgaaatcaacggcaacaagtccgtaacgcttttcgactccatttttccaagagtaaaggtcgaacggggaccaagcgtagtagccacgaacgtcacaaccagcatcaattgcgttgaaaatggcgttaatatggtcgttcataaaggcgattcggtaggcatcatctacttgtggcactgaaacatcttcgcgaacaccaatgccgttttctgtcacataaagtggtaattgatagcgttcgtaagcctcgattaagccatcttgtaagccttttggataaatttctgtatcccattcggtcgtttcgttggcgggatctttcacttgttcgaaccagtttttgatgagaactttactttcgccttttttaccgctgtggttaaattgtagctgggtttcgccgccagtgtatggtttaacgagcgtgcgcgaatagtaatttaagccgatgaagtcgacagtgttttgtttaattgtttgtagttcgtctgttttcataaagctgatgtcgtgcgattttgctagttcggcaatgagatcgaccgggaattcaccaagtgcggctgtttcgagaatccagttgttgcaatagttatcagcgtagcgcatcgcgattttcgtttcgatactttcatcgacaccgttcaccggcgtgtagctgtgaacaataccaatttgccctggatagccgccttctttaaaagtcttcacgcctaaagcactcgcgtacatcacattataagccgcaatcattgttttttgcgtatcttgatagccgggcggatagttgccgattttatatccgttagcaacaaaccattttggctcgttaaaagtggtccaattggtgattttgtcgccaaagtggtcgtaacaaactttggcataatgctcgaatgcagcacaaacgtcgtgatccaaccagccaccagtttcttcccaatattgcggcaaatcccaatgataaagtgtcacaaacggctcaatatcatattttttacacgtatctagcaagttttgataaaattcgatcccttttaagttgatgtcaccttgtctatttttaataattcgcggccaagataaggaaaaacgatacgaattttgtccgccttctttcatcatccgaatgtcttcctcatagcggtggtagtggtcgctcgccacatcgccattctcaagacccgcttcgtgcaagtagtagtcccacatcgattctgccttgccatccacattccaagcaccttcacattgataagaggccgttgcacctccccataaaaagttattattcattagataaactccatttccattgataaatttctcccagttcccgaatcatttccacggcaatatccgtagaagacaagtgaccctccgcatgaacaagcagtaaatccacctctctcattcggttctctgaagatagttttcgtaaaagttccgcgtgcgctcggtgcgccagtttaatctcatctttcgcttcagtaattttctgagtgaaagcttcgatgttttgctgttttacttctttcagtgcctcaaaagcacaacttttcgcattcccggcgtgtaagatgatcgccatggaatcgagttctgttgttagttcgttgctatctgtcacgtaaagacctccttttgatttgtctttactatagctggaaaaatgggggaggtgaaattattatttgccactttggaagtggaaattggttttgggttggaatttaggggttactaggatatgatgatagttagagagaaaatattacataggagatgaataaatgatgaaaaaaacagtacacggatgggaaataatatctaatttagacgtaagagtataccaagatgaagctggcggggttgcgattttagtagatagagataattttggtgatcaagtgccagtgctattgaattttgatggtgatggagtggatataaaagctctttcgtatttaacaaaaagtgttcgagtttcgctggataagaatgtgcggattgaatggcatgaggattattttgaagagaaaacacaagcaatggagaacatcgaggtggaacgggattaaccgttaattatataaaaaaaggagagcaacaagatgagcaaaaaattagtaagtattatatttttagggatttgtcttttgttagtaggatgtggtaaagatgttgttgatagcaaatttactgggaagtggaagttggaatcggttagtgtaggtacgagtgacgggaagaatttaaaagatactggtatggcaagtaagatgagtgtggatctggacatggatgcagatggtaatgtaacagaattgtatattgatgatgaagttgccataacgaattcttataaattaaaacaaaaagatggcgataaataccaatatgatggtccggtagttagtaaaaaagtatatggttatgaaacagaaagtgaaaaagcgaacgtgcaaaaggtccttaaaatgcttgaagcacaggatggtattgagataacgaaaaagtgaacaaaaaggaaatgaataccgcgtggatactaaagaaaaaagagattatgtactttctatggagcttgaaagcgagaatttagttttgaaaaaagtggatgacaaagagaacagtttgattaaggaaacatataagaaaaattaaactataagaaatgggatccgttataaccacctattgttttaaaaaatataaaataaacgcctccattaatttcattttagatgagattagtgggggtgtttatgatagaagtcctttttttattttatctgagatagtgaatttaaaaatatgcttgtttacgaaatatatgaaactgataagtaaataggttccgccgaaaataagaagaaagatagaactatttaaactatgactactaaaataaccaaataataatgctcctatcggtaatgtggctacacttaggctataaagagcgctgaaaactttgcccaaatgttctttttgaattaatacttggaaaaaaggtttttggacaacatgggtgactcctaaaaaagtacttgcaatcccccagataagaataataagggaagaatttacaaaataagagcttattaacattgttagcccaaacatgagtgtgcataaagttagtacttttccgatttccatgaatttcagtaataaggtggctaggagagttgagccaatcaatgttccaatggccattgttgatgtcaatagtccaagcacaatggcacttccttgctcttttgcaattaacacttggtagacattcaatccgccgaacataaaatttgccatgcctccaccgatagcgataaataaaatggttttattttgaaatagttcaatgaagcctttaaatacattttttaagaaaggttcaggttctttattatttgcatctgtaggttcttttatttttgaaaaagaaaatattgcgaataagaaggtaaatatattggcaactaaaagggtgattgttgaaaaaatattgattaagaatcctgttagagcattaaataaatattcagtaccattataagcaacagacatgtatgattgagcacttgctagctgttctttttttatgataaacggagtcattgcgtcttgtatagtatatgtattcataccaaaaagggaagctaaaaatgctaaaacacataataaaagaggactttgaaaatccaacaaaatactgataaccataattaaaatcgcaaataattgcccgaattcgcataaaagtaaggatcttttcttggaatgtgtatctatccagtgaccaaataaaaaggaaaaaatgttaggtataaaaatagcaaaattaactactcctacccaaaacgaattattagtgagtgttaaaatataccaagataatacaatgtaatacatgctatccccggcattactgattaaacgacctaaccataaatatctaaaatttttgttttttaacatgtgtccagtccttttgtgttttataatatgttgtacttctaatttagcggttataattagaattgtcaaaatttttattataataatgttggaggagattgataggagaagttgcgggagaggatttgttgagtctataataaactaaaagctgaagattataagatatattgggtatataattgttatacaatcaatcaagtatatcgtaaaaggagtgaaccaaaatgacaaacacactaaaaaccagctaccaaaaaacaccttataaactaggcggaaacggtccgcgcaatgttggtgttcttacagaagcacttcaaaatattgatgataactcagaaagcgatatttacggaaatggtgcagttattgaaaactttgaaacaaaaattgcgaaaattctcgggaaacaatctgcggtgtttttcccaagtgggacgatggctcagcaaattgcgttgagaatttgggctgaccggaaagagaatcggtgcgtggcatatcatcctctctctcatttggagattcatgagcaagatgggctaaaagaattgcaacaaatcacgccaatattacttggaacagcgaatcgacttttgacaattgacgatattaaaagtcttcgcgagccagtttctagcgtgcttatcgaacttcctcaacgagaaattggtggacagcttccttcttttgaagagcttgaggagatttcggagtattgccatgaacagggtatttcgttgcatctggacggggctcggttatgggaaatcatgccgttttatcagaagtctgcggaagatatttgttcactgtttgatagcgtgtatgtgtcgttttacaaagggattggcgggattgctggggcgattttggctgggaatgctgattttgtgcaagaggcgaaaatctggaaacgacggtatggtggagatttgattagtctgtatccatatattttgtccgcggattactattttgaaaaacgaattgggaaaatggcggaatattttgaggcggcgaaaggattggctgagcgatttaattcgtgtccaggcttgaagactgtgccggaagtgccgatttctaatatgtttcatgtttattttgagaagtcggctgatgaggttgggacgattttgacgaagattcaggatgaaactggggttgggatttcggggtatttgcaggagaaatcggcggatgtttgtgcgtttgaggtttcggttggggatgcgtttgcggagataccgacaaaagatttagaatcagcttttgaatgtttggaaaaggaacttagactataaatttggatatgaaaagacaagctattttctatagtagcttgtcttttttagtatgaattatattttatttcgagtgattacttgatcttcataagattttagttcggatagaatttcatcaattgtcttagttttttcttttggcatttctaaggatgtctcttctttttctataatttcatcataaccttttcttggttcttgaaacattttatcaagttcttcagagctactaaaaattttcacatcttttccagcagtaaaactcaaatttttatcattatttatgtatccatcaatacttattccaataggattaaattcttcattggtgaaagtaactgtattaaaatctggaatattgtgtttaaggtacagtgtaactttttctttttgctcattaaaaaaagcttgatcttttttttcttgctcttgatgctgcatataaagataacctcctactatagataatattgtgacaattagcacaataactagtataataattttagttcgttttgacatagaagacctccagagatgaaaggatgattgaattggctacgaaaaaaacttttactgatgaaacttatttcaagctttctgaagcggtgtatcaagatggtacattaaatagtaaaaaaattaatattgaattaagtgatagaacaaaaagtaattggaaagtagtgtcaaaattaaatgatagagctactaacacacaagcttttgcagttattccagaagaaaaaggaaaagatggtaaaatctattataaccataataacatgatttttgtctatcgcggaacaaaagagtcaaaagattttggcagtgatattattaatgtatttgcagggagaaattctagaactagtttagatagaaaatcaaaaaatcctttccaagtctctaaagaatggacagaagaggtattaaaagaatttaatcctaaaaatcctacttctactggacatagtttaggcggagcgctatcgcattataattcaattttatacgattttaatgcgactacatacgcagctcctaatatttatcaattattacctgaagataagcaaaagaaagttcgtgatggcttttataataattcaattattgatttcactcatgatgatgacatgattggaacttttgatcaatttagttcacctattataggttcccaatatatagcagaacgaaataacgtcaaagttggagccaaagggctttttggagctattccaggacattataatgagacatttgaaggctgtttttctagcgatgggacgatgaagttaaaagtagatgtagattctattattaaacatgctcaagacattgatgatattattcagtcactacaaacgaataatgctgacttagagaaccttgaagaaaaactacaaataggttccaagaaaatacaaaatcaattagaggaagaaataagaattggtggagcttatagtgaattgactacctgggatatagatgatgttttaacagaactatgcacaaaatataaaaatggagtttattgcttttataatccgaatgagtttgaaaaatattatgaaatgaatcatcagacacgtagactattgaaaaattttcaaatagagcttattgatgcagcgcagtcttttcgagaaacagatacgcgtttaggaaaatggatttctaataacaattaaaagggagtgattatatgtatggcaatacttatcaacgtgaatacgcccgtgcaattgggaacacatcttatgatttgaactatcaacttcaaattattgagcgagaactcaagaaaaaagatttaactgccaaagaacgttcgaatttacttgcagcagaaagtactttgaaaaaacaagttcaattgaaaatcttaaagctagatgcaaaaaaatcagtagaaaaactaactcagcaaactagagaagaaatagctataattcaaaaagtaaatgaaaaaattggagatgaattagattttattcaagataaattagcggatgcatttgaatcaagaactgcaaaagctgttcaaagttggatgaagcatattcgggaagaagaattggaagagcaaaaagaggttcttgttatttgtaaagaaagtatcagaatggattaatatagcgacgaaaattaaacgaagtctattcttgtgggccaatacatgaacgtgtgttggttttttcgcatattcaaaagttgatttttagtttatttatgtattatttcacttaatttgacaaaaagtatgtttttatatctttttgatgctattttcaatgatcaaatgtaaataattagtcacatttagattcattatttctactataatagaactaggaagataaatttaaaataaagaatttatgggggatggaagtatgagcattattaatagtaattttagaagtttaggttcatacataatggagaatgtttataaaatacctgattatcaaagggaatattcatgggacgaaactgagttagaagacttatggatggatttaagtcaaatcataaatggagaaactgaaagtcattttttggggcaaattgtaatacacatagataaaaaagtagatgaaaagcttattattgatggacaacaaagaacaagtacgtccgttattttgttagcagcaatgagagatttatttataaaaatacatgattgtggttgggaagatgcacgttttgacgcagaagatattactacaaaatttattggtcgatatacgcaaactagggatgaacgtaaattaatacttggcgagaatgataaagagtatttttcaaatagaattcaatttatgacaccagaaataaaaaagaagcaaaagttaactaactcacaaaaaagaatagattttgcttatgactatttttataaaaaactagaaaaatccatggactcagctgaaactttggagaataaatatacagttttaaaagagttttttagtacttttacagaaaaatgctctgttatgtttgtagaaacagatgacataaatgaagcttttattatttttgagacattgaatgctagaggaagagatttagagacagctgatttattgaagaatcatttgtttagagttgcgaataagaaaattgatgttgtaaaagaagaatggaaacaaatgttagaatttcttggaaagattgatactactaaatatatccggcatttttggaattcccaaaatttatttattagagaaaaagatttgtataaagtaataaggaaaaaaataacaacaccattagaagctaataattttatgaaagacttactgaaactatctgaagtatatagtggcatggttaatccagcagaagataatttctttgatacgaatattcaaaaagtattagctgatataaatatacttggagctaaatcgttttatcctataatattagcgatggtgaagaaaggttatgattttaaagagatatacgatgttctctcatgtatagaagttttagtggtaagaaatttcgtggtttcaggattagttgcaaataaatatgaaatagagttttcgaaaattgcttttagaatttatcaagaagatattgaagattttgctgagattatgagtttattacggagaaatattgtagcagataatgattttttacataatttttccagttttgagatcaaaaataagcctagtataagatacattttgaaaaagattaatgatagttactcgaaggaacttactgtgttagatgataataataaagttcatattgaacatataatgcctgtaaaagcgactgattgggacattatcaaagaagatcatggtgagtatttatggaagctgggcaatcttactttacttggtggggaatataataaaaaatctaccaataaaatatttaatgagaaaaaagaagtatatgagtattcgcaagtacagttgacgagagagctattggactacgaggaatggaatataaaaacaattaaagaaagacaacaaagtttggctgagatagcggttaatatttggaagatttaatttaactattagaagattgcacatgtcaggagatgaaaagcagcgttggaattatcaataaatattctaaatattattgggattcttttagaaataggagtttcaatatatattattatttcagaaaagaagaagagcaagaatcgaaatagtgaagctgaaaatgatttgattcaacaaacgaataatattataaataatacgcaaggagataatgcgtcatttaattatactaacgttcttatgcaatcaaaatatcaagaaagagcgtatcgagaaatattaaatgatttaggagataaaaaagaaaacaagcagaaatctaaatatggaaaaaagtgttcatatttaagaaaagttattaatattgtctgtttgggaataggtggtttttgggcattttattattttgatttaatgaaaataacatctttcaatacctatctattaaatgtgttatttcaaaccatttatacattagccacttttattttgattttttcactttccaattttgttaaattatttctaattcattttaaagagtataattatatagttttacggaaaatccagttattcttaacaactctttttgcactgctaggtgctactatttggctatattttgattggagagcgaatttcagaccattatttaatatgtacactgaaagttcgtattatactttaggtattataatgcttggattagtattttatgtattccatcaaatggcacaaagttttttattaaataatatttgggttcctaaaaaagcagttaaaatattatttgtatctttaatttttagtttaatagcatctatttgtttatttatatgaattatagatatactaaaattaatagtatttgaatatcagcatttattattaaaataggaaaggagacccacccatgccaaaactaatcatcgacgcagacgatttcggtctatccaaagccatcaaccacggcatcatcgaaagctacaaaaccggcatcaccacatccactttactcatgccaaacctagaaactgccgagcacgcaatcgctctcgcaaaagaccacccagacctattcatcgggcaacacacaaacttcctgctcgggaaaccatgcgcgaacccggcggaaatcccgtcacttgtcgacgaaaatggggaattccatcgttccaaatattaccgggctaacccagaactgaaattccaatacgaagatgtgcgcacggaaactatcgctcaaatggaacggttcaaagcgctaacgggtcactacccagaacacattgactgccactcaatcggtgatgaaacggttgatcaagctttctttgatattgcgcgtgagttcgggattcacaccactttaaaatacagcggcgataaaaaatggccagatcaggaaggttatttgccaattactaaactgctcgagtcgggcgcactcccttatacaaatggcggagtctcggttgaaaacttcctaaatgatgatttcggattgctgaaactggcaccagatgaaatcgctgagatgcattttgatgtcggttttttggatcaatttgtgttggataattcttcttatacgttgatgcggtgccgtgagcttgcgacgatttgtgacgcgcgggtgcgggattggcttagtgaaaatgggtttgagcttattacatttggggatttacagcggtaaaactctatgttatgatgaacgcaacttaataagaaaaactaggggggccgattctggctgagataggaaggtaatgctttctgaccctttgaacctgtttgttagtgcaagcgtagggaagtgaatgtgaaagtgaccggaaaatttatcgcggctactgtttctttgcttatgctaagggacagtgggcgctttttttattgttcaaaaggaggaatttgaatgtttgttcacggttttcaagaagaagtaggggatttatggcaagaaacgttgcaacatccatttgtgcggagtttggcggatgggacacttgagaaggaggcgttttattattatctactccaggatgattattatttgtcgcattttgagaaggtgattgagaaaagtgtggagcaggctgggacagcggaacttgctacggaaatgagggaagtacaggtgcggcttcagcagtcggaattgttgatgcgcgaacagttttatccgcgggttgggctaacggagcgcgatttttccgagcgaaaaccggcgccaactgcttatcattatacttctcatctttaccggatggcggattttggcagttttggggtgacaattgcggcgcttttaccgtgttatgcgctttatgctgatatggggaaaatgtacgaaggggcgcggagttcggagccattttatcaagagttgttggatagttatgtggatgaaaattatcaaaaagtggtgttgcagcagaagcggttggtggaacaggcggcgagtatggcggatgcgcgggaacttgctctgatgaagcaggcttttcaaatcagtgtggaaatggaatgggcgttttttgatatggcttataaaaaacaaaattggcgtgggagtgtgaattatgtttgattttatgatgttggaaaaggtgcgggaaaaagggccgttggtacataatattacgaatatcgtggttgcgaatgactcggcgaacggcttgcttgcgattggtgcgtcaccgattatggcttctgcgaaagaggaaatggatgaacttgcgaaaatggcggatgtgctcgtgattaatattgggacgctggacggggagcttgttacagcgatgaaaattgctggacgtgcggcgaatgttgctgggacgccggttgtgcttgatccggtcggtgttggcgcgacttcataccgtcgtaaagtggtgcaagaattattggcagaaattcagtttacggcgattcgtggaaatgcgggagagcttgcggcgattgctggtgaagcttgggaagcgaaaggcgtggatgcgggtgttggttcggcggatgtgctgagcattgctgaaaaagtggcgaacgaatggagcacggttgttattattagcggcgaagtagatgtgatttcggacggaactcgttttgcaaaagtggctaatggtagcgcactgcttccaagaattactggttctggttgtttgctgagtgcggtttgcggtagttttattgccgttcaggatgatgcttttcgagctagtgtcgaagcgtgtgcgagttatgcggtggcttctgagtacgcggaaatcgaattagaaagaaaacttccaggttcatttcgaccgctatttttggatgcgcttgctagttggtcggtcgaaaaaacgcgtgccaaagctaaaattcaagaaagtggtgaacacaaatgattttcccacaagtattaacgatagctggttcagattctggcggcggcgcggggatacaagcggatatcaagacatttcaagagcgcaaaacctttggcatgtccgtcatcacggcaatcacggcacaaaacacgctaggtgtaaaagcagtgcataaaatcccggtagaaatgatccgcgaacagtgcgacgcgattgcagaggattttcaagtaagcgctgtgaaaactggaatgcttgcggatgcagaaattatccgggaagtggcgcggaatatccgtttgcacaacttcccaaatatcgttattgatcccgtgatgattgcaaaaggtggcactgctttgcttgaaaacgaggcgacacaagtgttgaaagatgagcttttgccacttggtacgataattacgccgaacattccagaagccgaagaaattctgggagaaaaaatcacaacaaaggcggaaatcgaacaagctgctaagaaaatttttgatttaggtgtaaaagcggttgttattaaaggtggacatagcgaaatgagcgaggcggctgatttttactatgatggtgaaatgacaaaatggcttacgagcgagcgctttgatacgcctcatacgcacgggacgggttgcactttttcggcatgtattgcggctgaacttgcgaaagggaattcccttttagacagcgtcgtagttgcgaaagagttcatcacgagtgcgattaaatatccgcttggaattggtcacggtcatggtccaaccaaccattttgcttaccgattggaggatgggaaatgagagctgaactagctgtatattttatcgctggaacgcaagacattgtccgtggaacattgccaagcgtgctagaagaagcactgaaagccgggattacttgtttccaatatcgcgaaaaaggagcaggcgcactccaaactgcctccgaaagaaaagaaatggcgctggaatgccaacaattatgcgcaaaatatcaagtgccattcattattaacgatgatgttgccctagccctcgaaatcggcgcggacggcatccatgttgggcaaaacgacgaggaaattcgccaagttatcgcgagttgcgccgggaaaatgaaaatcgggctttcggttcattcggttagtgaagcagaggaggcagaacgacttggctcggtggattatatcggcgtaggaccaattttccccacaatttcaaaagcggatgcagagccagtaagtggaacagcaattttggaagaaattcgtcgggctggaatcaagctgccaattgtcgggattggcggaattaatgaaacaaattcagccgaggttctcacagcaggtgcggatggggtatcggttatttcagcgattactcggtcggaagattgccaatcggttatcaagcaattaaaaaacccaggttccccctcctaaaagggcaaacctgggtttctcatttttataaatcttcaccattggtagcaataacgttcttgtaccaatcaaaacttttcttcttataacgatttagcgtacctgtgccgtcgttgttgcgatcgacatagataaagccgtaacgtttcttcatttcagcagtggaggcactaacaaggtcgatacagccccatgaagtgtaacccatcagctcaacgccgtctttaatcgcttcttttacttgcgataaatgggcgctcaaatagttaatacgatagtcgtcatttactgtgtagttgccgttttcgtcttgttctagttgatcgatagcgccaagaccgttttctacgatgaaaagtggtttttggtatctatcccagaattcgtttaggacaacgcgtaagcctttaggatcgatttgccaaccccattcggatgcttctaggtaagggttttgcacgcctcctaggatgtttcctgcgccagctttgcgtttcgactcgtcagctgtttcagttgtgctcatgtaatagctgaaggaaatgaaatctacagtgtttttaaggatttctaagtcttcttctgttacgtctaattcaatattattttctctgaaatagcgtttcatgtagccaggataagcgccgcgaacatgaacatcagagaagaaatagtttttgcgctctgcttccataacagcaataatatcatctgggttggaagttagcggataagttggcattgctagaaccatacagccgatttgagcttctggcatgatttcgtgaccaatttttgtagccagcgcgctcgccacaagttcgtggtggacagcttggtataggtctttttgtgataatttatctgggcttgtagaaataccgccactcatgaatggtgcgtgtaaaatcgagttgatttcattaaaagtgagccaatattttactttgcctttgtagcgattaaatacagtgcggacatagttttcatagaagtcgatcatttttctatttacccagccgtcgtaagttttcgataagtgaagtggtgtttcatagtgagataaagtgattagcggttcaatattatgtgctagaagttcgtcgaataaatcatcgtaaaattgtagtcctgcttcgtttggctcagtttcatcaccatttgggaagatacgggaccaagcgatggaagtacggaaaaccttgaagcccatttcagcaaaaagtttcacgtcgtctttgtaacgatgataaaagtcgattccttctaattttaagttatctggtgttggaccgtcagtaatttgaccgaatccgccttttggagtaacatcttgaacggaaagtccttttccatcaacgttgtaagcgccttcgaattgatttgcggcagcagctccaccccataaaaagtcggctggaaatcctgtatttgtatgcatgttaaaaactccttttctacattttaaagtatctataaaaaaaaccaaatacttttctaaataaatgcagagaaacattgtacttagaaaaatatttggttatgcccggcttgcgtcggtaacattccgatttataattaaaatatagcaaaaataactaggatagtcaacggaaacagataacatctactctgtttggagcggatgttatttacgtttagaaagagtgagcataccgaataaaatacttgctgtgctcgcggattcgtctgtttttgttgaatttgattgtcttacagaactgacttgctcttgtgctattcctgcgttcagttgttgttctggactggtcacagtatcaatttgcgccagtacgtcattatgggttacttttttcataatatttccacctgtctctgtatttgaacgaacaatagaaattatactattattatagccctaacatgaatttccatttttagtcaccgattccataatgggagtttttatataaaaatagacttttagaagaataactttgcttgaaaagtagcgttttagtgcatttaatgagctgtttatggcaaatgtattgtattgtttttttggggaagaacataaggaatgatatagcgacaattgtttgttagtgagtataagagggaaaaaggtagattgaatgataaggatttgtaaaaaaatgtatagagggggagttagcgtgggatcagcgttttcagctattttgtcaccggcagtggggattttgattagtccatttccaattgttgggcttattttgattttactgagcaacaaggcacggattaacagtattttttatacggttggttggattgttgggaatattgctattttctttattgggttatttttaatgagttcggcggttagttcgtccggagatcagtcaaccttggtcaaagtggtacttattgtgttaggggttttacttattttgctcggtgcgcatgattttacgaaacgtccaaaaaacggggagaaagctgcaacaccaaaatggtttgaaaaaatgagcaatattaaaccagttggcgcgatgatttttgctttcttattatctgcggtgaatcctaagaatatgttgctttctctgactgcgggtgttagtgttggtgcgctgaatttaactggcgggcaagaaacaacggcaactattatttttggaattatcgcttgttgttcgatttacatcccaacgattgctttcttactggctgggaatcgacttaacaacgcattagatagtacgcgtaaatggcttatccaaaacaattccgtgatcatggctgtactgttcttgtttatcggtctaagtgttattagtaaggcattttaaatgataaaagggctacttgttctcaaggattagtagcttttttttatttaaaaatgcagactgttcacataatgtctacatactatgaaaacgttttatgctaatatggcttcacttgttcatttaaaattgaataagaatacttacaacaaaaaggatgggtttcatgtttgacaaactaatgggaaaagcagcaattgttaccgaatcatcttatggcatagaacgatttttagaagatgatgaaaagattattcaaatttttaaatttataagagatgaagttattattacttcaaaagggatttttaatgtggatgctcaagggataactggtaagaaagtagaattcaagtttttcccgaagaaggcattaaagtatgtttcgatcgagacggcgggaactttagaccgtgactttgacttgaaaattggtgttgatggcaatacggtcgtgacacaaaacacctctttttccgcgccaatcgccttaaaagtgcataaaaatgatacagaaatgggatttgcgctttataaaatgattaaagaaatgttataagtgaaagagaagacgatattcgtcttctcttttttatgtccattctagtgttgcagtcacagggaaatggtcagatgcagaacagccatccacttgatccgtgatagttttgtaagagtgtacgcggaactctttagacacgaagatgtaatcaattttttctaattcgttttcaggtcggagtggttggaagtcatgaaagctaccaattgggccttttataggagtctgagaaatcaactgcgcatcctgatattttttggttatgaagttatacgttggtgtttctggttctgtattgaaatctcctagtaaaatcactggtaaattctctgcaatcagaccggctttttgcagtaaaagttggcttgcaaatagacgagcttcctccgagacgtgatccaaatgcgtattgaagatatagaactgtcttccatcagtcgaatcctctagttttccccaaacgcaaattcgtggaaacatcgctgttgagtgaatagaagggacatctggcgtttctgaaagccaaaaatgcccttcttgcagtaaactaaaacgagcagaattataaaaaacagccgtaaattctcctttttcaaaaccatcatctcgtcctaccccgaaataatcccaatctagcatttctttcatgtcgcgcatttgtggcagaagaggttcctccacccccatgaaatcccattgatatttatcaagtaatgattttgttagtgttttacgcaattcccagctctttttctgctcggaagtgtcatcaaaacgaatgttaaaagtagttacactgaacatgattccacatcctttttttatttaaaagttttacaaagagagtttagcatatttatgaaagcgtttcacttatttgaggttttatgtagtatatattcgacattttttcaaaaaaataaaagtcattgtattgttatgaaaagggagtgtcactatgttgcgaaaaggtagttggttgctcatattattattgatagtattagtggcattatcagcttgcgaagatagggagaaaggagacgctcataatgtctcggctaaaagggaaaagcagattttctcttcaaaagatactaaaaagggatggctagagctcattgcagcagatgaaatttcaagtcaagatgattctccttgtatttataaagcgggggaatctgtagaaaaattggaagtgcatatgaaagaattaagtacggcgagtttgacctatatttacattgacggctacatcgtacaaatggaacaaggcggcgagctctcttttcaaattcaattaagtaaaacagaattaaaaaaaggatttcatgaattaacggctgttcaatatcaggaaaataaccctgaaactaaaaaagtagagttattaaaacgcgctaagtatgaagtaaaataaaaagattaacgaatgagttagaacgatatttttaaagagaatgtgaaaaatgacattctttttttgtgctattaatacttaaaaaaggaagatgacgatattgtaagtagcttttcgcctgtaaaagaattaaactactagtatttagggtatatattttagaacaattattcctaaatggtttggaatagagcaaataaggcataggcatagatactgcattccgactttttgaaatgaaagaacttaattagggggatatcatatgggttcatatggcgaattgattcgggaaatacggctatctaaaggtttgactcaaaaagaggtatacacaggaattatatctaggtcttatgcaatcggatttgaaaaaggtaaacacgagattactttgagtttgtttgaagaaattttaaagcggatcatggttcctctagatgaattcttttttatttacagagacttttcttcgacagaggatgatagtttttggattgatttcgtcgagctatcaggtaaaaatgatgttgtagggatgcaggcgttgctagataaaataactttagagcgaacggagcagtcagaagttagaaaagcgatacttcatacgagaattcaaactattaatcattatttgcgtacgaatgtgtttgatgaatcaaacatttccgatgaatataaaaaaattattcatgactatctttggaaaatgcagacgtggactttagaagaggttcgtattttttccaatagcatatctttttttgaggaagaagtacaaattcacttttatcaaattatgttgaaatcgtatgaaaagtataggtactatgatagaggaagactgctattttgccatctatttgctaatctaacagacgaactcatcatacagaataaaatcaattatgcgaatctagtactcgaaaaattaaaagaagcatctgaaacaagtggtagctttaacagtgctttttatcgaatagtagccaattattatcaaggggctatttggatgaaagaaggcgaagtggaaaagggctatcgccaagccaaaagagcgattcaaacatggaaagaactacgctatgaagcaatagcagatttgtatagtgtggtattaaaacaatttttagaaaaagaaaatattaaagtagaagattagctaccctaagattttctatttaaaaacactaaaatggagtcgttttagtgtttttttgtttgtggtaaagaggttttatgtactatatatagcactatttacagagagaaaacaaaggaatgtaaaataaaagcaagaaatgagtcaagaggaggtcttcgggtgataagttatggtgagctgattcggcaaataaggcagtctaaaaaaatctcccaaaaagaagtgtacacaggggttattagtaaatcttatgcaattgaatttgaaaagggaacccatgcaatatcgagcattttactagagaaaatagtaacaaaactaatggtaagtatggaagagtttttcttcatgtatcatcaagaggagttgcctgagaaagaggacttttgggaagcctacgagcgggcgtgtaaaacggatgaaattgctatttgggaattactttatcaaaaaatatcatcggaagaaggaaaaatcaatcaagtaaaaagcgcggcgataaaacttgaattagaccatataaaaggcaaacaagttatggataaaaaagtggttcggattttggagaactacctgattgaagctgttttttggacgttagaggatatattcttatttactcggatgttgccgtacttgtctttgaaaagtcgggtgccattttattataaattattaaacacgctggacaggtatcgtcattttgaacgaggaagaaggattttacaaacagcgattgctagtattatagatgattttatagagaaaaatgaaatcgagcatatggagctgatgataagaagtttaaaaaagattagtgatgattgtgagggtgcttattttaaaattctctgcatgtattatcatggaattattgagcggggagaaggcgcagaaatcaagcaggcgatagctattttacgggtgttaggttatgagaataaagcgttaaagtatgaagcaatgtatcgacaatttagtttaaaagcaacgatataaaaataatttaaagaaagctaaaaagaaccaatctttttagctttcttttttcgagtagtatatatgcgacattagaaaattttaagactccgcatagtattatatagactgaagtacggcttaaagccacattgacagtgaagggaggggctttggcaaagaaactaaatgccaactgacactgcaaatttagcgttaaaaggaggaagattgttattttaaagaaaatatttattgcattaattgcgcttgtagttattatcaatacagttagttttacggctgtttctgcaagcacacctacatggttagaacaaaccatgaatagtaatgaaccgtttataaaagagattgaaaaagaaactggtaagacgagagcgaatattacacagacagatttagaagctataaccgccttgcgagtaacaggggcaagtgatattccgacaaatatcgatatgttaactcatttaactacgttagaagttaaaagtggaacattatcttctgtatctaactcagtggggaatttaaaagagttaaaaatcttagttctgaatgataataatttaagcacctttccaacgattgttttccaactacctaagttagaagaattacaagtttctgggggaacgatagaagaaatccctgccacaataacaaatatggcgagtcatttgaaattcttagggatattaaataaccatttagtgaaggttccagacgcaattttcactacgaactggacaaatgctactgggggagacttagacttaatggctgcagggaaccagattgtaaccaatattcctgccaactatataagccagtttaataatgggaataacctattagaattttacgataacaactatcaaaaacaagaccaactaactacaacacctggatataccattgatgtacctgttggaactgattttaatcaattaacaccagacaaaacgaaactcgcactaacatctggacgaactttactcgcgcaacacgaattcgagtattatgatgatggttcaagttcactaatccacaatggcgtggcagcagcaccgggtcaagcgaccattttcatcaaaagcaagttttccacgcaatcaaacaaatttgccagaacacaagttacagtaaacatcatcgcgctaaacggcggacctattacagtgaaacatgaagatacgaaaggacaagaacttgcgccacctgtcattttaaatggtaaagacggggacccttatacaacgacacaaaaaactttcccaggctacactttagttgcaacaccagccaatcaaaatggtacattcaccatgaacccggctacagtcaactatgtatacagcgcaaatgattataaactaacctctactttcaaagatgcccaaggtcaagaactgaaagcgccagttgtggatacaaaagattaccatatccaagacaactatactacaacagcagcaaccattcctggctattctttagtttccacacctgctaatcagaacggaacttttggagctgggaatgtcacggttaattatgtatacaaaaaagacgattatacacttacttccacttacaaagatacgaatggtcaagaactaaaagcaccagtggtagatgcgacaacgtatcattatcaagacacgtatacaacaacagccgcagttttcccaggttatacgttagtagcaacgccaacaaacgctactgggacatttggttcgtcaaacatcactgttaattacgtatatcaagcaaatggctatcaattaacttctacatttaaagatcaacaagggaagacaatcgcaccagatgatgtcgatgctaaaacctatcacgtgaacgatccctatacaacaactgccaaaacgatcccgggttacacattagtgacgacccctgcaaacaaccaaggtaattttggaacaagcgatattacggttgattatgtttataaagcagaagattatacattaacttcgacgtacaaagatgcacagggtaaagaattaaaacaacccgttgtagatagtaaaaaatatcatattcaagacaactattctacaagtgcagcagccattccaggttatacgctagtagcgacacctgcgaacgaaacaggaaccttccatacgagcgatgttacggttaattatgtgtataaattaacagacttaaaattaacttcaacatataaagatgcgcaaggaactgagttaaaagcccccgttgtagatagcaaaacgtatcatattcaagataactatgctacaactgcagctgtcattcctggctatacattagtcgcaacaccagcgaatcaatcaggtacttttggtagcacggatatccaagtgaactatgtataccaagcagttgcttataaactaacttcgacgtacaaagatcaacaagggaacgatttagctttaccaaaagtagatacaaaaacgtaccatattcaggatggttacacgacgagtgatattgctattccaggttatacattagtcgcggctccaacgaatcaaacaggtacatttggtgcgagtgatgtaaccgtgaattatgtctacaaagccaatgactacacactaacttcaacatataaagatgcacaaggtaaggaattaaaaacgccagtcatagacagtcaaaaatatcacattaacgacacttatactacgacaggagctactattccaggttacacattagtcgcagcaccagcgaatcaatccggtacatttggcgcggcgaatgtaacagtcaactatgtctacaaagcagatgattacacattaacttcgacctacaaagatgcaaacggcaaagaattaaaagcgccagttgtagacagcaaaacttaccatacaaaagataactattctactagcgcagcaaccattccaggctacacactagtggcagtaccagcaaatcaaacaggtacatttaatacgagcaatgtgacagtcaattatgtttacaaagcgaatgaatataccttaacttccactttcaaaaatgtacaaggaacagaactaaaaccagctatcgtgaaaaaaggatttattattaaggatggctatgcgactagtggcgtaacaattccaggctatacattagtggcaacaccatcgaacaaaaaaggaacgtttggtgctagtaatgtaacagttaattatgtatataaagcgaatggttatgcattaatcacaacatataaagacacacaaggtaaagatttaaaaccactagccattgatacaaaaatatacaatattaacgacccatacactgcaacagcgctaaacatcccaggttacacattaacaactacaccagccaatgaaaaaggtgtatttggcgcaagtgatgaaacagttaattacgtatataaagcaaatgattatacgttaacaactacctacaaagacgcaaacggcaaagaactacaagcacctaaagtagacgcgaaaacttatcatatccaagacacatacaaaacaactgcagcagtaattcctggatatacattagttgcaacacctaagaatgaccaaggtgcttttggagcgaacaatgtaactgtgaattacgtgtaccaaacgaatgattacacgctaacttcgacatttaaagatgctcaaggaaatgaattaaaagctgcagatgtagacgcacaaaaataccatattcatgacacttacacatcgaaagcagccgtgattccgggttacactttagaaaaaacaccaacgaacgaaacgggtacttttaatgcaagtgatattcaagtgaattatgtgtataaagcaaatgattatcaacttacttctacttttaaagatcaacaaggcaacgaaatagcattaccaacagttgatgcaaaaacttatcacattcatgacgcgtatacaacgaaagctcgcttgattccagggtatagcctagtagctgcaccaaagaaccaaataggtgcttttggaacaagtgatgtaacagtcaattatgtgtataaaaaagatgctattatcaaacctattactccagcgaaaccaactattcttacaataaaaacacctgcaagcaaagtaattaagactaaagtagttaagcaaactcttcctaaaacaggggatgacgatgccggactattaaacctactaagacttataggactcgttttaattttaggcgtatttttggcagtcggaagtaaaaaattaagataagcataacgtagattaaaacaccgccgcagattgttgtggtggtgttttaactaatatatccgacattagaaatacccattttggaaaagatgtatgatttttattgtaaagaattttacaaaggaagaggcgattctttgttagagaaaaagtatcaaatccatttacaaaatcattacgatgcaacgagtaggcaagtgcaaaagaaagaaataaaagtcttaaaaaaacgcaaaaatttattaattggggaagttttcccatatcaaatttgtttagaaagcacgatggaatattcaagatttatgttatggtttgaaaaagaagtccaaaaaatcgtgaaagaactttggaatcaacattttattatcaaactaacattatcccaattacatttccgcgaaaccattctctttttagagcatttaaaagattttagtaaacggataacgattgaatttatcggtgaagacacaccagaaattaaaaaacatttttccgtccaagagcaagaagcgttttttatagggaaactaagaatgctaaaaaaatggaaattcattatttctaaacatatcgaaggctgctcagtggaacaaacccttgcttttaccccgtgtctacatgaaataaaatacacgatgagccaacaagcacgaatggaagaaaatattatcgatttgcacatgttcatcgatttttgggaatactgggcaacacataaaaaattgaaattcgtagttgaggtgaaggaggcggattttattacgaagtctttgatgcataaaaaggtccacgtacaatttgagaatgcgtagcggatgaagtggacccgagagtttactattaattaataatgttaagctgtagaaaaagggagaaatcttttttactacagctttttgattgtacattttttgccaataagtaatctacgttatcaacctgaaaagtagatatagaaaaaaccttatcgcgaatgataaggtttttaatcactattagactgtttttttctttcgtttgatgaaaaatagaataccgaagcttaaacaaacaattccagctaatgacaaacttaagctagtaatatcacctgtttttggcaactgcttttcgactactttcacaggttgcttgtctgtacttttcccactgttaacagctgcaccatctttatcgtttccgggactttgctcgttgttaacatctttatcttttggtggagtaggagcggcaggattatctgtacttggttctgctgtcacatacacaataacgtcttttgtaacatctgatcctgccacgcttagagttacaacgtatttaccgggtgtttggaagtctactacgtcagcgaaattgctagtgatggtatctgttgtgggagttacgcttgcatgaatatcttccagaaaggctgcttctgtttttgtagtgccttctttgtaactgatctcgtcatcactagaaatactgatagtttctttgccagtatatggcacagtaactcttccagaaaacacaccatagtcattgctttcgaatgtgtaacttacttcaccgttatctggtaaattttcccacgtaatagttctagtatctgcatcataaactccgccgttttctggtttgatgatggaaacaacattaccatccttatctaacaggtctgtaggaacagcggatacaagtttattattttgtgtggtttgggttggacttactaatgtttgatccattgcttggtacccgccattctcagcagtaagataatctggtaaagaactaatatcttttaactggttattattacatcttacatccaatactgtctctccaacaactagattcgttagttgattattattacaagataaaagtaataaatttatgttttttctaacatctaaattcgttagttgattgtcatcgcaatataaaatctctaaagctagattttgggtagtatctaaattcgttagttgattgttttcacaagataactctattaaagctagattttgatcaatatctatattcttcaacttattgttatcacaagtcaaatactctagagcttggttttggctaacgtctaaattggctaactggttatcagaacaaaccaaagtgtttaaattcggatttttgctaacatctaaatctgtaagttgatttttagtacaaccaagatttgttaaagctggatttctactaacatctaaattggttaactgattgacatcacaagccaaataacgtaaagctgagttattactaacatctagctttgttaactggtttctagggcaatataaatactctaaagctgtattttggctaacatctagttgtgttaattcattgttatcacaagtcaattcttctagagcaagatttttactgacatctatactttttagttgattatcatcaagattaagtatctctagtccagtcaaatattcgattccagtactatcttctataccttggctccgtgcatctaattcagttattttagctaattcctccacagttacagattcatcaacgtttttgttcattttttctgctaccgctttagccaaattattatctggaaagtaatcattataggttttagttccagcttggacaatttggttttttaagttgttagctgtttttttttcttttaagtctgttgcaagcgattggctctcgcttttagtttcgtttccggttgtgctctctgcgtgtaccgttgttatcggaaggctgcttgttacggtggcacttaatgcaattattgtaaaaattttggacagtttcatatttagttactccttcagctgctattgtctttagcccgttcagttatattaatcaagaagtatattagcatgggaagattagattttatatagaaatctcaaaaaaatacaaaataccggacaaatagtgtcgaaattgttacaacttaggtggaattctaatttctgaacaatacttaaaatgatggattcgtggatgaatggttctatgtctttgttttaatcgttttttgaggtaaaaaactagtcggaggatttgtctctgtggagcgcggttttactaatgatagagaagaatttcgcttatttctaaatgaataagtcataataatagtataaatttgttgtgagattgatttgaataagttagatggtagaatgttaaatttttcacttgaaaagctgatttagagctattttccaatgaattgtttcacagaacgctcacaaaagaagtgcgctaccggtgatataatgagggggaaggatatacatagagaggaagcgtacagatgagagaaataaaagtcaacgaaagggccttccagcaacatgcaaccaaatttgcaagtaaaagttcgggaagatacttgccattaaaaaacgggaacatggcatattcgagagccaattcgattgatcaattgcgctcggctttgattgagttggtggatgtcgtggaagatttccaacatgtgaccaaaaaagatgcgagccggcttaagaaaatgggtattgcttatgctaaacaagaccaattgatgggacaaaaaatcaatcagttggaggtgcgttaaatggatagcgcacatagtcagcttgaacaacaactccaacaaattaaaaaagcgaaaataacggcagaaacagatgttgaccaaacgagaagaaaacaaaatgaacaagattggctagaagaggacagcgaccaattaacacaagaaaaacggatgttattagactttttgcgcagtggctggcaaggcgaagaagccagtggttttcatcgttatttagaagagcaacagcacgaagagtccgtggcttggaagaaggatctccaagataaaagaaccgatttagacaaggaactacaagaaaataagaacaggctccacgcactaggaacaaaacaagccaccttgcaaaaggagtggagtaagtgagccggatagatattgcggaattgaatgactttctctacggcttacgaaagagtaacgcggaagctaaaacgatgattaatcagattaaagatgcagcgatggattatgcccaagacaatagtttaaaaggggaagcagttactacatccaaacgatatttttctagcgcctatacaagtatttgccagagcatcatcgaagcactagatgaaagtgaggagcggctcgcgcaatatattcgcgagttcgggagccaagtggatagttcgccttccgctagaattgatgcagaaatcttacaagaagcgatggccaaggttagccagttgcagcgaaaagaagaagatttacaccggcaattgacggcaccgaacacgaagccagatatgcaacaagtctatgcagtgaaatcaagaagcgttcatacccaattgctgaaagccatcgaacaagagaatatcctagaaaaatatttggcttttgaacaaagtcatggcccgttttttaatgcattagccgaactcattcgagcatagattgttagttaaagtttttgtaaaaaaacataaatcgtttggaacagggaaaagaaagcaactacaaagatacttcattcaaattttttaaaataaccaaacatggaaaggagaaaatcacatggattcacataaacaatcaatcccaaaaacacaactttctaaaacaaaaaaacaaactctaaaagtaaccatagatcgccctataggttatactgacaaattcggcaatgtctatccgctgaattatgggtttgtggaaggtatcattggtggtgacggggaagaacaggatgtttatattttatcgagagagatttctgagccgattgaaacgtttcaaggagatttaattgcggtgattactcggaatgatgatgtggaagataaatgggttgtcgcaccgcaaaatgagaatttcaccatagaggaaattagagagaaagtccattttatcgagcaatatttcgattcggaaattaaattgatttagggtgcttttacaagctagacaaataaaaacaggaattctctatttggatgtagaggattcctgttttttacagttcattttaattgcttggaaattgattggtcacatttaaagtgttcattccgccccaaaagccttttgaaagagcgattttctctatctcttttaatacgtttgcttcctcaggatttaaatggattttttcgacgaagcataaggtatggatattttgatagacagaacgagcttctaattcgactgtttgagaggctttttgggctcgggtgatagctgtagtcaaaatttcttgtagccgggacgaattttggttatttaaagaagtatccgcctcaaataaattcttcaattcctcgaataaatctataagtgcctctggagtattctttttcattaaaacgcacctcttttaataaagtatcttactatagaatactcctttttgataattgaatccacctacaactgcttcaatgcaagttccgtcaagttctctacagtaaagccaaatcgttctgccagctcgtctcccgggccagacatcccaaacgaatcaatcgcgaggatttcgcctgcatcaccgaggtatttgtgccagccgtatgaggcgcccatttcagcggcgaagcgttttttcactgcttttggtaaaatggactctttatattcggggctttgtttgtcgaataaatcaaagcttggcatgctgactacgcgtgcgccgaagccttttttagcaagattatctctgacagctgtcattaggtgtacttcggatccagaagcgagtaagataatatctagtttatcaagcggggaatcggctaagatgtaagcaccttttgctagaccggttttcgcttttgctgcgctgtttggtaaaattggcaggttttggcggctaagaacgagcatggttggttgttctttttgagtaaaggcatagcggtatgcttctacggtttcgttgccgtcagctggtcggatgacgtgaagtccaggcatggcgcggaaggatgcgagatgctcgattggttcgtgtgttggaccgtcttcaccgaccgcgatggaatcatgggtcataatgaaggtggatggaatgcccattaaggctgctgaacgaatcgcggaacgtagataatccgagaatacgaagaaggtcgcgccgaatgcttgaactccgccgtgaagcgtcatgccgttgactgctgctcccatcgcaaattcgcggacgccgaacgaaatattcttggcggcatagttacctggagcaaaccgttcgctagcttttaaattggttttgttggaggaagctaaatcagccgcaccgccaaataagttaggcagttttttctctaattcttgaaggacaatccctgatacttcacgagttgcaactggtttgtccgcattttcatcaaagacaggtaattctgcatcccaatctggattcaaattatcatccattaattgttgcaaactttctgcgagtgctggatatttttgtttgtaagcattgaatgtccggagccagctgctttcactcgcgcgacctttagaatgataaaattctttctgattttcgacagtttttggtaattcaaaaggtggcatttgccaatcgtaagcttcttttgctagtttgagttctttttcgccaagtggggagccgtgtgccgctgattttccggcttttccagggctaccataaccgatgaccgttttcacttcgattaaagttgggcgggatttctcggtttttgcaagatggattgctgcatcaagcgcatctaagtcgtttccgtcgtccacacgtagcgtttgccaaccagcagctcggaatctaagctcgatgtcttctgaaaaagactcgtttaaatcgccatccagtgaaatatcgtttgaatcatataaaacaactaattttcccagttttaaatgaccagcaagggaggcagcttcgtaggaaataccttccatcaaacagccgtcaccgcatagcacataggtattgtgatcaacaaccgggaattcaggttggttaaatttggcgccaaggtgagcctcggccattgccatcccaactcccattgcgaaaccttgaccaagaggaccggtagttgcatcgacaccaaccgtatgaccaaattcaggatgaccgggcgttttactgccagtttggcggaagtttttcagctcgctcattggtaaatcataaccaaatagatgtagcaaactataaagcattgccgaaccgtgaccagctgacaagacgaagcgatcgcggttaaaccaagttgggtgttctggattgaattttaaatgatttttccaaagcgagaaagccattggtgcggctcccatcggcaaaccgggatgtccggagttcgctttttcaatcatatccattgataatacgcgaatcgagttaaccatttgttcatcaattctgctcatattaattgccttctttctgactgaacgcttcccaatcttttaaaaatccttcaatacctttatcagtcaaaggatgagaccaaagtttcgggaaaaggcttcctgggatagtcgcgatatgtgctccggcttcagcggcttcttctaaatgcccgatatggcggatacttgctgaaatgatttctgcttttagaccataattatcaagcacttttttcaagtttttaattaaaatcattccgtctgtaccaatatcatctagtcttcctaagaacgggctaatatatgttgcgccagcttttgcagccattaatccttgggaaacagtgaaaataagcgtaacatttgttttaatgccttcagctgtgagggtatggactgcttttaaaccttcttccgtcataggaatttttactactacatttggcgcccattttgctagaattcgagcttcttctaccattttgtctgcttcgaggccgataacttctgcgctaactgggccgtctacgatagaacaaatttctttaattacttcttcaaatggtcgaccttctttagcgatgatggttgggttggttgtcacaccgtccactaaacctagttcgctaattcgttttatttccgatacgcttgctgtgtccaagaaaaatttcattatttactcgctccattctctcagctgaactttaaagctgaatactttatttaatcgtataaccgccgtcgataataaggttttcaccagtaattaggctcgctgcgtcacttactaaaaagagtgcacatgcggcaacttcttctggataaccaaatctaccggctggaattaattttttcatgtcttcgccgacttgacctgcccaagcttttttgcctagttccgtcaagataacggttggggaaatcgcattaacattaatgttgtaaggcgcccattccattgctagcacttgagtcattgaaacaatcgcagctttactagcacagtaggcaacgtgtttatcaagtgcgatgacagaagcttgagaggccatattaacgattttaccgccgccagttgcaatcatttcgcgaccgataatttgcgccattaggaacgaaccttttaagttcagttccattgttttatcccagtattcttctggtaagtcttctgctttttcgagaagcgcgacaccagctgaattggctaaaatatcgatttttggatagacttttttaatttcggcaacgactttttcgatgttttctttcttagtaatgtcgacttgaagtgcgagcgttcttgaagggttaatttgcgctgcgacatcttttacatcttctttaatatcaagcaagacaacataagctcctttttcggaaaaaagctctgccattgctttaccaatcccgcttgctgccccagttaccacggctactttgtctgtaatgttaaaatctttatcaaaacctttaaaagtcatttttcattacctccaataaattttttatctatttttttggtcgatttcttccattaaatctacttttgcttgggaacgtccacctgaaaagtcgctatcaagccatgtatcaagtagcgaaacggcgagggatggcccgataactagggcgcccatggtcataatatgtgcgtcgttactttttcttgcacgttctgctgaatacgaatcatgaatttgtgctgcgcgaatgccgtgaattttgtttgctgtaatggccattccaatacctgtaccgcaaataaggatcccccggtcataatcgttgttttttacttctagtgctactttttcggcgatacttggataaagtactttttcattttcaaaactgccgaaatcagtaaactcaatatttttctcctttaaacgtgtgatgagggtttgttttagttcgtaacccatttcgtcacaaccaattgcgattttcatactaactcatcctttcgttttgctaacaatagaaacaatgtcggcaaaattttgcggtttatggccaaatcttccgacgaataaaccatcgacatttttttgacggacaatttctgcggcgttttctttgctgaccgagccgccgtaaataattcttacgagcgtttcatcgccgcctagttcgcgaataatttcgcgcaaagcttgatgagcgctttcgatgtagtttgtctcagctgaagatgcctttccaattgcccattccggttcataagccagaacaacattttcccactgtgctaaattaattgtctgaaacagcgcctcgatttgtttttttagcgcattttttaattcatttgtatcattcgcatggacttcttcacccacacagacaaccggagtgattttttcgtccaatgcgagtttaatcttcttagctatctcactagttttctcatgaaaaaggtttttgcgttctgcgtgaccaatttcgacatagttcgcgtttagatcaatgatagattctaccgaaaattcaccagttagcgggccggatttctccggcgccatattttgtggaccaaagccaaatgatgtccccgctaaaaggttggcggtcgtttcgagtgtgcccatagaaggaaagataaacgtatccacatcagaaaaattttcaagaagagggatagtcgcttctaaccattcagatgtctgagcccgagtgttaatatagtttttcatattaattccaactaagggtttacgcataaatcagaccgccttttttaaattttctaaaatgacattcattaacatccaagacgattcagagccaggatcaagatgaccgattgctcgttcgccaagtcttagtgcgcgacctttcttagcaataagtgggatagtggactgagcgccagcatgcatagcatctacaaatgcggaaaaagtttcgattggatctgcatttgtatctcgattttgaagaacttccacgccaggcaagaaggcgtccatcatcgttttatcaccaagttcggcttttccgcgatgttgaaccgcagcggccccatttataatcatgccgcaaagctcgtcgaagttaacctccgttttcccaggaacatcagcgccacatttcataaagaaactgccataaagcgggccagatgcgccgccaacttttccaaggagaatcattccggattttttaagtaaggttgcaatatcgggagaaacagtgagtaattcgtctaattgtttgttcacttcacggaagccaatgctgagattgattccgtggtcgccgtctccaatatctgagtccagtccggtcaagtaatcacgttctttttcaattagcgctcccatgtcctgtaaaacgtggccgaaaaaagcgctatccataactaattcgctcatttttattcctccagtagtaatttagtccactttgaaatatggtgtgtcgcacggtgtatccaaaaggtctttcagttcatcgtctaaacgaaccagtgtaatcgacataccaatcatatccatcgaagtcgcgtagttcccaacaagtgggctatgaatgtgtacacctttttctttcaaaatttcatccacgcggcgataacaaatatattggtccatcactggtaaaccgccaagtccattgataagtacatgtacttcttcgccagcagttaatttcatttcttctataagatagcccataatttgatcgactactttatcagctggttcgatggaagtacgtttgattcctggttcaccgtggattcccataccaacttccatttcgccttctttcatttcgaaaatagctttaccagttacaggaagggtagaagaagaaagcgcaacacccatcgagaacgtatttgcattagctttttcagcagcttgtttcaccgcatctaggtcaagtccttttgctgctgcagatgccgctgctttaaatacaattaagtcaccagccacaccgcgacgatcttctacattttcagcagagtaaatatcatctgttacaagtactgtttcaacgcgaataccgtcgtccgcagccatttcagcgcccatatcaaagttcatcacatcgccagcataatttccgtacatatagagacaacctttaccgctatcaacagcttttactgcgttataacaaggctctggagaaggggaggtattaatatttccgactactgccgcatccgcgaaatcttttccaacataaccaaggaaaagtggttcatgaccagaaccgccaccaacgataatccgcacacgaggttcttcgctcatttgtttgcttacgattactcgcttatcattttctgcaaaatctacgtatttcccttgtgccgcaacataaccagctaacatttcttctactgcttcatacccatcattcactaaacgtctcatttttcttcctccttcatatttttataagaatagtgatagtaaaaatccgccaagcacgccgccaactacagctgcagccaaattgactaccgatttagaaaatttaccgcctgttaaaagggaagctgtgaatacaccaataccagctgcaaccgccatatctacccaaactgttccagattgatagatcattgattttggaataccatgattaattgtccaaactgtaccaacgataaatgctgctgccatccaacctccgatagcaccccattcatcaaccattttcccccacatcattcgaatagcaaaagggaataaaaagccacctgcaatcgttgctaatgcaataccaatgctcattatttacactcctttttagactaattgattttcgtttaaacgctcttcttctttaatattcatgccaggttctgttttttcttgttttgcttcatgttttcttgccatatctttttcaattgctgctgctacgattccagctaaaacggctccaatcgcaacaagaccaatcgttggaagcgaacttactaactcgccaccaccacgcataaagacatcacgcataattccgcaaatcccaattccgacagccatatcaacgaacgctgcatcttcatcattttcgattaaaccaacatggtgattcataaaccacattggcccaataataatgaacgctgccagataacctccaaaaataccataattctcggcaagtggagtccaaacactcataacaatcatacctgcgatacaaaaaccaatcattcctctaaagaatttcataataaactcctttcgaaaatagtattgtcatgtaaaaattaatttacattgttcccagttacaaaattgcgttttattacttttttagtgcacgtttgtgagttcttgtaggatagcttctttggatggattaacgagagattgaacagcagcagtaaatgcgccttcaactaatggggcatcaattatcgttgttttttctagaagttcagtatctaataattcaagtgctgtttcggcacttaagatagcgcttccaatatcgcaaaaaatataaatatgttcagaattagtgcaagtcgcgatattatcggctatcatgagtgcatttgtgccaaggcgcccatcgccagttccgccagaagaaataatatgtactgtatctccaaccatttcaacaatcatttcctggaggccttctgtgattttttgactgtgagatactaaaacaatacttatcatttggttgctcctttctgtttttaattgtgtttagttgctatttaaatcctaacatacttgttttttattgtaaagtgttatcttttgttgtgttttataaaatatatttgtgttttgttatttttttgggtaatatgtatatacataaagaaatcattgataggtaaaaggagggcgagcagatgtttccatttgaaagacaaaacaaaattattcatctactagaccaaaataacaaaataactgtaccagaattaagtcgtatcttggatgtctcgattagcaccatccgaaatgatttatctgcattagaagaaagcgggatgataaaaaaagtacacgggggtgcggtacttttaaaaagtgaagagaaatttactaattttaatgaccgaattattcgcaacatcgaagaaaaagaagcgattgcgaaagaagcggcgactttagtaaaaaacaaccaaacgattatccttgacgccagttcaacggcgcttgcactagcaaaagaattacatggtttttcaagactgactgtgattacaagcggactttatacggcaatcgaactaaaagacaacccgaatattagcgttattttaactggcgggattgtaacgacgaactctttcacactggaagggattcttggcgcaaatttaattgaaaatatccacgctgatttatgttttatgtcagctaaaggttttacaatggaagaaggcttaaccgatttcaacatttatgaaaccgaactaaaacgacttcttgcaaaaagaaccaataaactggttgcgcttctagatcatacaaaaatgggagtaatctccaccgcaagcattacaacagcagaaaacatcgatttactaattacggataacaagataaataaagcattatataaaaaattccaagatgcgggacttccggtcaaaattgcggaataaaatagagattgaaactctttgggcgacaattggttcaaagagatttttttgataggagattgaaaatggattatattattacaactgatttaccaaatgcggaggaatttgttaaacttcgagtggatgctggtcttagttttcgatctattgaagtatcacgtcaggctctgttgaagagtgtgtattttgtggggttacgttcgaaaagagacgatgtacttattggaatgggacggctcgttggtgatggaattatgtttatcgtttctgatatagcagtacttccggaatttcaaggtaatggttatggaaaactaattatgacccatattaaaaattacattgattcgaatttagataaaactgcttgtgttacattacttgccgatgtaccagcagatcgtttatacaaacaatttggctttcgggagtcagcaccagcttcaatcggaatgatttaccaaatgaaatgaaaacagcttgagggtgtcctcgagctgtttttttatgtttctgctgataagaaaatgggaactagatactattaaacttttttgtcagggggagcaagatgaaatctaaagggagactgtttttgtacgttgttttggcgttgtcgattgttattggaacgaatgtatttataaaaatagacgcatacgcagccgctgcaccgccagctgcaatcaaccagatttttccagatgatgctttagcgaaagaaattcaaactgcactcggaaagtctagtacagcagaggttgtcacacaaacagatttagatactattaattcattaacccttacatctaaaggaatcagctccatagaaggcatgaactacttgaccaatttaggaactttaattttatcaagtaatcaagtaagcgatatttcgccactgaagggattaactaatttgaccatgcttcagttaagtggaaatccgattagcgacattagcgcacttagtaacttaaaaaacttacaagctctagatattaacgacgcgcaaatcactgacatcacgccactgagcggtttaacaaatctaaagggtttaggcttatataataatcagttggagaaccttagtggagtaaataatttacaacaactccgctccttaaatgttagtaataataagcttacaaacctagatgagctacaagcgctaagcaatttaggcgttctatatgcaaatggaaaccaaattaacaatcttcaggggctgagtactttaaaaaaccttttcttgcttgatttatcaacgaaccaaattgtggatactactccactcgccggcttaaccaatgtacaaacattatacttatcaaacaatcaaattagtgatgtaactggtctttcgagtttaataaatttagattggctcgatataagtcaaaataaaattagtaatattagacctttaaacagtttaacaaagctaacaattattcaaatgaccaatcaattaatcgtaaacgaaccgataagtttcgaaagcaccataactattcctaatttaataaaaaacattgcggaacaaacgattgatccagatacgattagcgatagcggtgtgtatgcgaatggatcagttacgtggaatttacctacttatattccaaaagtcagctatacttttattgaacgtgatacggttgggaatgcaactggtaatttcagtgggactgtagaacaaccattagtgcaatattttaaagcgactttcaatattgaaggacaagaaacaacggaaaatgtcgaaacagggacgctattacaagaaccaccaacaccagtcaaagagggttatacttttaacggatggtatgatgctgaaacaggtggaacaaaatgggattttacagccgatacgatgccagcaaatgatataaccttgtatgcccagtttagtattaatagttataccgcgacttttgatgtagatggcgtcacttctactcaaacggtagactatcaaggtttactagaagagccaccagcaccaactaaggatggttatacatttaaaggttggtatgatgccaaaactggtggaacaaaatgggacttcacaaacaatcaaatgccagcgaaagatataaccttatatgcccagtttagtattaatagttataccgcaacttttgatgtagatggcgttatttctactcaaacggtagattatcaaggtttactagaagagccaccagcaccaactaaggatggttatacatttaaaggttggtatgatgccaaatctggcggaacaaaatgggatttcgcaaacaatcaaatgccagcgaaagacataatcttgtatgcccagtttagtaaagatgcagcttctggtggggacggtggaggaaccgatgaaggcggaggcaactctgaaaatagtacagatggaactactaatacggatactataaaccacatcgtactaccagcaacaggagatcatcgtgtactttttccaatttttattgggacatttcttacgggtttagcactctttacacttagaagaaaataaatgaaaaagcagctgcatgacgcagctgctttttttgaaacttattttttcaattctcgttccatctgcaaacgttgtactttcattgttgcagtgcgcggaatctcatcatatttcatcacaattggctcattcatatgtggtagatcagaaactgcgtcccaccatgcatcccagttcatttctttatcatcatgaacagcgataattggttgcgggcttccgttttcaccgcggataataacgacttcatcgaggaaagtaagcgtatcaagcagtttatcttcaatcgcaagtgtgctatcaatcgtttcgactaaatcaacttgacgatcttgcaagaataagcggccttgctcatctttcataccgtagtcaccgctgtcccaccaaggtccatacacattttcttcaaaacgagcttcttctttgtaataagtaagggcgcgacctttagaaagcatttgaatattaccgctaactcctggcgcaactggattaccgtcttggtccacaatccgaacctcggttaaacctgggacaccaattcccatatcacgcgcatttaatgtttcgatggattgcagtgtatggccacgtaaaatcattggaccacattcactttgcccataaatttgtaagaaaattggttttttatattcagaagtacgaaggaaaaccgccattgtttctttgttaatcgcatcaaatgtagaatgataaaatttaatgctttggaaaacatctggtttttcacgagcaagggaagcccattgtacaaaatggtttggatgggtttcaagcacgtatggtttatattcgcgtagtaccttttcaatatttgttttagatggatttgcgattggtaataatgggaaaccaagagacatcaaggaagacacaccaatattaaaacgagaatggacaggtgaaatatggaaagctacaagccctcttggtttgatgaaattaagaatacgtctttggtatttcgttctccagcccatcgaattcgcagagtgagcgattaattttggcacaccagttgttccagaagtgtgagtcatataagcaatcatatcttttggtaattcctcttgctcacaagtatagccgtctaatggcgctttgaacaattgttcagcattgatcaatcttgagtccggcaaattgtttaactgatggcttttctcagaagtctcagaatcaaaaagcaaccagggttgatcaaggcgattaacaaaaatatcaatagtggatgctggaagatgaggcgaaaccataattggcacagcaccaatataagaaatcgcaactgctaaaatataagaatcaaatttggcagatttataaacgattactttttcttctttacgcacaccgaatctatgtagatgagctgctttttggatgatagcttcttcgcattttttgtaagtggtgtgaagacctaattcaggaaaagtaacaagttcttcatcaaaatggattggcatttctggatagcgttcagcagattttttgaagttggtatagagattaagcggttcatacttttttatcgtcatatggcgatgctcctttaatatttgatgttgttattatatcactttgtcgaaataatgaggagtggttactaaaaacattttcgtcattttaaaaaaatctgtaaattgcttgttttcttaattcaagaaatcctacagataccctataaagaaatctcaattaatgatataatatgttaatataatcacaaactgtttggcagaaggaaaatttttaaaaaaagtggaggtacaaaaaatgaaaaaaaggatagctacaactctcatcatgctactatcacttgcattaatcatcgcaggttgtggcagtaacaacacaagtaaaagtgactcggcgaaaacgaaagaaaaagaaaaaacagaagtaacatcaggggcgtcgaaaacaagttatacagacccatctgaattaaaagataaatacgatattgttatcgttggtgcaggtggcgcgggaatgtcagcagcactagaagcaaaatctaaagggatgaacccagtaattcttgaaaaaatgccacttgcaggcggaaacacaatgaaagcctcttctggtatgaatgcatctgaaactaaattccaaaaagaacaaggaattaatgatagcaatgacaagttttatgaagaaacattaaaaggcggtcacggaacaaacgataaagcaatgcttcgtttcttcgtagataactccgctagtgcaattgattggttagactctatggatattaaattaaacaacttaactatcacaggcggaatgagcgaaaaacgtacccaccgtcctgaagatggctcagcagttggtaaatacttagtagacggtttactaaaaaatgtacaagaacaaaaaattccagtcttcgttaatgcagatgtaaaagaaattacacaaaaagacggaaaagtaactggtgttaaagtaaaattaaacaataaagacgaaaaaacaattagctcgaacgcagtagttgtaacaactggtggttacggtgctaataaagatatgattgaaaaagaacgtccagacttaaaaggatacgtaacaacgaaccaagaaggaagtactggcgacggtattaaaatgattgaaaaacttggcgggacaacagtagatatggaccaaatccaagttcacccaacagttcaacaagataagtcttaccttatcggtgaagctgtccgcggtgaaggtgcgattttagtttctcaagaaggtaaacgttttggaaacgaactagatacacgtgataacgtaactgcttctatcaataaactaccagaaaaatccgcttacctaatattcgattcaggcgtaaaagatcgcgtaaaagctatcgcgcaatacgaagaaatgggctttgttgaagaaggtaaaacaattgatgaattagctagcaaaatcaacgttccaaaagaagaactaacgaaaacattagacacttggaatgcaagcgttaaaaacaaaaaagacgaagcatttggtagaacaactgcaatggataatgatttatccaaagctccatactacgcaatcaaaatcggcccaggaattcattacacaatgggtggcgtaaaaatcaatacaaatacagaagttttagataaagacggtaaaccaatcacaggactatttgctgcaggcgaagtaactggtggcttacacggggaaaaccgtatcggtgggaactctgtcgctgaaatcattatttttggacgtcaagctggcgataaatcagcagaatttgtaaaagcgaagtaaaaatttcttaaccaatagttatgtgattacttaaaaataaaaacttgctaagacgcttaaaatagacgttttagcaagtttttttattggctaagtaaagcgttagtgtagtactatggataggagctaatactaattttaaatcattagtttttaataaggaggaaataatatgttgaaaatgggttttatcggaaatgggaaaagcacgaatagataccatttaccgtttattttagagcgcgataatattgaagtgaagacaatttataatcgaaatcccaaaacagccacatgggacaaaatcgaaggggtacattatacaacagatttagatgagctattaaaagaccctgaaataaagctaattaccatttcaactacacaaagctctcattttgaatatgcaaaaatggtcttggaaaatggcaaaaacgtacttgtcgaaaaaccatttatgatgacttacgacgaagctaaagaaatattcgaactagctaaagaacgcggtttactagtacaatgctaccaaaatcgtcgtttcgattctgatttcctcacagcacaaaaagtgattgaaagcggaaaattaggcgatttattggaagtggaaatgcattatgactatttccgtccagaaatcccagaatccgtccatgaatttaaattctacgatagctatctttatggtcacggctgccacacgattgatcaagttttatcttatttcggaaaaccagacgacattcactacgatgtgcgccaattgctcggcgaaggacgaatgaacgattatttcgaccttgatttatattatggcgtaacaaaagtttctgtaaaatcaagctacttccgcataaaagcccgtccaagctttgtcctatacggcaaaaaaggcatgtttacaaaagaaacaaaagaccgccaagaagaacatttaaaactcttttatatgccaagtaatccggactttgggattgacttaccagaacactacggcacgctaacgtatgtcgatgaagcaggagtttggcacgaggaaaaagttatttccgaagttggcgattatggtcgcgtgtatgacgatttatacgaagcgattattaatggaaaacctaaacaagtaacggacgaagaaaccttgctacaaatggagattttggaaaaaggcgttgaagcttgtaaataatgaaaaattgtctgcgggagcaatctagcggacaatttttttagataaaaatgattggtttcgttcaaataaaccatcaaaacaaccgtaaaaatgaactttttgcataatacacccataatattgaatgaagtcgttcagcgtgatatagtgtaatcaaacaagtgaagcgcttactttgttgagagaggatgtggattatgaatatatcgaatttaattaatgaaaaccgaattatttttgatgatcgtattcaaacaaaacaattattatttgaaaaagcagctgaagtactaggtgaagaagggtctataacaaatccaaaaaaatttatacgtgacttatataaacgagaagaagaaacttccactggaattgaagatggttttggcatccctcatgcaaaaagtaaatatgtaaaagaaccattgattgtttttgttcattctggcattataactgattattttggattagatgattcactgattgaatgtagttttcttattggcgttccgaaaaaagccacagatgtccatttgcaaatattaagtgaactatcaaggaagttaatgaacgaggaatttcgcgaaaaattaaaaaattcaaaaaacgaaactgaaattataacaattttatcgaactaaggaggcgtttcacatgaaaatagttggtgttactgcttgtcccactggtattgctcatacgtatatgtctgccgagaaattaactataacggcagaagcgcttggttacgaagtgaaaatcgagacacaaggagcaaaagtagaaaatgttttaacaaaagaagacatcgcgactgctgattatgtcattttagcagtggataaagaaatagatacatcaagattcgctggaaagaaaattaaaaaagtatccacttccagagcgattaaagaggctgatgtggttattgaagaaactatttcaggcaaagggttaatcaatttagaggcgaaaagttcggatgtaagctctgaacaaccttcaaaagcaagtttatacaatcactttatgaatggtgttaactatatgttgccatttgttatagctggcgggattttaattgccattagttttgcttttgggattgatgcctcaaaccctgactctgattcgtataacgcacttgcagctgcattttctaaaattggtggggatactgcgtttggtttaatggttccagcacttgcagcggggatagcggtttctgttgctggtcgagcaggatttgcgcccggacttgtcgcagggacactggcgactgttggtggatcaggatttctaggcggtatgattggtggtattttggctggttacgtggcgcatttctttgctaataaagtcaatgtcactaaatcacttgcttcgatttatcagttgattgttgtaccgcttttagggattacgattgttggtttggcgatggtatttattattgatacaccaatcgcttgggttttaaatgcgctcacgagttggttaaatggacttggtgagacatccggcgttgtatttggtctactcattggtgtgatgatggcagcagatatgggaggtccaatcaataaatctatttcaaccttttcaattgggttaatgtcagcgggtgtaacggcgccgattgcggcttgtatggctgccggaatggttccaccacttggattagcacttgcaacactattatttaaaaacaaatttacaaaagaagaaaaaacagcggggaattcttgttgggtgttaggtgcatcctatattactgaaggagcaattcctttcgcagttgctgatccgcttcgggttatcccgagtttgatgttaggttctgcaacagcggctgcaatttcgatgggagccggcgttacttcgatggcgcctcacggtggaatttgggtaatgttcattccaaacgttattaaccatctatttatctacttactagcaattgcagcaggtacagtcgtgacagcaatttctgtcggactattaaaaaccccggtaaacaagcgaaaaaataaagaggagatgatataatgttatatacaatgaaagatcttttagcagtaggaaaagaacatcaatttgcggtaccagcatttaatatctgtagttttgatatgttaaaggcgataatggaggaagtggaggcaaataatgctcctgtaattttagaaattcatccggatgaaatagaatatcttggtgataactttgttgcaacagtaagagaatacgcacatagaagtaaggtgccggtcgttattcatatggatcacggtggaacaattaaagatgtgatgcgggctattagaaatggctatacttccgtcatgattgacgcttcaagagccagttatgaagagaatgtcgctttgacaaaacaagtggttgaacttgcgcataaagtcggtgtttctgttgaagcggaacttggaacaatcgggaacaatggttcagcagaaggcggggcggatacaatcatatatactgaccctgaccaagcagaagattttgtacagagaactggcattgatacgttggccgtagctattggaacggcgcatggtttatacccaaaagataaaaaaccagaactgaatatgcctcttttaaaagaattaaataaacgcttggatattccgtttgtacttcatggtggttcaggaaatccagataaagaagtcagtgaatcagtacaatacggcgttaggaaagtaaaccttagttcagatctgaaaagcgtgttttttgaagaggttcgccgcgttttagtggataatcctgcgatgtatgaaccaaatcaagtgtatccatcagctaatgaaaaagtaaaagaagttgtaagacataaattacacattttaaatactactggtcaagcagataaatactaataagaagggtagaagcgctagttatagtgcttttgccctttaaggagtggaggaacatgttaagcacagcaaaagaacggcaactaaaaatcgttaaccggctaaaagtggaacaatttatgcggattattgatttagtggagcttgtcaactacagcgaagccactgttaaacgggatttagtagaattggaaaaagaaggacttgtgagacgaacaagaggcggcgcaatgattatcgataataaaaaaatcgatttgccttatttaatgaaaatgaacgagcggagtaatgaaacgagtaaaataagaattgccgatattgcaaaatcactgattcgcgatgatatggtgattttcttagactcaagctcaacctccctgcatttaatcgacgttttaagtaaatttgatggactgcaaattattacaaacggggtcatgacggcttccatgctatcagaatttacaaatgcaagagttagtattttaggaggctcgattttaacgaagcgatacacggtgaacggcgcaaaagcatacaatgatgccctaacttataatgcggatattgcttttgtttcatgccgcgggatcgactatgacaaaggtgcaaccgaaacacatgaaggtgaagcgctcatcaaacaagctttcaggcgccagtcaagttcgctcgttttacttgttactgaagaaaaagtaggacacaagtttatgcaccaaagcttagcatgtcatgatattgactatttaattacggacttcaaactggactcagatgtagaggaacagttcaaaacccatcaaattacttgtttgtattaattgaaaaatgccttgaaatccacatccgatttcaaagcatttttttcatgttcatttccttatccattcgccgcacagtaaagccagacacaacaatgctaatctcatacagccctatgagcggaatggtaatcatcaaatgcgataagatttctggtggagcgatgaatgcagcgataatcaataagcagaagtaagcatatttccgtgcgcgccgcattccgtttggtgttatcagtgacaacctcgttaacagcataatcaccatcggaagttcaaataatacaccgaatgaaagcacaatttgtagtaaaaattgaaaataagttgcgaggccaatcgtcgtttcaacgccaagttcagccgcgaattggaacataaattttaaaataaatggaaaagtaattacataagaaaaaacgacaccgcataaaaaaagtaaaaaagtaatcggaatatagcgcagggtaattcgttgttcggatgcatgtaagccgggttttacgaaggcccataattgatataaaataaccggaaatactaaaataagcccgataataaatgccatttcaatatagatttgaaaagcatccgtcactttaaaaacgtgtagaataacttcttttggtaagtcatctttttggagaaataaaattaacggcttggaaacgaaaagccccacaaagaaagcgagaaaaaaggatagaagtatgattaataatctggttcgcaattctttcaggtgtccagtgaggctcatggaaacttcagtcacgggcgtgaatcttcttttttagtttcttcttttgaatcatccatcatgccttttgtcgcatttttgaattcgcgaagagtgtctccagcagctctaccaagctctggcagtttttttggtccgaaaatcacaagggcagctccgacaattaaagcgatacttcctggtccgatcatttcgatttcctccattcattggttgaaaatgataatcattatcaactaattctaaatcgaaacctactggatgtcaatctgtttttccgttagcaagtttagtgattacttcttcatcgcgaacgagaatagcttcatgattgctaatcggatgcatttttaaacttttagtatagtcagcaactattttttgcgttatttttttaaacggaatattgttgtagtgcgggagtgtgcagaaatcgactaagtttaaggcatcgtagtttgttaattgttcggctttttttgggctgtccatcgattgaatgtatgcaatattaggtgaggtgataactgctccggctgattcaccgatgtataattttccagcagcaatttcttctaaaattagtttatctgccccagttcgctttaattcctgtaacaaaaagaaggtattgcctccagtaacataaataaaatcattttttctgagtgtcgcagcaatgtggtctaaactttctgtagcaacatcgagttctacgacgaataaccccaacttctccagtgctttcttaccagcttctacataaaaaactacttcttcgactgtgctagcggtcgggataaaagtaacggtttttccttggagattgctttcaaattcagtaaataatggcacaacatctttaaaagacgaggttaaaaataagtttttcattattctagctcctttggtttctagttatagtataatattaaaaggtatcaaatagtgacaccttttaatattgaaaaaagaaaagagatggcgatgaataaatcagaacgactaaatgatatgatgttgtttttaaatgataaaaatacgtttcaattaagcgagataatggcaaaatatggcgtttctcgtagtactgccattcgagatataaagtctttggaagaaataggtatgccgatatattcggaacggggacgaaatggtcattatcaggtgcttcgtaacaggctactttcaccgattgtctttaatatcgatgaggtatttgcgctttatttttcgatgcttacgttaaaggcttatgaaacgacaccttttcatttaagtgtggaaaaattaaaaacgaaatttgaacattgtctttcagctgaaaaaatcgaaatgcttcgaaaaacagaagaagtatttagtctcggctatataaagcataataatcaatgtgaatttctagatattattttgcaatttacgatggaagagaaagtgtgtcagattaattatgataaaaatgggactgaaaaaacgtatattgttcaattttataatatatcttcggcgtatgggcaatggtatgtgacgagttataactttaaggataaacggatgcaggtatttcgctgtgatagaattcttgggctaaaagaaagtgatgcttttgaagccaaaaaattagtggattttaaaagagcagccgaaaatttttataagaaagaagatgcaactaattttgaagtggaaattgcttcaaatggtgttgatttattttttaaagaaaattatccatcaatgaagcttcgacaagagcaagggaaaaattttattcgtggctattataataaaggagaagaacgatttattattaattatttactaggttatggcgataaaataatagccgttcagccagattcattacgcgaaatgctactaaatgagcttggttccttgcaaaatcactttttaaaattatcgttataaaaaacttcgatttcattatcggagtttttttatttggatgaaaacatgaaaaaatttattgacttttttgaacatggagaatatgataatgataatcattttcaattagaaagagaggtggtttgtgtatggggcaaaagcttctaggccgatttatgttgctattaagcgttttagcagtggttttgactatcaattttagtgaaacctttgctgcagaaaagccgaatattgataaaccggtcaaagcattagagcaaactgaaacggcagtggaagcccttgattatcctaaagcgaaggaagcttttcaagaagataaattatggtggtcagaaaataaacaagttgttaaagaaaaatcatatgacttggccggccagatagatcggcaaattgcggaaatatcgcttggaattttaaatagtgataaacagcaagcgatggatgggatcacttcacttcataatttgctcaagacctatcaagagggtacatatacggataacgaaggcaatacaaacattactctatcaagctatattgcaaaactgactgcgacaaagaagctgatagatgagaaagaatgggcaaaagcatcaacccaaattcaagacttaaaaacagagtggcttgcggtggaaggtgatgtggtcagtcaatcgcaagcagcttacgataataccgagcgcgatttaatgttgcttgatgcgtatattaatgatcctactaaacaagccaaaacagcagatgttctagatgggatgacggaggagttaaaaccttttgcagatgtgacttacacttggttcgatgctgcgctaattccatttcgagaaggacttgaagcacttttgattatcgcgacacttcttacttatacaaaaagaacgaagacacgcgcggcgaaaagatggattatcggcgggactgcagctggtttggtggttagtttggcgcttggcatggtcgtggcgttttggctatcagcgcttgcctttggagataataataatttaattaatggttgggctgggctgattgcgagtattatgatgctctatgtcagctactggttacatcgaaattcagatattactcgttggaataactacatggaaggaaaaagtaatcaagcactctccaatggaaaaatgatttcctttgcatttttagcatttttagcgattttgcgggaaggtttagaaacggttgtttttctaattggcatggttgggcggatgtcgaattttgagctgttaatgggaattttggcgggacttggtgtgttgcttattattgcttttgtgatgttgcgatatagcgtacatattcctgtgaagccattctttatgatttctagcgcgattgtgttttacttatgctttaaatttatggggtcaggaattcacagtttgcaacttgctggagtcattccaacatcagtagaagattacttgccatctattccagcgctaagtatttacccatcttggtatagctttttaccacaagtattactcgttatttttggattaattattttaataaaacaaaaaattaaaaaaagagcggattctaaaaaggaattcgcacaagggggaaaatcatgaaaaaatggattattgttatgttgactattttaacagcagtattggttgttggttgcggtggaacaggtacagaagataaggcagaaacaaaaaaggaaacaacaaaagaaagtaaacaagcaaatgcggtcaaaaaagaagtaaaagaaatgaaatcaaacttggatgacgtgaaaaaagccattgcggacaaagacaagagcgcgcttcaatctagtgcagctgaactacataaacattggttagaatttgaaaacaacgtccgtgacttgtatccattacaatatacagatgtcgaaaaatatgaaacaccaattttctatgaatcaaaaaatgatagcccgaattttgataaattaaatgacaatgcgactggacttgacgcatcgctagatacacttgcaaaagccaaagaaacaaaagcaaaaacttccgaagtgcttgataaagcggtagataattattataaatacgtaacagatcaagtagatgaattcgttgcacaaactgaaatcttcacgaatgctgtgaaatctggtgatattgaaaaagcaaaagctacctatgtttcgccacgcttgaattatgaacgcattgaaccaattgcagaaagctttggcgacctagatccaaaaatcgatgcacgtattaacgatgtggaaaatgaagcagactggactggtttccacgttattgaacgcgcgctttgggaaaagaaatcacttgatggcatggacgtttacgcagataaacttttaacagatgcaaaggcgcttcaagcggaagtgaaaaacttgaaattagagccaaaaccaatggtcgcaggtgcgatggaattactgaatgaagccgcaacaacgaagattactggggaagaagaagcgtactctcacacggatttagacgatttaaatgcgaatgtggaaggttcaaaagtagtctaccaagcgattattccagctttaaatgctcaagataaagacttagctgaccaaattgatgcagctttcaacaaaatggaagacacattagcgaactacaaaaatggtgattcattcgtactctatacaacgcttacgaaagaccaaattcgtgaaatcagtgaccaattgagccatctttccgaattaatggcacaaacaggtaaaattttctaagcatagaaaggaaaacgatgacagataagaagagcgataatcaaacggaaaagacagaagtcaaggaaaacaaaggaatgactcggcgtgaaatgctaaaactttctgctgtagctgggaccggtattgccgttggggcaactggtcttggcacgattttaaatgtggtggatcatgtggataaggcgctcactccgaaagaaaaagcggaaacaggtgtaccgttttatgcgacaaatcaagcgggaattattactgcgcaacaaacctattgttacatcgccagttttgatattcaaaccgattcacgtcaaattttgaaagatttatttggaaaatggacaaaatttgcggatttaacggcaagtggcggggttctgcgcgatgtggataatgacatgttaccgccgaacgataccggggaagctgatgggttaggaatttctaacttcacagtgacactaggttatggtccgactttttttgaaaaagatggcaaagatcgatttggtgtaagggcgaaaaagccgaagtatctagaaaaaattccacatatggcgcatgatagtttggatgaagcttattctgatggtgatctttgtatccaagtgtgcgctgatgatcagcaagtcgctttccacggaattcgtaattttattcgtttagcgagcggtgttgctgtagttcgctggattgaagaaggtttcctgagtgcgccaaaaaacgagacgccacgcaatctatttggctttaaagatggaacagcaaacgttgaccatgactcaaacaaaggctacaaagacgtcgtttgggcagaaaatgatgaaccagaatggatgcgaaacggcagctatcttggctaccgcaaaatccaaatgctcatcgaaatctgggatcgttcatccctacttgatcaagaagacacttttggtcggaaaaaagcatctggtgcaccgtatcataaaaaacatgaacacgataaagtcgacccaagcaaactgccagctgattcacacgtacgcctagccaaagacacgaagcaacaaatgcaccgtcgcgcgtattcgtacacaaacggtattgataaaagcacgggaacgattgatgctggattgctattcatctgcttcacccaaaatccgtccaaacaatttctgccaatgctaagtatcatggggaaaatggataaattaaacgaatatactgtcccaattggaagcgcgatgtttgcttgccaaggcggacttgctccgggagaaatttttggagaaaaactactgtagtctaaggttcgcgagccttagactttttttgtataatgaaggtaagtcactgattagaaggagccgattttagtggaggaatgggatttactaaatgagaatcgtgaactaacaaggaaaacacatatccgcggtgaaaaactagcacccggagagcttcatttggttgttcacgtatgtatttttaacgaaaaagggcaacttttaatccaaaagcgtcaaaaagataaagaaggttggccgaattattgggatctttctgcggccggatctgcactaaaaggcgaaacaagtcgacaagctgctgaacgagaagtgaaagaagaactaggcatgacaattgatttaagtaacacccgtgccaaattcagttaccattttgaggcaggatttgatgattattggtttattacgaaagacgttgaactaagcgacttaacattacaaacagaagaagtagcagatgtccgttttgtcaccaaagaaaagttagaagcattaagaagttcgggcgaattcattccttatttctttttaaatcaactttttgaacttaaaaacgccacaactattcacttttaacgaatatagctaaatttccacttaacaaattcgtttcctacacttataatagtacagagacatgagaaaaactccaattagaaagcgagtggtaatatgggccgtaaatgggcaaatattaaagagaaaaaagcgtcaaaagataaaacaaatagtcgtatctatgcgaaatttggaattgaaatatatgtagcggctaaatcaggcgacccagatccacattccaaccaaaaattacgttttgttattgaacgtgcaaaaacatacaatgtgccaaaacatattattgaccgtgcaatcgaaaaagcgaaaggcactggtgatgaaacgtattcagaactgcgctatgaaggctttggtccaaacggctcgatgattatcgttgacgcactgacaaataatgtgaatcgtacagcatccgatgttcgcgcagcttatagcaaaaacggcggaaacatgggcgttagtggctctgttgcgtatatgtttgataatacagctatttttggtgtcgaaggaaaagacgcagatgagctattggaacttttaatggaagcggatattgatgttcgtgacattttagacgaagatggccaagcgattatttatgcagaaccagaagatttccacaaagtacaagaaggtttgaaagcggctggaattgaagaatttacagtagcagaaatcgaaatgattcctcaaaacgatattcaattatcaggtgaggatttagaaaaattcgagaaactaattgatgctttagaagacctagaagacgtgcaaaaagtatatcataacgtcgaattagaagattaacagccaactattacaacaatcggaggaattgataaaatgtcaaaattaccaaattgcccagaatgtaactcagaatatgcctacgaagatcgcggtctattaatttgcccggaatgcggacatgagtggagcgccgtagcagaagaagctaccgaagaaaaagtgttcaaagactcaaacggcaacgtactaacagatggcgattctgtcacagtcatcaaagatcttaaagtaaaaggcgcatcaaacccaatcaaaatgggaacaaaagtaaaaaatatccgcctagtagacggcgaccacgacattgattgcaaaatcgacggcttcggcccaatgaaattaaaatcagaatttgttaagaagatataaaaaaacagcgattctctaattcagagagtcgctgtttttattaattctgcacaaaaaccgtttcaaacacaaacgattcatacgtatggcgcgtaatcgaatattcaaacactcggccatcttccaaatgcgctaatttctcaatttccatcataaaagtaggttcttctaaatcgaggagcttactatcctcttgatttgatttatccccgcgcacccaaacatgggcactctgcatcttgagttttaaatcatcacgaatataattataaatcgaatcttctaaatggtgcggctcaagtcctggaataatcgcaagtggcatataagtatgttcaatcgaataggctttatgaccaacttctctcatccggatgattcggtaaatatagtcatcctgcatctctaatttttctgcgacttctttcgatggtttttcaatggaaaataaaatgactttcgatttaatgttgtcttttccaaatgtatttacaagtccagacattggccctagcgcgaattcaccgccgttagtagaatgagatttcacgaaagtaccagcaccgcggcgtctaataatcatgccttcttgtacaagcatatccagtgcttttttgacagtgagcttgctgcaatcatacgtgcgagccatactatcgccatcaggaagtttctcatttatttcgtatttattttgattgattttatcacggatatctatgtatatttccatgtatttagccattcccgacattttattggctcctttactgatgtaataagcatagtataccatatacttttacaaaaaggtatccctatgaagaaaagtatatatcttttaataaaagtattgttttttaaataaatgtatgctatatttattttgacaaaagggaggccataaaaaatgaaagaattattaacgtttccaaaagatttttggtggggctctgcgtggtctgcggaacaagcagaaggtcgcggcgacactggtaaggcaaaaactgtttgggagcattggtttgaaacagaaccgaatcgcttttacgaaggtgtaggttcagaaattacaacagatcattttaatcggtataaagaagacgtacagtggatgaagaaaacaggacataattcgttccggatttcgatttcatgggcgagaatgtttccaaatgatggtgttggtgaagtgaaccagaaagctattgcgttttatcgtgatttacttactgaaatgaatgaaaacggtatcaaaccatttgcgaatttatatcatttcgatatgcccgttgcacttcaagacgcttggggctgggaatcaagggaagttgttgatgcttatgtccattttgcggatacttgttttaaagaatttggcgatttagtttatcactggtttacatttaacgaaccacttggaccgattcttggcggttatttagaagatttccattatccgaatcaaatcgacttcaaacgcggcgcacaagctggttttaacacgattttggcacatgctttagctattaaagctttcaaaaaattaaatttgtcatccaaaatcggcgttattttaaaccttagcccgacttatccgcgtagccaaaacgaatacgatttagaagctgcagaaatctgtgatgctttttatacgagaagtttcttggatccgatggttaaaggaactttcccagaaaaattagtagaaatcatgcgcgaatacgatcaaatgccggaatatacggaagaagatttgacgattattaaagaaaatacggcgcaaattcttggcctaaattactatgaaccaagacgcgtgaaagcccgtttaacggctattaatgaaaaaagtccgtttttaccagattggttttttgaaccgcacaatatgccaggtaaacgaatgaatatttatcgcggttgggaaatttatgaacgtggaatttatgatttatgtattgatattcgcgataattacggcaatatcgaatcatttatttctgaaaatggtatgggtgtagcgaatgaagaacgtttcttaaatgaagaaggacaaattcaagatgattaccggatccaatttgttaaagatcatttggcgtatgtacatcaagcgattgcagaaggttgcgatattaaggggtatcacctgtggactttcattgattgttggtcgtggattaacgcatataaaaaccgttacggactcgtttcacttgatgttgaaactggcaaacgcacaatgaagaaaagtggcgaattttataaaaaaatgagcgatatgaacggttttgaatatgaaacaagcaaactagttgggacgaaaagggaggaaacaactaatggctgaaacgaaaaagaagtcgattgttaatggttttattaatgtagcacaacgtcttggtggtcagattcatttgcgttcattgcgtgatgcttttgcgagtattatgccgttcatgattttagctggttttgtcacgctgattaactatgttattttagaaccgactggctttatgggcaaaattgttaacccagatacacttaaaacatggcaagagattggtatttcaatcggaaatggtaccttgagtgtcattacgcttttagtcactgtggcgatttcatatcatttatgtttgaatcgtggctataaaaacgtcattgctccaattcttgttgccttatcttcatttatcgtcgtaacaccgattgcgatgacgttccttccagaaggcgcatcaaaatcaatcgaagtaccaaacgttattccagttagttatactggtgcgtcaggcatgttcgtcggtattatcgttggcttaattgcaaccgatttattcattaaattatcgaaaaacaaacgtatgcaaatcaatttaacaggaaatattccaccagcagttattaaatcatttaacgtgttaattccaattatgattacggttattattttctcagttgtgtcatttgcagttaatcaaattttcagcatggactttaacacgcttgttacaacgattatcacgaggccacttagctatgtgacgacaagtcttccagggttcttgctgattacttctatcgctaacttattcttcggtttgggtattcatcaagcagttatttctggtccgttactagatccatttttacttcaaaatatgcaagaaaacatggttgcctacgcgaatcatcaagaaattccgcatattattaacatggctttcaaagacacttttgcggttatgggtggctcaggaaacacgattggcttattaattgccattttcatctttggaaaacgaaaagactataaagatatttccaaactatcagcagcaccatcgctatttaacatcagtgagccaatcatctttggtctaccgattgtgttcaacccgttacttattatcccgttcgtattagcgccgattttctctttaacaactgcgtattttgcgacggcagcaggttggattaatcatgtagtagtacaaaccccgtggacgacaccgccgattatttcaggtttcttagcaactggtggggactggcgcgcgtccgttctacaagtaattatcattgttataacagtctttatctatctaccattcctacgtatggatgaaaaagttgcttttgctacagctcaaaaaacagaagcaaaataaggaaggaagtctaaccaatgaaaaacattttattagtatgtaatgctggtatgtccacaagtttcttagtagaaaaaatgaaagcagcaggcgcggagcaaggtattgaagcaaatatctgggctgtatccgacgctgagctacacgaaaactgggaaaaagcagatgtcattttgcttggaccacaagttggttatttaaaaggaaatacagaaaaagtagtggaaggtaaaattccggtcgaagtaattaatatgttagactacggccgtgtaaacggagcagcagtgcttgagagagcaatcgaattaatcggttaaaaaagtaagggagtgtggcttatagtcgcactccttttttatcagacaagaaagtgttataatgtgtgaaaaggagcggaattattatgaaatatgtaaaatcacaaatgaaagagcttgtaaaagatagcgtagacttgcaagaacgccttcaaaagctaatgaaagaaatggacttagaaaaaactttcgctttaaaagcactttatcattcagaagtagctgatggtggaccgtaccaaacagcgtatcaagatttggattataaatataaagattaacatcaaatggctctgctaaacaattagcagagccatttttagatatattttccttgaatttctgctaaataatcaacaaaactatcgtaaaagtcatcacggttttgaatggttacatgcgttccaagttggagcaaaaagcggtacccagcctcatgatcgggaagtgtcacttttactaaaaaatgctcttcatcgtgctgtgaaattgcaactggatcaaagcgttcaacgatttgttcacgagctattttatctacaattaaagtgacttcatgcatcaagaacgtgggtctatcaccggtcatgctaaatggttttacaacaaaaggccgcgcttcaaaagtttcttccagcgttttcagttcaacaatacgcgacattttaaacgtccgaaaatcgctacgttccaagctgtaaccttgtaaataccaagaacgattcctaaataggaggtgatatggctcagttttacgaacggtttgattgccggttcgatcaatatagctgagttccactagttgatgttttttaatcgctaaatataaactttcgacttttgcatttaactcttttttcatggataaattggagaaatcaagcgaaatcgaacttttgggtggttcgctggaatgttcgagcatgtttttcattttttgcagcgtttttttagtttctgcggaagaaagtaattgttccataccgtctaagctggcgataatagctgttaaatcatctgctgtcagaagctttttatcgactttgtaggtaggcataattccaatgccacctttcgttccggcaatcgtgtaaatcgggatgttcgccatcgagagcgtgtcaatatcgcgaaaaatagtacgtttagagacctcaaacatcgtagccatttcagaagcactgactagctcgcgttggaggagcagcatgataattccgatgagtcgctcgattttcatttttttctccttttttcgaaatgatgacagacagttgtcatcattcgcgtgttatagttacatcatatcaaagttaagtaactttttggagggaaatattatggcatttgaaattgttgaattgaaaaaagaaacatttactggaaacaaagtagaaatccctgaatttgatccacaaaaaggctttggcccaatgagcgaaattaaagaatcagcctacacaaaatttgcaaaaaacgaaaaagactacgttggcattaacgcaagtcttgacggcttacaatattacatcgtggcaagcgcgaacggcgaaaacggcgacacaaccttcgacatcccagcaggcaaatacgcaaaattcgtaacaagcgaaacagaccgcccagctctagacgccttcatcggcgcagcatacggcgaagtgagccaaagcgacacagttggtattgcaggatcgtttaatttggaagatcttagagaagcggattttacgctttatattccggttgttagtaagtaagttgaggagatctctttcggatgaaaggggtctttttttatttgtataattaaaagtaaagtaaaaaaacacactaaaaatagtgttaattagttatatttttgatcataggttcacaaattgctcacaaaattaaggagctgctgatgatataatatagtaaatagtagatataatataaagtttctatattcaacgtatatttttctaatactgaagtcctttttattaattaaagagagaaggagacatgattataatggagaaaatagcttccaatacaaattcgactgttgcagctgtatctggagtgaaatcagtttctgtagataaaggtgaaaaaatttctctagaaaaaagtaacatttcaagcatgatgtttggagaagaagttaataatgaattgttgcctaatttaattgatttagtcgagtgtgtacagacacaaagtgaaaaatttccgaaaattgctaaaatgatggctcttaaagatagccaaatcaaattttaagggatgaaaaaattgaatgagaaaacaaatgaacaaaaacgagcaacatataatgaattaattatccaaaaagaaaatcagatggataagttggtagaaaatcaaaaggaaattgaaaagtctctttaccaattagatgaagattttaaaagaggttttcagcgattaaggtatttgaatgaggataatactgggacgggaaaaaatgagcactatcaagctcaacaatgggatgatcatttggagagtaagcttcgacatcaagttcaatatgcacaagaagagtttaattattgttttcaaaaagagatacttgaaatagataatgagcgagaagaattatttaaaaaaaggagtgagattccttgggattgatttattcaagccgtgattcggagcaggtgataaaagcactctctaaaaatttagccagtggaaaagatgtagttgcacaactaaaagagggaagtaaaaaaattattcaggctgttgatggacgaaccttatctggagcagcttatacagcgggtaaggatttatttgtaaatcttgttttacctacaatcgaaaaagtaacatcagcttgtgatgcaattgaacacgaattaaacaggtaccagtcaaccaactcaatagtctcaggtgaaggttaccttgacgaagacatcttaaagcaacaaattgaagctaaaaaagatatgaatacatcaatagaaaaaactgttaccataatgaatatgataatgaagacaagtttaattagagcattatttgatgctgcacaagattgtaaaagagagctaaaccagatgtcggatgttcttcaacaggatattgaagaactccagaagaagctagagaagttatatgaatttgatggacaaacaaaaaacttatttactagcagtcttgatgaaatgaaattagcaatgcaaggtgttttgattttaaataatacaactgtaaatagcgatgggagttatcaacttcctgctggaatagataaaagctggtttacagaattgaaaagtgaaaaacaacaaactgaaatgatagagaaggaaaggaatgcagtaattaaggagttaaatgagttatttgagaaaaatccagcagtagctattgaaaaaattaaaaataatgatcgtttattcggttacgtaatcggagctttagataaattccctgaaggacttcaaaatgcagctcttggaatctttatcgcacaagagagttggaataaacttccaaaagatgttgctacaaaagttttaaatagtgctaaattcgctacatatatcagtaagacatctatcgccacccaagcgattgtctatagtggattgattaaactaaacgaaaaaggatggaatgtccttgctccaattggttatacaacaaaagttctatctaaaaccagcgagggagcaaaaataatagctggatctaaagtgggatttgatttatttaagaaattaggaccagtttctgattttattaaaactcataaagtgacagttgaaggtattggttatgctggagatgggtttagtataactgcctatgcgtatgatgaatatatagatcctaagagcccggcttatggaaacgcaagtaaggctatatatggaggtcttaatttgtttatattaaaagctggaccacttgaaggtgctcaatatggaggtttaccaggtgcattatttggaacagtgaatactgcagttcaagggatggagattcaaaccccatttaagtggttaggtgataatgggaaaataggttgggatggactaatgggatttggtacagattcagatgcagaaaaatggctggctgagcagtatgaattatatgatcaaagagaaaaaaatcttaatgaaggaaatgttggtaagataaaggaagattggtttggaaaacaaagtggccgtgtaaatgtaactgattttaacaagggcctcccaaggtggtagagatgatgaaaaatgtgagttatgaagaagcacgagatacaatcagttccaaagaaatagaacagattaatacaatgaaagaacatacatctagctatataggtaagataatggtgagtattttattcgccttattactatgtttaccagcaatcaattattatccaatatacccagcagtagcttgtattcttataggtagcctgttaattagatatgttgcgttacaaccaattttcaaagtaacaaactataacttggtattatatttagtatggcaaactgctgcaatcttttttatgattgtttttttacgagtagaggcagatagatatcacttgattccgttagtttatattattttgggctacggaggttctattttattaattcgggctcgagtaaatacatatgtgaaagagatatttgaaacgacagctaaatctggaaaaaaagtgttttcaaacataattactaaaattttaggagcttttctggttcttgctgtaattgctgttttattttatcgtggaaataaatggtggcttatgaatatggataccgcagtaggaaattcaagttttttagaatatgttgtgtggggaatcggtttgttcattttgcttattggctttactttgttgccaacattgctattttcgccatctcaatatgtaaaagcaagattgattgggaaatatgcagaggaatttcgaaaagcttatagatttacggagaaagaatggtacggagaaaaatagccaaatcaagaggcccctttcatatgaaaggggcttttcactaaaccaacctcaccaaaaccccaacatccgcacaataccccaaacacccaccagccatttccttcgacgtaaccaaccaatcaaattccgccagctccccgtacgtaagcaacgccgatttatccacctttgtatgatccaccagcaaaaatttctccctggctttttccatcatatggcgcttaatctcatactccaaaatatccgagttcatcaccccatgcgtagtcgaaagtgcagtcgcggccatgaaagcttttgtaatattgtatttctcaaaaaacccccagttctccacgccaacaaatgatttagtactcgttttaaaagtcgagccaatcacaattaatttcacatatccatttcactcgcaaaattaatcacatctaggctgttcgtaataatagtaatctccttatccgttggcagagccgcagcgagacagctagtcgttgtcccggaatcaataaaaatcaaatcattctcttcaataaaatcagctgctgcttttccgataagctgtttttcagcatgattttctgtatcacgattttcgaacggccgaatttcttcaggattattataaatagaaacgacaccaccatagacttttttgatggtgtttttttggagaagtttggcaatgtcgcgacgaatagtatttttagaaacgttgaattgtttgcataaatcatcgaggctagcgctgcctttttcgtgaattaaattctctatcgcttgaatgcgttgtactttcatttgaaattcatcctttggcaaaaaaattgttttctcccctatttataacacatgctcaaaaggtaatcaactatgattttttatggtgaagttagtgacaaaaattaaattgactctccaattttattggcttaagatggggttataatcgattgatggttaacttatgagtaattttaagtggagggataatttatggcagatgtacggaaattaaagaattatattaatggtgaatgggtcgagagtaaggcggacaaatacgaagatgtcatcaatccagcgacgggcgaagtgctgtgccaagtgccaatatcgacgcgcgcggaattagaccaagccgctgtcattgccgaacaagcttttgaaaaatggagccaagttgctgtgccaagacgtgcacgggttctatttagtttccaacagttactcattcaacataaagaagaactagcaagactgattacactcgaaaatggtaaaaatttatctgaggcacgcggcgaagtgcaacgtggtattgaaaatgttgagttcgcggcgggagcaccaacactcatgatgggtgattcgcttgcttcgattgcaacagatgtggaggcggcaaattatcgctatccggtcggagttgttggcggaattgcaccatttaactttccgatgatggttccttgttggatgttcccaatggctatcgcgctcggtaactcgtttattttaaaaccttctgagcgaacaccgcttttaatggagaaattggttgaattattttccgaagctggtcttccaaaaggtgtgttcaatgtggtatacggcgcgcatgatgtggttaatggtattttagaaaacgaaacaattaaagcggtttcttttgtaggttctaagccggttggggagtatgtctacaaaacaggaagcgcgaacttgaaacgtgtgcaagctttgacaggcgcgaaaaaccatacgattgtacttaatgatgcggatttagaagataccgtgacgaatgttatttcagcggcattcggatcggctggcgaacggtgcatggcgtgtgcggttgttacagttgaagaaggaatcgcggacgattttttagcggcacttcgaacagcggcgcagaatgtgaaaattggaaacgggttagacgatggcgttttccttggtccggtaattcgcgaagaaaatcaaaaacgcacaattgcttatattgaaaaaggcgtggaagaaggggcgaaattaacagtagatggtcgtgaaacagggctttctgaaggatattttgttggaccgacgattttggaagatgttacgacggatatgacaatttggaaagatgagatttttgcaccagttttatctgtgattcgtgtgaaaaatctccaagaagctgttcgggttgcgaatcaatctgaatttgcgaacggtgcttgtattttcactaataatgccaaggcaatccgttactttagagaaaaaattgatgctggaatgcttggtgtgaatttgggtgtacctgctccgatggcgtttttcccgttttctggttggaaatcgtccttttatggaacgcttcatgctaacggtaaagacagcgtggatttttacacgcataagaaagttgtcactgcgagatattcattaaaaggttacgaagaataggagggcgcaaaaatgggcaaactgttacgaaaaccgttaaatgaaagaatagcgcctggcgttacgcttgtgcaggatattaaccaagggaattctccgctaagttatgttgggtttcgcttgattgaactggaaaaaggcgccgtttatcaggaggctcttactgatttggagtgctgcattgtcgcgcttactgggaaaattacagtgagtgagggggacgatatttttgcggagattgggacaagagcgaacgtctttgaaaaaattccgacagatagcgtgtttatttctggtggacgggcgtttcaagtgaaggcggacacagaaaaagctcgtgtagcgctttgctactccccggcgaatcgagacttgccaacgacacttattaaagctagtgataattcgattgagcaacgcggaaaatatcaaaataaacgactggtacataacattttgccagatgtaagtggggttgcgagtagtttgttggttgtggaagtgtatacgaatggcgggaatttttcgagttatccaccgcataaacatgaccgcgataatttgccagcagagtcacttttagaagaaagttattatcatgaaattaatccggagcaaggttttatttttcaacgtgtctatacggatgatcgtgcgcttgatgaaacaatggctgtggagcaccagaatgcggttattgttccagagggctatcatcctgtgggggttccggacggatatgattcttactatttaaacgtaatggctgggccgaaacgggtttggaaatttcacaacgatccggaccatgaatggattttagagcgagactaagaggaggatttggagcatgaatctaaacaaacatagcgaacgaaaatttgatttaatcacagtaggacgcgcttgcattgatttgaacgcagtcgaatacaatcgtccaatggaagaaacgatgactttttctaaatatgtgggtggttccccggcgaatattgcgataggaaccgcaaaactcggcttaaaagtaggttttatcggcaaaatttcagatgatcaacatggtaggtttattgaaaaatatatgcgcgatttgaatataaacacggatggaatggtgaaagatacagctgggcgcaaagttggtttggcgtttacggaaattaagagcccggaagaatgtagtattttaatgtatcgtgaaaatgtagcggatttatatttgacgccggaagagatttcggaagactacataaaagaaacacgggtgctcctcgtttcaggtacagctttagcgcaaagtccatcacgggaagccgttttaaaagcagtccacctagctcagaaaaacgatgtaatagtcgcttttgaactggattatcgcccctatacttggaaaaatacggaagaaacagcggtttattattcacttgtcgcggaacaagcggatgtgataatcggtacgcgtgacgaatttgatatgatggaaaatcaaattggtggtaacaatgaaatgacaatagacaatcttttcaaacataaagcagaaattatcgtgattaagcacggtgtagaagggtcttttgcgtatacaaaagcaggcgaaacattccgagcacaagcctataaaactaaagtcctcaaaacatttggcgcaggagattcctatgcatctgcattcttatatggactgtttagcggcgaaaatatcgaaacagcacttaaattcggaagtgcggcggcttcgattgttgtgagtaaacatagttcttccgatgcgatgccaacagccgatgaaattaaagcgcttattgcgaacgcggattaggagggattttgatgactgaaaaaacaattcgactaactactgcgcaagctttggtgaaatttttaaatcaacagtatattgaggtggacggtgaatctgcgccgtttgtggacgggattttcacattgtttgggcacgggaatgtggttgggattgggcaggctttggaagaaaatccaggtcatttaaaagtctaccaaggaaaaaatgagcagggcatggcgcacgcggcaatcgcctatgcaaaacaaaaaaatcgtaagcgcatctacgcatgttccacgtcagctggaccaggttctgctaacttaattacagcagctggaacagcatttgcaaacaatttaccagtattattcttgccagccgacacattcgcaaccagacagcccgacccagttttgcaacaactagagcatgagtcgagtacagcaatcacaaccaacgatggcttccaagcagtttcaaaatattttgaccgtgtgcagcgaccagagcaactaatgagcgcactgattcgcgcctttgaagtcatgaccaacccagtaagcgccggcccagcaacaatctgtatcgcgcaagacacagaaggagaagcattcgattacccagtaacgtttttccaaaaaagaatccactatcttaatcggcaaattccgacaaaacgcgaactaaccgaggcggcgaaacttatcaaagctagccagaccccggttatcattgttggaggtggcgcccgctattcagatgcccgcaaagaattaatcgccctttccgaacaaaacgacattccgctcgtcgaaacgcatgctgggaaatccaccgtggagtttagcttcaaaaacaacctaggcggcacaggtatcctcggtacgctagcggcaaataaaataatccacgaggccgatttagtcattggaattggcacgcgctataccgatttcacaacgagctccaagacagcctttaacccagcgactaaatttatcaatatcaacgtcagccggatgcagacatacaaactagatgccttccaagtggtcggtgatgccaaagcaaccctaatcgaactcacgccacttttaaaaggatacaaaacccaatttggtgacaagatttcgacgtataaaaaagaatggctaaaagaacgaacacgtctacaacatacaaaattcaatcgtgataatttcgctccagaaatcaaaaatcaatttgatcaaacaactttaaacgaatatgccgatagcttacagacggaattcacacaaaccgaagcattgattacaattaatgataccgtggcgccagatagcatcgtagtttgttcagctggttcacttccgggggacctgcaacgactgtggaatcccgctgtaccaaacacgtatcacctagaatatggctactcttgcatgggctacgaaataaacggtgctcttggtgcaaaaatggccgcaagcgataaccaagaagtatactctatcgtcggtgatggcagtttctgcatgtcccactctgaactgctgacttccttgcaatacggtaaaaaaattaacattatgctcttcgataattccggatttggctgtatcaacaatcttcaaatggcaaacgggagtgacagtttcttctgtgaattccgtgataataacaaccaaatcatgcaagtcgattacgctaaaattgcagaaggatacggcgcaaaagtctataaagccaacacaaaagaagacttagtcaacgcgttagaagacgccaaaaaacaaaccaaaacaactttaatcgacatgaaagtgttgcctaaaaccatgtcagaaggctaccttaactggtggaatgtaggcgtttccgaagtttcaaataaagagagcatcacccgagcatacgaagcgaaacaaataaacctgaaaaaagcccgactatattaagctaaacaaaaacaagcctgactcagaggcttgtttttgtttgccgtatctaatagccgcgccttgcatcacagcagtttttctttataataagagtaactgtaagattatgttttttaggaggaaataatatggaagcttttgcagaatatctagctgagattgaaaacccggaacaccgcgcacgaacacaagaagttttaacctgggtggcggaaacttttccaaatctaaagccagaaatcaaatggaatacaccaatgttcaccaataatggtacgttcatcattggattctcaattgcaaaacagcatatgagtgtttccccagaagtagctggaattgatcgttttgaaacggaactgaaagaagctggttatagtcatacgaagggaattttccggattttatggaagaaaccagtagattttgatttactagcaaaaataatcgagtttaatattcaagataaagctaattatagtagtttttggcgcgtatcagtaaattatagttactttgtcgcgtagcaaatccggattttttatgacataataaataagctaaaatgtattttaaaaagagtggtgtaaaatgcgtattttttgtggaattatgtcaatccaagcaggctttattggtgctcttgctgaactactaagtcctgacagcaaaaaaaataacttgtttatgataccggaagatcttgcggcgtcatcgggctatctaatgtcacttgcgatgattttagcaggaatcctcattatttgtgcttatcgaaatgattttctaatatttatggcactaattttatggctatttggactagtttttggactgattttcaccccgagttattcgggattctatttccgtccaatcgtatgtttaataagcttcttaatgggcctgtttatttttacggattatacaagacatcgagatgtgaacgaagaaaggtgagcgaaatgcccacctttttttattttatatccgtgcaggtcgcgatgtccgaaactgcaacccaagatcaatcaatgcacaaatccaaatgcttacaaaactaacaaataacggtaaatttgtataaagattaaggaaaaacaacccaacgagaagcaataataaaagcgcatctttccaaaaagaaaagctcacttccacctttttgtgggttataaaaacgaattgttttgagatgaaaaatagtgctacagagccaaacaacatcaaaagtaacacatttttttctaaatgatcctcaaacaataaatgcaaattcgccgcaagtagcataatggaaataataataaagaaatgtccataaattaagtactgcccatgggtttctttatgatgatcgattattttttcaaagctatgaaagtaagagacgaagagtgtgctgataattaaaaagccaagaaaagtatagctgatagtatataaatcaagcgtatgccccaccaaaatggtagtaatcgcgacgatgctctcaccaaatgtaataatgacgaacaaaccaaatcgctctgccaaatgcgggaaatcaacgggaactttccgtaatgtttttgctaagaataacggtaaaataatatcaactgcgatacctagatacattactaaataacgaataaagccatcaaagaaaaccgaagtagctgtcgtgaaaaccccaagcagaaacacacttccgagtataatcgccaccttgcgcgcgtttccaactagctgtctactcataacaaaatactgaataaccgtaataaatcgaatgcctaaataaccaattaaaaaagtatagtacgtatttgaaaaagttaaatcaaagctcgccgtcatcaaaatcaagaaaaacatttgcggcaacatataaagttcaggtaattttatcttttcaccaaaacggttgaaaaacatcgtctgccccacccacgcccaaaacatcggcgttaccatcagtaaatattcgccaaaataaacagctgttttatcgggatgattatcaacactaagtaaaagatgggtcgtggaagcaaccgcggtaacaaatattaaatcaaaaaataattctagccaagaaacttttctttcagtcattatttcaccccattaaatgctcttttttaaaattataccacgcggaaagctattcttatttacttttgacagtggcttgccgagaaaagtataatggagggacaaattactaggacgggagagagcaaaatggtgaaaacttgggatgaatttttagagcaagaagccaaacagccttattttatagaattgatgaaagctgtgagtgaagcgagagaagaaggaaatgtttatccatcagaggaagatatgttttcgtgtttccgcttatgcccttatgataaagtcaaagttgtcatccttggtcaagacccttatcatggcccaggtcaggcacatggcttaagtttttctgtgcaaaaagacgttcgaatcccgccaagccttcgaaatatttacaaggaactaaaaagcgacttggatattgatccagctaatcacggttatcttgctaaatgggcggaacagggagttttactaatgaacacaagctggagtgtggaggaagggaaagccggaagccacaaaaaattaggttgggcgacatttaccgaccacgttttagaagaattaaataattacgataagccgctcgtctttattttatgggggaatcacgccataaaagctgcaagtggcatcactaacccaaaacatttactgattaaaggagtacatccatcaccccttgccgcaagtcgtggctttttcggaagtaaaccattttccaaaaccaatgagttcttaaaagagaataatagaacgccaattgattgggatttaaatagtaaataatagcaacattttgtcgttttttcttcctattataaatttttctttaaaagtgaaaaaatttacagaataattgctaaaagttttttacataaagtttctttcgtgttatggttattacaggagatagttaaaacttaaaaaagttcctaaagaaggtgactggtttgaagcataattttacagaagatgactttgtttatggagaatcatggggactcgtgcatcggggggttttagaagacaaagaaatagaaagaatgaaagcgctacgagacaaagtagtgggcaaaaaaggtgtagcacaaacgacacttaaaccgattggcagtgtcagaatagacggagaagtctatgaagctcgcttgaaaacaggttatttggaagttggaaaaccaataattgcagtaggtatcgatttcggatacgtactagttaatgaagatatacaggagggagaaaaatgacaatgattggaccaattattatcgcagtattgattatcatctttttaatcgtcttttttactttagtaccagtggggttatggattagtgcattatccgcacgtgtaccagtaggactaggaacattaatcgggatgagattacgtcgggttgtaccttctcgcgttgtaaaaccgttaattaaagcagtaaaagcaggacttgatttagaagtaaaccaacttgaaagtcactatttagcaggtggggacgtggataacacagttgatgcgttaatcgccgcacaccgcgcaaatattgaattagattttagccgtgcagcagccattgaccttgctggacgtgacgtacttgaagcagtacaaacttctgtaacaccaaaagttatccgtacacctgaatttactggtgtggcgcaaaatggggtagaagtaaaagttattacacaaattaccgtacaatctaatattgaacgtatcgtcggtggtgcgggtgaagatacagttatcgcgcgtgtcggtgaagccgtagtatctacagtcggtgaaacgagagaacatacagacgtacttgaaaatccaaacagcatttcgaaaaaagtccaagaacaaggacttggagacggaactgcttacactattttatccattgatatcgctgaaatgcgtatcggtgacaatattaaagcaaaactagacatcgaaaaagccaacgcggacatggaagttgctcaagcagctgcatcgaaacgtaaagctgaagcgattgccctagaacaagaaaacagagctgccgtagtagccgcagaagcagaagtaccacgtgctctttctcgcgctttagaagaaggcaacttaggcgtaatggattactacaaaatggaaaatgtacaatcagatacagcaatgcgcgaatcgattgcacacgaagacgaaaaataaaccttgatcttttgcaagaaagaaggtgttttcattggatttaagtgattttctaaatagtggctgggaaggtgttttagttatccttggggtgattggcgttattgtaaatctccttagtaaatcgggcaaggcagctgacagcgaaaaaaaagaaccatccaagctaagccaaatgtcgcgtgcgaactacaaaccgcaacatcataaccaaaccactaaaaaaccagcaaaacgaaaagtatcacaaggaacttttacacaaaataaagagcaagataaagttattgcggaacaaaaagccgcacaagagaaaatgttaagagaaatccgccgggaatccgacgtggccaaagggaaaaagataatgaaaacttccacgcatcgccctaaaaaagctcgaaaattacggggtagattacaggaagcaataattaccaaagaaatccttgataaaccagtctctttacgaaaaaaccatctatagaaataagctcaagaactcgtttcttgggcttatttttttgctgtgtccaaactgttacataataaagttaagttttaaaatagctgtattacaactgtaacattcacctgatatgctgtgggtatataaaaaaggggtgcgtggattgaaaataatagcagcgagaagaaagattttttttgcgttaatagctttaatgatttctttttcagtactatttttaccaacaaatagcgcatcagcagcaactacttacaagatgacgacaacagctgatgtaaatgttcgcacagcagacaatacaagcggcaaagtcatcggtttttacaaaaaaggtactacggttacttttacagccaaaacaaaaaataactggtacaaaacaacatataacggtaaagtaggatatgtttcaggtaaatgtttaactacatacaaagcacctgttgcaacaacacaaagttttgccgcattaaataatgaagcgagaaaacaccttggcaagcgctataaaatcggcgcaactggcccaagctgctttgattgctctggatatacgcaatatgtatattcaaaaggaataaaaaaatctattcctcgtacagctaaacagcaatatgcttccgccaaaaaaattaaagcaagcgaactaaaaaacggcgatttaattttctttaattacggcaaagggattgcccatgttgggatttatgtaggaaatggaaaaatgcttaacgcccaaaataacggcgtgaaatacgacactatcaaatctggctactggaaaaaatatattgctggatacggtcgtgtagcaaatttaaaataattttacaaagcgtcactttccggtgatgcttttttgtgtaattaataaggaggaatcataagtggagtttagtataaaagaaatgcctttagaagagttggaaccgaaagtaatcgaaggtctgatgaatcataaagaaagaatgggatactcgatacctaaaagtgaacctgtttttattggatttgcagcgataaatcacgaaggaaaagtagtcggtggcgtaacagctaaaacgagttacggtgaactccatgtgtcactgctttcagtagatcaaaaaatgcaaggaacaggagtagggacagcattaatagaacaaatagaaagatatggtagagaacatcattgccaccatatctctctaacgacattcagttatcaagctccggaattttataaaaaatgtggcttcacagagcttggccgtatcaaagattttccattaaaaggtgaggaaaaatactttttcgtcaaatatctataaagtctacatggaactgtttttgttagcagcggcttgaacggcactaatgacagaggaacggaaacctgtatcttccagtgacttgactgcttcgattgttgttccaccaggagaggtgaccatgtcttttagttttccaggatgttcgccagtttctaataccatttttgcggcaccaagaacggcttgagctgcgaatttataagctttatctcgcggcatacccttcaaaacagctccatcagcaagcgcctcgataaacatatacacatatgctggggacgaaccactgacgcccactacggcatccatcaagttctcagcaacaacttcggcttttccaaaactagaaaaaatagtagaaatatgcgctgtttcttccgcagttacattgctattaggcgaaatggatgacattgcttcgccgacaagcgccggggtatttggcataacgcgaacaattttagtctctgttgacgttaattcttctaagtctttaattgtgacccctgctgctacagaaataacgattttttcaggtgttatcttatcttttactgctgttaaaatctcaggaatagtataaggcttaacggataaaatgataatatctgcttgttctgcaagttgagcgatatccgttgttaattgaattccgttaaattccgttttaagtggttttaatttttccatatctctaccacacacaagaatgtcttcttctttccccaagttagcttttgctaaaccacgaatcattgctgcacccatatttcccgcgcctataaaaccgatttttttcatactaattttcgctcctaacaaaatctttttttctattatctcacgttatacggctttgtccagcctttcagaaatggaaaaaagcaacaaacaaattagatctaaaacaatcttaggatttattctaaggttttttgagtttgggattgtattttttgtgaaaaaaagtctgtttttgaactaaacttgtaaagccattcatgaaatttatagcgcaactaaactttggctcgtatgaataataaaatgtagcgaaaatgtgtcaaaagcgactcgcttgacaactaaaaataaacattattgtgataattgtccccaaataagtgattctgagcaacagtaaaaattagcttaggatactatatattgctcaatgtttttaaggtttgaaagcgctataaatggcgtttttatcagctataattaacattggataacagttccaactacataatactgcgaggtgaaaacattgaatttctttctacaattattaggcaacttttctggcgctttaaatttcccagacgtaacagaaatcctaaacaacttaattaaagttatttttggttgatttcaaaaaaataaaacaagagaggaggtaactaaagttgaatttctttctacaattattaggtaatttctcaggagcgcttaacttcccggaaatcacaggattattaaacaacttaatgacagcaatctttggttgattttcacaaaaataaaacagcagaggaggccactaaaaaatgaatttctttttacaattattaactaacctttcaggagcattcaatttcccagaaatcacaggattactaaacaacttaatcaaaggaatctttggttgattgctcattagaataagttgaaatatagggttaaggctgacttaaccctattttgtaattaaagatgtaaatgaggaggatttttaatccatgaaaaaaataatcgcgttaatcacaacagttgcacttctatcaatggttgtctttaactttattccgagtatggttgcagatgcggctagtacttccgagagcaatttgacttataaagatgtacgaaatggcttttactttgttggatatgaagatgtgcaacttgaaaaaggtaaaagttataaatatacagtagcttatgaagcaaatgttgacatgcaagcgactaatactgttacaggtcaatcagcaaaagcaggactatttataccaaattcgtctggcgtagaacttgatagtaacaatgtgactactacacagaataacgtagtggatgtagcaaatgacggaaataaagtatttacacatatatttgaatttacagtaaaagaagatacaaaagcagatattggtacttatttaggagcaggatctgtcattccaacgactccggatgcaacaattatttggaaaaacgtatccgtaacaaatgaaaccccagcagaacaagcagaagctccagttattaatgcagaagataaaacaatcgaacaaaacgaaacttttgacgcattaaatgaagtaactgcaacagataaaaaagatggcgatcttactaaaagcatcaaagtaactaaaaacacagttgatacgacaaaaagtggcgaatatgacgttgactatagtgtgacaaactcaagcaaactcacaactacaaaaagcgttaaagtaaccgttactccagtagaaacaaaaacaaacacagctccagttattgatgcaaaagatcaaacaatcaaagttggtgacctatttaattcgttaaaaggagttacggcaacggataaagaagacggcgacttaacagcgaaaattaaagtaacaaaagacaccgtgaacaatgcggaaaaaggcgtttaccaagtaacttatacagttacagattccggtaatctatcagcctctcttacaatcaaagtgactgttactcaagatggaaaattaattgttaatccaagcgatccgacaaatccagctgatccatccaatccagaagtaacaaaaactcctgtagaatttgaaagagcttcagttgatccaacaacgactaaagtaaatgtgaacaaaattccaaaaactggtgatagctcgatgatatgggtagtcttagcaggactaggcttaactaccattggcatcagctcttatcgcaaaaaagcaaatagataatttatcattgatgaaaagagtatgctaggtctgaaatcagatactcttttcattaactagatgataaaatggcaatcaagggctatttttaaagagctttacacagagaggggagtcatttatgccaaaaattgctaaaagtgatcgattggagaatgttgcttttgagtacattaagaacaaaattacaacgggggagtatcctaccgggtacagagtagtagaagcgaaattgtctcaagaattaaacatgagcagaacaccaattagaagggcgattattaatctttgccattctggttttttagttcatcagtataatcgtggtgccttcgttcaaaacacagaggtaacaattactgagtttttttcgagaatgaaattggtcgaacttttagtgtatgaaagcacggaaaaattagctttacgggaagattatattgttgtagatgacatcatagaaatagcagaaaaagtaattcaatatgaaaaaaatagagaatatgagttaatgcggggtgcttttgaagattttattagcacgtttatcggtaagttgaacaatgattactttaatagagtaattcaagatttatggaatgaaataaatgacaacgcaaccaaagaagtaagacttattattgtttctgcgagtgatcgaattgcggaagaattagcgcacatgattgaaattttaaaatcatggaattacgaacaattaaaaaaatgttttcaacacataatgaacgcaatgattttaattgctttttaaagagaggtttataactattgaaaaaaataagctggatgattatcatgctgattatcgttgctatatcagtaggctattattttataaaagaaaatgagaaaaaaacaccacaagtaattaattacaaaacagtcgaagcgaataaaacagacttaagcgtctatgtttccgcagaaggtcatatcgtaaaaacagtaaatgaatggccagattataaagattttgcggtacaaattatggtggacgaactagaaatcaatcaaataaaagaaaaacaagcagcgaatgtccacgttgaagccgtagataataagatttacaaaggcaaagtttctgatatagatgaaaaaggcatcataaacggctcagtaacatcatataaagttacgattgatttggaaaatgatgatgatttgaaagaaaatatgtcagtaagtgctgacgtgctcgtggcattagaaaaaatgattctgacaatcccgatagaagcagtccacacagataaacaagacaaaaattatgtttatattgttgatgaaaataagcaaaaaaagaaaatctggattgaaacaggaaaagataatacaaaatctatccaagtagtaaaaggacttacagaaggacaacctgtgattattccttaaatggaggagaatgcgacatgattcaactatttaacatctcaaaatcctaccaaatgggagaaaacacaataaaagcattagacgacatatcgcttcaaatcagtgaaggtgaatttttagccattatcggcccatctggttctggaaaatctaccttaatgaatatccttggaattcttgataaggcgacggttggtgagtactatctcaataaaaagaatttaatgcgcgtatcagaccgaaaaatttctaaaattagaaatcggaaaatcggttttattttccagcaatttaatttaatgccccgactcactgcttttgaaaatgtagaattgccgcttgtatatcgaggtgtaggtaaagctgttcgaaaaagagtcgtattaaaaagtttagaacgagttggattattagataaaaagaaacatctacctgcccagctttcaggaggtcagcagcaacgtatcgcgatagcacgagccatagcaggaagtccggaaataatactagcagatgaaccaacaggcgcgcttgattctaaaacaggagaagaagtaatgtcgttgcttaaagaaattcaccgagaaggaaatactttaattatgattacacacgatcaagaaatcgcccaacaagcagagcggataatagaaattaaagacggcaaactctgtgaatggaacaaattatgaatatttttcaaagcattaaattagctctaaaacaactactatccgccaaatttcgaacatttttaacaatgcttggaattattattggtgttttttctgttatattacttgtttcaattggcgaggcgatttcaaaaaatgtttctagccaattaggagatatggggagtaatctggtatctgttagcttttattcggataatccaaacgagaaattcacctataaagaagcgaatggccttttgaatgaggatgaaattggttcgccggaagtaatgaagaccaaagaagtaagaacgaatgtaaagacagcgagtagccaagtaactggagtaaatgaagattatgcgactataaaaaacttagaacttacatcaggtcgattttgttctaatgtagatgttcgatttgcccaaaaagtgactgtcatcggttcagaaattgctaaaaagtattttaaaaatcaaaatccagtaggaaaacatatccaaattgccggcgctagatatttagtaattggtgttttaaaagaaaaaggcgagagtttattcgggtcagcggacaagaaactttttattccggtcacttccgcagaacgactttttaaaacggattctgtagatttatactatattcaaactaaaaatacagaacaagtgccagacgttgtgaagcggacaaaacagcgactaagccaactttttccaaataataaagaggcgtatacggttgtcaatcagcaacaggcacttgatacatttgacagtattactagcacgcttaccattggtttaggcgcgattgctggaatttctttactcgttggcgggattggaatcatgaatattatgctcgtctcggtttcagaacgaacgcgagaaattggtattagaaaagcaatcggtgcaggtagtggggatattttgaggcaatttttgattgaagcgattgtgcttagtttgttaggcggaggtatcggtattttactcggaattttttccgcacaaatagttacagccgcatctagttttgacatgcatgtttctgctacaacgattcttttagcagttggattttcgatgtttattggaattgtgtttggtgtagtgccagcgcagaaagcttcgaaaaaaatgccgatagatgcgttacgagcagattaactatagggggcgtttttatggagaaagaacaacaagtcgatgatacatgggttttagtagaaattgttagtctggtaaccaatgtagaacgacaacgacttagagaacttagttacgctgacttggaagaattttatgaaagagttgtagtagaacaataaagaaaatcctactttttgcgagaataataaaactatgcgaaaataaaggcaaattagtaggaggggtttagatgtacgaatcgattaggaaacgtgatgatggtacgacgctcgttgaatttgggttagaaataaatgcgcaagtagcagatgtattttccttattaacaaccaacgaagggctagcaaagtggtttaatgagcttgagataggcgagcttggagcaaatggacatcttcttttcatcatgactcctgaagaaaaaataaccatgccaattcgtgcatttgaacctaacaaaaaaatcgcctttcagtgggatcaagatgaagtagcgtttgaactaaatgaaattgcgggaaacaaaacaaagttagtttttacagaacaactgaccgcaatcacagagcacagtccaagagatgtgtctggttggcatgtttgcctgaaaaaattacaagcaagcgcggagaaaaagacgtacgattttaacaaagccacatttgaaaccctatttgccaaataccaaaaagcattgaatactgaaaaataaatcctttataaaagccataaatgaagctggaaacgctttgtttatggcttttttctgtttcaattaatctttttccactttaactggaaattccttatgttcaaaaaagtaatcggtttcattagaatgtaattgtaagcaaggcattgaaaaaatacggggtgacgaaatgatagtatcggaagaacaattatttttaaatcagcatctaagcacaaaagaagaagtgctagcttttattgcagacaaggcagaagaaatcggtatcacaacaaattcagctcaggtagaacgcgacttatgggctcgcgaaaaagaatacgcgactgcagtacaacaattaatcgccattccacatgcgaaaacagaggcaatatcagaagcaaaactgctttttattcgcctagttgaaccgattgattgggagtcaaaagaaggttttaaggcacaagccatttttgcgatattagttccagctagtgaggccagccagcaacatctgaaaattttatctagcgtggctgtgaatttactagaagaagcatttcaagaacaaattttaaccattaaaacggaacacgaactgatggattacttgaaagataatttggaaggagaattgatatgaaagttgtaggagttacgtcatgtattgcagggcttgcgcatacaccaatggcagccaaagcactagaaaaagccggagtaaaattaggacacgatgtcaaaattgaacaacaaggagcgatggggacaattgatgaaattacgccagccgaagtgagcgcagcagatgtagttatcatcgcagcagataaagttatcgacggggaagatcgtttcaaaggaaaaccagtcgttcgtgtgaaaattggtcaatgtgttgcgaacggggaagcggtgttaagtaaagtagttgcagcaattgaagcacgtaaacaaaaggaggctaactaagtcatgaaagggaaattaaacgaagcaaaagaccacttaatgtcgggtatatcctacgcgctaccagtcattatcgcagggtcacttgttgtagctgttgcaaaattgattgggattatcggcggggttacaaatctagatgcctacgcagatgcaagcggattttatcattacgtttacttattccaaaatgtaggttgggcggcaattggcttacttaacttagtacttgcgggatatattgcttattctatcgctggaaaacctgctcttgctgctggttttgtcggcggggtccttgctactagtacaaatgctggtttcttaggtgccgttgttgccggtttcttcgcaggttggttaacaaactgggtgaaaaaacatgttcgtatcactggacctgctgctagttctttaccgctaattattttgccactgattacagttggtgccacggggatactgatgtcactgattctcggcggaccacttggttggttaaaccaaacgttacttgattgggtaactgaaatgtgtaaaaacgatacaaacgtcattattctcgcacttattttaggagctatgattggttttgaccttggtggaccggtaaacaaagctgcttggatggctgggaatgcgctatttatgagtggcatttacctaccttcgatcatgattaatgtcgcaatttgtattccgccacttggctacggaattgctacacttttacgcaaaaagaattattctactacattcaaagaagctggaaatggtgcactaattatgggactgattggcgttacagaaggtgcgattccatttacactacgtagccctggtaaattaattccgctaaatgtaattgcctgtgcgattggtagtgcagtaacaatgggacttggcgcttatgtgaaaatgccgccgattggtggaatgtatggtttcttcaccattggtaacggctgggcttacttagttggtggcttggttggtgcatttatcatcggaatctgcgctaacttattcgtgaatttcaccgaagaagaaacagctgcagcagatgacgctgtagatgatattgatattagttttgatgaaatagagattaaataatagttggaggatttaattaaaatggctaaaacgaaagtacatgtaattccgcattcgcactgggatagagaatggtatttcacttcaagccgttcgacaatctatttagtgaagcatttaaaagaagtgattgaaactttagaagcgaaagacaattaccatttttacttaatggatgcccaaagttctttaatagaagattatttacgctactgccccgaagataaaactagattagaaaaacttattgctgaaaaacggcttattacagggccttggtatacacaaacggaccaattagtcatttcacaagaatcaatcgttagaaacttgctgtatggaacgagaatcgctcgcgaaatgggacatagtatggctgtcggctatgtccccgatgcattcggacaaggtggaaatatgccgcaaatttataaagaatttgggatttcaaagtttctattttggcgcggagttgccgataatcgcttgaaacaaaccgaatttatctggcgcggtgatgatggaacagaaatgctagcagaacaaatcccattcggctactactacggagcgaacattccggaaaatgaagcggaactaaaaacgtatttggatgagcaaattggcgctttagaagaaaaagcatccacgccaaacgtatacttcccgaacggcttagaccaagcgccagtcagaaaaaacttaccagaattagttgcgaaatttaatgaattagatcattcgcgtgaataccaaatcgcttctccagaaacattttttgctgatttagaaaaagatgtaactgatttgccagtcattgctggggaattaacagaaggtaaacatagccgtctgcacaaatcgattttctccactcgggcagatttaaaacaagcaaataatgaaatcgaaaactttttaagcaatgtgctagagccggttctgtcgataagctactcacttggaaatcgctatccacacaatgagctcgcggaaatttggaaattgatgtttgaaaatgctgcgcacgatagcattggcggctgtaacagtgacacgactaaccgtgacgtcaaacatcgctataaattggcttcggatttagcaaccaatttactcgatttaaatatgcgtctaatcagtgaaaaaatcgcacaaaaacaaccattccaatttaccgttttcaacccactgccatacgaaaaaagtggcgtgattaaaatgaccgcgtatatcccagaagacaatttcaccatagaagatacgcgaggaaacacgcttgaatacaccattctagagaaaaaggacttaacggaatatgtcttaaatcaacatatttatctgaacccaagcaaaccagtttatttaccagaaaaagtctttttagcaacgatgctagtagatgtgaacagcattccagcgcttggatatgacacaatctactttaatttagaaaaagaagtagctgaacaacaaccaaaacaatctgctgaaacaaaaatcgaaaatgagttttacaaaattcagttagcagataataattcattaacaatccatgataagaaatccggcagaacctacacagaccaaatgatttttgtggaaaatggtgatgacggagattcctacaattattcgccgccgcgtaaagatctattaatttcatctaaagaagcgataatagatagcgtagaggcaagtgtatcgggcattaaccaaactttaactatttccttcaagttaaatgtaccgtataatctagaagaacgtgcaaatggtgaaaaaacaaaagaaatgacaatcaaaacgttaatttctttacggaaaaacgaagagcttattcgctttgatgtgcaagttatcaaccaagtactgagccatcgtttatgcgtcactttcgcaactgaaatagctagcaaattttccacagctgaccaattattcgccccaatcaaccgtcctgtacgacttccagaaatggacgtatgggaagcggaagaatggcaagaagcacccatttcgattgaagcaatgcaaagcttcgtaagtttacatgatgaatcgcacggtgttgccgtaatgacagaaggcgtgcgcgaatatgaaatcattggtgaaaattatgatacgatttcgctaacattattccgcacatttagtcatatgggaaaaacggatttactgtaccgtcctggccgcgcttccggtgaatcaatcgttgaaacacctgatgctcaattactcggcgaaataaacgccacatttgcgctaaccttatttgaaagttcttttgacgaagcaaacattgcgaaaaaagcaaaagaatacttatcaaatccaccagtttaccaaatgtctgattttcttaatggtcggttgatttacgtataccgcgacgaagaaaaaacattagacagcacgtatagcttgggactcccagtgatagacggggcgattattagcgcggtgaaaaaagccgaggatagtgatgccttcattacccgctttttcaacccttatttacaaaaagaaattgccatcccagaaattttccaaggcaaagaacgccacttggatgaaagcaatgaagctgaaacaaaaacaaccttaacacacgctaaagtgcaaacatatttatttgaaaagtaaagtttaactacctcaaaaaggagctgcttatgatgggatatttcgcttataaacgtttagaaacactatttggcatgctccttgatgcgggtagccacctgtcagctcagaaactcagccaagatttacatatttcagaacgaacaatccgaacggacatagccaaattaaccgaatttctcgaaacaaatggagcaaccattaccctaactagaggcgcgggatataaaatagaaattcttgatcccactgcctttgaagcatttcaggccgacaaaaataaaccgaaaaatacggattattttgacttggataacccggaagaacgcgtgaaatatgagatattcttattactatctagcgctgattatattaaattagaagatttggcagacaccctttttgctagtcgtgcgacgatctctaatgacatgaaacaagtccgaacagttatcgcatcttatgatttaacgctcgtctcaaaaccaggatgcggcgtgaaaattgttggagaagaagaaaaaatgcgctacacactaacggctctgattgcctcgaaaaaagcgccagagtcctacttagaaacattttttgagtggcataaacaaaaagagaagttgcaaaagttaatgtcagccgtgacggattatttttttgcaaccaacattcgttttacagatgaagcacttcaaaatttgctcttacatatgatgattttagtagagcgaattgaactagggcattctttagagcaatttgaattaacagatgttagcgaagaagaaatcacaatcgcaaataatttagctggcattctagcttctctttttgaaattgaaatctcagaaggggacaaaaactatttacttctccaaattgctagtaaacggattttgaatgtggaagataaagaaattagtgaattcgatgattatgcctatattgaagggatgttaaatcggattgaatcgcaatatttttatcgtttgcaagatgatttacagttaaaaaaagatttgatcgcacacattcattccatgctttaccgcgtgaaatatcatatgactgtaaaaaatcctatgaccgagcatattaaacgatattacccacttgcttatgaaattacgctagatgcagtagaatcactaaaaaaagattatccgtacgatattaatcaaaatgaattagcttatttggcgcttcatatcggtgcatcattggaacgaaactatcaaatatcctattatcgccataaatcagcgctcattgtgtgcggttcgggatttggaactgcacgaattgtggaagcgaaagttaaatcagctgtaagtaatttagacattactaaagttgtttccattcaagaatataatcgttttattcatattgaagaagatattattctttccaccgtcagaattccagaaaaaaataaaccagttattaaaattagcaatatcccgacgaacgaagaattaaaaatgcttggagcgattatcgaggagcagacagaccctaatcgaggcttcttatcttccttttttgacgctgcattttttgcgagaagtacgcttactaataagacagcgattttggaagagatggttgagtcactaaaaagtaaaaatattgttggcgacgagtttttgaattctgtaatagaaagggaacggctcggttcaacggtgctcggaactggaatcgccatcccgcatcctctaggcttaatggctaaagagacgaaaatcgtcatcagaattttagataatccgattaaatgggatcaaaaacaatctgttcacgctgtctttttattatgtattagtaaaaatgattacgaagaagcaatcaatatttatgaattacttgtggaattagttcgcgaagagtacggtgaaaaacttgcggctttaaaaagttttacggattttactagtttagcgaacgatattttaaagaaaaagtaaaagctacctccttttcatcaaggaagtagctttttttaatgaagttttagtgaactttttgattttaccatttggtcaaaggcgatttcatggtacactagtaaggagaataattatacagatggaggatttaatgaatagacaaacagaatttattttgcttataataggcgcttcttttagtatcatcactttttttgcagcagcattatatgcactggtttttggatttagcgcaattgttttatcgggttcaccaatgacttatggtggttctgaagaaatgattatgtcttggatatttactttcttttctattattgctgtgatttttacagtagcatcagctgtttttggatttattggagcttttaaaattaaaaataacagctctaaagtaaaaacaattgctgtttgttttatcatattaggaggattgcaagttttttcaatacaaggtattctatttttaatcgcaggaattttaactcttacaaaaaaggaatacaaaacaaattttagagaaaatgaggggataaaatgggaatagcagtcttctttccaatatttttgatttttgctatgtttctaggactcgcagcaaaagtgctattagctatttggatttataaagatgcagaacaacgcggtatgaatgcgattctgtggtgcctattaatgattttcataaatgtaattattattctagttatttatcttatcgttcgtacaaaaggcgaggtaatgagaaaaaacttaggtctacttattagtgggattggtgtagcggtagtaaatacctttatcgtcattattgcctgcattttcttgctgtttttcgcagtaaacgatggtggaatgcataatatgatgaacgattatgacaatgaatatcaatatgatatggacaactggcaagaattttaataacatctgtaagaatctgctaccaaatatggagcagattctttttatatttacataaaaggggtatagactataaaaaagtgaatctcgacaaggggaattgttgaatggatacggttattttaataacggttattatcgttataatggggttagcgtttgattttataaatgggtttcacgatattgcaaatgccgttgctacgagtatttccactagagcgttaaaaccacgtgtggcgattgggattgctgctgtgatgaactttttaggagcgatttcttttacaggagtagccgagtcgcttacaaagagtatagtggatcctttttcattaaataacggagaatttgtggttttatgtggtttaattgctgcggtgatttggaatttgatgacttggcttgttgggatgccgagtagttcctcgcacgctcttattggtgcgatagcaggtgcttctattgcttctgctagtagttttagcgtgcttaattggtctggatttacaacgattattatcgcgttaataatttcgccaatcattggttttacagtcggttatttaatatattcgctgtttaaaaccctttttcatgataaaaaacttggtaaaatgaatcggcgttttcgttttattcaaattggaactgcagccgttcaagcatattctcacggaacgaatgatgcccaaaaaacaatggggattatcacgctagctttagttgcaagtggacttttaaaagaatcagctggaattccgttttgggttcaagttagttgtgcggcttccatggcgatcggttcatctgtcggtggttaccggataatcaaaacagttggaacaaagattatgaaaattacaccagtaacaggagtagcttcggatttaagttcgctttcagtaatcatgtcagctactttaatccatttaccagtgagcacaacgcaagtaatcgatagctcaattatgggtgttggaactgctaatcataaaaaagaagtaaactggcgtacaggtaaaaatatggtggtcacctggttcatcacgttaccattagctggactcttagcggcagtggtatactggatatcagcagccattttcttataattaggaggaatttaaatgaaaatagaacatgtagctttatggacaaaagatttagaaaaaatgaaacaattttatgtgacttattttggtgcaacagctaatgaattatacgaaaataaaacaaaaggcttcaaatcctattttctctcttttaaaagtggggcaaggctggaaattatgagccgcatcgatgttgctggaaaaaacaccggcgaaagtttaggctgggcacatattgcgatcgcaacggactcaaaagaagccgtggatgaactaacagaaaaaataagacaagctggttttagtgtcgctggtgaggcgagaacaactggagacggctactatgaaagtgtagttcttgatccagaaggcaatcgaatagaaatcacttgttagtacctatttgtcactaacttatttatcatgtagtatacagttatacatattattgatgaggtgaatttatggatattgtaactaataaaattgtcgtagagaaatacaactttgaaacaacaatggaagaaaatcaaccgttcgaaaacaaaattgaattagaagtccatgaagtagaaccagttgatggaaacgtagaattaatggctaaaggtaagatttttaaaatcacgattccgtttttactagttcttgaaaatttccggattgacggtcgaattagccgtattatccagttaaaagacttttttggtcaattttctgacttagaagcaaaagatgtggaaggtttatcaaatccactaattgattacattaaacgtcttacttacgatgtgaccgaaattgcatttgatgagccaggggttagtttagattttaatgctaatcataacggctagataggagaagaaatgcgccaatatatgaaaatggtacgcccatttgattttgtaattatcgttgcactgattttgggttcgtttttaccactattgttattttccgttgctgaggctaaaaataccggcgatgaagtcgtagcaatcatttcacaaaatggcaaagtaattcgggaaattccgctaacaggtcataaaggaaatgagcaatttacgattaaaggaaaaggcgcacaatataatttgatggaagtagacggcgagcgaattcgcatcaaagaagataacagccctgaccaagttggtgtgaaaatgggctggaaatctaaagctggtgacaccattgtttgtttaccccataaagtattcgtggaaataaaatcaacacagaaagatagcaaagatcctgatacagatttaattgtgccaaattaaaaaaaacagcaagcgccaaatactgggcttgctgttttttatttaatcaaggagttcgatatatccttctgttccatttattcgaatacgtgcaccatcctgtataattttagtggcattttcgacaccaacaacagcagggagaccatattcccgagcaattactgcaccatgtgtcatcagcccgccaacctcggtgataagccctttaatcgaaacaaacgcgggagtccagcttggatcggtaaaagctgtaactaaaatatcgccatcttctaaatcagctttttccatatttaaaataacgcgtgcccgaccttcaaccacacccgatgaaacaggcagaccgagaatcgtattttccggaaggttttcgcggtgatattgcccgctaatcatttcgccgtccgatgtaagaatccgcggtggcgtcaatttttcataagaagcaaaatcgctttttctagtattaataagttgataatcagctttatttgtacgtacaacttcgcgtaattcatcaaaataaaggaaatatatatcttctttttctgagataacgccacttctcacaagctcttcgccagcacgaagcaatgcgcgcttataaataaagtaacgattaatcattccgtattttggatactcgcgatagccgatgaaattacgtaaagtatcgattttcgtttttgtttcggccgctttttcagccccgtctggaagctctgctaattgttttaaaagggtttgttctttttcgcgcgcttctttttcgccttgttcgaacttgtgtttacttgcatttggttcgaaatttttaatattactcaaaattaatggaacgagcgctagcgggttttctatccagcgcgtttttgttaagtcgatttcgccggcgcagcgcattccgtatttttctaaataggcttctattgcatgttttgcttctttaccaccttctaaatgagctagatcagctaagaaatctggatttttagtttgttctaaatagcttctaacagcaggatatggtcgaatagcatcggctacatctaacaattctaagcccatctttgaagtaatattattgggtgcggattcagaaagtgtatctgctacgtttttttcaccaagccatttgctaatatgctcgtttaaccatgcagaagcgtccataccagccataattgcatcaatgcttgtctggttaaataaaacgcttttaagctccagaaggtcctctacaatgaaatcaaataaggcggaacctgatttcgttttaatcgtctcattaagttggttaatggatgcttcactattttttactaattcaaaaacgacagcgggatcaggaacatttcgtacaggtggtttgcctggtgcggtcgcatgattgggtgtgttttccactggtaatggtggcaagaaatcttttttattaataactgtcaaaagagcatctttaattaatgggtcagacgcgccaagtgtatttaccatcatatctcttgaagtggggaaggataggctttgggtaatatccacgaataatcttccaccagctggatacatcgaagcagaggttgtcattaaataaaaggaaagaccaagtggcttcattgcatcagtcatcatttgttgatgagccacagatatatagacccgatttcctggctcgtccacctcaggaactggataaagcgtagtaatcggacgactttgaacaatataaaattgcccctgagccaaacaccattcaatatcttgtggtttattaaaatgagcttctacggttctgccaagtttagctaaagttaaaatttgttcatcggttaatgtttgagctgtttgcttggatggctccagtggcctcgtttccgttccgccttcttttaacccatatatggcgatttttttagtggcaatgattttatttgtaatagtattttcttggatggtataggaatctgctgacactaaaccggaaactagagcctcacctaagccgaaacttgcatcaatagctagtgattttcgattagacgtgattggatctgcggtgaataggatgccagaagcttcagggaaaatcatttcttgaacaactacagccaaatgcaccttgctatgttcaaaatggttttcgtttcggtaaataatagcacgctcggtaaataaagaagcccagcatttactaatatggcgcagtatttcatctataccaataatatttaaataagtatcatgttgcccagcaaaggaagtatgagggaggtcttcggcggtagcgctagagcggacagcaaatgccgcgctcgcatcgatgttcataatagcagcatcaatttcaacgctgatttctggagcaatcgggatattttgaatgagtgtgcgaatctttgcgctaatttcacgaatgtccgctgtgttttcgttttcttggagtgtgagttgttccaggagttgtttgaattcatgattttctgctacggtttctttgtatgcttcggtcgtaacggaaaaaccggctggtacgcgcacgccttgaatctttgcgcactcgcttaaattcattcctttgccaccaactaaggcttcatttgtttcgttggtttcctgaaatttcaatacgtatgacgtcatttcgttccctcccaaattttcgcaaaaataaattcttgactgtaaagcgggtatgttatataattaaagtagggattgctttacgtaagtctatttaagcgattatatctttataaatttaccatgaatccagctatttttcaattaaaaaccaatataaaaagcaaaatttctcgtattaagaaattttgcttttatttttattgctcgaatttacatagtgataagtttctagatttagcttctgcaatggttacagctgtttcgccgtttgagttgtttaaaccacgacagttttggtcgtaatggtattttttgccagttgcagtgatataaaccatttcgccttgtttattacttgtatctggtttcggagcagagcgttttgcttcagctcgttttgcctcagcagctttcttttcggcggcagctttttcggcagcggcttttgcatcggcagttcttttttcagcggcagctttttcatctgcaattcgtttttcttctgcggcaactcgttcacgttctactcgctctgcctcagctttttcagcagcaacacgctcggcttcagctttatcagcaagctttttcgtgtaaccggggctcatttctaatgatagtgtttgttctttcgtttttccatcaatagtaatagaaagaacagcatcttgggcccggtcaagttcatttacacgaaggctgaattttccgtcctcgtctgcggttgcagttgcatctggattatcaacaaaatctaacgttacttcagcgccagggtttgtttttccttcgacaacaatagctccgtcatccgttgttttaaaggtcttttctgcttttaaaagtggttcaactgtaactttctttgttttttcttcttgcttaggtttctctgtggatgcttcctctttctcgcttggcacaatagcagagccaataaaaatagctaaaatcgaactaataattacaatttgcgtttttctacgtggccattttttctttctaaaacttataagcccataaatcaacacaccaatacctactagaaacagtattgtcccaaatcccgtcataaaaaactccctctccctttttttgtctaacgatttattataggcatattttgaggttgcgcacacgaggggggtggtaaaaaaaactatttttttgtacgttctactaaggcattgcataaaattccaataaaaagcatcaaaatcataaaaattgtcacagatttcatccatattatattagaaaaaaaggtgctgttgaaatttaaaaaaaccaaaacaggaccgataaatgctagtaataagctaattggaatcagataaaaggcaagtttgccaagttcttttaagttgtttttaatagcaatcatcctccttttttaagctttcaacaggagtatactacaaaaaatggcaaaaaagaaccctcttgaataatacagatgattgctttatgatgaaggaaagacaagcgtnngggaggtgcttaaagatgacgaaaccaatagaagaaatcggcgcagaaattggcgctaaaacagaaaaagttgcacgtaaaactggagaaattgcaggaactgtagctaaagtttctatttatggttcgatttgggctgtaaaaactggggtaaacaagtctcgtgcctttactcgaggatttaaacaaggttggtctggcaaataatatagtcaaaaaagggagaaagtgaattgttaagttacttatcgacgttaaacccggtacttttagcattactagcaggaatcttcacctgggcttgtacagcagcgggagcatcactcgtgtttttctttaaaaatttaaataaaaaatggggcaatgtaatgctcggttttgctgctggtgttatgctcgcagctagtttttggtcacttcttgcacctgcaatcgaaatgagcaaggatttagggaaattttcttttgtgccagctttagtcggttttttactcggtggcatatttttgcgtgtcattgatcgcattattcctcacttgcattttggatttcccgaacaagcaaaagaaggtcctaaaacatcacttcgaaaaagtattttgctagtgctttcgattacgattcataatattccagaaggcgcggctgttggtgtggcttttggggctgtcataactggtgatacggaaacgcttattactgcgattgtattagcacttggaatcggcattcaaaattttccagagggagcagctgtttcgattccattacgcggggaaggtttatcaagagggaagagcttttggtacggacagttatctgcagtagttgagccgatttttgccgttatcggtgctgttttagttgtttttgttacacctatcctgccatttgcgcttgcatttgccgctggagcgatgattttcgtgattgtggaagagctaatacctgaatctcaagtggaaggttcagccgatttagcaacggctgcaactatggctggtttttcagttatgatggttttagacgtagctttaggataaataataacctgccgtagaaacgttatttaacatctgcgaaatacgtttttttacaatagaataaatagtgaaatatttcacaatatgctagttttcaggggtaatcctgtaactataaattggacacggaaaaaagctcccactttatccgtgtcttttttgtaacaaatgttacgattctgttggttctattttcctattttagtacaaaaactagaaacttgttttttttcatgtataattgttttatacgaaaaactggggaaggtttttctaaaggtgaggtgcataatgtgaaaataaggtggattaaagtttcactagttacgattctcattattgccgtggtttttgttggtgtcatagggttccaaaaataccaattttcaaagtcgcgcaacaaagtaataatgcagatggatagactaatgaaagaccaagatggaggtaattttcgccgcttggataagaaagaggacggagtagaaattatttcttatattcctaaaacttccacgaaacaagacaacgaaattatccagaaagaaattgaaaaggctaaatctgcagaaataaagaaattaaacagagataaagataagcaagggattattttttacacttatcaaaagcagaaaatggccgagcaagtagtatcttacaaagctgtccaatctgagtacgtaaaagaaggtaaaactaaatttgtacttaaggacaaaaaagatatttgcaaaaacattgtcactgacgccaaaacaggcgctctgttaacacttggggatgtgttaataaaaaatgacgaaacaaaattaaatttaaagactgcagcagagcaagaacttattaaaacaggggacattcctttaaaagatgttgggaaactcggaggaataaagagcttagtgaaatgggatcaaactgattttgaacttactaactcggaactaattgtaccagttgaagcaccagggatttcaggaccgaaaaaagtaaatctaaaacttgctgacattgctagttctgtgaataaacgttacttaccaagcagcgtaaaagtcccagaaataccaaaagcaaaaacaaacaaacgtattgcacttacttttgatgatggcccaagcgcttcagtaacaccaggcgtactagatacattgaaacgctatgatgtaaaagcgacattctttgtacttggctctagtgttgtgcaaaatccaggtttagtaaaacgtgaattagatgaaggacaccaagttggtagtcactcatgggatcatccacagttaactaaactatcggaacaagaagtttacaaccagattctacaaacacaaaaagttgtttttgatcaaacaggttattttccaacgacaatgcgtcctccttatggcgcagtaaacaaaaaggttgctgatgaaattggacttccgattattcagtggtctgttgatacagaagattggaaaaataaaaacgcaaaagtagttactcaaagagtccttgctggtgcaacggacggagcgattgtgctaatgcatgatattcataaaacaactgctgcgagcttagatgaaacgttgaaacaactgaaaagtcaaggcttcgaatttgtaactattaacgaactttatggagagaaattgcagattggtaagcaatatttcgataaaacagagtcgagaatggtgaagtaaaagaagagtagctaagatgagtaatcattttagctatttttttatatttcatgttaagttttctttacgtaagaggatttttattttatactaagtgtaaatatatctttacatggtggtggttatttgaaagttagtaataaagtgaggcagttgcgagaagaaagagctattggccaaaatgagttagctcttgcattagaagtttcgcgacaaacaatccatgccattgaaaaagggaagtataatcctagtttagagctgagcttgaagatggcgaggtattttcatttaacaattgaagagatttttcaactagaggaggattagtatgaaacgatacattattaatcgaggtattacggtagttgcaacaattatatatatgtttccacttctaggaattattaaaggggaaaaaatatttggggatatcgttacgccaattgttatgattattgcggctttaattgggacactaacttctatgttcttatttgaaaataaatcaaagcgagaatatgagcaagaaaaaatagaaaaagatgaaagatatatcaataatcgcaaaacattttcttattatgtacttattgttttagctttgacgataccaattgtgttgattgtgctgaatttatacgggattgaacaaatctccatttcgagtttgacaatcatttttcttatcttctgttttgcatatatgattgctttggaattcatccggaaaaaagtatgattgtaggcaaaataaaaaacatccaactttttcgttgcatgttgcctagcatttaccaaattttggtgacaatgccataaatactattacgtgtaatccaaccattcacgtgtttgtgattattagaaatttgatattgtttgccgcggattttactgattttatgtgtaaaaaagctaccgcgaactttgcaaaatacaatgtcgtttactttgagttctctcgtgccaatcggttctaaacgaacaggttgcattgatttaatcaaaggcaacatcgaatttccgccttctttataacgctcaatggtttcgccacgtctgagtatttctactgcatcaaggcttctcataattatgctcctttcttgttgttagtgccagaataacaaaatagtaaagcgaagtcaacgaaatttttcgctgactttttttgtggagcgaaaaaaacttataataccaagcgcgaaaacaaatatgaaacggatacttcggaatttctgattacaacatattttaaaagtaaaaaagcaattctgttataatagaataaaatcaactttaaaaggagcttaaacagatgattagagcgatttctgtagatatggacgggacttttttagatggaaatggtgaatataatcgcgctagatttgagaagatttatgcagaattagtgaagcgtgagattaaatttattgttgcgagcggtaatcaatattatcagctaaaatcattttttcctggaaaggatgaggaacttttttatgtggctgaaaatggggcggttatttttcatcaagggaattacttagtgtgaatcgttttgatgaaagattggttcaaaagattttgcggacgttgattcaagaatatcaggatttgcaagtgatactttgtggggtgaaaagtgcgtatttgttaaaagcggccgatccggattttaaagcatttgcgaaaaagtattattttgagttgcaagaggtggattcgttcgatgtgcttccggatgatacttttatcaaatttgcgcttgatgtggaagtggctaagactgggcaaattgtggaagatttaaaccaaacgtttgctggggaaattcgtgctgtgtcgagcgggcatgggagtattgatattattattccgggcgtgacgaaagggagcgcgattcagcaattattaaatgaatggcaagtggcaccagatgatttactcgcttttggcgatgcgaataatgatatcgaaatgttgcaattaacgtcgcatagttacgcgatgcaagaaagtagcccggaagttcttgcaactgcaaatcatgtggctccttctaataaggaagcgggcgtgttacaagttatagaagattatatggaaaaaagccaaagaccatgaggtggtctttggcttttttggggagtggtaaatgtgccgatgtttcgtaacggttatatactaaatcaatttaccagtgtagattctacaatatcttttctgcgataaacgttcagaataaggccgagtagtgcagcgtaaactagtaacatgcttcccccgtaactgataaacggcagggggactaccatgattggaactattccaagccccataagaatattccaaaaagctggaacggtaaataatacagcccctccgattgttaataatctgccgaataaatcctttgttttaaaagcgtttaatgaaattcgcaatataaatacaagcagtaatagacaaaggaaaattccgaatacccagccaaaagagtagacaaggaatggaaagacaaaatctgtatgtgcttcagggattgtcagattgttatgaagtcccttgccgaaccaaccagcctgcgaaaggacagctttcactgatatgagattatcagagagataactactaaagaatttaagaatcatcgtactaatgaaaataacacctacaagcaaattaccaagcgctactttaatggcaaattggttacgacgataataaaaaatatacatcactaatacacacaaaaagtatataatactaaatacaaattggctgagtataatgtagaaaataactgggagccaaaataggattagtagacctactagttttttccaacctttaaagtcagtaactttggtgaaaataccagcccacgctatcaagaataaatataagcatatagctggaccattaatcataatacccccgaaagaaagccatattcctccgccaataagcctggtaccaacaaaaaaagatatgaaaaataggattaaggcagccgcgtaaaaatacatccataaattttttagttttctataatcaaagaaaagaaatccaatcagagcaagaatcgcaagggcgagccagacgatttgtttttttataaagaaagaattaggtgatactacatcactcatcagtggaagaaaaccaataccggcaagtaggataaataacgcaataaggagccaatccattcttggtttatgaagctgattcatgtttttgccaacagtcgagggatctcccatttcctggatggctttcttattcgcatcctctatagataatcctctcttttgaaaggagtgacttagctcttctaagtgattactaagctcttttttaatcatactgtgagcttgcttggattttactttagctattactttacctaaatattcctcaaatatagcagaactcataaagaagcctcctcaattaaattttttagtaatccgcgttgtttagagcctctatgttcacaagtagctacaaattttttcccttttgcagttagggaataatatttcttatcttctatccattttgatgagaggattttcttattttcaagtagatgtaaaagggtatacagctgaccttcattgtttttgaagctaagttcatttttttgaaatagttgggtggaaatctcatagccatgctttgcttcatcgtgcagtgaatctaaaatgtttttaagcgtttcttctttccagtagtgaagttctaggtgagattgcttcttccggattgtttcttttactgcagtttttctctcctcggaaaaagaaaaaccctcaaaatctttttttatagaatcctttaaattatagaatggatcatccatgattatacctcctttttcatcttggtttttaataattctctggcgtgttttaacctggttttcaatgtattgctatttacaccagtaattttactgatattcgctaaagagagttcttcgtagtaatgtaagaaaacaacttccctgtattttacgggtaaatccataaccgcgctcattaagctgtttgctacatcttttgcgataatttcttcctcaacgtgttttgacttggacgggagataattccaaattttttcgctgaaatttagtttgcgataatgccaactacccaagtaatctttgcaatgattaatagcaattcgatatagccacgtttttatggatgacttgttattaaactgatctagtttttcatagcatttaataaatatctcttgcgttaaatcttccgctgtcgttcgattctttacataagaaaaaactagatgcagtacatcatcgctgtagttatccattaactggctgattatttgttcggtattttctatgctattaatattaattcctatttcttcaagttcagtcatttaagtttcaccttcttctgcaatattagacgaagcaagtatcatttaggtttggaaaaattttatttatatccctaaaatagcgatagtcatcttataaagtattaactatctgttgaaaatacgcaataaaaaaaagactgtaaacaaaatgattgctctacagtctttggctttttctatttcaataaactaaggaatacaacacccaccataattaacagtatgccagaaaggataaaagtccattctaacgggctttttttctgtttaaaaatgaggatgccgccgattgttgcgacgataacgcaagcttgtgatatcgagaagctcgttgcgacaccaagtacagcagttgctaagaacatgcctagattggcgattgaccacgataatccggtcattaagttgaatgtaacattttttcgggaaatagcagtctttttcgctaagttaataccaatggcgcatgtcagcataccgattgcttgtggtaaaatgatagaaaagccagtgacatcaaaaagctggtttgtcactacgtaaagcgttaaaaagaacgaagatagaataacgataccgtagacatgaaatgaaaccgactccgtgatatgattcccgcgtttttgaaacccggtcattaccaccccaatcaagattaaaattactgcaacaactccgatgataacagccgtaaccgtttgccattcctgaaaaacaaggactgcaaaaagcgttgcgccaacgagttgtgtaccatttgaaatcggcattgccttcgcgacactagaagccgcaatccctttaaactgcagtaattgcccaaaactccaaaagatacccgaaacaaaactcactataaaagaaagaactgttatttctggtgataaaatccagaacaaaatgaaagcaaataatagcgcgctaatcgaagtccccagtagttgttcctcgggggtgctttttcgtaagttcgcaattatcggcataaatccccacccaagaacagggagtaacgcaataagataaatagacataaaataagcttcctttctaggttagtggtgctaatttaaatctaccattctccaaaatgaacagcaatatcccaaaattacggtattcaatgcggtaattttcgtagttttctggggatgagtctttgtaatagaataagcgtagggaaaggaaaattaaaaatgaaagcggtaacgaaaatgattgcaaatcgcgaaaaaaatatcattcagtttctaatgaagacaggtcaaacacgtgttggaactatcgcgaatcatcttggactttcagaaaaaactgtctcaaattcactcaaggaaatcgatgtttttctaaaggattttgatatgacagttgtccgtaaaccaaaaatcggtgtgtatattgagggcgataacaaggcttttgccgaagttagccgattcctagataaccaagtcagccaaatcccatcaactaaagaagagcgggttatctacattttcagtaagttgcttaaagcagacgattatatcacaattcatcaactggccgacgaactttatataagccggagcacgattgagaaaaacatggttgaagttacgaaaatgctggaaaaagaaggtattactttgtataagaaacctagtaagggcatgaaactccttattagtgaacgagaaaagcgcgccttaacatcgaaatttattaataatttttggggcaataattggtatttgaagcaagaaggcgaaaaggtcctccaagcttttgacacgattaaagccgatgtcaccggaatttttccagaagagggcttgaaagaaatcattgcgattgttcaagaatttagtgagcgacatgattttgcttttaccgattatgcgtttcaatcgattgtcattcaccttgcgattgctgtagagcgtattcgagcaggagagtatatcgaaaatgttgagagcgacccaatgaaagatgtatttgattcgcagcgaaacaatacggaaatcctcgttagcatgctagaagatcgtttggatattaaaattccagcatttgaagttggctatattcagttgcatttaacagcagcatataaccaacagcatgatgaactgcttgtaagtgttcgaccacaagaagacgatgtggcagaatttgtcagcacgtgtttagtggaagggaattacgataagagcttacttgatgacttgacgacgcatatgaaatccgccattaaccgcttaaaacttggtatgcattttaaaaacccgtaccttagcaaaattaagcaaaactttccccaagcgtttgaagaagcgctatattttaaagctaaatttgaacaaaagtacgatgtgcaagtgaacgaagatgaaacggcatatatcgcactacattttgaagcatacaaagaaagaagtcgttctttccccgaccaaattcgagttgtacttgtatgcagtaccgggcttggttcatcaagattacttgcggcgagaattaaaaaatattttccaatgattatgattgaaaaaatattatccgttcaggcgttaatggaaaccgaagtcgatgtagatttagtcatcagcacgatttatctcgaactggaagatattccaagtattgttgtcagtccaatgatgagtaaagccgatttacaacaggttgaaagccaaatcgaacgaacgagacgtaagaaaaagaaacgcagccaaccatttattgacttgattgaaccgaaaactatttttgcaaagctagatgttgcaacgatggaagacgcaatcgcgcaaattggtgataagcttgtggatcttggtattgctaaatcagggattgttgaaagtgcgctaaaaagagaagcgttatcgttcacttcttttgaagaaatggcgacaccacacgcagatcctgcacttattaatgaatcgcacatcgctattgctacacttaaaaaaccagtgaaatggggcttagtcgaggttgataaaatcttttttatcgctctgacagaacaaaatggtattaatttagatgcgatgtatgaacaattttataaatatattgataataaaaaatggcttgagaagctgacacaactaaaaagtgccgcagaaatttatgagcatttgttaaaggatgggatgtaatggaagtaaaagatattttaacaaaagaattagtcgtctttgatttagaggcgacgaccaaagaagcagcaattgaagaaatggcagaaatgctagatgaacgtgatattttagcggataaagcgacttatgtccgagcagttttggatcgtgaagcacattcaactactggaataggtaataacattgctatcccacacggaaaaagtgaaagtgtcacaaaatcggccattgtttttgcaagaacgaaagaaatgattgaatgggaatcactggatgacgaaccggtaaacatgattttcttactagcgattactgattccgacaaaacagacggacatttgaaaatccttgctgaaattgcgacgaaactaatggacgatgatattgtcgaaagtttaaaaaatacacgagataaagaagaagttattcgaattttaaatggaggcgtagtagagatatgaaacgtaaaattattgcagtaaccgcatgtgcgacaggagtggcgcacacatatatggcagcacaagcacttaaaaaaggcgcgaaaaaaatgggcaaccttattaaagtagaaacacaaggcgcaacaggaattgaaaatgaattaaccgaaaaagatgtaaatattggcgaagtagttattttcgcagtggatacaaaagtgcgtaacaaagaacgttttgacggtaaagtcgtgctggaagttccagtaagcgcaccaattaaagatgcggaaaaagtaatcaacgcagctcttgcgttaattgacgaaaaataaggaggatctaccatgttcagaaaaattgggagtgaactgaaaaaacacgttttaacaggtatttcatatatgattccgctcgttattgcaggcgccgttattatggcgattgcgcgggttggtggttcgtttttcggaattacagatatttgggatgcgaaatacgcagatagtgcgaatagcttaatttcgctactgcatagtttagatggttttggtggcttggcgcttggaatgatgttcccggttattgcagcatttatcgggtattccatttcggacaaattagcactggcacctggtcttgttggtggtttactggcacgtgatattggcgctggttttctcggggcacttgcagctggtttaatcgctggttatacatgtcttttaattaaaaaatatgtgaaattaccaaaagcagcggcttcaattgtaccagtatttttagtaccagtttttggcacacttattaccgttcttattattaattatgtggttggtattccttttgctgacttaaatacagcgcttgaaaattggcttaatggtatgtctggatcaaaccaaattatgatggcggctattattggtgcgatggttggttttgacttaggcggaccagtaaataaagcggctgtaacaacggcgatggctcttttaacaagtggaatttatgcaccaaacacagcagcacaagtagcaatcatcatcccaccacttggtcttggtttagctacattaatcgcaaaacgtaaatacaatgcagaaatgcgtgaggctggaaaatcttctcttatcatgggacttgttgggattagtgaaggggcaattcctttcgcggtagaatctccactgaaagttattccggctacagtgcttggttctgctgtcggcggtgcgctagctgtaggtcttggcgcaattaaccaagcgccaatcagtggtttttatggctggttcacagttgaaaattggccagtttatattttagcgattgcagttggaacgttaatcgttgcgggtatgtcagtcgctttacgtaaatcgagtgctggtgaggaaatggctggttcaagctacgatgacgaaattgacgaagcagaatgggaagcttaaaaaacggaggtaactatggttaaagcacatattgtgaaccatacgcattgggaccgagagtggtatttcacctcggtcgatgcactggttctaagtgaacaactttttacagaagtaattgacgaattgaaaaagcacccagaagcaaactttgtacttgatgggcagttgtcgattttagatgattatgtcgcactgtatccggaaaaattagcggatattaaacagctgattgcggataaacaacttttcattggaccatggtttacacaaacagatgcctttttcgcgcatggtgagtcaattttgcgcaatgcgatgattgggatttttgatagtaaaaaatacggcgactacatgaaaataggttatttgccagatacatttggctttaatgcccaaatgccgactttacttgagcatgctggctttgataatgtgattttctggcgtgggattcatcttggtgaacatgttgcgtctccgtattttaaatggcaaggacttggcgaagaagcgtctatctatgcgattaacatgccacaaggatacggcacagggatgcttctggaaccaacttcggcatacgtggatgggcgccttgatccagcgattgattttatcgaaaaatatagtaaaacgaccgaagtattaattccatctggaaacgatcagctgaatattattagcaattttgccgagaaattagcagaaatcaacaagatgggacgccatgattatcaacttagcacctatcaagattttattcaatatgtaaaagagttaccagatttagaagaatatcgcggcgaattcagaagtccggtgcttgcgcgagtgcataaaaccattggctccagccgaatgaatattaagctaaaaagcgcgtcactcgagcaaaaactgctaacacgtattgagccacttcttgttattgctaaagcatctggaattgccattagcgaacggttactaatgcatacgtggaagaaactcctagaaggtcaagcgcacgatagcttggcgggctgcgtttctgatccagttgccgaagatattttgcaccggatgaaagaagctgacgaactatgcgatagtattgaaaacacgattgtgaaaaaaattgctgatgatttgtcacttgccgcgaacgaaattatcatttttaatacggatttacatgattttgacggatataaagaaatacaagtagtaactgagcataaaaacatccatttcccagcgtttccggacgcaacgattgtccaagaagagttcattccatcgcgcgaaaatgtgctagaagaaacaccagccggaaaccggtttattgaagaacctggctactatgtgcttcaagtgcgcgtcaaagtggagcttccaggccttggttaccgcgtgattgcttttgaggagaatgaccgcgaactggattcgatgattgcttccaatgatgtggcaatcacgaatgatttctacaaaatcacttttgaaaatggcgaaattgttcttgaaaaaccaaacggcgaacgcctgacttctttcattacgctagaggatgacgtgaatgcaggtgatacgtatgattattcaccactagctggggatgttgcagagctgttcactttttccacagcaaatacagagaaatcgagtgaagtcgaacgtttaattttaacaggaaaaagcgatttcccgcttgatcgtttgacgaaagaagggcacggcgacctgcaaatcaaactcattttagaggtgaaaaaaggtagcgaactgctggatgttaaagttgaagtagataaccaaattaaaaatcaccgtctacgcttaaaagtaaacacaggtgtgaaaacagactacaatatcgcctcacttccattcggatatatcgagagaaaaccagttgtaccagcgaattggcaagaaacatatagcgaaatgccaatcgacatcgaaccactggaacaaagcgtgacgctaacaaatgaagcagaaagttgtaccattttcacacagggcgttaaagaataccagcaattggatcaacatttagcgctgacattactcgcaacaaccggacaactcggaaaacctgacttagcttaccgtccaggccgagcatcaggcgacacaacgaaaaaaggtcacgtgctcatcgaaacagaaggtgcgcagttacttggtaaacatgaattcacactagccatctatcttggcgacggagctttcgatgaacataaaaccgctgaacgaacaaaagcgttcaaccaagcaaacgtatcttatcaacgccaaccgttcaatcactttttacatcgcttggataataaaatccagaaaacagaacggaaattaggcgcgaagcaaacattaggtatgttgaatttaccgaaagaatacttagtttcagcgtgtcacccgtcctactacacagcagataaatacatcatccgcttggaaaacccaactaacacaccacaaaagttggtattaccggatgtgtcatttgagtatgtgaatgctatcgaagaagttgtcgcgaatgacaacaacacgattccagcatacggggctgttacgttgcgattagacttataaaaagaaaacttgctcaaagcatttattttgagcaagttttttgtattaatcgtaaaaattccttcgaagcactggagaaagtttgattctttttccatacaatactaataccagcagttagaggcggcgaaaaagggataaactttaagttagtattttccgtattgataataccgtcaatgcaaagaatacttgcgatgttctccttagcgagcaaagaagcgttatacagtaaattatatctcccaataacattcaattgttcaaaatgccctccaagccaactagctagctgattatcaatgaacgactggtttgaaacgacaatcggattagcatcaatatcactaggagttacaaccactttttccgctaaaggatgttttgtattgactaaaatcccccaagtatcttctatagtaagtggtaaatattcatattgtagtttttccgcaggattaattaccaacccaaaatccagtaatccgtgctcaattttttctaaaacatcatccgcattgccgctatgcaattgaaaagtaatgtcgggatgtttctctctcagttcatgtaacacgctgccgataaattcaaatcctcttgtttcagcagcaccaatcattatttttccactaatcgtctcattttgcagcaaattcgaagtagtcaactccactaaagacaaaatttcttttccacgattcgctaaataaagcccatcctccgtcaacgtaatagacctatttccacgaataaataaagttacccctagttcttcctcaagttccttcaattgtttagaaagcgttggctgagaaagatgaagtacttccgccgctctactaatcgttttttcacgtgcaacagttaaaaaataattcaacacacgaagctccattaaaaccaccctttcccataactaaaatgaatagttggatatgctttataagtattattcaattataacttctcccgctataattaaatagtaaaaggttttcgagggggaaagcgcatgatagaacaagatttacagaaaagactagtcgaacaagaaattctccaagggtcggatttgttagatgaaattcacgaagtaaaacaaaacaatgaacaacttatcatcgaactaaacaccaagtaccacacaaaaaaagaagtgactaaatatctcagtgacatcaccggaaaaccagtcgatccgtcagtcgatgtctcacttcctttttacagcgacttcgggaaacacattacttttgggaaaaatatctttatcaatttaaatgtaactttcgtggatttgggtgggattacgattgaagataatgtcttaattggtccgggagcaagacttgtgaccgtcaaccatttagtcagccctaaaaagagacgtggactgcgggtagcaccgatttgtgtgaagaaaaacgcctggattggtgcaaacgcaacgatattgtcaggtgtaacaatcggcgaaaatgccatcgttgctgcggatgctaccgtcacaaaagacgtcccagcaaacgtcatcgtcgccggaagcccagccaaacaaatccgtaaaattatcgaggaataaggagagatagcaaatgacaatcaaaaataaagtaattattataaccggagcatcatccggaattggtgaagcaacagccatacttttagccgaaaaaggggcgaagttagttcttgctgctcgtcgcgtggaaaaactggaaaaaattgtccaaaccattaaagcgagttcaggtgaagcaatttttgccaaaacggatgtaacaaaacgcgaagataataagaaattagttgaattagcgattgaaagatacggaaaagtagatgcaatctttttaaatgcgggaatcatgccaaactcgccattatccgctttaaaagaagacgaatgggagcaaatgattgatattaatattaaaggcgtactgaatggaattgcggctgttctaccttctttcatcgcccaaaaatcaggtcatatcatcgctacttcatctgttgcaggattaaaagcatatcccggcggtgcggtttatggtgcgactaaatgggcagtccgcgatttaatggaagtattacgaatggagtcagcccaagaaggcaccaatatccgcacagcgaccatttatccagcagctatcaatacggaattactagaaacaatcacggataaagaaaccgaacaaggaatgacgaacctctacaaacaatatggcgtcacaccagaccgaatcgccagcatcgtcgcctatgccattgaccaacccgaagacatcaacgtaaacgaattcacagtcggaccaacgacccagccatggtaaatagaaaagccttgaactgattgattattcgttcaaggctttttttggtattgcaggagctggttaaacatggtatcttaaattgaaagcgcttaaaaaggagatgacccaatgaaccgtaaacaattagaacaattagaccaaaagtgcctttatgaagtatatgatgacgagcaagaaacaaatgattttcgtgtgggatatatcagagctatttttgattcgttcattatattggaaaaataccatactagagtgggatttgatggttttgcactcgtagcaaatgaagctatttttaaagttcaacaagatactcaatatctgaagccatatcaaaatttaaaccgcccccaggaacaaatacctgaattaagtgaggacggcgacacactattgaattttcttgaatggacgaaaaagaacaacaaattagtggaaataatgactgtctgggatgagctaattatcgggacaatagaaacgattgaagagaatttagtgatgcttaataccgttgcaccagaagaatttcaatctgacgggaaatgctttatagaatgcgacaatattgttgatatttgtattgatacagcgcgactgaaatttattactacttaacgttaattataattaagaaaattaataattcaaataaaaagtaaaaaaattacaattctgttcaccaaaaaagaaaaatacatgctataataattttgtaatattaagaaaaggaccagttttatttcaattaaaactggtccttttctagaaagagagggcagtgaggtagataacgggagatagaaaaagaaataaaaggtaaggcatcgacatcgaatgaaattacattaaaagagggagagcttgacacatgaaaatacatgcaaaagcaaaaaatgtactagtgagcttgatagcatttatgttattcttttcactattgcctggttatgcaccattagcggaagattcacctgtaggagtggatgcgccagacaagaaagcgggagaacaagcaccaacagaagttaaagaagaacgaacagaaaatgaagtggtttttgataaccacgacgggagctttacaaaacaaatctttgcggatcctatcaatatggaagttgacggggatatgaagcgcatcgatgcgaatgtggagaaagaagcagattctgacatgattgttccaaaacaaaccccattagaattaggcttcttagaaaaaatggaagacggggcatatcagaaactaacaaaagctggcgcagaagttacttttcgcttaaaaggagcacgtacaggcgagaatgaacaagcagtaacagaccaaccagcgacctacaaagaaaatgaagttacttatgaaaacgtatttcctagaacagatctaaggcatttaacttttccacaatcagttaaagaagacttagtactacaggaaccaaatcaagtagatacgtatgtttatcaaattgaaacaaaactagatttagaactagcggagaatggcgatgtgctattcaaaaataaatccgacgaaacaatgtatacgcttccaaaaccagtcatgacagattccaatgtcggcactgaaaccggggaagcggcacaatccgaaaatgtttcctttaaagtgaaacaactgaccaaaacagtgtatgaactacaactaaaagtagatacagaatggctaaatgatgacgctcgcgagtaccctgtctatattgatccatctgttcgtttagataaaatttataatgccaatattaattcggctaaaccaaccgaaacaaatattggtagtaagctatgggattctggtcaaaatgcttatacgttaaaactcggtaaatgggacaattcaacaggaaataatgccgcttttttaaaaatggatacatctactttaaataaagcgactatttctaaagcaacattgaaagtctataacatttggcatatgtccccaacggttaaaaatgatctttggtattacgaggcaaatgcaaaatggtctccgtggcaagtgacttggaatacagtgccacctgtaacgagattagggagtgttaacgttggtcgtggtgagtgggcgaacttagacgtaaccaaaactgtccaagcatgggcaagtggctcacgagtgaacaacggttttcgcttaggtactaacattaacaaaaactattggaaaaaagttgtagcaagtgaaaacaataaaaattatccctatttggaagtgaattatacgtacgcacaaccagaaaaaccaaccgtgaaaacaagttcaaacggtgttggaactggaacaggatacatggatttatcttggaaagcggttcctggtgcgactagttataatattgttatttctaatggatataaatacgaatattttaatacaaaaagtacagcaaccacttggagtaccaaaggaaagaaaattttcccaacaaatgacgaaattgctaaaggagaatttgaattccatcatgatggcaaaggaaccgacttcgctcttgatccgcgagcgcaatatgaaaatgcctttcaagccggaagtacttttggacttcgtaatttaacacgctatttattcagagtacaagccgttttcccgggtggagaaagtccgaattccgacttagtattcgcctacatgccaatcgagaaaccacaagctcctgttgcaaaagcgtattctaacttggcacataaagaaacaggatacgtggaacttaactgggaaaagagcccaatggcagatgggtataaagtacttgtctttaatgggaaagcctacgaagaatacgatgtcggcgcagaaacaaagtggacgacacaaaacaaaggtatttggccaaccaaagaagaaattgctgaagggaaatacgctctacaccatgacggaaaaggcgcagaactcgcaaaagacccttccccagtgtataccaattctggcggaaattataaagagcgcacaaactactggttccgcgttatcgcttatcaaaaagcaggaaataacacaactagcgtgcaatcagaaccagccacaccatctattccagaggcactcaataaacaactaggaatggttgattactggacaagtgtgccagttcgtggcggcgaagtgaatgctacaaacggaaactttttattccatgaaacagatttcaacttagaagggcgcggtccaagcattaatgttaaccgtacatttaatagccaagatgatgcaactggcattttcggtaaaggctggacaagtacgctcgaagaaaaactcgtagaagaagaaaacggtaatatcgtttgggtggaatcggacaagaaaatccatcgtttcacaaaaaaaggcgataaatacgaagctccaccaggcatttactccgagattactaaaaacgcagatggctatttgaaaatagaagaagataagtcagaaacacgctttttagttgatggacgattaaaatccgaaaaagacacaaaaggtaacgaattaacatacgaatatactgacggcaaactcacaagcttgcgcgacgcttccggacgtaccgttactctcacgtatgaaggcgagctcgtaaaagaacttgtcggaccagaagaccgtaaaatcagctacacgtataatgacaaacaggagctaatcagttcatccacagcccgcggaaaattatatcgctacggctacacagatggcttattaacctcgatttacgatccaaaacatacagaagaaaaaccatacgaaacaacttttgcctatgaagaagaaaaattaacagaaataaccgatccagtcggcaaaaaaacaacactttcttatgacaaagcagaacaacaaactactttaacaaacgagaaaaagaagaaaaccatttattcctacaatgatgctggaaatccaaagaaagaaattgtagatgcagatggtctcaaactcacaacgacctacacgtatgaatcaaataacttagtaaaagaagtgaatcctaagggacaagaagaaacgtacgcttacgatgcagatggtaatattacgaaagcgacagatgcatacggaacagaatcatacacttacaatgataataacgatgtaacgagctcaaccgatacagaaggacgaaaaacaaccgttacttatgacggagcagatgcggtatcagaaacacttgcgacagaatcccaagtatcctctgtaacacagtatgatgcctatggaaacccaattcgcggtagtggcgaactttcttccggcggtaacttacttcaaaacagcggctttgaaaaaggagcaggagtttccaactggacactgattcaatctgatgcaaaaggaagcatgacattcgataacacacagtcagctccaggagcacttggcggcagcggttccgttaaactaacgagtgaagcaaattctaccgtaaaaggctattcatccgttacccaacgcgtcgatgtagaaccagaaaccacgtatacatttagcgcctggattaaaacatccggaatgacaaacgccgatgcacttctcattggccgtttacaagatgcgaatgcaaaagacgttaccgatgccggcgtatggcaatccaaccgcgccacatcgatcaaaaagaacggcgactgggtaaaacgccaactaacctttaaaacatctaaaaacacgcgccaagtcttgctttatttggacaacgaacaaccagctccacataaaggaaaaggaacgatttggtacgataatgttcaatttgaaaaaggcagtgttgcttccagttacaacccagtagtcaataacagctttgaaaatcataatggaacacttccgactggctggatgcgtacaggcaataccgcgctgacacaagcaaaagtagtcgataatcaaagccacagcggtgatagcgccgtttacttcgagcgaaaagcaacaagtgaagcttacacgcatattgtccaagatgtacccgtaaatcaaaaagaagccaaagcattaacaatttccgcactatccaaatcagaagacgccaaagcaaacggttctgttgcaacgatgtcgaacgattattcggtatggggcacagtatattatcaagatggcacaacttcttctgtacaaggtcaattcccactcggaacgaacgactggaaccgaagtgctgtagttgttaaaccgaccaagccagtcaaaatgattaaagtttacaccatgttccgcaatggtttaaccggaaaagcttggtttgacgatgtacgtgtcatagaaggcgaagtattaacaaaaaatgaatatgacgcttccggaaactatgtaacagctagctatgacgaagaaggccgcaaaatcagcttcacttacgatatttacggcaataaaacatccgaaacagacgaaaaaggcaacaaaaaaactttaacttatgatgcagacaacgcacttatagacaccaaactagcgaacggcacatccgtagcctataagtacgacgacaatggcaacaccaccgaaaaaaatgtcactgcatctggcaaaacgcaaaaaaacatctatgaatatgacgtagataacaaaattaccgcatttaccgacgcactcaatcgcacaatcaagtacgaatacgatgcagccggtaatgaaacaaaagcaatcatgccaaatggtcgcgtaaccgaaagcacatacgattccgctgaccgcatggacgggattaaatggaatgataaactagcatttaaattccaatacgatccaaacggcaaccaaacaaaagtaaccgacgaaattaacagcatcgtaaccgacaaaacctacgacgatgccaaccgaatcaccaaagtagccgaacgaggtggcgacgtaagctacacatacaaagacaaaccaacaaaagacaacaaagggaaaacagacaaagtcggcgaagtagccattaaccacggcgactacacagcaaaaacaagctacacatacaacgacttagaccgaaatacccgcgtaaacgatggaagcaaaaatgcctattttgagtttgacgaatttggaaacatcaacgtctacacagcaggaaacggcaccgcagccaactacacctacgatagcacgcaaaaagtcaccaacgcagctattagtagcgcaagcggtacccaaattttagacgaaaactacacctatgacgcagcaagcaaccgcacaagcattgacaacaaacaagacggaaaaacaacctacgaatacgatgcagtcaaccaactaactaaagaaacactaccagacggcaccgtaaaagcatacacatacgatggcttcggaaaccgcacacaagtagcaatcagcggaagcgagacaaaaacaattgacgcaagttataatgatggtaatcaactagtttcgtggaacggagaagcgctgacgtatgacgccaatggtaaccgtacaagcgatggcaagtacacgtatacatgggataccggggaccgtttaagcagcatcacgaaaaaaggtgagagcgagccgtttacgagttatacgtacgatgatgataaccgccgcttgtcgaaaaccgtcgatggcgtgacgacgaattatcattatgacggagatagtattgatgttctgtatgagactgatggtgatggaaaagtagttcgtcagtatgtttattcggatgataatgttcgtttagcgatgaagatgaacggcaaaaccctctattatcactataatgcgcatggcgacgtgattgcactcacggatgaagcaggtaagattgtcgcagaatatgcgtatgatgcttggggaaatgtgctgaaaaacactgcctctacagaagaagccaaagcgaatccttatggttatgcaggatacacgtatgacaaggaaatcgaacaatattacttgatggcgcgttattacgaaccagagcaaggcgtgtttaccgcttacgatccgtacccgggcgatgaagatgatccgcaaacgatgaatgggtataattatgcgaataataatcctgtgatgatgtttgatcctgatggtaatgttgcatggtggattgcggcagcaggttatggggcattcgaaggtggggcagaatatttattaacaactaagaagaagaattggaagggttttggtaaagctgttgtaaaaggagctgttttaggtcttggatttggtaaattatacaaaggttttaagtttttaaaatcaacaaaaattgtaagaaaaaattcaaaaaaattcaaaaaaacaaagatatataaaaaatttagtaagaaaaaaaaggttgttaataagccctcaactaaacgaaaaaaggctaagaaaaaaaagaagagccgaaaaaaagggcattaaagattgaaaaagagaggagtttattttattgttattaacaatttatatagccctagtgattatttgtctattaatttgtcttagtttagagtcgaaaaaacaaaaatggagtaaaatattgttctggttagtatttgctgtaggggttttttttacaattcggataggggatttatttctataagaaatgaaaatttagaaattatcttagtaaacaacgaatcacgcttatttggaatgtaataaattaaaaagtagagagcttctctattttggtgacaaagtagaacaaaatttgatgaacaaactaaaaataaactgagaataagcctttcgcttatgtaaggagaacttattccgaaaatgaaagttaagtggatagttatattgttagatgttcagaaacaaaaatccttgataaggaaaaaataatgctagacaaaactaataatgtaccacaaataaaaatatttaataatatttcgaactaagctcggttgctaaaaaattacacccagattaggaatgtaagtaattgaataatatttttagtttaatcgtttagccaaaaaatataactattctttttaaactcctaaggaggaaccaaaaatgtccacaaaattcatgtatgaaagattactaaaatgccaagaagcaaataaactagtagccatctatgcgtcacgcgaagacgaatatttcgaggcgggctacattgaagcagttacagcgagtgatgttatgtttcgctcgagacgttcggacggttacgaagagggacatgttgttcttccgttagaattagtgtaccgaatagaaattgacacggcacatttaaaaacagccgaactactcgcaaaacatcttaatcaacaaatcagctcaggattatttgagaaagcaccaaacaaaaagcattctcttttcgaaattgccgctgattatgtataccaaagtaaagagataatctttattgacatcataggcgacgagacgccagtaattggaatgatcgctgaaaatgaatatgaaggattagaaattactttagtggatgacgaaggtcgattagatggaacttgttggataaagaaagaagatattctagccctgcgtttcggcggcagtgtagaacaagatttgatgaacaaactaaaaaaataaactaagaataagccctccacttttacagggagggcttattataaaagtaagagatgtaaataatacaaatcagaaaaataaactttacgggagcatatgattaaataataaaagaaatacttaacttgaattcgaataatttaaaaataaaatgtatccgctataaaacttacatttattacgttggtggtattgaggttctatatgaagcggataggaaagtagttcgtcagtatgtttattcggatgataatgaagacgaatgggaaaacactatatttataatacacatagtgatgttagtactttgatgaatgatgctggtaagattatcgcatagtatgtgcataattctaagcttatgtagtgattttgggttggaaagaggttggccttatgagcaaattaactagtgatgaagtcgaatttaaaataaaaaaacttatcgatttagaaaaaaatttaccgaaacaaatattttctaatccctcaaaatacaatttttattttgaagaaccagaggctatttatatggatacgaatgaatttgtccatatgattaaacaaattgtggaaattacacaggatgagaaagcatatattagtgaaattttgaaagaagataaatttttacaaaagagcaaaactatctttaatttaaaggaagtaatagactttacacaggaagagggtagtatagtagaaaatttggattttgaaaatataaccgagacaacgatatttttatattgctatatgtattttccttctgagcaactctttcttttcgttaatgaatattcagacacagcccttttagcgattgataaaaaacttgatattgatattccttggtatgatgtagaaacatttttgactgtggagaatctggggatgaaagataggctatacaggaagttcaggaagcgtttagttaataattataaaaaacatgaataaataagtctttaaaaaattaataattatttttagtaaatccaatcctttaaaaggattggatttatttggctatcaacagattttttacgactctttgtaaagttagctctaacaaggtatatcgatttttatgattctcattgttcactttttgttcacattgtagctttttttacgaattttggatgaaaccgcatatatttaatgactaattggttatttataatgaatagtagtcgacttacaatatttagaacggaggagaaatgaattgatcagaaaaatctttatcgggattttgtcatttactatcttaatccaaactgtgattgtttcaaactttaatgttgtttatgcaactactgaagagcaacaacaaaaagttattaagttagaaaaaaaatcaactaataataatataattttaataaaagatgctgttaaagataaagaatataaattatctttaccaaaatcttttagtttagatgagaaaaagacaggcaaagaagttgaatataacaaagaaaaaaatgaactaacaattataggaacaggggaagaaataacgctatatttacttgcttctcaaacaggaaaatacgaacttgaactaaaagaaggggacaaagtacaagccaagttagatttaattgtaaaaaatgtagatgaagaagtcgcaaaaacagtcgaaaaatcaaatagacagttactgcgttcatccatttcggataaactatttcttcaagctgattcaagtaaagccacattagctaattatacagaacaaataacttttaactattctattaattttctagatggttctacgacattgaaaaacggtaaattagtaatagattttaataactctaatcttgaactagtgaattatcctaaagatacagcagcaaataggaatataaaatcaacatcttatagtgcgattacaggtaaattaaccattaacttagtggataatatatctagtggtgctccatttgatattccaatcgttgtaagagctggttatggtgcaaagccaggagtaccaatgaatctaaaagctacactgtcaggagagaacagtgctggtgccacatatacaccagcagaaaaaacaaccaccgttaatttagaagaaaatagcagcaatctagactatagcccaattacagcaggtgataatagctgggcttttagtatgaaagaactcgcattttcacttaagccaggtggatataccatccaatggcctgaaatccagaagaaaagttcggaaaataaaagtttcaaaaatttaaaattagaatttcttaaagaaaatggtggggatattatatctgttaatacggcagatccttacgtaattagattcggagagccttattggtcacagcttagcacagttaatggtaaagcaaatgtacttgttaatgatgatgagaaacaagtagtcgaatatggacccattaacgctaatatttaccaaagaatacaggtatcaatggcagcgaaaataccagcagatgcggttaaaggaacagagtatactggtacggtaaatgtatatgatgaagatattttggtaacttccattaaaattaagaccgaagtgactgactcagcgacttcaatagctgttgatagcaaagtttctaaaacaagcatatcagaaggcgatgtactggaatggggattcatgcctagaatatcttctgcggcaccaggtgttaatgatttagaaattgtagcaccaattcctaaaggtattaaagtactatcttacatcccgaacaataactcaatggcaagtatgaaaaaattagagtactatcagaatggtaaatgggtatcaatggctccacaaacttctagtggttgggatttttcaaagattgaccagtctgttaatcgtattgaaaagctaaaacttacttctagagacggaattattaatgataaagatatgccgccgtatactcatggaacaatacgaatgcaaaatactggtgtgaaagcaggagaatcctttacactccaaccagaatctatcacttatacagactctgataaaaccagtaaagcaattgatacaactgcaagtagctatgaaaagaaagttcaagtagtagaaaaaacttctactccagcgaaaataaatggcgatgttttcttatcttcaactgctggtatttatggcaaaggatttgaaagtacaattttttttaatggcgacaaaattgcacagtcagttcgtttaggctcatacggaagtaaactagaaaatccatatatttttgtggtagtaccaaagggtatcgatgtagaaactatgaaaaatttcattcaacaaccgtatagaagtatattaaattatacgtatgctcctgctaatggaacgaatactctttaccctaaatccagtgcagatgttaagggaaaagaaactttatcagatggttccacattatattactgggaagcgccggatactggtttagcaccaggcatggaaaattgcgaaatgctagccttagatttagtttttaaattaaataaagcaaacagtggcgcaaataaagtagaatttggtatgggatcaatgacagattctagttggaatttatatggtgctgctaattcaggatatgaaacaaaagaattatctgccgaattacaatccaaacttcccggagtaacatctactaaatacttgtctaaatcgaagacggcaaatgtaggtgcatctaatagtattgcaactaaaatgaaaattaaaggaagtcaagataacgactttgttgatgttagtgcaaatacagctactacaattccaggtaaaagagtagattataatttaacatttgaaaataatggtacaagaagtatgaagaacttagaaattatcgatatacttccgcacaaggatgatcagtatgttttaggcactggtccacgcggatcgaaattttcagttatcccaactagtgaaatcgaagttcttgttaatgggaagaaaagtgattcagcaactttagaatattcaacaagtaatacacctgaacgtttcgatgcaaacggggaggatgtagcaggtgacccttggcaaatcgtggcaccaacaagtatggcagatgtaaaaagtttccgtattaagctaccaaatacagaattcaaagtaggagacgaaatcagcctaaactttgaagcaatagtgccaacagatgctccaagaaatggtgaaatagcatataactcgattgcttaccggattgataaggaaacaagctctggtacaagcaaattagcatcagaacctcctcgtgggggagtaaaaagtacaaatccatcaacagatttaaacatagccggtaactctttctccgatcttaacaaaaatggtgtaaaagatgcggacgaactaggtttaaacgctgttaaattagatttatacaaaaaaaataacaatgaatttgagaaagtggaaaccgtttatacttcctcggatgctctagataaagaaaaaggtttatttgattttaatggcttgagtaatggaacatataaaatagctgctcatctaccgaataaaaatgcagactttattactaccggtccaaataaaatcgtaaaagactcaaaagatgattcgattggctggataacagtcaataactctacagaattcacaattgatgatttggctaacggaaatcctaaaagtctagttggtattcatgtacctatttatatggcaacacctataaaaggcactgttgttttcgtaaataaagacggagaaccaaaaatcacatcttacggtcaagattatgaaatagctttatttgataaagatggaaaagaagtacaatcagcaattaaaacgaataataagggagaattttcttttagtgatgtagctattaaaaacccagctgattttaaattaaaagtaactgcaccaactagaacaaattttgtctactcagcaaaaaatcctttatttaatatgtctacaaaggaatatactttaaatagtgtagttccaggcgtgggtggggtagcagaaatttatattactgaaactagtaaaccaactacaaagattatactagataaagcagttactccaaatgcaattacaattgaatcaagtgatgaagctacagaagtaacaaatgaatggacagtagtagatagtaatggaacagtcgtttattctggaaccggaaatacgattcgtattccaaacgatgaaggaacgtatatagctaaaaacacagcaacagatgaggctggaaataccgcttctgatgaaaaaacgtttgatatagattatacagttccgacattaacagttaatcaagatgcatcagcagaagtgaatagtactgaggcaaatattgattggattaagccgttaaatgtagcagcaacagatacgcatgatggaaatatcacgccagtagtagattatagtaaagttaaatgggatgtacttggaacatacccagttactgttacagcaacagatgcaagtggcaacaaagctactcaaacagtaaatttacgcatagtagatactacttcgcctacaattttaataacgaataatccattaacgtattctatcgaaaacatgcgaaaattaactgaacaagaattgtataaagcggcaggacttatcggtggagataattatgatttagcaccaggtcaatcagtccaaccaaataaacagccaatggtatttactagcaactttagtactatttttagtgacatcgctagtgtgaaacctggacaatatcaagttcaagtgaatttagcagattctagtggaaatcaagctattccacaaacaattactattaatgtagtagataccatgggaccagtgattaaagcagataatgtgtcttaccacgttaatacaacaaaaacagaagcagaattcttccaagatgctcgtttagatgtgacagataacaatgatgatacaactaatttaattattacttctaattttgcagaaaaagtgaatttgaataagcctggtaagtatgaagtaaccatcagtgctacagatactaaaggcaatcaaacaacaaaagaaataacagttcaagtaagcaaggataaaccagtcattactgcaggtccaaaaataagctaccaaggaaaaaccgaagtaacagaagctacctttttaagcgatatccacggggaagtaacggatgaattagatggtgatgttaaaattactagtgattttgctaaaaaagtagattttaataaagtaggaacatatacggttactttaaatgcgaaagatgaatatggtaatactgcagaacctgtaaaagtgtcagtacgcatctttaataagatcgcaccaactttcaataatgctgataataaaacaattgaagcagtaaacgagttaccatcattagaatctatatttaacattgaagcaaaagactatctttcaggtaataaattaaaagtaacttatacaccagatcaaacaattaaaggcaatgttttaggtgagtattctattaaagtcacaacgaaagatgattcaggcaacacagctgaaacaactgttactttaacaattaaagatacaacaggaccaagcataaaaatgactaaatcaacaaacaaattagaagtacaaagcaaagaaccgaattggataactttctttggagtaaaagcgactgatattgttgatggtgatgtaacaaaaaatattaaagtagacagtagtgaagtcaatcttaataaagtaggaacttatcctatctactttacagttacagatgcacttggaaatgaagctagtaaatcaaaaagcacagtgcagattgtagatacaagtagtcctgcgctaacaatcgacaaactagaaattagttatccaacaggaaaaacagtttctgataagcaatttctacaagatattggtactaaagttacaaatagttatggaacagtaaaagtaactactaatctaagtaaaattgttgattgggacaaagctggacagtataaagtaactgtaacagcgacaaattcatctggaggcgttgctgagaaaacgattctattaacggtcaaaaaagctgattcagcgtttatagcaataccaagtaagaatgataataataacaaaccaacaaaaaatatcccaaaaacaggagatactttaaatacagagctaattgtctttggtgttatgtcgctacttgttggaggatggttgttcttaagaagaaaaacaaaagtaaaaacaaagtgattcataatatttgaagaatgttgtaagactcaaaagttagacctaaaaccgcccagaggaatctggtcggttttttattcggcttgcattctatataaccaataaaaatacgccccaagagttagattttttggtctaactttaggaggcgcactaaattgagtccgttcttttttacaaatatttagtaataaactcactattctgcggtcgatctttcatttccagtacagatatatcatggacgatactatccagcttaatttgatccatttcaagttctattttttgttggagaagttcatatttacttgaaagtacttgttggatattggctccgacgatgcaatctgggttggtttttggatcgacatggattaaatttgtgttgccttcaatacttttataaacatctagcagcgatatttcctcgggtggcttggtgagaatcggattcgctttaccagtttgtgttgtaataaggtttgctttttttaaattgctcataattcttctaatattggcaggatttgttttaacactactagcgataatttcactcgataataaattcgtgtttttgaaaatctctatataagccaaaatgtggatagcatcactaaattggatggagtatttcattttattcaatcctttcaatttttcttcttgacttatcttatcataatgtttattataaaggtgtaaattataaatgtacagcttaaataattaaaattttgaaggagtggtttaaatgacttatttagtaactggtgcaacaggtggactgggtggttatgccttaaattatttgaaagaattggttccaatgacagatatttatgctttagttcgtagtgaagaaaaaggtgcggatttgaaagcagcgggatttaatatccgaattggtgattatagcgatgcagagtcaatgaaacaagcatttgcaggaatcgatcgtgtcttgtttgtctcaggtgctccaggaaatcgtcaagtagagcacgaaaatgtggtgaacactgcaaaagaagcaggcgtttcttatattgcttacacaagtttcgcagacgcagataattccacaagtgctctagcggcagaccatatttttacagaaaaagtaattgaaaaatccggaattgaacatacattcttgcgcaataactggtacttcgaaaatgaaatgccaatgattggtggcgctttgaatggtggaaaatttgtttatgcagctggaaatggaaaaactggctgggcattgaaacgagaatacgcagaagttgctgctaaagcggtggcaggagctcgttttcctgaaatcttagaattatctggcccagtaatgacatacgcagaacttacagaagcattaaaagaagctactggaaaagatttcgaagtcatttcttctgatgataaaggatttgtagaaaatttagtcaatgttggtatgccacaaccagttgcagaaatgttcttatctttccaacatgatataaaaaataatcaactagatgttacttctggagatttcgaaaaagcattaggaaaaccattaacgaaccgcgtggatgcgcttcgggaattactgcaataaaataaatacgtctatcttcgcgatagacgtttttttatagttcatcctgtactagcaacgtaaattcacgggctaattgatctaaaaaatgcttctgccaatcatgatctcgggtggtgccgtgtaagttagtactaagcgtcaattcaccgcggaaagtagtagcagcgacttggaaaaacggagcatattttaaagagccgcaaataaaacaatccgttaaagtactaccttcaaaaatgagcttctcttcatcaataataccaatgtttgtaaagctcgtttttggaatagaatacattttttcagaagcttttttcgcaaaagaataacttttcttcttgaaaatcagttccaacaaataataaatccgtaaaggggtaagactgtttttttgtggattaagtgaatttttgacggcttggagggtgctctcgaatgaagttaagtcgtcatttgcgttaatttggcaggtaatattggctgttaaattggtaattccttggctagctttacctggcaaatatttacgaagatctactgggcaatcaatcgataattcattttgatgcgtcgtctgctgaactattcgtaccattgcggcaaaaaaaacatcatttacagttgcatcgttttctttcgcataatgaacgattccgtcaaaaacctcttttggtagctttgtccaaatgattttcgggtttttcgggtcacctttgagtggaaatggtgggttatagacagtttttcgatttgttttttcggtaaaaatggtttttatttctttgcgtgaaaattgatcgaaaacttgttttaaatttctcgagcctaaactcaaattggcttggtagtttgggttttccaatagtttcgaataaagttcacttaacaaataaagatattctttaaaaccagcaccatcagccaacatgtgattcaaaataatgacaagtttatcagccgattccgtacggacgacagttaagcgaatttgtggaccgttttctgtagataatttcctcactagcgcccgatttacttcagcttcgggttcggtggttttaataaggaaaaccaaatcctccgctgaaaaaacactttcttgccaaaaagcgcctttgttcgtttctttaaaatggcaaagtaatagccgaagttttttagtagactgcataactgctttttttagaacgtctatatttaaatgattatcaaatgtaagaaccgtatgcaaatgatggtcatttttcattttttctccagaaatataatgcttaatatcagaaggttcagcgggataactcgtgatttttaccatgggatttccttctttcttcggtttaaatagttgttagtagtttccctgaaagccggtttgcgaaactaaaccaagtaactccagtaaaaaagagccattctgttcgcgaacagaatggctctttttttatttatacatactttcaattactggttttagcttatcgattacaagtccgctaccgccgcgacctttgacgttttcgatcattcctaccatgaggtaattgggattgtcggcatcgaaggcataaacaaagccattttcaaggccatcttcgccttgtttttcttttagttcggctgtaccggttttggctgcgatattgtgaccttgaatttgtagggcgtgcgctgtgcctgctgggtcagaaacagttttgactaaagctgctttgacttggttagcagatgcggcttcggttgcttgtgtttccttgccagctttttcttttgtatctagttttggataaggcatttttccgtcgttggcaatggccgagtaagcaatcgcttgttgaattggcgacatcagtaattcgccttgtccgtaagacgtatcagctagtaagatttctgagttcagcccgtcatttgaaatttgtgctggtttcattgtgaaaggtaagttatattccttatcaaaatcgaattttttcaagccagcagttagtttatctttgccaatctctagaccttcttgggcgaaataaatgttatcagagtgtacaagcgcgtccgtcatatttacttttggaacatcatggacacgagtaacaaagtatttgccccatgaagcatctttttgccactgtaatccagaaatttcacggactttgtcgggtttggtaattccagtatccagcccaatcgttgcagtaatcgttttaaaagtagatcccggtgcgtaacgatttgcgtatcttgctaagaaaggaaggcgtttatcgtcattatattttgcgtaatcttcggaagtaattcctagcaccatttgatttgcatcataagaaggtgtgctcactaatgctaatagttcgccgtttgttgggttaatcattgtcactgcgccagtttcagagccaagactatcaaatgctttcttctgaacatcagcatcaatagttagtttaatttcttcgccgtcttttttatcgattttttgtaaagtatcttcttgtttggtttgatcattgataattttgattgcgccaccatttttaccgcgcaattgtttgtcatagtaacgttctaagccacttttcccaatgacatcgccaacgctgagttttggatttttttcaatgtcttcggcgctaacttcaccgacataaccaatcaaatgcgaggttgcttcatttaatggatacgtccgcatttctttttgagcgtaagtaagccctgttgcttctggaagtttatctttatttaaagtaactagtggcacaaagctatctgcttgaacccatttttgatcgagttgtttgttgatgtaatcagttgagacttctagttttttgctaatatcagcaatgtttttcactttttcatcgccttcaccaagctttgaaggaacaactccagcttcggcaaattggcctgtagttgcaagcggttttccatttctgtcaacgatttgaccacgttctgcatcatcttctgtcattcgaactttatctgttttcaccattcctgggaaaattagtgccggtttccagtcgattttccagtcgtcatcttgcttggaaatagttgttttatatttttgcgtagcgagttttccaaggcttgtccgcatttctagttcatatgttaagttgaatttgttttctttgtcatcatagactgactttaaatttttgactttaatatctttcgcaccaattccgtcgtaaacagcttgatacttttcttccatttctttctttgtgaactctacttttttcagagattcacttgagacgctatttcctagtttatcgtacttttctttagcgatatttgatgtaaaagtttctgcggctgctaaagcgtttttttcatctttatgttgattttggatgaaaaaataaatggcaatacctgcgaggacgacaacagcaacaatacttccaatgataattgctttcttgttgttaccttttttcccatttaaattagccataatacaccccttaatttcatgttatattcaattaattataccaaacacttctaaaaaagttgaaaaaattaaagaaaactttagatttgcccgacatatttttttctaattcatgtcataatttgttcttatttgcttggtaaagtagtggtaacgaaaggatgatgttggatggaagagatggaacaaccagaaaagaaggtcattattcgtgggaaaggcatccacaataaatggaagtggagcacgattattgttagtattctttctgtcataattattagtgttttaagttatcagctgtattcagttagtcaaaataccccggaaaataataatggaacgatgcaaggccctggaggaaacggtgcgccgagtggaacgccgccatctggtgagccaggtcaggcaccttcagacgatagttcggattctggaacaagtgatagtactaatagcggcagtacgctttagaatacgctagaagccctctaaaatcatgtttttagagggcttattccaatctttaaaaaatcttatggaattatcgctctctttttttgtcattttattgtaatatggaggtaagttacaataaatgaggtgtgaaaaatggcaagacatgcacaaaaaagaaaggcacgtaaaggtagaatttttggtacgattcttgtagccctattaattttagttggtgtagttgcagttataggttattttcaatatcaatcgagcttaaaagaagcgcaaaatgatagtaaattaaaagaatacaaatttaacggtgcaaaagcagttggcgatgagattaatgttttacttatcggtagtgactctcgtggcgaagaccaagggcgttcagacagcttgatgattgctcattataatacgaagacaaatacgccaaaactagtatcaatcatgcgtgatacttatgtagatattccaggtcatggcaaaaataaaatcaacgcagcttattcatacggtggtccagaacttgtccgccaaacgattaaagaaaattttggtgtagatgtgcagtattatgtagtagcaaatttcgaaggtttccctaagattgttgatacagtagcaccagaaggcatcaagatcaatgcagaaaaagatatgtcgaaaaatattgatgcaaacattaaaaaaggcgaacaagtaatggatggtaaaacattattacaatatgctcgtttccgtaaagatgctgaaggagacttcggtcgaattcgccgtcaacagcaggttttagaagcgctgaaagaacaagctattgatgttggagatgttactaaaattccagatgtcatcggaaaattacaaggttattcttctaccaatatcccgactggcacattaatgtcaattggcgcagatttcctactaggaaaaacagaaacaatggaaaaattcgcgattcctgtagaaggaaaatggcacaatgaaagaattgacggtgcaggagcagttcttcgtttagacgatatggctgccaacgcgaaagcattacaagattttcttaaataaataaagcaaaacacggaaatccattcttcggatttccgtgtttttttagatgaaaaaaagcattaactttcgtaaattgagactatatcataaattctacgcttcattttttcacgaacatgtaatggctctaaacattcgcatttatcgccaaaactcaagagaatatcatagtgatactcgttttctataaaaggaaaactgacaatgtaatgctcctcaccatcgggataaaaattttcataagagcaataatcaagcactctatcgataatggattgatgaatacgaattttaatttctatctgcataattgctacaatatcttccatttctaactgtggcttttgaaaatctcgcagtgtaaaagtgtcctcaagtatttgcagaccagacatacgagataacctgaataaacgaaaatcattcctattttggcaatacccatacaaataccagtggctgcttttcattacaagctgatatggttcaactattcttacggtcttatttccttggtgagctatatattcaaaggttagtaacttgttttcctgcaaagccactttgataatttctacatgtggttgtatgttgttatttcccgtccactggcttaaatctatataaatttggttcgcttttagctcgatttcttttgctctatcagctgggataaaactttttatttttgcaagagcatttatcagttcatctccgcgtaccatgttagaaagacttgaaaggcccataagaatagcggaaaggtctgctgttgaaaaaaccttgctatccatcttgtagtcaggcataatttcaaacccgccacctacgcccggtgttgaacgaataggtacaccagccaagtcaatcgcgtctatgtcacgataaattgtacgaagcgaaacttcaaatctatcagctaactcttgtgcgctaatacgttctttatcaaggagaattaaaacaatgctcataagcctatcaactttcatataatagccacctttcaaaattactatatattgttgccataatggtgtcaacaatcgggagctatactgaaaagtaaggaaaggagattaacatagtaatcattgatataaaaaattaatagaaaatggaggaaatatatgtttacaatttatgtttacgttcttgatactctagcagattgggagataggctatgtaaattcggagctcaattctcgtcgtttttttaaaaaagacgcaaatcgcgtatcgctcaaaacagttagttattcgaaagagcctattaaaacaatgggtgggatgacgatagtgcctgattgtgtaattgatgacattgttatgagtgaaacaagtgtattgttattgccaggagctgacacatggaacaacctagagcataaagcaattatcaaaaaagcaagtgagcttctcgctttaaatgctacggtagctgcaatttgtggagctacagttgcacttgcgaatcatggattattggataatcgtccacatacaagtaatggagcaggatttttagaaatgttctcttctagttataaagggcaaaattcatatataaatgagctttctgtatgggataacaatctgattacagcgagttctgctggagccttgttatgggccaagcaaattattgcgcatttggacgtttttgagtcaaacacacttgagtcttggtatgcctatttcaatactggtgaccctaaacacttctatgcactcatggaaagtttgccagataacaatgatcactaattaagtggagcggctaatctacaatattaaagcagattggtcgtttgctgtgtggctaactttaggtggaaaattgtcacaaagtacagggagagaattgacaggctggttttaaatttcttttttcgcgtcacatagcttataatgaatacatattttaaaaaggggtgaggcgcttcatgaaagataaaacgaaaaaacggaaatggaactgggcacagattcttgcaatttttgtattaataacgctcgtgatttctatggtttatgcaatagttaacttaattacagcaccatctggcaatgtaccagaaggacagcaaacaaaaggcgattactcacttatgcttatgcagtgtgttcttggtgtggtagttctatttctaccatcaattattagtaaaaaaatgaaattcgtcattccgaatgcgatgtatattgtttttatcgttttcttatattgcgcgatttatcttggggaagttcgtagtttctattatttgattcctaactgggatacgattttacatacatttagtggggctatgctcgggggacttggcttttcgattgtaagtttactgaataatgatgaacgggttacactttctatgagcccggtttttgtagcattatttgcttgtagttttgctgtatttttaggcgttttctgggagttctatgaatttgcagcagatagctttggaatgaacatgcaaaaaacgatgctagaagatggtacaatgctacaaggtcatgcagcagttgcagatacaatgggcgatctgttcgtagatttcctcggcgcatttgtcatctcggttgtcggttacttctccattcgtaaaaataaaaaatggatgaagaacttcgaatttaaaaaagtagaagaagacgcgaaataaaaaaatgccagcaaagtgagaaatcattttgttggcagtttttttatattattttactttctctatcaataaacatcattaaaaatgcgatgaactgtaaaaacgcacaaacaagaatagcatattggctgaaaagctgaataaagaaattaccaacgaccgcaccaacgataaaactaagaataaccgtgaaatatagcccactattacgaaggtattgcttttccttgtactcaaaataatcacataagttttgtgtagcacttcttagatttccgatacacatcgtcgttgcaacacctctaccatgcatttttcgaaaactttctacttgaataccacatacaaaagatatgagcgaattagcaattagattatgatcaagtggaataaatgcaacagcgaccaaaataatagcctctatcattacggaaagctgtctccagtgtaaacgtctaatatcacgtcgatgaattacttctgatatcgcaatcccgaccgtaaaagagacaaccggccaaaaatactgaattgcgatagcccagttcccctctgaaagattaattccgaataaaagtatgttccctgtctgtgcatttgcgaatacttgtcctctttcaatataagagtaagcatccataaatccgccagctagagctaacaagagccctagccctattgattctgaaatttgccttgaacgtaccataacttttcatccttttttcttatttattaagcaattgcgcgcgaatcgtactaattaagtgatttacttgatcgatattttgcaacattttcttttcaaaatggtgaattggcaggaatacgcaaagttcgtctgcattatccgcagtttcttggccataaaaaatcctgcttgatggaatgatttcttgaatttttaagaacgtttcccaaatatcagcataaacttgagcttctgtcattccaagcttaagcgtgctaggaagagaatataaaacaagtatcccacgtttcttatttattgttttggtcgatatagtaaaatcagactcataggaatgaacaatatcctcatcgtctactaaataaattgcagtttccgaattagaaagctccgaatgaaaaatttcttgaaacttttcgaattcgcggttagaaacttcttcattactcgcggtcaaagtgccttgttgatctgttaaaaacaaaggagaatggctggtttttccagtcagctttttaggaattagaaaagcctgtctaagaagttcgaataaagtccttccgcaaatacctaacaatagcgcacttacatcactttgttggtaggcggataaaataattttagcaaaaagcgaatcctctttttcaaaaccacgcgtttcttggtagctctctaaattatctagaaatacatctttaaaacgtctacacgctgttggattagctaaaatctgcgcaaataatttagttgtattttcttctctaggaaaaatagttgtcatttttttgctctcctttgttttttatagtacaccaaatcaactcatttaaaagcaattcgaatatattatctcatatttaccaagaaataataaaaaattcatagaaacaagcccataataattcatgggctcgtttcattatttatcgtgtttgtttaaaagcgcgataattctctcagtaagctcgatttcattttgcttcattcctttttccgcgtcattattactataaacctgagcctcataaatttttgttagctcggtaaagtcggcggttttcagctcattatcaacacgtattgcaaagtggcgtaacgtttcacttggctcgcgaacataaccataaactgcaagagatttcattaatttatgatatgttttactgaattcaggtgcttttgatagtgatcgaagtaataaataactacgaattctgcgtctaaatagaacgacgagaacaagtaaaacagcaactaagccagtaggaatccaccagaaccatgaaggtagtttgaagcttgaagttgagtcggtttttggttgttcttgttttggcgtttccccagtagagctacttccagcttcttgctcaggtgttttatctggttgagctggtgtttctggagtactcgtgctgtcatttggtgtttctggtttattggcagtttcggtagttggctcttggaagtcttccggatttgtaaaggtagctgttggctcaaatggaacccatccagttccagggaaaaacacttctggccaagaatgtgcatcgttatttgtaatggtatacgttgatttagagtcgtttccttttttctcgccttcacctggagtgtaacctttcgcccatcttgctgggataccaagcgaacgaagcattaccaccatggaagtagaaaaattatcgcaataaccaatttgtgtttcaaataaaaattgatcgacataatcggctccattaggcgtttctttcgcatcctcagtactatatgtgaacgtacctgaagaacttaagtagctttcgatagcttttgctttatcgtaaattgaatcagcatctttagttactttattggcgagttttgtaactcggtcaggcagttcttttggcatttgcgtatattttgaaacaaatgcgctggataaagtgctgaaatcagctttttgcattttttcgatgtcgtaaacaggtgatttcatttgaatcgtgtaatttttgattgtatctacaggattaattttttcagtcgttaaattggcactaaatgaatcaaccgcactattaattgtttgcgttccatatggatatggaatgtaatcacttgatgaagcaaaactgatttcggctgttttggtatctccagttgtttgttctgtaagttggataggaaagtcatcaccagaagagaaagacgttatgtctgctgatttttcgttcgcccagccagttccagtataaacacgttttgactcaacgcgccagtagtgccctttttccgtacgagcggtaaatacggtagcattatctttttggagtgcgccaccaagcgttgtatcgtcttcgctgtaaccgactgtgcgagtagtattgattccaagcgcatttttaatcgtcggtactggatcagggaaaacgggcgcttttttaggtaacattagcgaactaaaaacaaatactgcaagcaataggactataaagacatgataaaataggccatttcgtttgagtgaatccgcgctaattcgatttggagacgcaattcggctcgaaagcgcaagatgtagcaataaaaatccttctaaaacagttcgaacaattgcccaattactattataatctgtaaaagtattaataactgccaaataactgaccgttaaaactaacacactcataatccgttgttttcgcaaaatactataagttgtaatatagctaagcagccacaatgcaattaaaaagacgattaaaataaagttcatggcaatatccgatgaacggaattgaaccatatctctaaaaccattaaatgtgatttggaaaaaagaactaaaccaattcatggaaaaaatactatctttagcataataaattcccgaaaccacgaaaatcatgattaaatgaaggggaatcgtccaataatatttcaaacgaaggaaaaaactaccgagtgaaatagttataaataaaataatccaatttggagtagatagttctgttagctcagaaaatgggtaaatccactctgaaattagcaaaacagataagataaatagcaatacgagagataaatatcttttcatcgattttcacgctcccatctgctttcaaggctagcgggctcaaggtaaatcgctggaatatcaatagctttagcatgttctgattgaaaagtaataatctgtaattgcttattatccgttaaccgtgttactttttgcattaacattgtatctatacatggtgtgaaaagaagaattttttctccagcatgtagattgctatcaagtgattcttggagcgacaaactatcgacaggtgcaatttcggcaaatgctgtcgaaatgtcttgaagtcgatttgtaccttttgaaggagcgaatttacttatttgatcgcctaaaagagtaacacgaatttctccattatcttcggagattttgcgaataaacgagtaagacgcccgaagtgataattcaaaattgggatggctcgctccgtaaaaaataaccgacaaacgcgatgtcgcactattttcaaattctcgagtcattagttgatcgcttttcgcagaagatttccagtcaataagggaaatccggtcaccagaagaaaattcgcgcaaactgtgcaaattgctgtttttcttaagcgtccagtaagcggcgttgcgttcgttttctggagaagattcactgattttttctagtacgtccggaaaataggttggataaatagtgagcgttttttcggaagatagttggcgcgaacgctctaataagccaaaagcatcgctagtttctacatcaacaggtggaaatgaatgaatcccacgaacacctacaaatccagccaatgtgaccgtgaaatgctttttaaaaagcggataaaccacttgttggcgggcgctcacattgccaaaactagcgggtattttttgttggaatagcaaataacccaccggataacgcgattttcgagtgaatgatacttgcatatcaattaaatcgccatcatgataggtatttttaacaaaactccgattcactttccacgcttttagtggataaatcgaggataaaaacaaaaataacaagataaaactgaaaaagtaggttaaaaaccagctagctgtatcaccttgaaataacgtataagcccaaagtccagcgtaaataattagcataataatccaccgagatgctaataagagacgtttttttaacatcttgttacctcttctctaccgggactgacgtgtttttcagaatggaagcaataatggattcggctgtttcttcattataataagcttcagacttcaaaatgagacggtgggtgaaaatataaggcgctaaatactgaatgtcatcaggaataacgtagtctctgccttcaataagtgcaaaagcttgagctgcttgcataaatgcgagcgagccacgtggactaatccctagcgcaacagacggatgtttacggctcgcatctactaagcgaataatataattttttaaaacatcatcaataaagacttgttttgctttattttttagcgttactaattcttctaaggttactacttgtttcgtttgatcaagtgggtcttggtattgttttaaagtaagtagttgcatttcttcttccacagtcggataaccaatgttgattttaagtaaaaaacggtctaattgggcttctggcagtgcataagttccttcatactcaatcggattttgtgtcgccataacgaaaaaagggtcagcaagtttgcgcgtaataccgtcaacagtcacgctgctttccgccataccttcaagtagagctgcctgagtgcgcggtgctgtacggttaatttcatcggccagcacaatattacccatgactggacctggacggaactcaaattcacgagtttctgggttaaaaatcgaaactccagttacatctgccggtaataaatctggtgtaaactgaattcgtttaaaggaaacaccaattgtttttgctaatgtacggaccatcattgttttaccaacaccaggaacatcttctagtaatacatgacctcccgcaagtagggcagttaagcttaatttaacaacatgtcgtttaccgacgataactttttcaacttcattaataatctcatttattttaatggatggctctgtagacataatttgcctccgtttcttttcatgtgtttttagtcagaatatgtttattcatggtttaatgctactataatcaacctggaatgtaaaagatttaaggtggcatggacttttctaaggagattgtttacacttagaataactggaggtggcgaactttgagcgtaaaattagcagatttaatgaaactaccatctttaaaagaagcgaaagtagtctctgggaaatcaggattatctaagcttgtttcgtctatttctgttttagaatatacagaggtagctcttttagaagatgatttatttgataatgatgaattttatggcagtgaaatagttgtatcggcttttgtgaatattagggatgatgtcgaggcgcagtgtcgcacgattgaacgattacataaggtcggagaagttgctttaatactttactatgttggaatatttgtcccgaaaattgaccaaaagctagtggattttgcaaatgaactcgattttaccattattgttatgccagaaaatgaaatgtcgcttaggtatagtgaagttatttatgaagtagttgaggccattgtgaaacaggaaatgacagacactaattttgtaaccgagtcactagaacaaatttcaagcgtaagaccgccgcaacgtaacattgatacgacactgaaaatcctatctgatagaacgcatgtctcgcttgttttaacggacaattccttccaagtcattaattccatcacttggccacggacccggcactgggattttgaaagagtaattgaagcatcaaaacatataaacgagcacgaacttgtccagctgaccctagacgaacgagatttttatacagctaaaagaccgatttttcaagatggtatgcaggcaatgcacttatttatgatgaaagaaaaaggagcattaactatcgacgtagctatgcaaattagcgaggttgtccaagtatttatgaatttatggggcaaaaattatgtcgaaattagtacaaccgaactaatgaaggctattttgaatgatgaaagtgtcaagatgcgccgacttggaaaaattctaaatgtcgatgtttcttctattaaatggatgtggcttgtaaaacctgaagctgttcgtgacaatgaactagtattaaaggaactgaaaagctatgtttctagtcatttcaatgtttcgctgattgatttatttgaagataatatcgtcgtccttttagataattccgttgcgcaacgagacaggacgcatacggctcaagcattttctgaaatgatgcaggaaatcgggatagctttaaaaatcaccgtctgccaaggtatggaacaaacctcagatgtccaaaacgcgtattcgttagtaaatgaatacaaaaatgcagcgaatgcaatttatgctaataagtcgatatattcgctccaagaattcgattttgcaacgaaatgcgtcgaaatagtcggtcgaggggaactcgcaattgcggaacaaatgaaacctttaaaaccgttggaagaaaatgctgagttgattgagacgctttcggtatttttactagaaggggaatcgaattataaccaagcagcagacatactatttctccacaaaaatacgattaaataccgaattcagcggataaatgagttattgcaatacccagcaacgaaaattcccgagtcttataacctttatttagcagtagcaattcggcgtttacttggcgaaacaaacaataataaatgaaaacagcgcggtttttgtccaaaatgacaaagattgcgctgttttttttcaattctgataaatacaaatgctagctagttcttatataattagtcattaatacaactatttcaagaaaaggggcgaaacaaaatgacagagaagaaaacagaagagcaaacacaatcctggcagagtttggcatttgtatggaccggcgcaatgatatgcgttccgagtcttcttgtaggaggaacacttatttcaggcatgcctttatgggaagccattttaatagcacttttaggatacggcgttattgtcttatttatgatatatcaaggaatgcaaagtagtgacttagggattccagcagttagcgtagcctcacaggtttttggggaacaaggatctaaaaagattatttcgattctactggcgattgcttgtcttggttggtttgggattcaagccaatgtttgcggggccgcattttcacagtttttaggaatttatggtattaatcttccagttccaatttcttccttgatttggggagttatcatgttactttcagctatttatggtattcgaattttgagtattttaaattatgttgcagttccgattttacttttcgtatgtatttatgggttaatagtttctttaaacaatggcggaattgcggttgtggaaaattacaaaccagcaagtagtatgtcgtttatgacgggtcttgctattacaattggctcgtttgctttaggagcagttattgcgggtgattattcgcagtatacgaaatcacgtaaagacgttgtaaaagcagctattgttgggattttgccatcaggtgttttaatgattgcggtaggcgcggttcttgctttaacagcaggtacagcagatatttctgtcgtatttactaatctagggttaccagttcttggaattatcggcttgatccttgccgcttggactaccaatgcagtaaatgctttctcaggcggaattgcaatcatcaatgtattcaatatctcagaaaaatatcataaagtagcagttgcgattgctggtggacttggtactattctagcagttattggaatcttgaaccactttgttccgattatgtcggtactttcggcgatggttccacccgttgcaggagttatgattgcatcttactggattgttcaaaaaggtgataaaaccaaatgggcaccagtatcaggtgtcaactggcttggtgtaacttcttggttagttggtgcagtcatcgcgggaattccagttattttaacatttttcccgacgctaccacaattaccaaaccaaccacttatcggcattatcttgtcactagctgtttacttagttggggcaaaagtgctgagcgggaagacgaacaatgtagaaaacttggagggaaaataaatgcgttatttagatgaacaagctattgaaaatatcgcgattggtgccgcgtttcttggcactggcggcggcggagatccatatataggcaagatgatggcattaactgcaattaaaaaacatggaccaattaaacttttatccccagaagaaattgcagatgatgattatttcattccagctgcgatgatgggggcgccgtctgtactcattgaaaaatttcctaaaggcgacgagttcgttcgtgtatttgaaaagttaggtagatatgtaggcaaagaagtaaaaggaacatttccaatggaagctggcggagtaaattcaatgattccaatcgttgtggcagctcaactaggtttgccaatggtagactgtgacggcatgggccgagcttttccagaactacaaatggtgacgttccatctagacgggatttccgcaacaccaatggctatcaccgatgaaaaaggcaatattggcatcatggaaacaattgataataaatggaccgaacgacttgcacgtgtgacaacggtcgaaatgggcgcgagttctcttgtgagcctgtacccgtgtaacggcgcgcaaatcaagcaaagcagtattaaaaatatcgtgacactatctgaagaaatcggtaaagtaatccgcgaaacttcgatggacgaagcagaaaaactacaaaaactattagatgtaacgcacggttatcatttattcgaagggaaaattaccgatgttgttcgggaaacgcgcgcaggctttaactttggtcgcgtgaaaatcgacgggctaaacaaagacactggtagcgaagtcatcgtccatttccaaaacgaaaatcttgtcgcggagaaaaatggagaaccgatagcaattacaccagatttaatttgcatggtagaccttgaaacgctgatgccggtaacgacggaagcgctcaaatacggtaaacgtgtccgcgtgatggcactaccagctgatgatgcttggagaacggacaaaggtatcgaaacagttgggccgcgctatttcggctacgatgtcgattttgaaccactagaagaacttgtcaaaaaggaggaacgccgtcatgtataaaattggaattgacgttggtggtacaaacaccgatgccgttattttagatgaaaatcaacaactcattcatagtgtaaaaatgccaacgagtgaagatattgaaacaggaattactgagtcacttcatcgcgtattgagcgaaacgggcattgatcgctcgaaagtaacgcacgccatgcttggaacaacgcagtgtacgaacgcgattgtggaacgtaaaaaattagcaaaagttggcgttcttcgtttaggctatcctgcaacagcatccgttttaccatatacagcttggccggaagacatggttggctttttatctggaaaatataaattaactggtggcggctatgagtacgatggtcaggtgttatcagaaatcaacgaagcagaaatccgtgaaaccttagctagttggaaaggtgaagtggaatccgtcgcagttgttggcgtcttttcttccttgaaaaacgatcaggaattagctgttcaaaaaataattgaagaagaactaggcgcagatattccggtttcgatttcctcttccgtaggttctgttggactgattgaacgcgaaaatgcgacgattttaaacgcagcccttttcaaagttattgcggcaacgagtgatggttttgaaaaagcactagaacaagaaggaattgagcacgctgaaatctatctttgccaaaacgacgggactttaatgtcactaaactatgcaagacaattcccgattttgacgattgcctgtggaccaacgaacagtatccgcggcgcatcctacttggcgggacttaaagacgcgatggttctcgatgttggtggcacgacttctgatattggagtactgacggatggtttccctagagagtcctcgcttgcggttgatgttggcggagtgcgtacgaactttagaatgccagatattatttccatcgggcttggtggaggaagtatcgttcgcgaaaaagatggcgatataacaatcggaccagatagcgttggctaccgtatttccgaagaagcactagtttttggcggtaaaacgatgaccactaccgacatcgcggttcgtctagggatggctgaaatcggtaaccctgaattagtcgcacatatcccaaccgattttgccgaaaaagcctataaaaaaatcgctgacatgaccgaagatgcgattgataaaatgaaaaccagttcggggagtgtaagcctggtgcttgttggcggtggtagcatgattattccagacgaaatctctggtgtcgcacaaattttccgcgacaaaaacggcccagtcgccaacgcaatcggtgcatccatttcccaaatcagcggacaatatgaacaaatctacatctattctcaaatcgagcgggaagaagcgctccaagatgccgagcaaaaagcaagagaacaagcaactctagccggcgcagtgactgactcgattgaagtggtggaagtggaagaaatcccattggcgtatcatccgggtaatgcgaccagattgcgcgtgaaagttgtgggggatttggtttaagaagagtaaatagtggagcattgctgacttcaggctggaactaaagtaatttcttactttagttccagctttttttataacgaataggtgattaatacagcttctagccataaaaaagccagaaagcaattagtaacaatctctttaaacgacattgttaaggttcagatttgctatataaatattttagttcatttatacgtgctattcttttattaatcagttgtaagaacttgatataagaaccttaaaactaattgtacaataaactcataaaatgaaggaggaactactaatgaaagaaattgctataagaaaaggcaccgcaactaaaaaatgagaattaaaaaacaccaaatgttagattttaaggtctaactattggtgattgaatcaaatcgtccaaactttatggagggcattttttgttgttttgactgttcaatagcaacacctggtttcaaaagcaactgcaaaagacagtgcttcataaacgcccatgggttatcctttctaggcaatcctaacaaaaaatattcataagcatcaccctttcttgcttaaggagctagccacttgcttactccttaagtatatcattgatattaaatgaaaaaaggttttatactagcgatgaatattaaaagttataggcacccctttttaagcaggacatcaagtgataaaatatagttcgtgaagtatttattaacgtcccaaaaaaatagcttaaaatggaggcaagggtgattatgacaaataaaacattggtttgtgaattcttatacatagaaaaggaaatgaccccaagtgagttctttttaaagaattttgatctgcaaaagacggtggaaagtcatcaccaagatgggataatcgatatttctttaccatctctcaaatttaattataataaccaaagttataaattgttatataatgaaatagaacttaataataatgtttatagtatatccatctctcttctttatgaaaataataaagaaaaacatgcaattatcttagataaagtgatgggatttataaataatagaagaaatcacaattttaatttaatattcaccagaaatgatagtttaaagtatttttcaataagattatataaactactctatgattttgaaacaaacttacgatcattggtcaaaatcatgttgattcctgataataaacaagaatggcataaagtgataactagtaaagtagacgtaacaacaaagttgagtaagacagctaaaatcgaaaaaataattgaggaattaagtatcactgatttagagttaatgttatttgacaagacgtttccaaagggatcaaatttatttgaagatgaactatctagaaagcaagtagaaaaattaactaggcaagaaataattaacgttattaatattaatagaccagcctctttatgggatacatactttagtcattatattgagtacgatgtaatgaatgccatgaaggtaattaaaactactagaaataatgcggctcattacagagaatttgatagtgaacaatataaagaaacacttaaagtacttaataaggtaaatcctttgataaaaaatactattaaagaattgcaatctttggattccgatgtattaataaaaatatcccaagctatggaggaaaaagtcgcgaatgtgtttgaagagatttctaaaaacacaattaatcttactaaggatttgaaaaaagcattattaaatgacctttcgaacgatttgaatcctttaaaaagtatggtaatccctatgaaggatatttaataatgaatctaactcaatgactttgagttagattgatgaaaaactttataaagttttaattatataagtaaaacctctcgcataccattctcttgaaagagaagtgaaatgaagagtataaaatatcgtactttgaagaaagtggacgtttgtagatgaatcaatccaatgaggtttgagacaactaaatagcttattattgaagaacttgtatagatcgaaaagatcaggcagaatattaagtagacattataatgtgttcaggtatcaggggagctgtgctaataccttttttgctgtgtataggttatcattctacggcacaagatggtaaaataagattagtaacggggagtgccttttgtataaagttaggtagtaggactttttcaaggagacacatataaaatttaagtcgttaggtattataattcaaaggggaatataaatgcatactaggattagcaatatgatagaggcgatagatagagagagcaaaaaaaaaggaagcgaaggggctgtatttaataaaacggtatttcatatacatacgcctgcttcacatgatttcggactttttgcaaaaaatgatacagataaaattacaaatgagcaattatttaataaattacttgatgatggttttccattgaagaagaatattcattcaatagaaggattgaatgaagtcaattcaaataatgttttcgataatggtattgagttagctctattttgtttgcaagctaataaattatctgtaaacaatgtcaaaatggcacttataacagatcataatacgctttctggtgttagtaaaatggtagaagcatgtaagataaacaagcgatttttaaataataaatgtcctcaaatattagctgggatcgaaataagctgttcggataaacatcacgtagtagtgatacttaataataaagacatggacatgatgcaaaaggcagaagattggttaacgaattatattatctcagatgatggaacatatttaccatccttacttgttattgaggcatttgttgagattggagctatagcttatatagcgcattttaatacttcagatttatttaaaaaacctaaatttttaagtggactttatatagataaattattttctaccaaaaaaatggaaataattggcttatcaaatatggatagtaagctagctattgaggaaaaattatctaactacaccaaaagaaagtttcattttattttagacgaggattctcatactcttgaagagttatgtactaaacctttttggattaaagcacagtcattagattttaacgctattaaatatgcgttaaatgattttgacaattcaatttccttttgtgaacgtcagatgccctcaatttatattaaatcgttgtatatagaagggaagacattcattaaaccatcaaataaaaaaaataaaggtgtagtttttacattttctccaagaatgaacagttttattggtggaagaggaagtggtaaaagtacagtgttgaacacaatagaatttttaatcacgcaatatattgaaagtgaacatatatttgactccgttttgcctcagggagatttatgcctttgttgtgtatttgaaggagaaacatattatattacatctttaaatgctgaagatgaagacaaccaaagatttaggaataattacttttataaggaatctagattggaatataaaaaggtatctgaaacccagaagagaaatgaagtttttggaagaattgaagtatggaaaaaatgtcgagacaatggctactatgaaaaaataactcgaaaaaaagcaattcttgataaaatgtttacaagaaaattttctgtaaataatcttgtttccagtgctcaagacagtgataatattaaccaattcattataaacatgattgaactagaccgaatcttaaaaaagaaaattaaattatcaacaatagacactaaaaaatggttcgaaatcaaaaaagcatttcaatcaatagaattaaaattaaatagtcatcgagataaatatttatcgacaattaatgaatataataaaagaaataacaatagtgttaggctaatttatcaacaagtagcagttgagaattttgtatatgcttgggaaaatacaatgtatttaaacaaattaaatgcaacaaaagatttccataactataatattagtttaggtgaggtagtgaattatttgcgtgatctatcaaagaaaattaatccttttaatgtcattattaaatttcatgaatggaaatttgatgaattagatcaaatttctaacattactgattttttgatgagtagaaataaaacattagataacaatttaattgatgtaaacatacctgctaataaaataaaattatttaaggaattaagaaagagaattaatcaatctttttcttatatgatagatgagttggagagattctattctcatgtagacaggtggagcttagaatttaatattaataaccgtactggacatgataacagaaatccggattttaggacaataaccgagttatcattaggtcaaaaagtagtagccatgttgaactttattctctcctttagtgagtttgaaggagatgattcaccattaattatagaccagccagaagataatttggataatcaatacatttataataatttggtaggactttttaagaatctcaaacaaaacagacaagtaattatagcatcccataactccaccattgtggttaatagttcaactgaattagtgtatgtaatggattcggatgctaataacggctggattcaaacaagtggtttttgtaaagaaaaagtggttttaaacaaaataataaatacattagaaggagggcagattgcattttcaaataaaagtgagttgtatagtagcgttactaataaaaaataataacccaagaagatggttaaaaaacttattattcaatttagatacgaatactgccaaattggattaataagtgttagtgtataaatgaaataagagtcatacactaacatgaatctcaaatacaagcccgtttatgatgaggactagccattatgataaaatagccactaaaccattcaaagtttataagtggttattttttgttgtttggactgttaagtagtaaaacactttttgtacaagcaactgcgaaagacagtgctttataaaaggtcattatctatcccttttcagggagccaacaaaaatataattaggccacctcatttagtaaaaagaatactagccaccatcataaacagtgcttattggtattagaagcatgaagaaaaaagcatgcaaatgatatataatgaataaatagagaggatggaatacatgagatacataatgattgatactaattacttttgtgagaaaaaatttgatacagaaacaatcatattgaaagacttcaaaaaaatgattgaagagcaattaggtacatttttgtataatgatattttaattggagaatatgaaagtaacttagaaaaattaacaaacagtaccagagaagcgtttaaagcatttttacgtaataaaagcactttaaatgatgttatacctatgtttgggaaaaaaagacttgaacaaaaagttgcagaatatgaagaaaaatatttaaaaccttatgcagatagattttttgattatatcgagatgattaacggaatagatataatgattaaggatatagatattgaagtactttttgataaatattttaatggagaaccaccttttgaagctaataaaaataaaaaaagtgaatttccagatgctataattttcgaaagtgtgctaaattggacagaaaaagaatcaaaatttaataagtttacagatttgttatactttgttacaaaggataacggcttaaaagaagcatttgctcctactttggttcatgttgtagaagatttaagggattgcttaattagttcactagcagaagaggtagaaagaaatatcagtgaaaatattgaaagtgatgaatttaattgcgcgttaaatgatttgttagaagaaaatataaaagattttcttatggaaggatatctagatcttgataatggagaaatagaagcagaggccctgagatataatatagcaggaattggaaatatggactatgatttgttggcagcaaacaaagatgggaaagaattgaaaattataatcgccatctcaaatgtggatctagacttaattgtaaactattccgaagtatacccagaatcaggatactatgatagagagactggcgaggtatttggcttagaggtacatgaaacaaagcgtaatataggggtagaattaaagctagttgtagaattatcaattgatgagacaagtatgctctctaaaagattaatgtgctcaatagcagatatcgagactgaaactaatcctatattaaaggaagatttgtacaattatgaatacgatttaaaatctagcaatgcttctgtgttaattgatatagaagatatacaattaaatattgaagaaatggtaagtccctcagaatatttggaagatcctactatgttattttaaattatttcttgtagtaaataatttcgtccaatcttagccaatgacattgagctggattagtaaagcacattcaacagattataaaataataaagagaagacaaaaaatctgttttctcttattcttcgtttactttgaatcttacttttctaattgatgcgaaagaatttgtaagattgaaagaatacaaaaaaggggtgtattaaaatatacataaaatactcattataaaacagacttctttgtgtgtaattagggggtgtattaaatgttttgagaataaatgtttttagtcatgaatgttgtatactattgagtaagcagtaatgattaaaaatttaaattgaaaatcgtagagtttaaacatcgtggtgctgaaaaattatttatcgaaaagaaatcttgcgcagacattatagttttcgtcttaaaataggttgttcatgataagaatcgaacatttcattacattttttgcttatacattcattttctgtgctatgcttttagtaggaacaaatattctaccaatggcacatccaaacaaaatattttccctgaatacggtatgacaggaagccgatatagtaagaacccgacttactgttcaaagattgtacttcaagcctattatttcgaaacaagaaataagcctgttgtgcaagtatttccgtccttagttactgtgtatgatttaccaaactatttttcaaaagcatataagccacaacaagtgaaatactttaaataaatctcatgtattaggaagtgtcgctgaatgaaaaagtataaaaagtggtggataacgattggattagtgttaattctttgcattatcggatatatttattggtttgcaatccctaaacatacagcaaatgaagcagtggatgattacatagcagcgcaaaagataaattcaacgcaagttaaaacgagggatatttaaaaagattggactagaggaggatactatgtcacgatagtgtttaaggatgaccctaatttagtgtatgaatacaactacaatagtaaaaggaatacgccttaccatattaatctacttgtttttaaagatggctcgagtcaagaagatgaccaagtgaagcatccaccactacaagagcaaaaggattaaagcagaaacccaagcattttaagtaagcagtgctactactgcttacttttttgtattacttttatgtaagctcggcataaaaagtatcacgccaatcgaatgatcaagccggctaaggtcccaaagcggatttactaaataacttgagataccttaatgcacacgagctagtcgggaagacaaaaagctttggattggttcaactaaaatctatcattttcattcaaagagataataaagcaccaacctctcccatgttttccctagcaattccaaccccacctgagatacaattaacccaaacaaacgaaacggggcggatgccatggcggaatcactcattactaaaaaagcgattgctggtgggctgatggagctttgtcagcataagcggtttgaaaagattagtattgcggatattacgaatatttgtgggctcaatcggcaaactttttactatcattttacagataaatacgatttgcttacttggacctatgaaaatgactttttccattgtttggcggatgggattacgcttgaaaattgggataagcatgtgctgaaaatgctggaatcgattaaagaaaatgctgatttctataaaaacacggtttcggcggatgcgagtatcctttctttttgcttttctaaattaacgaattcgctgtttatggatttatttgagaaaattgatacgaatggagccgtgaacgaggcagatcgggtgttttatgcggaattcttttcttacggatgctcgggtgtactgattaaatggattacgcgcggttttaaagaggctccggaaacgattgcgaaccagctatttcgacttgcaaaggatacggaatttttggcaaatagcatgtaccgcgaaaactagacaatatggctaatttgtctaaaaaccagacataagcgttcttttgcccagattaaaagcgaacgaggcgaggtatactatctgtatcaagaaattggaggagatagtgatgaaaaataaaaaacgtacgctagtcgctctaactggggctgcaattggaacaggtattgccgcaaagaaaatttctgaacaaaaggccgctgaaaaagaacgggcagtggatgaagcaattaaagcgcgctattacggtgacaaacaagtgtatttcgtcggtggcgggattgctagtttggctggggctgtttatttaattcgcgatgccaattttgatgggaaaaatattcatattattgaaggtatgcatattttaggcggaagtaatgacggagccggaagcgtggaacatggctttgtgtgtcgcggtggtcggatgttgaatgaagaaacttatgaaaatttctgggatctatttagtagtattccgtcgcttgatatgccgaactttagtgtgactgaagagattttgaactttgaccatttacacccaactcatgcgcaagcgagattagtggataaagatcgtaatatccttgatgcgcattcgatgggatttaataataatgaccggatgttgatgacgaaactgctcgctactccggaagaaaaactcgataatttaacgatacgtgattggtttgatgaacactttttcgaaacgaatttttggtatatgtggcaaaccacttttgctttccaaaaatggagcagtttgtttgaatttagacgttatatgaatcggatgatgttagaatttagccggattgatacgctggaaggtgtaacgagaacaccgctaaaccaatacgaaagcttgattttaccgttaaaaacatttttagataaacaccatgttgattttacgattaatcaaacggtggaagatattgatttcaaagatgcgcctggaattaccgcaacagcacttcatttatcggatggatcaactatcgaacttggcccggatgatgatgtgattatgacgaatgcttgtatgacagatagcgcgactcttggtgatatgaatacgccagcaccaaaacctgaagaaaaaccaatttctggggagctttggtataaagtcgcgcaaaagaaaccaaatttgggcaatccagagccattcttcggtcatgaggaagaaacaaactggcaaagctttaccgtcacttgtcatggtgataaattattaaaacgcattgaacgcttcacagggaacattccaggaagtggcgcactcatgactttcaaagattctaattggttaatgagtactgttgttgccgcacaacctcattttaaagcgcaagatgcaaatactacgattttctggggttacggattatatccagaccgcgtgggtgatttcgtgaaaaaaccgatgaaagaatgtactggggaagaaattttatatgaattaatgtgtcatttgaactggcaagacgattttgaagaaattaaagcggatattatcaatgtaattccgtgctacatgccatatatcgatgcgcaatttgaaccacgggcaatgagtgatcgtccggccgttgttccagaaggtagtacaaactttgcgatgattagccaatttgtggaaattccaaaagatatggttttcaccgaagaatattccgttcgcgctgctagaatcgccgtgtacacgttgcttgatattgacaaaaaaatctgcccagtaacaccacacaatcgtgatccaaaagtgctagcgaaagcaacccaaaccatgtttagataaagttgaaaagtagctatttgttacagaatagctactttttttgtgcgagacaggacaaacgactgatatttacgaaatagcattgcttgtgaaccataaaacagctataatctttatagacgaaaacaagacctgaaaagaggctgaacaatggaaaagagctccatttacggattaacatggacaaaattaacagaatggctagaagcacacggtcaaaagaaattccgcgcgacacaagtgtgggactggctttatagaaaacgtgtcaaaacttttgaagaaatgagtaacgttccaaaagaaacaattgaacttttaacagcgaattttgtaatgaacactttagaagaacaagtagtacaagaatctacagacggcacgacgaaatatttatttaagctgagtgacgggaacttaattgaaaccgtaatgatgaagcaagaatatggcttgtcggtttgtgtaacgacccaagttggctgtaatatcggctgtactttttgtgcgagtgggcttttgaaaaaaagtcgcgacttaactgctggcgaaatcgtggaacaaattatgaatgtacagcattatctggatggacgtaatttggaagagcgcgtgagtcacgtagttgtaatgggaatcggggagccgtttgataattacgataatgtgatggatttcttgcgtgtgattaatcatgacaaaggtctagcaatcggcgcgcgccatatcactgtttcaacaagtggtcttgcaccgcgcattattgatttcgcgaatgaagatttccaagtcaacttagcgatttccctccatgcgccaaacaatgaactgcggacgagcattatgcgtattaacaaaacctattcgatcgagaaattgatggaagcaatccattattacgtgaacaaaactaaccgccgaatcacttttgaatatattatgttaaaaggtgtaaatgaccacaaaaaagaagcgctcgaacttgcggcgcttctcggcgaacatcgtcatttagcttatgttaacttgattccttataacccggtggacgagcatatcgattatgaacgtagtacaaaagaagacgtactcgctttctatgatacccttaagaaaaatggaattaattgtgttattcgccgcgaacacgggacggatattgatgccgcgtgtgggcaacttcgtagtaaacaaatcaaacgagttggcgtgcgcgaacggatgaaacaaaaacaagcagcagcggaagaatagtatgtaaactatctggtttccatttggagattggatagtttttgtttatacttaaagtacctaaagcaattgaaggaggacaaaaatcatggaagtagaaattgtcgaacgaaatgcttttacagcggtcggaaaaaaacgaactttttcggttgaaaatgatgcgcaaaaagaaaaaatcagccaattttggcaagaagcaaacgcaaatggcgatgctgaacgaatcaacgaattagctgaattcgcaacaattgacggtattttaggcgtttgccaaatgaacggagacaaaatggactattatatcgcgattgaatccgaactcactccgccagaagacatggaaaaactaaccatcccagcaagcaaatgggccatcttcaaatcagtcggcccattaccaagctccattcaaaaagtgtgggaatacatttacggcgaatggttccacacaagtaactacaaccacggaaatgctccagaactagaagtctacacagaaggcgacacaactgctgttgattattattccgaagtttggattccggtggttgaaaaagaataatcattaacaagaacaaatttgtggatactcaaatttgttctttgtgctatttttacatcatgataaacagaggtgatttaatgacaacaattccactctcaatcccaatgactatcttatttgtagttgtttttgaactagtatacttaggctttaaaaaattcaatatttcaaaatctactttgggtacctacatgtttgtagcgtacttggctattttaacagaagtagttttattgccgtttaatctaacagctgccggagaaacctatccattagaggcttacttacaaataattcccttccaaaccatactattttatcttaaaaacatcccaaatctacacctaatgatccagtttttaggtaatgtagtcctacttgttccatttgctatttatattaatcggtttaaaaatatttctgttttaaaaaatatagttttagctttgggaatttctttaattatcgaaattagtcaaggaatcttaaatttaatcacacaatatccgaataatattactgatatagatgatgttattttaaacgtttcagggtatgtactcgcttggctcattttttcatcatttaaatcggataataaccgccctaaacctgtttcctaaaattgacattgagaatcattatcaatataatggagggaactagcctattatacatacaatacaattatccaagggggatttaagaatgattattgtaactaatacgattaaggtagaaaaaggcgcagcagagcacgttatccgtcagttcacaggcgcaaatggcgacggacatccaacaaaagatattgcagaagtagaaggtttcctaggcttcgaactatggcacagcaaaccagaagacaaagactatgaagaagtagtcgtaacaagcaaatgggaaagcgaagaagcccaacgcaattgggtgaaaagcgactctttcaaaaaagcacacggcagaacaaaagacactagagaacaaagagaagaccgcaaaggcatcgtaggaaatgcaatcgctcgttttgaagtggttcatgtgcaaaaccctgtgattgttgaaaaataagaagtgagtgaacaagccgtttcgaggtagatggcttgttttttgttttcagatgagaaaataaatacagtgcttttctttcaaaagcccctttactagcaacccacaatccaatcatgctataattctctaaatgataacgtttatcatttaagggggaattaaacatgattgaaaaaacaattatggaacgtcgcagcattaaaaaagcgaacgatgcgccaatttcaagagaaactgtgaacactattttagagcaagctgcctatgcgccttttcatagcaaagtagagccgtggaatgtatacgtattgcatacacttgctgaaaaagaacgttacatcgagaaaatcatcgaatttaatgagcgcgaacaaggggttagtttttctgaagcagaggttgcggatttaaaagcaggctatgcgaagaaaattattacgccgccttacttactcattgtgacgacgaatattattggtcacgggaaaaaggatttcgaatcaatcggggcaactagtgcatttatccaaaacattcaattacttggctgggaagcgggaattgggatgatttggcggtcgaatagatttatttttgatgcgaagtttgcggaagatttaggtattccttctgagcaaaaaattgtcggaactttgcatttaactagtttagccgaagttcctgaagcaaaaccgcgccgtcctttgaatgaatgggtgaaggatttagcggatttgtaagattgatgtttcgtgtgattagcgttacaatggtacaagtgtaagaaataaggaggcgagcaagatggcagttccagctagacgtacgtccaaagcgaagaaaaacaagcgccgtacgcataaaggcttaacagcaccaggtttgagtcgcgatagtgaaacaggcgaataccgtatgtcacaccgcatctcaccagacggcacttataaaggtcgcacaattatcgaaaaataagaggatttgttccagcgattggaacaaattcttttttttgtgatactataatggaaagagctaaatacacaaaaaggagtctgattttgacatgacagaagaatttgtgaacaaagaagatgcgctgaaaaattataatgcaaaagaatttcgtacaccagatggctatacgagtgatatgattttaactacagtaaaagagttgaacgggaaaccaacattacatattttattaattaaacgaagccttacaaacgcggaaggaaaaccaaatatggaaggcggaaaatgggcagttcccggcggttttgtcgatgaaaatgagtcagctgaacaagctgctgaacgtgaactagaagaagaaacaagtttgactgatattccgttgattccgtttggtgtctttgataagcctggtcgtgatccgcgtggttggattatttcacgggcattttacgcaattgtgccaccggaagctttggaaaaacgagcggctggcgatgatgcagccgaaatcgggctttttccaatgacagaagcgctcgaattgccacttgcttttgaccatttagacatgctgaaaaaagcgtttagtgcaattacagaagaatttttactgacaacggcgattcgcgatttcttgccggaaactttctcagcagagctactttaccaaacgttggaaggctgtacgaagccagggattttaccggatgaagtagaatttatggagaatatcgagtatttaccctatttagaaaaagtgggcgatctgtacagatttaacgcagatgctgaagcgggaagtatttatttttaaatagaaaaggagccaccgatttggttggctcctttttttataggaaatgtttttcgccgtagcgtaatgcgaaatctttaaaagctttggatgcgggtgaaatgtagtggtttttcaagcttgctaagtaaatgaaacgctcatgttttggctcattgatagagagtactttgacgttataatgcgcgagagaggagatttttggcatgatagaaataccgtaatcaacactcacaaggccaaccattgcggtatcttcctctacataacagccgattttaggttgaatatttatttcagcaaaaagagaatcaattagaggtctgaggccacttgtgtcagaaaagaagatatacgaataatctgcggtatcttttaaatcgattgaatcatatttggcaagcggatggttttcagcaaccacaatcaccagttcttgtttcgttaatggcaaaaattcaatatcgggttcattttcgacgtaggaacagattgctaggtcaaatttttcattttttaaatcaggaataattgattttgtcgcgccttggtaaaaggaaaaagtgatatctttgtgattttcagctttggtgaaattttggacaagttctggaactgtgtgtgcgcccattgtgtagataaagcctaaatcaatatttccgtgcgatgggctcgttaattcgtgtaaaagtttttcgcctttttctagttcggcgagggatttttccacataagttaaataaaagcgaccgtatttagttaaacgaatattgcggccttgtttttcaaataagtagacaccaagttcgcgctcaagttctgcgatagaatggcttaagctaggctgggtaatggataattcggcagctgcaatagtgtaatgctctttttcagccagttttttaaaatagtataattgacgcaaattcatgaaactacctccttgaaatgccttgataactctattgtaagcgattatatagaaaaaatctatgaataaatcgaaaaatatacattagattaataattattcctgacttataatgaaagagaaataagattgtgcattattgaacgtgaataatgtaacaaatcatttgctgagattatagtcgcaggaggcttattatgacagattatccgagtatttttgaaccattaactgtaaaacgaatgaccattaaaaaccgtgtgataatgccaccaatggggacaaacctagctggattaaatggcgaatttttagaagaacatatgaattactacgaacaacgtgcaaaaggtggaacaggtctaatcactattgaaaacgcttgtgtagatttcccttatggtacaaatggaacaacgcaacttagaattgataatgaccaatacattcctggattttacaaattaacagaacgtcttcataaacatggaacttgtgtatccatccaaatcaaccacgccggtgcatctgcttatccagcacgtttgaatggacttcaaccagtttccgcatcagatattccatctaaaaaaggtggtactgtaccgcgcccgcttacagtagaagaaatttatgaaatcgtaaataaatatggtgatgctgcaagacgcgcccaacaagccggcttcgatgcagtcgaaatccacggcggacactcgtacttactatgccaatttttatcgccactttacaacaaacgaacagatgaatttggtggaacgcctgaaaatcgcgcgcgtatcgtcaaattaattttagaaaaagttcgcgaggaagttggtccatttttcccaatcgtgctgcgttttagtgcagatgaatttacagaaggcggcaaccacttagaagatattttggaactgctagattattgccaagaagaagcggatattttgaatgtatcagcggcaattaatgacaacctatacttgcaaattgaccaaatgaacttagaagatggttggagaagctaccttgcaaaagcggtgaaagataaatttaacaaaccaacgattacttccggtaacattcgcagtccaaaagcggcagagaaaattttgtcagaaggatatgcggacttacttgcgatgggacgtggcttaatcgctgagcctaactgggtgaacaaagtggcaactggtcaagaagacatgcttcgaaaatgtatttcttgtaatatcggttgcgcagatcaccgaatttcgaagtcgaagccaatccgttgtacggtaaatccagatattattcatgaagataaatacaaagaaacaaaagtaactcgtcctaccaatgttgtcgtaattggcggcggaacagcaggacttgaagcagcttgtacggcggccgaagttggctgtaacacaacgctaattgaagcgaatgaacaaactggtggcttggcgcgagctattgccaaccttccagataaaagtagaattgccgatttccctaattatttagcgaaccgagcagaaaaattaaccaatttaaaagttattacaggcactaaagctgatactgcgcttattgatacatttaatcctgatgtggttgtaaatgccacaggatccaaaccattacttccaccaattaaaggtttgctcgacgtgattgacaaagaaggcagtaaggttcattcgattttcggacttatttcgaatatcgatgactttaccgaatttagtaacaagaaagtcgcagttatcggcggtggtgcagttggtcttgatgtggtcgagtacttctcagaacgtggctcggatgttacaattgtagaaatgatgccaatccttggaaaggacttggatatgattacacgactttcgatgatggatattattgagaaaaaccacgtcgatgtgcaaacagaaacggcattaacagaagtagcagccgatcatttcaaagtgaagcatgacggagtagacgccgagattccatttgattacggctttgtctgcctaggaatgcgaccagaacgcccgcttatggaagaacttgcggcttatggcaaagaaaaacaaattgaaatcgtaaatattggcgatagcgcagcaacaagaaaaatcttggaaggcgttcgcgaaggaagaaatattttaactacattagaaaaaataggctctttgtaagccgaactggcaaggcggattccgttttgccagattcgctctctatataagttcatattttcacaaataaactttaacttggaaaggaacgatgttattatgacaaacaaaatcactgaaagaatcacaggacacacagaattaatcgggttaatcgccactccaatcagacacagtttatcaccaacaatgcacaacgaagcttttgcaaaactagggcttgattatgtataccttgcttttgaagttggagacaaagaactgaaagatgttgtacaagggttccgagcaatgaacttacgcggctggaatgtttctatgccaaataaaacaaatatccataaatacttagataaactttctccagcggctgaacttgtaggggcagtaaacacagttgttaatgatgacggcgtgttaactggacacatcacggacggcactggctatatgcgtgcgttaaaagaagccggtcatgatattatcggtaaaaaaatgacaatttgtggtgctggtggtgccgcaacagctatctgcatccaagctgctctcgatggcgtgaaagaaatctcgattttcaacagaaaagacgatttttatgccaatgctgaaaaaacagtagaaaaaatcaatacaaaaacaaattgtaaagcacaattatttgatatggaagaccacgaacaattacgtaaagaaatcgcagaaagtgtgattttcacgaatgcgactggcgttgggatgaaacctttcgaaggcgaaacacttctaccaagtgcagatatgcttcgtccagaattaatcgtttcggatgttgtttacaaaccaactaaaacaagattgctggaaatcgctgaagaacaaggctgtcaaacacttaatggtctaggcatgatgctttggcaaggtgcgaaagctttcgaaatttggacacacaaagaaatgccagttgattacattaaagaaatcctattttaaaaacttgcaaaagaacaaggttatcgctaatcttaagacataatatcgaatgaggagaattatacatgaataaagtagtcgtaaagaatgttacgtttggtgaaggtgcgccaaaaatttgtgtaccaatggtcggtaaaacggttgctgctcttaaagaagaagcagaaatgttaaaaacaatcgatttggacgttgtcgaatggcgcgttgacttttttgaggacgtaaaagatttagttaaagtgaaagctgcgctagatgagattcgcgcaattttgccagaaacaccgattttattcactttccgcagtgcaaaagaaggcggcgagttagctgttagtgatgaattttattttgaattaaatgaaacactagctggcactggcaaaattgatttagttgacgtggaacttttcaatgaagaagcggatgttttacgcttaatcgaaacagcccacaaaaacaatgtaaaagtagtgatgtcgaaccatgattttgataaaacacctgcgaaggaagaaattgtttctcgcttaactcgcatggaagcactcggcgcggaccttccgaaaatcgctgttatgccaaaatctgctggagacgtactaactttattagatgcaacgaataccgtatctgaaaaagctaatcaaccaatcattacgatgtcgatggcgggaactggtgtcatcagtcgtcttgctggcgaagtatttggctccgcaatgacatttggtgctgcgaaaaaagcatccgctcctggtcaaattgatgttaatgagttacgtcatgtccttgatttactgcataaacaattttaatgaagttcgaaaaaccttaaatttagattaatcgtctaagtttaaggtttttttgttataataaggcatcaggaattttaaaggagacggaactaaatgaagaagttactttttttaggtgatagtgtgacagatgctgggtgcgattttgaaaatgaccgcgaattaggacatggttatgtgaaaatgattgcagaacagcttgagaaagaagatgtaacggttataaatcgtggcgttagtgcgaaccgggtggcggatttgcatcgtcgtattgaggcggatgcaatttcacttcaaccagatgtagttacgattatgattgggataaatgatacgtggtttagttttagcagatgggaagatacttcggtgacggcgtttaaagaagtgtatcgcgtgattttgaaccgaattaaaacggagacaaatgcggaactgattttgatggagccgtttgtattaccatatccggaagatcggaaagagtggcgtggtgatttagatccaaaaattggagctgtacgcgaacttgcggcagaatttggtgcgacgcttattccgcttgatgggctaatgaacgcgctcgctatcaaacatgggccaacctttttagctgaggacggggtgcacccgaccaaagcaggacatgaagcaattgcttctacttggctagagtttacaaaataacgctttacagaaaaaattatccatgctatagttgggtctatgcgatgagcctacaagcagtgacttaagtatcactgccccattttccgcgttatagctttgtggaaggctgcggaagatgacgctatgaaatgccccttaaagtaatttaaggggcatttttctataaaaaaggagtgtttgttttgcagaaagaaaaagcaccaataggactttattttttattaattgcagtgatggcgagttggggttttaacgtaacgatgacgaaagtattagttagctattttccgacagttacgatgacatctttccggattttcacagcagcgattaccgttattattattttatttatcaccaaaaaattacgtctgcctacaaagcgggaatttggcttgattttcctcgctagtatttttaatattgttattcatcattttttcttgtcgaacgggttgaagctgacgactgggacgaatgctgggcttattcttggttctgcgccaattgtggtggcgattttttccgtggtttttctccgtgaacgaattggggcatggcgtgcgctcggctttttagcagggatttttggcgtgagtttggttgttctttctaatggaacgggaattagcgggatttcactgggagatatcgacatctttatcgcgatggcttcccaggcatttagttttattattattaaaaagctcgctggatcaatggacacgggtctgatgacgggatacatgttatttcttggttcggttatgttgtttgctttaagtcgcttcatggagccgggaggcgtgtcagaattagtggcggttcattcatggaaactgtggctcttgtttgttgtttcagctgtagttgcaacggcatttggcaatttcgtttataattatgcggttgggaaaattggaccgtcgcgctcggctatttttatgaatttcaatccattattttcgcttattggcgcattgcttttccttggcgaagctattaaaatcccacaactagtcgggtttgtttttatcattattggcgtcctgcttggttcgggcgcattaatggatcttatttatgaacgcaaaaaaacaaaagtacgcgatcctgaaaaactgctcgaaaaagaagtttgacttttattgacctttatattataatttggttagttacttattaaaagtaactcgataatgataggagggatagcatgaaattgttattaaaaaatattaatgaacttgctgcaaaacaaaaaagtgaaggattaactgcttttgaaaaagaaagacaagctgcccttcgtcaagaatatttgaagaaaattagaggaactgttcaagataatttgcatcacgtaacaatcattgatccacttggagacgatgtaactcctaaaaaactaaaagaaatccaagccgaattaagaggctgatataaatcaaaaggttgaaagagctcattgctttttcagcctttttttgttgacagagctaatttaccatcttgcggagtcaagtagagaaaaatggtgacgaacagtttaacattttcggaaatactggtgctacaatcaaaatgagaaaggagaggataacatggaaattgcaatcgcagctgaccatggtgggtttcagttaaaggaaaaagttcgcgcacatttaattgaaagcggctacaaggtgaaagattttggttgttattcattagagagcgtggattttccagagtacgccgctaaagtagggcacttcgttgcaaccgaaaatagtttaggtgtactttgttgcggaacaggaattgggatgtccatcgcagccaacaaaataaaaggcgtgcgtgctgctgtcgtttcagacacattttcagcaatgatgacgaggcgacataataacagtaatgttctttgtcttggtgaacgtgttcttggcgatagtctggcgttactcttacttgatacctggcttgcggcggaatttgaaggtggaagacatatgacaaggctcgcaaaattggcagagcttgaggaacaggaggaagtagaatgaaaatgattgcggcttccattatgtgcgcagactcgcttcatctcgctgacgaacttcgcgccctcgaacaagcaaacgtaaagatgctccattgtgatgtgatggatggtgtgtttgtaaaaaatgcagcgatgggcgcctatgtccttcaagatataaaaaataatacagatatgttgcttgatattcatttagctacagtgaatcctgataaatttgtggatttgtatgcggcgataaagccagcttatatgtccttccacgtagaagcttcacctgatgtcgatgcgactataaaccacattcgggagctaggaatcaaaccgtccatcgccatcagcccggatacagaaattgaacagatttatccatttttagagaaagtcgatatggttttaatgatgaccgttaacccaggattcgccgggcaaaaattccagcatcatgtactagaaaaaatcaaaaaacttcaaaaagagcttgaaagccacaccaataaaccattaattgaagtagatggcaacatttttgaagaaacagtccggttgcttgaaccaattggcgcagatgtctatgtcgttggaacagccgcattatttaacgacaaggcaggtagttatacagaaaaactagcgccacttagagaaattatccaagaaaggtgagggaaaatgcatttagattcagctaatttagaagacgtgaaaaaaattcaaaccagctccatttttaaaggaattacaacgaacccaaccattttattaaaagaaaaatgtaatcgagaaacagcgattaagcgtattttagaactaacagataaacaagtttttgtacagacagttggttttacctatgaggaaattttggcagatgcgcgcatgttactagctacatttgggaaagacaaaatagctattaagattccggcacatgaggctggtactaatgtgattgatacgctcaaaaaagaggataaagccattcaaatcttaggaactgctatttattcggctgatcaagcaatcgcggctgccttggctggtgcagattttgttgccccatatgtgaataggatgagcgcagcgaacatcgatccttttaaagaaattgctgggatgcgtcgtttttttgatacaaaggcacttaaaacacaaattatggcagcgagctttaaacatagcgggcaagtaatgcaagcctacgaaagtggtgcagatacggtaactattccttatgaaatttatttgcaaatgaccaataaagttttagcagtagaagcaattcgtgtctttaataaagatgctacattgtacgaaaattaacaatctccttctcatgttgtggaagtgtgtggagaaaacttgtgatgaaagcgcattcttaagcgccaaaccctatgctataattaggctatcaaaggggggagacgcatgtatctggataacagaagtaaaacactatttcaagaagtcataaaaaatccgaacattacaaataaacaactcgaagtaaagtataaattatcgcgttaccaaatcagctatagttttcagaaagtaaacgaatggctcaagtggaaaaattatccagaagtaaagcgttccaaaaacggcagatttatattagaaccagagcttacagcgctattttctgagaaagaaactcgagatccgagcgtagaatacttaccttctgaaaatgaacgtgccaatttaattttgctgatgcttttaacagcaaaagaagaactatccctcgcccattttacaacgaagattcaagtaagcaaaaacaccattcttcgtgatttaaaagtagcgcaaaaattacttcctaaagaaacaacggtcacttatagcagagcatcgggttatcagttggcaggcagtgagtgggaactgcgcaaggttctgacacaagttgttagtagcgtgaaagagatgtttcgaggagagcactatttcctatcgtattcagggattgaaaaagtccaactaatggaaattcgccgcacactcgaagaagcagaagcgatgatgcaaataaaattcacctatgaacaaatcgaattactaccctatttgctatccgtgatgttcttaagaatcagagaccggcgcttaatcgacactgcttttcatattgacgagaaatcactttcagacacgagagaataccacattaccgatattttgctcgaaaaaactggcccagttccagaacaagagcgacttttcatcacattacaacttcttacaacaaacatcttttccggcgaaatcttaactgaaaaattaacagaagacttggaaaaagttgtcctcatatgcttagatctattcgagaaaaaagcacttgtttcacttaaaaacaaacatatcttaattgaaaaattactcttacatctaaaaccagcctattaccggattaaataccaaatgaatttagaagatacactttatgaaaaattcaatcaagaattcgaggcgcttaacttcattgtgaaagaagcttttgacccacttgcgaaatttattggtcgcgaaattccggcaggtgaaatattctttatttctttgttcattggcagcgatatgattccgcaaaatgatatttatcataaacaaaaacgtgcgattgttctttgtccgagcggggttactttttcaaaaattatggaaaatattttagtaaaactattcccggaaatccatttttatccaactatatctgttcgtgaatacgcctttttcaaagcagaagtagatattgttttttcatccattccgttaaaagatggcgaaaatgtctttgttgttcaaccatttatgaacgatattgaaaaaacacaactaaggcaacaagtgctacaaaatcttttcgggatgggaaatcagctcacaaacattgataaaatcatggaagtcgtagaacgtaacgccgatataaatgatccaaatgcgatacgagatggaatcattgatattttgtcagcgaatacagctacaaatgaaaataaacgtgtgaaaaaagtctatttacatgatttaatcaccgaagataacatcatgatttgtgaggatgttaaaaactatcaagaatcgattcgtctagcgagtcagccgctgctactgcaacaagcaattacagcgaactatgtaaagaccatgattgataaccataaattccacgatccgtacattattatcggtgaagatattgccattccacacgcaatgcctaatgcaggggtaaatcgactcgctatgtctcttttagtcgtgaaaaatggtgtatatttttcagaaaccgaacaagttcatttcgtaatagtcattgcgcccgtggataaagagcaacacattgaagcactttaccaaatcgttcatttagcagagaatcaccaaattctagatgatttgctcgaaaatgtaacgaaagaaaaagtcatgcaaacaatcaaccaattagtaattagagaggatgaataaattttggataagcaagctattttagataatattcaccaaacatggcaagaagaagcaaatgcgatttcccgtttgccggaagtaacaagtgaagaggctctcgttaaaacggttgaaacaatcgccgagtgcacaggaaaaattgtcgtagctggttgtggaacatccggcgtcgctgcgaaaaaattagtacattctttcaactgtatcgaacgtccggcagtctttttaaccccatcagatgctgtacacgggactctcggtgtacttcaaaaagaagatatattgattctcatttcaaaaggtggaaatacaggcgaattacttaatttaattcctgcttgtaaaacaaaagggagtacattgattggtgtaacagaaaacccagaatctgttatcgccaacgaagcagatatctttttcccagtaagtgtaaagaaagaaccagatccttttaatatgttagcaacggcaagtacaatggctgttattgcaagctttgatgcaataattgtttgcttaatgacctatatgaattacacaaaagagcagttttcagtcatccatcctggtggtgccgttggaaacaaattattaaataaataaacaagcagccagtcggagggatgcaatttggatgtattagaatattttaaagaagaaatggttcgcttttcaaacgaacaaaataaagaaaaattacttacggaaatggctgaacagttgtgtgaagtaggcgctgtaaagccaagtttcaaagacgccgtaattaaacgggaaaaagtttttccaacgggattactaaccgctcatgctggagtcgccattccacatacagatagcgaacacgtcattcgtccagtaattgctgtgcggatacttaaggaaccagtttcttttattgaaatggcctctgataacgaagcaattgatgtgagaattgtctttatgatggcgctgaggagtgctgacgaacaactagatatgctacaaacacttatccaacttattcaagacgaggaggtgatgacgaccttacttaaagcgcaagaaacgggagatgttctctcagcaatagaacatttttctaagaataattaagggaggtcgggaatagatggggagtttttttgcaagttttgtagactggctaataggaagtccaggtagatttgtcgttaacttaattgaagataatatgttaattttcatgttcgtagtaatgatttacgccaccaccattttatacgccaagtggacactcgcatactacttaccgaaaaaaatgagtcagttagcagaaatgaaaacgtgggaactggacgaattatatgcagcgtggcaaacagagaaaaaagctctaccatggtatattcttgttccaagtcgcaatgaattttgggtgaaatctgcccgaaacgcaccagaatcaactaaattactccattttagtcagcaaaaattaaaactaagtgacaaagaaaagttacaaaaaatcatagaaattcaatcttgaggtgataatagtggcaaaaatagttccgtctgtttttggagcagacatcggcagaattaatgaacagttagaggttctagagaaaaatggcattgatttattacatgtggatatgatggatggctcattcgtcccaaacattgcttttgggcctgatcaaatcaaaatgatgaaaaaaggcacaaaacttcaatttgatgtgcatatgatggtgtatgaaccagatcgttatattccaagattagtggaagctggtgcccatatgattacagtccaccaagaagcgacaactcatttacatcgtacaattcaactaattaaaagttacggagtgcgcgctggagttgtgttaaatccaggtacaccaccaagcactctagaatacgtgttagatgatattgactgtattttgcttatgactgtaaatccaggcttaggtggccaaaaattcttccaatcaagtttagaaaaaatcagaaaaaccaaagcgtatattggaaaccgccctattcaaattgaagtagacggcggagtaaatgacgaacttgcgaaagaatgcacacttgcaggcgcggatttaatcgttgtaggatcttatttatttgaaggagatatcgaagcgaatttggagaagttatcgaaaggagttttaacagaatgaaagctttaaaattatatggaaaaagagatttgcgttatgaagacgcagatatgccaacaatcgaacaacctgatgatgttattttgaaagtaaaaacggttggaatttgcggatcagatatttcgagatacagtaaacttggtccgtatgtaccgggaatggtgtggggacacgaattttcaggagaagtgattgaggttggtagtgcggtaactgatattgaaattggtgatagggctgccggatgcccagcactctattgcggagagtgtgaatactgtaaaaaaggcgaattcgcccgctgtcggaagctaacagtaatcggagcaagacatcccggagcctatgctgagtatatcaaacttccagcagaaaatgtagtaaaaataccagacgaattagattatgaagcggctgcacttgtcgagccttctgcagtggtcgttcatggattttatcatacgaaattacaagctggcgatgatgtcgtcgttgtcggaagcggcaatatcggtttgctagcaattcaatgggcaaaagtttttggcgcaagaagagttattgcgattgatgtagacgataaaaagttagctcttgcgaaagaagtgggagcagacgtagttattaattctttaaaagaagatccattagaagtagtcgcagcacatacagatggtctaaatgctgatttagttgtagaagccgcgggatcacctattacatccgctcaagtttttgcctatgcgaaaaaaggtggaggcgtcgtgttcctaggaattccatatgctgatgtaacaatcgaacgtttctattttgaaaaaattgtgcggagtgagcttacagtttggggttcatggaacgcaatttccgcaccatttccaggaaaagagtggcaaacaaccattcacttcctagctaacaaacaaatcaacattgagccaatgattacacaccgtctttcacttgctgaaggaccagaagtttttgagcgaatctatgaaagaaatgaatttttcgggaaagtactatttttcccagaatgatagggggattttaagatgaaaaagaagagaatttatgtatgttgtgggacaggaattgcgacttccacagttatttccaaaaaagtgcgtgcggtattagatgaaaagcgcattccatatgaaattagtcaatgcacggttcaagaagtagcgtcaaaagtaagcacatctaagccagacattattgttagttcaacaacagttacaggtgatgttggtgatgtaccagttgtcattggaagatcatttttaactggccttaaaaaacaagaaacaatcgatgaaatactcgcgatacttcaagattaaagggagggcacaaaatggatattattctagatttctttaaatatattatcgggcttggtgtaacagttatgatgccaattatcattaccattctaggtgtgattttccgcaagaaaattagtgtagcttttaaagcgggattaacggttggtgttggttttgttgggctaggcgttattacttcacttatgttaacgaccattacaccagttacaaaagcactggtagagaactataattttaaattaaccgcgacggatattggttggggagttggctcgtcactcgcatgggggactgaagtagtgccatttgtttttgtagcaattattgcaactaatattttaatgattgcctttaaatggacgaaaacaatggatgtggatatttggaactactggcagccgctttttatcgcgagtgcactttacttaacgactggtagtatgattattgcgattcttagttcgattattaatatggcaattattttcaaaatcgctgactggacgcaaaaagatgtggaggatgtattaggtttggatggaatttccttaccacaaattcaaacttctgggtgggctcttgttggttatccgatgaactggttacttggaaaaattcctggcgttaggaaaatcaattggtccacagagaaagttcaaacccgtttaggtattttcggcgaaccaatgctgatgggcttaattatcggtggtggacttgcagcaattgcgcaaatgccactaagccaagtattgcaaactggagtaacaattgcagctagtttagtacttattccgcggatggtttcgcttttaatggacggtcttacagttatttcagaagctgcccatgaattcatggaaaaacgttttccaggtcgcgaactattcatcggactagattcagcggttgggattggacacccatttgtactttcacttggactgttaatgattccaattactttaatcttagcgttcattttaccaggcaataaagttttacctttagctgatttaacggcattaccattctatatgatttttgccattgttccttcaaaaggtaatttgtttagagggattttcacaggtattgttatcgtcattattaccctctacctatcaggcgcagcggcaccactgatgacggaacttgctggtcaaatcggctataatataccaaaagatgctgtagaagtaacttcactagctgtagggactcagtggtatacttggattgtatattacggacttcattggttcggcggcattctttaattgcaatatagtgaaacaagcattagttcacgctaatgcttgttttatttccgggaagaatttttagctagtagacaaccctcagacagttctatataataataaggagaagaaattagtacggcggaaggagatagcaatgacaggcaaaatgaaacttttttctgtgacgagtgagagaccacttgcgacaaaaattgcagattatctagatatacctttatgtgaggtggagctccagaagttcagtgatggagaagtgaaaattaatattgaggaaagtatccgcggaacgaatgcgtatgttgttcaatcaatgaatgcaaacgtaaatgaacgtttaatggaacttttaatcatggtagatgccttaaaacgcgcttccgtgcactcaattaatataattatgccttattatggctatgctcgtcaggacagaaaagcacgctcaagagaacctattactgccaaattaatggcaaacctaatccaacgtgcgggagcaaatcgtttaattacagttgatttgcatgcagctcaaattcaaggctttttcaatattccaatcgatcatctttcagcagttccacttatcggtgattatttgattgaaaaatacggtgaagaggacgtcgttgtagtcgcaccagatcatagtggtgttgttcgtgcacgtagaattgctgatcgattaaatgcgccaatcgccattttaaatcgtaaaccaagaccgcacgaagatgagattatgagcgttatcggcgacgtgaaaggcaaagtcgcaatcgttgtcgatgatattatcgataccggtgtacgtgccacaacttcagctgacattttacttgaaaaaggggcagtagaagtaatcgcgtgcgcaacccattcagtcatggctggagacgcgactgaacgcttgcaaaactcaagaatcaaagaagttattacatcggactccatcgaccttccagaagaaaaacaattcgaaaaactaaccacgatttccattggacgaatcttaggccgcgcaatcgaaggcgtccaagaaaaccgttcattgcatccgttattttaaatattaaactcaaaaacagtaacttagcatagtgctgtttttttgtttttagtaaactgtcgaccagcagtagcgtaaaaattccgaagaccgacaggaagttgtgaatgcttggaggaagcagagtttggagatatttgctttgaaaaagtatactggtaaaagtagattttatctgatttggaacaggtcgacagaaacagccttttgaggtaagatgggagtaagaagaaaatcgcacgggttttagttacttattgtgaaatgtaaattttatatttgttagttgaactagttatttaaaccagttttagttactcactatgaaataaaagcccaatatataatcgttgctcacatttaaaaattacagttttaaattaactccctaaaaaatgcctttaacaaccattgacatttaccaactctctcaaaaactcaaacataatctggaggacatcaacatgaaaaaagttctaatgccacttatgcttctcgcagttttattctatgggtgtacatcacaaaacgaaggagtaacgaaagaaactgccatttcgaagacgtttattatacgggcggactacgctattccagcaaatttggatgaactagtagcgaacagtgattcgattgttaaagtgaaatttctacagaataaagacatcggtaaaaatggaaatacgattagtgaagtagagattttgaaaaactataaaggtaattttaaaaaaggcgaaaaagtagatatttcggaaccgtggtatttaagtaatgataaatatgtcgcggttgaaaactatattgcacttgaaaaaaatgaagaatataccttgtttctaaacgagggtgacgataaagtaagttctatagttagcatgggttatggtaaattcagtgaaaagctccaagaaaaacaaggcgttctggcagattttgacaaacttggcgaagttcaaaaatacgattttatttccgaaagtaaggatgaagtaaagaattaccaagcaatcaaacaacaagttttcgaaaaatatcaagattcaaagtaaaaaaggcaaatggtttagcctagttgcggaaaacttaaaattccgtcataatagaaaaaaatgacgggagctgataaattgattattgatgtattgcaacatgtgccgcacgaaggacctggacttatagcgaattgggcgagagaaaatcagcatcagttaaagatacatacgttatttgaagaaaatgaacatgttccaaaagactcggattttttaattgtgcttgggggaccgatgggaataaatgatacagctgaatttccgtggttaaaagacgaacgtaagctaataaagcgattaagtgaacagcataaacccgtttttggtgtctgtctcggagcacaacaaatcgcagcaacattcggaagcgaaatcactgtaaataaagtaaaagaagtaggctggtttcctgtcaaaagaacttccgataaattatcattttttccagaatcattaaatgtgtttcactggcaccaagatacgtttgcgttaccagctggcgccacgcgtttatttgctagtgagggttgtttgaaccaagcttttttgtacggtgaaaatattatcggtttacagtttcattttgaaatggaaaaagcggggattgagacgattttgcaaattgatgaggcgtttatcacacctggaaaatatgttcaaagcgtggaagtgatgcgagagaaggatgttccagaagataataaacaaatgcttgaggctattttagattatttaataaatccaaaaaccatctgacgagaaagtcagatggttttttctttaatatccagtttcaacagaagcattgacaatatacattaagtcgttcttgtcttctttatcttccaagaaaatgccgcttgttgtcatcatgccgccagccattttttcgattgttaccgtaccataagggataattgcgcgaatagtatcttcgtctaatttatcagcatcgcatggtaaagctagtttgatattcactaccatgttttgtaaatcgccctctggaaggagtccctgaatcccgggcatcgaattagtgaaaatcgcatttcttacagcgcgttcagccgctttagttatattttggccgtgtacatctacaccaaagccagtttgaatgaataaaatttgttccataattgtcactccttaaagtcttttattaaagctgcaccaggtcgattttttgcgtagccttccatcacttcggtaaaatgtaagccatcagtatcagaggaattagcgaatatttctgccatctgttttcgctgtgcagcaccgagttcgttttctaattctttacccgctgtggtcaagaaaatacagcgttggcgtttgtcgcgagtgccttgttcaattgtaagaagttcgcgatcttttaactctgcaagtggctggtgtaaggcttgtttcgatatttctaaaaaggttaaaagttcgttaatcgtaagtccaggcatccgtgcagtaaagaacaaaatgcgatgatgtaatctttttagtgaatgtttggcaataattaaatcagcggtctctgtaaatgctttatagccgaagtaaaataaagcgatttgttgattcatgttttgctcattgttcataaatatacccctttttctgtcaatatcaacagtatagcataaatagggcgaaggaatgatggtaagcgcactacttttttccaataaaaaagcttgttttttaagctgaatttgataaatttttaaataaattggaaacagaaagtgtaatattagtatttgtgaacgcatatttgtgtacaaaatgttacgttaatagaattttcaatctttttatttttgagaaataaaacgctttctttattgatttaaagcgatttgtcaatattataaactgaataatatgaatattaaagcaaatcaaacgtgaaatattttacgaaaacgtattgagagttaatttttatgacgttatactttggaaagaaatcaaccattaaggagattataaatgaaaaaagttctaaaattgtttctcgtaactatttgtatgtttataatgatctatcctacaacggcagttcatgcagatgaaacatcagatgtcgttaatattcctgatacaaacttaagagcatatctgaatggactactcaaacaaacgacgaatgctccaatcactaaaagccaactagcaacaatcaaaaccgttactctttctggaagtaattatactgatcttaccggtatagaagaagcggaaaatcttacaacactgacacttaacaatacaaacattcaaaccctagagccaattaaaaaccaaacatctttgacttacataacggttagtggtgacaatgtgaaagatagcctttttgtagatttaaacgggctagttaatttacagagcttaagtatcagtggcagcgaagtaacacataatgtttttaacaattttaataaattaccgaaactaacctatctgtacgcacaaaattcaatgaaaatcacggatatttctgcattagcctctttgccagcattaacaacgctttttgtgcaatttgatggaattgatgattttcgtcctttaaataattttgagagttttaaaaatggtaacttaaaagctttagcagcatttggacaaaataccgggcggacaaatccgcgcatcacgcttaaatcaggcaaacttgattttaacgaagcaaaccaaacgttatatttaccattttcgatgatgccaaagccattaactagctttgatgggacagttgctcctttttctaagtcaacctctgcaagtaacacgtatttaggttttaacgatgtggcacttccaagttcacgtcttacaattacagatgatggcattacagtaagtggcgtaacgaaagaagaatttgataaccttgacgaaattgaatataatgcacgttatgactttccaactggcagctatccgacaccaccaagcatgacttcatatacaatctccagcggaacatacgatcagtattttgatattagccacactttagatttaacagctgatgaaagttttgactataatcaatacgatgcaacaaccgaagagcaatttttaaaagatgttcatgctaaaacggacgatggcactcttgtccaaagtgactttaaccaagtcgtaaaactagatgtaccgggcgaatacacggtcacattaaacgcagaaaatgctgccgggctaaaagcaactcctgtgacagtaaaagtaactgtacatgaaaaacctgttatcacagcagatcctactatttcttataacaaagcaacaactaaatcagtcgacgaatttttaaccgagattcattcagctgtaacaggaaacgcgacacttacaagcgattttaataaagtagtagatttaaccacaccaggaaaatacaccgtaacattaaatgctgaaaatgagcgcggccaaaaagcagatcctgtaacagttattgtgacagtcactgatgcggacggcgaaacagttgacccaacaccacctacacctgaagaaaagacccctacacccgaagaaaaaccctcaacgcaaaatgaaaaatcaccttcagaacctacaaaaaacccagacatacaaagtgaaaacacagaagaacaagttactgtgcaagaaaaagcaaataatactacattaacaactaatgaaaatgtaagaacaaaaacaaaccagccaaaaactaaagcacttccaaaaaccggagatgctggattcggcactcttccgttagtttcagcaggagcaatgcttagtttgacggcactcgttcttttcagaaaacgcaaatcttaaacatctgaaatgaagcctaaaattatttttatagggtattgaatactataagaaaagttgtaggaggttataattatggaaaaatatcatcgtattcttgtagctgtagatggctcggaaccagcgaagttagcctttgaaaaaggattagaattagctctgaaattagatggtgttcttggtattgcaagtattgttgatttacgagctttttctccaaatgtttcttatgatggaagtttagaagaaaaagcggaattagaactaaaaacgagcgtaaatgaatatgccgacattgcaaggagagctggagtggcgaaagtagaaacttttgtagctaaaggaaatcctaaaatcttactatcgactgatattcccgcagaatttcaagcagatttaattatttgtggagctaccggaatgaaccgggttgaaaaacttgtgcttggtagcgtatcttcttatattatggcccatgcgatttgtgacactttaatagcaagataagaaaagagtagatactttcatctagaaggtatctactctttttgttttatcaaaacggatcaaagtacgtatattccgttactccacctggaacgggtttactgatacgagttagttcattaactattttcttagcatcttcaccaaatactggaagaggctgatagttgttttctgttgtgctaccatcggaattttcgtaagtaggaacaatagaaatattttttaaaacaattttattagcttcttttgtaaaacgcaattggaacatcgaggtcatccttgaaaggagagttgggtccgcgccaaaagcaaaatcgcccatactgtatacaatatatttatctttatatttttcgatactttccaggcggtggggatgagctcccataattatatcagcaccagcatctaaaatagcatgtccaaattgagtttggtagtttgttggagtttcacgatattcgacgccccagtgcatattaacaataacgagcgtatcttcttttttatattttttaacgtcttttacaattctttcaagataggctggagactgctgactcattcgacaatcgtaaccaagcatcacagttttcattcctttaatcgttgtttcaagcggtgcatcggaattaaaaacaggaatattattatctttgaaagcttttaaagtatcatcatagccaacttgaaagtagtctttagtatgattatttgcaagattcgctgcgtccacgccactcgctggtaaaaaggctacatgggctggatcgcttttaatgcgccactttttattttcagctttcgtagcatttgtaaaagcactttcggcattaattactgtaaagtcatcagatttaaaccaaggaagacaatttttaaaaacatacgtattagtaccattattttttttgaatacattatcaaattttaggttttctggtgtttctggataggtgccaaatgaattatcaccaaccattgttaacgtaacgacaccgttttcttttaatccttgctcgttagctgctgctgctgcataaaaccaatcatattggcttgttttttctatttcagttgatttttgttcgcttaaaagaaagttaggatatacttttccaagcgctttttcatcagctttcccagtgctatatgattttacggcttctaagcatgcttgcaagtttttgatatagtcactagattcatttttttcggtagaatagttgttcagctctttaattaattgattcaactcagaaagggaagctttgtcggctcctgaatttgctagggaacttaaggttttcttcgtttttgctgagattgttttgagattagcagggcttatttttttttgagtggtggtttgggtattattttgttcgggtttgtgggtggaatgagtaatccaaaaaactcctgctatcaagataaatgcaaaaccaatgataataaaagtaagtgtcttcaactagatgccctccatggtttcattttcactgagtacatgattttgtttaaagtaaaagcccaaaataatttgggcttttacggtgatttttatttagaacctttttctacatagcttaaatcatttacatcgccaatagtgaatttaccatctttgtaagtgatttttgtaacacttgcatttttaattccagctggtggaagtttatatccaggttcaattgtatcaagaagcgcaccaatacttaagccgtgggaaactagtaatacattgctgtctccatttttgctttctttcttagcaacttctgttaaaccatcttttagacgagcttggatagttgcgtaatcttctgcaggccagttttcgccttcttttacgcgagttttatcaagagcagctacactatccgcaaatccttttggagagataccagctttttgccattcttctaaagttttaccttggcttttcgcaatatcagtccacatattttcatttaaatcgccttcataagaaccaaaattaaattcgcggaaacgttcatctgtttctacttttttatccgcagatttagcactttctttcaaaattaagtttgcagtttggatggcacgaccgctatcactactatatgcagcagagaagtcaacgtctttcaagcctttaccagcactttttacaacgtcttccccagctggagtaagaactgcatctgaccaaccttgtacacggtcagttgtatttaacattgttttaccgtgacgtacaacataaaaagtcacagtaccatcttttttagtttctttggatgctttgtctgcgtttgagttatttccacaacccgcaattagtagtaatgcacaaaacaccatcattaatttcaaaatatttttcttcatcttattctcctttttgttagtatttagcaaaataaaaacctagataaatcgaaaaatagcccaaaaagccaattctccatttatctaggttatgcccaagttggtaacattcctgaataaggatatttatttatagctcgattttagcatgaacggaaagcgtttacaagtctgtttttaataaattttaaaaaataaatgaaactctgggggataaagtggcttaaatgctagtggtttaacgtgttaattagttggaaaatttactgtattttacattttaaagatgtctgaagtattacttttgatgctttatttagtacggtttgcgttgtgtttatttgctaaaggtattaagaattaactatcatgagacataaaaaaagaccaggatacaaatcccagtcttttcaaaactcttctaaaccaacaaaaccacaaccaacgccaaaaccgccggcaagccctgtttcaccaaaattcccttagaagaagtcgccccgccaaacagcgccgccacaacgacacaactcaaaaagaaaatctgcacagtttccgcaaatcctgctcccgcgaaaaacaatccccacacaagtcctgccgcaagaaagccattataaagcccttgattcgcaaatagtgtctgtactttcttattcgcaagtagttccttctccacgccaaacgtcttggctgcgaggttggtattggcgaaaaacatttctaaaatcattatataaatatgctcgatcattacgatgaaggttaaaataaatgctaaaatggccataaataatccctcttttctactccgaagtatagcatagcttgtaaatttttcgtaaaaataaagcttgaaacgttgacttattggcaaaatctccgtaatatcaaacgtagactacttatttttggtctgagaagggggaaattatatgcagcaagaagcaacaggtgggcagaagattcgcccaataccaattattgcctcatttttgatggctggttttattggactattcagtgaaactgctcttaatatggcgcttagtgatttgatacaggtgtttgatattagttcagcgacagtgcagtggcttacgacaggttatttgctaacgcttggaatattagtgccgatttcgggattgcttttacaatggtttacaacacgaggattattttttacagcagtgagtttttcgattgcaggtacgctgatcgcggcgctttcgccaacgtttgcgatgttaatgattggacgcgtagtgcaagcagtaggtacggcgctattactaccgttaatgtttaacacgattttactgattttcccagagcataaacgtggctcggcaatggggatgatcgggctggtaattatgtttgcaccagcagttggtccgacaatctcaggacttattttagaaaacttaacttggaactggattttctggatttccttgccattccttattattgcattattattcggaatgaaatttatgcaaaatgtttcggttgttacgaagccgaaaattgatattttatcgattattctttcgacgctaggttttggtggagtcgtatttgcctttagtagcgcgggagaaaatggttggggaagcgcgacggtattagtttcaattatcgttggtgggattgcgcttggactctttgtttggcgccaactaacaatggaaaaacctttgatggacttgaaagtatttaaatacccaatgttcacattaggacttattttagtatttatcagctttatgatgattctttcgacgatgattttactaccgctttacttgcaaaatagtttagcactcgcggcattttcggcgggattagtattacttccgggtggggtgttgaatggtttaatgtcaccatttactgggcgtttgttcgatgcatacggtccacgcgcacttgttatcccagggtttatcgtagcggttattgcactatttttcttaacgagaatagaagttggaacatctgcattaactatcatcgtgcttcattcggtattaatgattgggatttcgatggtcatgatgccggcacaaacaaacggattaaaccaattgccgccaaaattatatcctgatggcacggcgattatgaacacgttgcaacaagtttccggcgcgattggaactgctgttgcgattacgatcatgtcagctggacaaaaagcttatatggaaacagcgcaaggagtaggaccagagcaaatgattgcttcacttacagcgggaattcaaaatgcctttgtctttggactgattatggcttgtattggtcttctgtgctcgttatttattcgtaaagctaaataataaagtgaagagaacttctcgtaatgagaggttctttttttgttttgacaaataggttctgagtggttaaaatgatagtaaatatagtttataaagtttatttaataactttacggatggagcggttgatgatggcaattcctcgtgatttaaaagaattgaataaaaaaaatatcaagtcgattttacggcaacaaggtgcgatgacgaaagcggaaatcgccgaagtgactaggcttagtgtagttacagtgaataagttgattcgtgatttagtggaaaatgaagagattttagaacaagataattcagttgcgactggcggaagaagagccgtttcgtataaaattaatcctaattttcagcaggtgttagttattagtttgcaagaaaagtggaagaaaattacttattctttttcggtctataatttgcttggtgagccggagtttgtggaggatatgtctggagaggatttggacattactgcgctgaaacggaatacgaaagatcttgtttgcgcttttccgaagatttcttgtgtcgtaattggggtgccgggaattgagattggcggtaagctgcgcgcgatggattttccgctacttttaaatgtgcaactacgggagactttggaagcggaagtgaatttgccggtgttggttgagacggatacgaatgcggcaattttagggtataaaaatcggccggtgaaagaggagaatatcgttgggctttattatccggagcgttttccacctggtgcggggcttttgatgaacggcgagattttgaaagggcagaatgggctcgctggggagattaagcatatgccgttacaggtggactgggataattttgacttttcggtcgatgaaattaaagcgcatattcgtaaaatggtgctcctcacgatgagtttttacgatccggaaacgattgtgctctatacaaatttttattttgggcagaaggattttaccgaggaactgacggaagagttgaagcaagtttatccgtatgcgactttgccgaaaattgtgttgtcgcgtaagtttacgacagattatcggattgggcttttggcatttgggattgattatttggagaataatatgacggattggcggatataactttggaaagaaaatgctctagatttttagagcattttctttattattcaacaaataattttaagtctatgaagaaaagagtaataaaatatagttaagtagctgaattgatataatttttaaacaataactttaatacgtgatataatgacaagtgtaaatgcaatacttacactgaaaaacagcataagctaaattttttatgggaactatgaagtatgatatagagagaattacagtaatagttcataacaaaattgcgaaaggacgtatttatgtggcagaagcaaaatttgaagcagctttaattaaaaagcttgaaactgaagggtggacttatcgggaagatttatccaatgttagtattaaaaaacttgaagagcattggcgtgatatcttaaatgaaactaacgcacataaactcaatggagtaccattgtcagaaattgagtttggattaatccttcaagaattacaacgtattagaacaccgtatgatgctcaattattattagtgggtgcaggtggagtaggttcaattcctattactcgtgatgatggttcaagcttggaagttgaaattttttatgaagatgatgtagcgggggggcgctctcggtatgaaattgtcaatcaagtaagatttgataatctatctgaaggattaacaacaaaacgtataattgatgtagctttacttattaatggaattccggtagtacatattgaagaaaaagatgagcatttgcaaaatcagtggcgagcttttgaacaactcaaaggttatcatggtgacggactgtataaaggattgtttgcttttgtacaagttcaagttatcatgagtcaacattcggcacattattttgctcgtccaaatgcatttgaacaatataataaaacttttgtgtttggctggcgggacgaaaataataaagatattacggatgcatttgaatttattcatcaagtaatgagtatccctgctctccaccgcttagttacagttaatatgatcccggatgcgtcaaatgataacataatggtaatgcgcagctaccaaattcaagcaacaagggaaattttacaacgcatgaaagaaatggaagcaagcggacttgtgcaaaaagagggcgggtatatatggcatacaactggatcaggcaagacagttacttcctttaaagttgcacaactcttagcatctgcgcctagaattaaaaatgtactatttattgtggatcgtattgacttaatagatcaaacactcgaaaattttaaaagtttcgcatatgctcactttaaaaatcgcattaagaaggttaatggaagagagttaaagagagaattaaagagaaaaggctcctcgcaaattttattgatttcagttcaaggattgacaaaagctgttaaaaaaggtttagaaaatgacgactggaatgtcattattatggatgaggcgcaccgaagcgcgagtggagaatctgtaaagttaatcaaaaaggccctcaagaagacaacttggtttgggttcacgggtactccgaacttttacagtgatgaaataaatgatgtcaaaacaactcgagaaatttcaacgcatgatatatttggcaaacgactacatacatataccattaaagatgctattggcgacggaaatgtcttaggatttgatgtaacttatttcaaacctcattgggtggttgaacatccacaagaagacttttctgaaaaagactatgaaaaagaagtttatcaaagtgatgtctatcgtcaagaagtcgtaaaagatatccttgataactggacgaaaacatctagtggggctttaattgcaggtaaacgtgaagagaatgccttccaagcgatgtttgcagtgtcaggtaagcaagcagctgtgaattattataatattttcaaatcgaaaggatctcatttaaatgtagcaatgacattttcacgtgatgagtctaatgaacatggtacaaaggaacaaaatgaggcgcttaaaattgcgattaaagactatactgaaaaattcaatgttccaagcattttagacgcaaaggatccggctcgagcttacatgttagatataactaagcgattagcacgtaaaagaccatataatcaaggtaaagaaaaagatagattagatttagtaattgtttcagatcagcttttaacgggctttgattcaaagttcatcaacgtaatctacatggacaaaatgctcaaagaaggaatgctaatacaggcgatttctagaacgaatcgaacttttgaccttaacagcaaaccacatgggaaagtacgtttttatcgccaaggtgatgaaatgcgcgaatttgttgaaaatgcgctacgtatttatacgagaggtggcaatgatactcttcaagaagcggaagaggagacaaaaaatcagctacctaaagatttagaaaatgacgatattcttgcaaagccccagagtcatcaaatcaacgaactagaagaagctgtcttaagattgaaagagcttgctggcgatgattttagtcaagttccacgaggccaaaatgatctaaaagaatttgttggtcttgctttaactactcaaaccaggatccagcaattaatacagcagggttacgagctaggaagcgagattgaggagctaaatgaacaaggtgaagcgactggaagaatggttcgtttgaacatttcaagtattgatgaatttggtgctttacaagctcgtttatatgatgctaaggagaaattacctcctgaggaacgtccagatctcactgaaataaagattggaattgaattttatcatcacgagataattgactacgatatgctagttgagcttctgaatacctttatggatgaaaaaaataaaagtaataaagatgctatcgaaaaacacatcgtaccaatggatgaagaaagtcaacatgaaatccatgggatcgtggatgatattgaagcaggtaatattacagaacattttacaaccgattctcttcaggaaacacgtaagaaataccgtactgaacatcgagagcttaaagttcgccgttgggcagctaaccaaaaagtcaatggtaatcgtattgtggaagctttcgacttattcttaccagggcatacgctcattgataatccaaagctagcggatattgtgcgtgagattgaagaagaggaaaacatcggattttttgaagcctcagattttgaagaagagctaatggcattcttcaattcactataagcaaatatgagttttatttataataatagaaagaaggaaagaacataatggcattatcaactgaacaaaaaacaaaaatgtgggcaatgctcaaccaaacacgcggtcaaattggtttaactgcatataaagactatatcttcggaattttgttttataaatacttatctgaaaaagcaacacattggctaaatggcgtattacgcggggaaaattgggagaatgtttattctcaagattccgtaaaagccttaaattatatgaaaaagaatcttggttatgcgattcaaccaaatgaattctttgtagactggaaaaaagcaattgatacggaccgtttcaatattgggatgatgacagatacatttacgcattttaatcaacaaattgcatttgaagcgaaaaatgattttgaaggaatttttgatggtatgcgctttgatagtgcggatttaggtgctaatgcacaagctagggctagtgtcatgatttctatgattgaattgctatcctctccagaatttgatttatctggtagtaatgacacagtttcagatatttatgagtatctagttgcacaatttgctactgtcctagcatctgatatgggacaatactatacaccaaaagaaatatctaatgtaatggctcggattttaacttttggccgagaagatatggaaaaattttctatctttgatcctactgttggttctggttcacttttacttacaacagcaagttatatgaagaactcaggtagacgcggagtgataaagtattatggtcaagaaaaagatgcaacgccttaccgcttatcaagaatgaatttgatgatgcatggtattgaatataatgatattaatattaatcatgcggatacacttgaaagcgattggccagatggggtagtggatggaaaagatactcctcgaatgtttgatgcggtaatggcgaatcctccttattcagcacattggaataataaagatcgtgaagatgatccaagatggcgggaatacggtgtttcgcctaagacaaaagctgattatgcctttttattacactgtttgtatcatttagaagataatggacgcatggcgattattttaccacatggtgtattattccgcggagcttctgaggggcggatccgaaaggctttaattgataagcaccagattgaggcaataattggttttcctgataagttattcttaaatacatcgattccagtctgtgttgttattttaagaaagaatcgtattgaatcagacattttatttgttgatgcgagtaaaggatttgagaaaattaaaaagcaaaataatttacgttctgaagatgtggaaaagattgttgatacagtaattaaccgtaaagagatagagaaatactcacatgtagcaactttggatgaaataaaagaaaatgattataatttaaatattcctcgatatgtagatacttttgaagaagaggaggctattgatttggtggcacttggtaatgaaatggttacattaaatgccgatataaaaaaagccgagactgattttcttggtttattagatgaattagccgttactccggatacgaaggaaataattgaagctactaaggcggtatttcgatgaaaaaattagaaaaaagcgtgccagtaatccggtttaaaggcttttctgaagcttgggaacagcgtaagttgagggatattgctaattatcgaaatggaaaagctcacgaacaagttgaagatgaagatgggaaatatacaattatcaattcaaaatttatttcaactaatggaaaagttcaacgatatacaaatgaacaagttgaaccaatctttgatggagagattgccatggtgttaagtgacttgccaaatggtaaagcactggcaaaactctttcttgtgaaagaagatggtaaatatactttaaatcaacgaattgctggtattactccaaatgaaaatattgatccaatatttttgaatttcagaatgaatcgaaataattattttctaaaattcgatagtggtgttactcaaacaaatctatcaaaatcacaagttgaaaattttattgctttatatccaacttttgatgagcaatacaagattggtctattttttactcagttagatgacactatcgctcttcatcagcgtaagttagatactttaaagctgatgaagaaaggactcttacagcaaatgttcccaaaacgtggggagaatattcctaagattcggtttgatgattttgatgatatttgggaacagcgtatactcggagaatttctcaaagaaagtaagattaaaggttcaaatggtagtcttgcgaagaaattgaccgtaaaactttggcgaaaaggagtagttcctaaagaagagatttatacaggcagttctgctactcagtactatattcgaaaaacgggacaattcatatatggaaagttagactttttgaatcaagcatttggtattataccacttgagttggatggctatgaatcaactcttgattctccagcatttgatattgaagaaagcataaatgaaacatttttattagagtacgtatcattggcacgcttttacaaatatcaaggaaatattgctaatggttctagaagagcaaagagaattcatactgatactttttttgaaatgcctattcctttgcccaatagtaatgaacaacaaaaaattggaactttttcccgacaaattgacgacttaattgcccttcagcaaaataaacttgagaaactctcttctctaaaaagattctatctaaagaacatgtttatataattcaatatttacacttatatcaactcctaagataataaacaaaggtgattaattcatctattattatcttaggaggttttttatgaaagcgagaaagagaaaagaacaaacatttcatgagtattttaaagaatgggtagatctttataaagttggagcaatacgttcaattaccctgcagaaatactatgtaacagaacaaaaaattcaagaacttgtaccagatttaaaaataaaggatctagatcgttatacttatcaacaactgctaaatagttatgcagttactcatgagaaacaaactaccatggatttccatcatcatctgaaaggggctattttagatgctgtagatgaaggtgtgatcagtcaaaatcccacaaggaaaattgtgattaaaggaaaaacacctcgacctaaaaaagcaaaatttttaaatcaatttgaagtacaagccttattaaaagaattaaatttaaaggaggatataaattgggattggtttattctattaatcattaaaactgggcttcgattttcagaagcattagctctaaccccttcagacttcgatttttccaaacaaaaaattattattaacaaaacctgggattacaaaatggttactggttcttttcagccgacaaaaaacgaatcttccaatagaaagattcaaattgattggcaattagcaatgcaattttcccagttaattaaaatgaaagatccagataaaccgatttttgttaaaagcagagtattcaattctacaattaataatcgtttaaaggtgttgtgtgaaaacgcaaatataccaactatcacagttcatagtttacgacatacccatgcttctttactgttatttgctggagtttcaattgcaagcgttgcgaataggttagggcattcaagtatgactactactcaggaaacataccttcatattattcaggaattggaaaatcaagataatgataaaattatacgccatttatcaatgttaatgtgataataaatccccacttagctttatcttagctaggtggggattattttatataaacatattttgtagataagctttttttaattctttaattctacctagtttattttgaagaagattaatagtaatatctattttattcagaaattcagctattttcttttgctcctctattgatggtactgatattaaaatatcctcaagatacgaataataaagattggatacatttccaccttcaactctttttgcaaattcgtacttcattttacttctaaaatagtatgcaataaacaaaggatattgctctgtattataaaccgatatcatttcgccgatagcaacattggaaatcgaaagccagctacagttggcaaaatccaagggattttcaccaactcgtggaactagcacttcatttccagaactaaattttaagttgcttttatcaatatttgtataggagtgtacaatgtcaatttccggtccaaactttgtatacaattccccataccttacacatggtgtagttgcatcttgagccacagaccatttcggagcactctttccataatagaaataaccatattctcctatcttacgctgttcccattcttcgtaaaaactagtaaatcggatcttaggcttcttcctattattctctgggaatatttgttgcgagaatgctttcttcatcagctttaaagcatctaacttacgctgatgaagagcgatagtgtcatctaactgagtaaaaaatagaccaatcttgtattgctcatcaaaagttggatataaagcaataaaattttcaacttgtgattttgatagatttgtttgagtaacaccactatcgaattttagaaaataattatttcgattcattctgaaattcaaaaatattggatcaatattttcatttggagtaataccagcaattcgttgatttaaagtatatttaccatcttctttcacaagaaagagttttgccagtgctttaccatttggcaagtcacttaacaccatggcaatctctccatcaaagattggttcaacttgttcatttgtatatcgttgaacttttccattagttgaaataaattttgaattgataattgtatatttcccatcttcatcttcaacttgttcgtgagcttttccatttcgataattagcaatatccctcaacttacgctgttcccaagctcgaaatggtaagttaaagtagtgataaaatacataaaaaagaggcaacacaagctgcctctttcaaaaaaatatattacttaaaaatatctgtatctacattccacttatttaaagaaattcggtaaatactctttatgcgcttctaacatttcgtccagcatttcgcgggctacagattcgcttggagttagtgggttgattgtcattgcaaggagtgctttgtcgtaatcaccagtaactgctgcttcggctgttaggcgctcgaaagttttgatttcttggatgatgccgttgatagcgattggaaggcgtccgcttgctagtggaattgggccttggcgagtgataacacagtttgtttctactgcggaatcagggtcaatatcaaggatggcaccattgttacgagtattaacgatttgaatgtcgcgtttgtcgttatagatagagttaattaggttacatgctgcttcactgtagtaagcgccgccgcgttgttctaattgttttggtttttcagcaagttcttcttgtttgtaaagctcgaaaagttccgcttctacttttttaacaacttctgcacgagtaccatgttctgcgtatgcgcgagcttggtcttccagttgttgttttgtttgccagtagtagcgcaagtagtcgattggaatcatattaagtgtacgtaagaacgttttgtcccaaccagttgcattgatatttttaaggcttgagccagcttcatcttctgtcattttgaaaacaacatcttttgttacgtctttgccattatggtaaacagttttcgcgaataccatgtggtttagaccaacgaattctacgtaaatttcagaaacgtctacgcctagagtttcagcgatgttacgttcgatgccgatagggccgttacataagccgacaactttcttttggttactgtaacgaagaacggcttctgttaccattcctgcagggttagcaaagttgattaaccaagcatctgggcaaaggcgttccatatctttacaaatatctaaaataactgggattgtgcgaagtcctttgaacatgccgcctggtccgtttgtttcttgaccaactacgccatatgaattcgggatgcgctcatctttcacacgtgcgtctaataaacctacacgtaattgtgttgttacgaaatctgcgtcttttaaagcttcttcacggtctaatgttaaatgtacttccatgtcaacgccagctttttctaccatacgttttgctaaattaccaacgatttctaatttttcacggccagcttctacgtctactaaccatagttcgcgaactggtaattcgtcttgacgtttaataaatccttcgattagttcgggtgtataacttgatccgccaccaatagtcgcgattttaatacctttagtcattatttatacctccaaggatatttttttgaaaaggcttacttaattgttagttgccttttcttctcacagttatagtataggaattttatgaaaaaatagctagtatttgacgagctttaggtaaggattttctaagtaggaacttgtcacatttgagtaacgaggtgttacatggtaaaataaagcgaaaagaggtgcggaaatgctttttttggataaaaatttggaattaaatgatacagaattagatatttataattatatagtggcaaatttagagaaagttgtttatatgcgaattcgcgatttggcgacggaagcgcatgtgagtacgacgacgattctgcgtttttgccggaaatttggttgtaatggtttttcggagtttcgggtgaaattacagctttatttggaagagcagaagttggcgcaaattgatatggcggatgaaacgacttatattgattttctgaaacggacggcgcaacctgagtttaaagcgcaaattcaaaacgcagtggaaattcttcgcgaccgtgaactggttctatttgctggggtgggttcatcgggcgtaatcgctgaatatggcgcgatttatttttcgtcattattcacgttggcgctacatattgaagatccgcttaaccacccgttttaccatttatcgagcaaattatccgataaaatctgcatgattgcgatttcggtggaaggggaaaatgaagacatcatcagatatattcaccaattgaaggcgcaaaattgtaaagtgatttcgattacaaatagcgcgaaatcgaccatcgcgaggctatctgatgcgaacatcgcttattatattaataaggaaatgtatcaggaagcaaatatcacgtcccaactaccggcgctctatacaattgaaaatattgcccgggaaataagaacccaaattgataaagagaaaatgtaaaaagctacgttttgcttggatttccgagcaaaactttttttgtaacaaaattgtcacttacgaagaattttttattttgctacgatagttctttggaggtgaaattatgtacagtaatatgaaagagaaggtcgtttttacacttattatgtgttctttaatgattttatgcatgagctcttataatatctttcttgaaaatggtattggcgcggattcttttatgattattctaaaagcgtttgttccgtttctttttattggatttttattagacttttttgtagtaggaaaaatcgcgtctcgtctgcactcccttttggtaagtgaagatgcttcgaaatttaaaaagatcatcatgatgcaattgttaatggttacgtttatgtgtgtgcttatgtcgacccttagcctgattgtaaaccaaggcgaatggagtcatctaggtattcttattttacgcaattattttgttgctttatttttgcaaatttttatcgtgtcaccgtttgtgcgattaattagtccgcggatttttgcccttttgtaaaaatgaaaaaacgcttagtcgagtttaggcccggctaagcgttttgttatttatgttcggcataataagcatcgagcgcgtcttccacggttttcttcgtgtagccgttatcgataatgtagccaagatcatgttttctaaagcttgtttttaaatggtcaatgaggtcagcgaagtaatactcgatacctttatcatccagccatttgagtaagtctttcatagattcggtagcggttgtatcgatattaataatcgcactcgcttcaaaaatgactagttttgtatcatcttggactgcttcttttaagccatctgcgaatttattaaagtttccaaagaaaagggaagcgctataacgataaataactacatttggaattggtttggcttctggtttacgttttaagtcaaagtaaccatggcgcccgtcaataacaccaagaatcgcaattggtgatttcattgagcggctgactacattgatgaacgataagaaaatcccaagtagtaccccgaaaattacacctactaaaagtgttccaagagcggcaacaatccaaacggttgcttcacgacgagaaactctgaataaaccttttaacacatctacatcaataatgcccacaagtgcagcgaatacgatacctgaaagaactggttgtggcatatagtaaagtaagccacttaagaaggcaacaatcagtgcgataatagttgcggcaacgatcgaaaccatttgtgttttaccacgaaattgctcgtttgcagctgttcttgatacgctggcactcgccggggaacaaccagaaaacgcagcgacgaaattagaaataccgtaagcaaataactcacgattatcatcaatcgtatatttgtttctcattgcaaaactttcacttggtaatagtgaaccggcaaaggtagcgatagcacaaactaaaccgccaccaatcgcaagtgcccatgaacttgccccaaaatcaggaagggcaagggaagggaaaccaaccgggattttaccaacaatatctacattatattggtcgagtttgaagaaataagctgccattgttcctagtactaagacaacaagtgacatcgggatttttggaattacttttttacaagttatgacaatgatgattgtaacgatacccattgcaaatgaaatccaattagactggaaaaattgaccgaaaataatacctaaactagaaaagaaactatctccgctttctttaagtcccattatttttgggatttgccccataataatggaaacactaagtcctgaaatgaaaccacttagaactggagcagatatgtattttgcaaaacgacctaattttaagatggagaaaagtactaaaaagaccgcacaaaagaatgctagaatcggggcgagtgcgatggcttctttggatcctgctgcaagtccagctgttcctaagataattgacccagtaatggcgctagctgtcgcatcaatcccaaaaattaattgcggcgaactggcaaaaataacataagcaataaccggtaaaaatgatgcatataaaccatagatgggtggaagtccagctacttgcgcgtatcccattgcaaccggaattgtcagtgcagcaaccccaacacctgaaataacatcattccgtaaataggatgctttatacccatttaatgaaagcaagatgtgtttaaacataagttcctccctttaaaacatagtaattttcttcttctataatattatttaaatcttatactatttaccctgttataagttataccaaccctattttggtggattaattaaaaaaaacgcgattttcgttaaaaagaaaatcgcgttttttttaattgtttttggcataaatcgccatagcttctttcagaaaagcagaaaggccatcaccaaactggtcgatatttttagtgaaacgttcatctgccacgtacatttctccgagtcctgcaaatgcttcaagcgagtataaattcccgtgagtatcatttaaatattgaaaaaactggtggactgcttgttgggcttcatttgattctggggcggattttctaacagcggccaattggcgaaattctgcatcaaaactttcttttatagccatttgttctttttcattcatattagtgattttttcatttgcttgatttacaactttatctccccaaagttttcgtgcttcttcttcatatggattagttgaaaaatcgaagccagtaaatttttcttcattcgtcataattatttctcctttttcgttcttgatggtttggtcaagggtttcgagcatcgcttcaattcgtgtttttttctctattaataaatggcgttgcaaggataaagcgacttctttatcaaaactagggtcatcaagaatttgctttatttttttcaaagggaaatcgagttctttaaagaaaagaatttgttgtaatttgtcgacatctttttctgaataaatacgatagccgttccagtcgtctttttgcgggacgagtaggccgattttatcgtagtgatgcagcgtgcgcacacttacaccagtgagttcagctaattcttttgtttgcatgaatgattcctccttctgatttcaactataaagtatgacgcgacgtagtagtcaagaaagtttttttgtttattataactcttttagtggaaaagtgttgctagtaaataagttgttcgcgttaattgtaataaaataaataaaaccatggaaaaacttatgacattctcgtataatggagtgtaaatgtgtctaatttgtgaatggaattagcggaaataaaaaggggatagcatcatgacggggaaaataaaatccattagtacgtggctatggcatcatctaacaccgcaaatatttgcggttatttgtgtttttattataactattattgcgctttttgtgccaccttatattggtatggctgataatggagacttttttagaatattctcaagcaatggtttatttgtaaataatgctaattatgacgcgttacaatttggacattttgtgaaggagttcgggatttatcaatattttaatgaaaatcaagttgcgatttactcctcgcaaagtatttttattcaaattgcgcttcttttaaataaaattttttggtcaacaactgtttttgatgtacgttttttaggtgctttgcaattagtgcttcttttgccagcgatttacttattagtggctggtttaacggcaaaaatgaaaggttggcctggttacgttattgctgtgctaactgtatttattttcgcagataccgcttatacagcttattttaattcgttttttagtgaaggacttattttgattatgatgctgtatatttcagcgggatttttacttttatatcagcataaatataatgattatgcgatgttaggcttgatttttgtagcgtcccttattttaattacggccaagcagcaaaatgcgccaattgcggttgtgattgcagtttgcggtatactcgtgtttttcatccggaaaaatcgcgcgtttcggatttcggcagcggctactttttttgttattttcatgagtggtgtagtgatgtacgcattcattccaggagagtttgtcacgataaatcagtatcaaacaatgactcgcggtgtgttgcttgattcggaaaatccggagaaatcacttgaggaaatgggaatgaactctgaattcgctttgcttaaaggaaccaacttttatcaaaaatataaaatgattgatttagattcgaaattaatggaacaggaattttatccgaattataattttgtcacggttttaagttattatttggaaaatccgaaacaatttgggaaaatgcttgatttatccgcgcaaaatagtttttcgattcgaccatttgaaatgggcaattttgaaaaggcgacaggttataaatttaaagagaaaacgcattttttctcggtctacagtgatgtgaaggaaaaatttgctccagagaaattcacgtttttgattttatgggcgcttgtttttctgattggatatggtgtgagtgcgtttaaacatttccgcgaaaagaacattcggggaacgctactgtttgatttagtcgttttactgattggctcaggatttgcagtgattttagtaacaattgttggtgacggagaagcggatttaacgaagcataatttcctgtttaatgtttgttttgacttaacgatgttgattggagcggcttcattactcgaattttatttgaagaaacgaggtgagcggaatgcgtaaaaaaatcattataagtattctttttgcttgcgtcgctttcgtagtaagcacccatcctcaaacagcaaaagcagatagtgatgtggtcgttttttatgatagtttggcaaaagggacggataacgaagggaatatggactcgctacttcgaatgttaaatagtttgggaaaacgggtgacgatttacgcttgggaagagaatccggatctaagtcaagcgagcgaaattatcgtactgcaaaataaaaaggaccaattaacggataaatggaccgagaaattagctgaaagtaaggcgaaaattgcatatataggtgcaaatccaccaactttcttagcgaataaattgcagttgcaaacaaaagcgattacagatacttccatcactattaaaaccgaggcaggactagcgggaaaacctcagttagtgaacgaaacaaatttaattacttcctataaaggagaagcgttaggcgaaatggatgctgcggaaaatggcaaagcagcatacggtattcgagctggaaactatgcatatacgccaatatttcaagcaaataatacgagtgaatttgcgttgatggatttactcaaagcagtatttgaaattaaaactacgacgaatcaatatgcgcttataaccgatgtaaacccgtttgttgattttgatttacttaaaaaaacggcagacacattttatgaaaaaggaattccttttattataagtgctgggccggttttctataatcaagattttcaagcagcaaaaaattatgcggaaattttacgatatgtgcaagcaaaaaatggcactattatgatggatgttccagtcgttacgtacggtgatagtccgccgggagaccttgaaaacattatccaaaaatcgttacatttttttgcagaccatgatatagcggcgctcggtgtgacagcagagctatattggaattttgataaagtatatggtactgaaggctttgaaccatttaatacaggaattttactaccaaaccaaaaaattattcatacaacgaaaaagaacaacggtagcgcttttgaaaaatcaccatacagtgtagcaaatgatttttatgaaacgacgacaagcggaaaaaactttcctgttgatatagcagtgacttattcatttttccagaatgagaaggagttaaaggctgctgcgaacaatctagcaaatgaaaacattagtgacttcagatataaagatcatcaagtaaaaacaaataaagacacaatcgaatcaaatgctggctcgctttatatcaataatcagtccgtaacgctagatggtgatttaaagtatattaaaacaaataaagataaaactaaaaaacaagctggtagtttagaaggatttttcggctatcaaaatacatttttcacgataattattgtactttctcttggaattattggtgttttattcatctttggataccggctttatatgaaaaaatatatgaaatgaggtgaaataaatggttgttgcagattatttagcattattcgcggtggtttgtatctggggacttttactaattaatattgtattaatcgttgcgggatatatctattatttgaaaaacgaagcgcgtaaggtgcctgaaataccagcggaagtaccatttgtttctgtcatggtgccggcccataatgaaggaaaagtaatcgtgaagaccgtagaatcgctactggcttttgattatccggtcgatcgttacgaaattattgtcattaatgataattcgtctgataatagcgcagaacttctagcagctattcaagcaaaaaatccaacccgtcagttaaaaataattaatactgataacgtaacgggcggaaaaggaaaatcgaacgccctcaatatcggatttgcggaaagtcgcggcgaactggtggcaatttatgatgccgataatacgccagaacgacaagcgctacgaattcttgtcggcgagattaccaatgatgcaaaactcggtgcggtcattggtaaattcagaacgcggaatcgaaatgcgagctggttaacgcgatttatcaatatcgaaacattaagctttcagtggatggctcaggctggtcgatgggcgctattcaaactgtgcaccattcccggtaccaattttattgtaagaagatcgctcctagaagaaattggtggttgggatgtgaaagctgtcgctgaggataccgagattagttttcggatttatatgatgggataccgcatcaaatttcaagcgaaggcagttacttgggagcaagaaccacaaacattgccggtctggtttaaacagcgctcaagatgggcgaaaggtaatatttatgtgattttaaaaaatgttccactccttttcaaacgagaaggtagacgcgttcgcttcgatattttgtactttttatccatttactttttattattaacttccttgattgttagtgatgttttacttgtattatatgcgcttggacttgtacatacgacgcttgctggccttagcggggcgctttggttgcttgctattttactttttgtcgctggtacttttattacgctcaccactgaaaaaggggaaattagtttttcaaatctattatttattatgttaatgtatgtgacttattgccaactttggatggtggtcgccgcatatgggttctttattttcttaaaagatactgtactaaaaagagaaaccaaatggtataaaaccgagcgtttctaaaaaggagagtgcctaatgaaaaaattagctgttatggggctgcttgttttcgccgtactatttctgtataggccagacgttttcgcagcagataaaaattatcaaacggtttttggaacagataaaaccgctcaagggaaattcacgacaacgaaacaaaacttcactgtggagaattattgggacgtgtcaaacgcaaacgtgaaacttgtatacacgattacccaactgagcgaaagagaagtttcaacaatgacattaaaaattaacgatgttgccttttactcatttaaacctgataaaaccgacaaaggaacgaaacaaatcgaagttgaaattccaaaagataaactaaaaaaaggtgtgaacgttctatctattgaaagttttgtctacaccgatttaccagatggtcgttgtacgattgatgatacgcctgccaattggctacaattcgacaaaaccagcgcggtaaacgtttcttattctgataaagctttccaaaatacggtcgctgattttggcgaacgcttcactggaattgatactgtgaaaagtgggcaaggcgcggtagctgtcctcaaaaaagccggcgacgcagaacttggcgcagcgcttgaaggcctttctggattttcagcagcgaatacgttagaagataaaaatatcacttttggtcagtacgaagaggcaaaaacgcgcgatggcaaaaactatatcgttcttttttccagctatgacaatttaccaaatgacataaaatcacaaattaaagacgatcaaaaactagaaaagcaagcacttttccaagttgtgaaagtaggaaacacaaacacactcgtgattacctctaactcaaatgatgcccttaaaaaagcagggaaattaattgccaaccaaaattacttaagtcaactcggagcaaatactaaatggctaacaacggatgaacaaattgacacgccagccaacaatattgataaaaataccaaactcacaacaactggtgataaactaaaaggaattggtcacatcacgcaagattatttcatcagtatgcctgcaaaccgaagcgcctcaacaggaacggagatatcgcttgatttcagatacgcccaaaacttagattttgagcattccttagtaacagttttagtcaatggaaaaccaatcggtagccaaaaactttctgccaaaaaagcaaatagtgataaagtaacgttccaaattccaagcgatttaaatgtaaaaggtgatttttctgttacagttgcctttgatttagttttaacaaataattattgtggttttattgcagattccgaaattccttgggcgtatatcacaccagaatctaccattaacctgaatacaagcgaagaaacagacttgttatttgaacaatatccatacccattcgttgctggtggagattttaacaatgcagttgtcgttgttccggacgaattaacaaccgaagatacggattcgttagcaaatattttcaatctattgggtcgcttccatgatggaaacagaggcaatctaactgccgtacatgcgacaaactggaaaaagccaaaagaaggctcgaacattatcgcagtgggcacaatgaataacaatccagtcataaaaaatgccaatgatgacttatatttccagtacaacaaatcaggcagttatttcctttccaacgaaaaaatctcgattgaaaaaaattacggtaaacaactcggtagtgtacaattgattacttctggtggcgtacccgttctcgcagttactggtccgggtgctaaacaaacagagcttggttctgatttaatcgccacaaaagctaatttagctaaaatctacggagacggagcgattgttgataatgacaacacgatccactcttataggttcaaaaaagcagcagatgcaaaagaagaaagttttgggacaaaaattagtaataacaaagaagtaaccgtgtttggggccttcgcgcttcttacaatcgttatcctagttgtcgctgtcctactaatcttgcgtaaatatcgccggagccggaagtgagggagaaataaacatgaaaaaaataacgaataacttatttgcagatattggctttttatttttcatcttgctttgtttcatcacgattggctttatgattaatacgccagatgaatatttgcgaaacattattttattaaatatcacttttttacttgtgattatcacctattttacaaatttaacgcttggtttgattttaaatgtcctctatattttcatttatgcgacttacattatttatgaaattgttgcaaatcaaatggcatatggaatcggcagctactactggcttattattacgccactttttacggtagcgagtgcgatgtttacaagaaatacctccagactacaagaagaaaatacgaaaatcaaacagcaaaacttatatttaggaaccatcgatcaagaaactttacttaaaaatatcgtttctttccaaaatgacgagcgcattttttccagcatttcgcgtcgttatgatttaccattatcactgatggttatcaaagttcgtcactggcgcgagttgaaacgattccaaagcgaagatgaaatgcgcctggcactgcaagatatttcggcagttttagagacttgtatccgtacgagtgatgttctttatttgctagataaggacgatgcgacttgggggctcttgcttttaacagatgagccaggcgggaaattagttgctgaccgaattaaaagtcgcatagctgaggccaacaccgaagaatttgccgcgaagtaccgagtgaaactagaacttcgaattggaacaagccaatttgacagcgaaaaagtgaagacaccactcgattttattgatttagcgacaaaagaattagaatatgacgtgtaaaatagagagttaccttctataataggaggtaactttacttttttgataggaggcgcttgatgaacttagaagaaatagtcgcatgtatgttattaaatgaaaatgacaaagaaattcagcggacgcaaacggagcatcgtatgaagttggtcgacttttggcaaattaaaaaaggagaacgtgtccttgaagttggctgtgggcaaggcgatacgacggcagtgcttgcgagtgcagttggcgcagatggctttgttcaagcagttgacattgccccgagcacgtacggagcaccgtttacgattggcgatgcaacggctcacttgaaaaaatctaaactaggtgctcaaattgattttaaactagggacagatattttaaatggcgatattactttttcggataaagcttttgatgtggcggtgttatcacatgcttcttggtatttcagttctaaagaagagctaatcgaaatgctcgttttactaagcaagtgggcgaaacgggtttgttacgcggaatgggatacgagaattacagatgtgaaccaaacatctcatatgttagctgtattgacacaagcttcctacgaggcattcaaacaagaaacccagtcgaatatccgaacttttatcaccccagtagacatgcaagaaattatccaagctcatcattggaagataggcgcggaaacaagtattttctcagaaaaaatgcaagatagtcgctgggaaatcagttatgtgaaagattttataacaaaagaattagccgcagatataggtttaccagaaaagttcaaagtatttttactgagccaaagcaatttaattacactagaaaatagtttgccaatggcgtcgtattgcactttttggcatgcggagtaattttgctttctttttcacaagattgcgattttttatgctataatggaacgtattaacgaactaaaggagtgttgaatgtgagagctgtacttactgtaattggaaaagataatgtgggaattgtcgctggagttagtaataaattggcagaacttaacatcaatattgtcgacgtatcacaaacgattatggatggatattttacgatgatgatgatgtgcgatattagccagataacgaaagaatttgatgaagtaaaaacagaattaactggaaaaggtgaagaactccaagtaaaaatacatattcaacgtgaagaaatttttaacgcaatgcataaactataggatggaggcgattctagtatggaaactaaccaaattttagaaacaatacgtatgattgaagaagagaagctagacatccgaacaattaccatggggatttctttgctagattgtatggacggtgacggtgaagtagctagaaagaaaatctaccaaaaaatcgtgacaaaagcgcgcaatctagtggctgttggtgaagcgattgaatccgagtttggtattccgattataaataaacggatttctgtcacgccaattgcgattatagctggctcaagcgctgacactgactacgtagaatttgctaaaacactcgatgcggccgcaaaagaagttggcgtgaattttatcggtggttattccgctcttgtccaaaaaggttacacaaaaggtgacgagattctcattcgctccattccgcaagctttagctcaaacagaacgagtttgctcttccgttaacgtcggctcgactagaacaggaatcaacatggatgcggttcgtcaaatgggtgaggtaattaaagaaacagctgatttaacagcagacactcaaggactcggttgtgcgaaactcgttgtattcgccaatgcagtcgaggataatccttttatggcaggagcatttcacggagttggagaagctgactgtgttatcaatgtcggcgtcagtggtcctggtgttgtgaaacgcgctatcgaaaaagtaaaaggcgaaccatttgatattgttgccgaaacagtgaaacaaacagctttcaaaattactagaatgggtcaactcgttggtcaagtcgcttctgaaaaactcggtgttccttttggaattgttgatttatctttagcaccaacaccagcgattggtgattcagtcgcacatattttagaagagatgggactagagatggtcggaactcacggtacaacggctgctttagcactattaaatgatgcggtgaaaaaaggcggcgtcatggcttgcggtcacgttgggggattatcaggtgcatttattccggtttctgaggatgcggggatgattgaagccgtacaacaaggcgcccttaatcttgaaaaactagaagcgatgacggcaatttgttcagttggacttgatatgatcgccgtaccaggtgacacaaccgccgaaacattagctgcgatgattgctgatgaagctgcaatcggagtgattaacaataaaacaaccgctgtccgagtaattccggcgagcggtaccaaagttggcgatatggtcgaattcggtggtttacttggaacggcgccagtaatgccagtaaacggtaaatcctccgctagctttattgcgcgcggtggtcgaatcccagcaccaattcattcatttaaaaattaacaaaaaggtttcctcgtaaatttacgaggaaacctttttttatgtcgtttttctctctaccaaatggaaatctaaatcaagcagcggcaagttgcttccaaataattgattcataatgagcgtaaaagcattttcagcttgtaaatttacagggtaatgaatcgttgtaatatcaagcaaatgcgccacttccatattatcaaacccacaaatcgcaaaatcttccgggacactgtaaccaagccgtctagcttccgtaagtaaccccgccgcaaaataatcatttggtgtcaaaaatgcatctggtttatgctcagtctcactccaccaatgcgcaatcttttccccgtcttgccgactaccctgcccgtaaaactgtctaaattcatgaggatcaagctcataacgcgcacaaaaatctttaaaagcaagcatgcgactttgcgtattgagtccggtcgtattcccataaacattcacaaattttcggtaaccttttgcatataaatgttctagtgcaagcgtatatccatcatattgattcataaatacagaggggattttttcactctcgacacgctgccaagtgacaatcgggccgtatttggtataatgctcaattgttttccaatcatttgatcgaatcacaagaacgagtgcatcgatttgtttttgccgtagcatttctaaagcttccagttctttatccggatcaatccgcgtcataaacaaagtaacgttataaccatgctcttgagccatcatcgtaaaactttttaaaaatacattcagtgaatctgtaaaactaggaatgaccataccaattaacttagttgcgccttttttcagtgatacagcgttaatatttggaacgtaatctaacttgtcaataattgtctggacgcgttttcttgtttcttcactcacatagtcgcgattattaattactcgggaaactgttgctgatgaaacacccgctagtttcgcgatttcttgtatatttgccaattgcaaaacacctcgatttctcgtagctctgtatttagtataccaaaaaagcccgccaaatagccagtttagataaatttaaaataagtgcttgacctgtaatgcattacatgaattatgatgaatgagaagaaaagaaaacgctttaaaattctaggaggtaagtatattatgaaaaaaggtgtaaaaatcgttacaattggtgggggttccagttacacaccagaacttgttgaaggatttattaaacgctatcatgaacttccaatcagagaactttggctagtagatattgaagctggtcgtgaaaaattagaaatcgttggtaatatggcaaaacgtatggtcaaagcagcaaacattgactgcgaagtacatttaacactcgaccgtcgtgaagctttaaaagatgcagattttgttacaacacaatttcgcgttggtttattagacgctcgtattaaagatgaaagaattccacttagccacggcatcattggtcaagaaacaaacggagcaggtgggatgttcaaagcattccgtacaattcctgttattcttggtatcgtcgaagatatgcgcgaactatgcccagatgcttggttaatcaacttcactaacccagcaggaatggtaacagaagcagttcttcgttacggaaactgggataaagttatcggtctttgtaacgtgccaatcggagcagtgaaaagcgcttcagacgttttagaaaaaccagaagaagatttattcttcaaatttgcaggaatcaaccacttgcactggcaccgcgtatttgacaaagatggtacagaattaacagaaaaagtgattgatggtctttacgcgccagatgcgaatcctggaaaagttgttgaaaacattaaaaacatgcgcttcttatatgagcaagttaaacatctaaaaatgcttccttgtccgtaccaccgttactactacatgactgatgcaatgcttgaagaagaactggcatctttcaaaaacgaaggtactcgcggagaagtcgtgaaaaaattagaagacagcttattcgaattatataaagatccaaatcttgattacaaaccagaagaattatctaaacgcggcggcgcacactacagtgatgcagcatgtgaaatcatcaactccatttacaacaacaaaggtactgtaatggtagtatctactcgtaataatggcgcaattgatgatgttccttatgatagcgcagtagaaatcacaagtgttattcgcgcgcacggtgcggaaccaatcaacttcggtaaattcccaccagcacaacgcggcttgctacaagtaatgaaatcaatggaagaattaacaattgaagcagcagtaacaggcgattacgcaactgcacttcaagcttttacttctaacccacttgttcctagcggcgacttagcaaaaacaattctagatgaaatgctagaagcgcacaaagagttcttaccacaattcgctaaataattcgcaagtgatccctattttctagggatcactttttttgtgagttgttttagcgagcattttttcaagtttcctgtaaaatagaaaaaaggaggtatgcttcatgcaaacaaatcttgaaagaatcaaaaaacacatagaaaatttagatagatttacagcaactccgggtcagggaacaactcggcttacatatagcaaagaagacctcggcgcgcgtaattatttaaaagaagaaatggctaaagtaggccttactgtctcagaagatgcgattggaaatatctacggacgactagaaggcgacaatccagacataccagcagtaatcgtcggttctcattttgactctgtgccaaatggtggtgcttttgacggtccagcaggtgttataactgggcttgaagtagctagcgtttttcatgaacagcaaataaaaccccattttccacttgaaatcatcgcaatggtggaagaagagggatctcgtttcggagcgggactacttgcctcccgaacaattacaggaaaagttacaaaagaaatgctacatgaaatgaaagatataaatggtgttactgccgcagaagctatggcaaacctaggatttgacgcaaatcaagttcatacagccattcggtccaaagattccgtcaaagctttcattgaactacacatcgaacaaggcccagtcctagaaaatgcgaatgaagatgttgcgctagttgacacggtcgttggtttaacagaaataaaagttaccgtaaagggtcaagcaggtcacgccggaactaccccaatgctagaacgaaaagatgctctaagtgcagctgtccaaattcttaataagcttcctgaactagctatccaagaaggcggcggaactgtcttaacaattggcaaacttaatgtctacccgaacggcgctaatgtaataccaaacaaagtcgttttcacagtagatattcgagcaaaagacgaaatccacgtccaaaatacattagaaaaaacaaaaaaagttattcaagctttcgaaaaaaacggtattatgtgtgaaatagaagatatgctctatgaaaaaccaacacatttatcaacagaaattcatcaagcattgaccgaaagcgccgataaacttggtcttaaatatcgaacaatggttagcggcgcaggacacgatgcaatgattttcgcaagtttaaccgaagtaggacttatttttgtaccaagccacaaaggtataagccatgcaccagaagaatggaccgattacgacaagctccaaaaaggcatcgaagtcgtacttgaaacagttaaaaaatggacgggggaaagcgaacatgaataataaaataaaacaaatagtcttaaataatgaagaaaatatgatagccttccgccgcgatttgcacatgcatccagaactgcaatggcaggaatttcgaacaaccgatcaagttgcaaaacaactagatcagctcggaatcccttaccgacgtaccaatcccaccggactaattgcagatttaaaaggcgataaagtaggcaaaacgattgctttacgagcggatatggatgcactaccagtccaagaattaaaccaagatctttcttataaacctacagaagacggcaaaatgcacgcatgcggtcacgatgcccacacagccatgctattaaccgcagcaaaagcactcgtggaaattaaaagtgagctacgcggaacagtccgcttcatttttcaaccatcagaagaaattgctgaaggcgcgaaagaaatgattgcccaaggagcgatggagggcgtggatcacgtctttggtatccatatctggtcccaaaccccaagcaataaaatatcttgcgtagttggctcgacatttgcttctgcggatatcatccaaattgatttcaaaggtcaaggcggtcacggagcaatgccacatgatacaatcgatgctgcggtgattgcttcttcgtttgtcatgaaccttcaagcaattgtagcccgtgaaacagacccgcttgatccggtcgtcgtaacaattggaaaaatggaagtcggcacacgctataacgttatcgctgaaaatgcccgattagaagggacgctacgttgctttaacaacacaacccgcgccaaagtggcaaaaacaattgaacactacgcgaagcaaacagccgctatctacggcggcacagctgaaatgatttataaacaaggcacacaaccagttattaatgatgaaaaaagcgcattactcgtccaaaaaacaatcattgaatcattcggtgaagaaatgctttactttgaacgcccaacaaccggcggcgaagacttcagctattttcaagacgaagctcccgggagttttgcgttggttggctccggaaatcccgaaaaagataccgaatgggcccaccatcatggacgttttaatattgatgaaagtgtcatgaaaaacggcgcagagctatacgcccagttcgcctataattatttaaaccaagatgagatttaaacaaaaaacagcctcaagcgaattcactcgcttgaggctgtttatatatcgactattgtttttctacaacatgtacgtcttcaaaagaaccgtattttgtccaccaaggaacggcaccttcatcaagtaatttatcaagagaggtaatattttctttcccttgagtacgaagccattcgcgtaaagcatcatcgccttgtttaccataaacttcgataccatcagcccaagttgcacgaccacaaagtacaccactatattgtacgttatgttgattagcaaattggattgttttatggaacatttcagaagttacgccagcacttagataaataaatggaagtgggcttaagtcagagcattcttcaaaatgacgagctgcttcatcttgcgtataagctacttcaccttcagcaaaaccttccacatatttgaagtttactggaacctctagtttaagtacatctacaccgtaacgaggtttagagaattctttaatagatgcttttactttcgctggttttaattttgcatactctaaagaaccagaatcagtaacttttgcatcgtaagtaattggttctaagaaaaatggaatatcaactgcgcgacattctgcaccaattctttctaaaaaggcatatttaatttcattgatttcagcaggttcatctggatcataataaacaagaattttaacagcatctccgccgttttctttaatacgaagtgccgataaatcttcaattaaatcaggaagtttaccaggagtagttgcgtcataacctgttttttcataagaagttaaaagtccgctaccttcgtgacgagctttgattgctggagtaccatattctaaatcaagcaaaatcgcagaagcataaggtgtaagttcttcagaaacaagttgtttgaagtcttccacatcttttttgttttctgttccttttgcttgttgaatcatttttttgagtgaaccgcgttggtcaatggcaagtgctgcaatgacgcctttatcgttggagagtctttgtaaaccatcaaatttaccttttgttatttgtaccatttttatctagtctcctttatagcaatttgtcgttgcttttatcaatttgtccatcattagtataccacttataactttttttaaaacataggtatatttccgtattgatttatcctggataataaattactatatatgtggagtgttaggtattattagaaatttgggataatttcttttaatacattctcttttgggaaagtcagttagcgattagactagaccaggagtgatgaaatgaatcgacgcgaaagactaaaacataaaagacgcaagaacgtatttatcgtgttgagtactgtacttatacttttttttatggccactagctggatgatctatgaatttaaaagtaaagaacagcaaacagtatccgcaccaacaaagaaaaaagcaactacagccactaagccaaaggaaaaaccgactaccaaaaaagctgaaaagccaaaagagccggaacaagttgaagaaaagccaaaagaaacgatagtaaataacaaagaaattgatgcttatttaaaagaaatcggatttagcggctcggcacttgttgttcgtgatggacaaattgttatacaaaaagggtatttatatgcaaatcgtgatgcaaaggtattgaatacgcctgatacgctatattatatcggttcttctcaaaaggcgataatagcagcagctttattacaattagaagaaaaaggtaaaataaatacaaacgatccagtatcgaagtatttacctaattttcctaatggtaataaaatattgattaaaaactttttgaatcatacctctggaattgtcggacggccagagttctctgggactgtaacgccagaacaattagttacaggtattgagaagcggggaattaaatcacagcctgggaaatgggattatatggatgcaaattatacaattgcaggatatatcgtagaaaaagttagcggaaaaccactcgcaacttatttgcaagaaaatattttcgaaccagcaggaatgaaacatactggatactttcaaaaagatgttgatgggggaaaaaatatatcaacaggctacaaaatagatgaaaatggagtttatcaaagtccgaagttagtagacttaacgaaattatatggagcaggggatattagtatgtctactacggatatgtatttatttgataaagctttgatggataaaaaaataatctctgaagcaagctttaaaaaaatgttcacaccgggtagtaaatctaattatggaatgggcttttatgtagatcctgggagttataatagccacggggttgtaactggttgggatgtttctaatagcatgagccacactggcagaacctatgtgattttattctctaatgtccaaaataagattgcctcttttggaaaagtgaacaatcatatttatagtttattaaacaaataaagaaactcgattctgttaacagaatcgagtttttatttatttaccagtaatttgttttaccgcatcttccatttgataaagttgagcagcggcactgtagtcactccatttggtgttgtctactttatatacttggtttttcttcacagcgggaatatctttccaaaccccgttaagcatttcgttaacagaatcttcattaccatcagtaggcattaagataaataatcgatccgctccggctgcatattcaggaatagcttcacttgaaattgcttttgtttctttgtttgctttagcaccatcagttggagtaaaaccagctccagagaataagccgtcaaatactttcgcatcatgaacatagatttctttgccgtagaattgaatcacagcagctttttcgttctccacgccagcatcttttaacgttgccttagcttctttagaactttgagcgtaatctttgtcccatttttctttttctgattttttatttaagagatttgcgatattagaaagttgtttgtcaggagtatcaccgaaatgtgagatgtaaactggcgcaactttttctaaattctctaaaaggtctttttgataatcactaataataattaaatctggttttaaattagcgattttctcaatacttggtttatcattaccaacactttctgtcccttttgttgctttgggatatgtagtgatgtaataatccgttgtaccaacaggttttacgcctagaatttccatttcacttacgttttgaagtgctacaattctttttggtgttgttggtacttctactttacgatccattgtatcagttactgtttttgtcgcagcttctttttctttgcttgaatctttatccgaagagttgccacaagcggttagtactactgctaaaagtacagtcattaaaatagcagcccatttatgcttttggtacattgtgtatttcctccctaattgaaaatgattttcattatcgttacaaaagtaattatatcgaaaagagggaggattgacaaggtgaaacataacacaaattatttttattttttaaaattggatcgtgtcgcctattgccagggtaggaaatacttctggggagacaacgattgcgccaggtaatacttcattttgaccagagcggaaataaatcgaaatgtgtccaagttcttccaaatttttatttgcttccgtaccgacttcttctattatatagacttgatctccaatttgtagtgtattccctttcgagagggcactttggggtgctgcttcgaactcatgaataacggagatttctcgtaattcattagtggctgttggtccaaataaaatgacgatcttttcttcttcaaaagctgggacaagtggcccgatttcaatgattttacttttagtcatagcaatttcctcctaaaaattaatacatgccgatactgaatacccaagcgataacaacagcaaggacacctgtaatcatacggctatacaaaatggccggaacaccgaattgaaccgtttttggtttagcttctgcaagagatagcccgactggaataaagtcacatccggcttgtgcgttaatagcgaataaagcaggtaaggcgtaagttaccgggatggcgccaatcgcaatttgtgaaccaattaagacaccaataacttgggcgataactgcgccaggaccaagaatcggtgataggaaaggtagactacaaataaaagcaattaaaagcattccccaaatggaaccagcgagcggggagagtgtattcgcaattaattttccaatcccagtgtagttaataataccgataatcatactaataaaagccataaaaggaataatgtttttaatgagcatatcaacagaatcacgaccagcttgatagaatacgcccattgccttaccaataccgcgagaaaatttcacaagatagccttcttttaaatcactcgcttcttgttgatcttctttaatcttggcataatcttctttaaatttttctctgtcaaaaggttttccgggatctgcttctgatgaggtaaccataatatcttctggcttcactcccgaaacaaaaatatcttctgtaatatgttttgctagtggacctgatggagaagaagggagaatatcaacagttggaatacgtttcattggatagacgccaattcgagccgtaccaccacagtcaatgacaacacacatcatttcttcttcgggaatggagtttttaaaaccatcgacggcttctgcaccggataattcagcaattttcaaagctacggggtggataccgccgccagtaatagaaacaacttttgttcttggttcgcttggagtaaggtctagcccagttccccaaccgccttggcctttattcacatgaattgattgatacattttatttgcctcctatctatttcagactttttcttttcgcattaagaattttgtaatggtttccgtaatcacaccgcgcattaaaatgataacaatacctgctaagaagtaacgaactgcaagactagacatactataaccagcttcgacaaccccattagcaattcctaaataaacaaataattctccagcattcgcataagggaacaaccctgtgactggatgtaaaaatgaaacaaccgaatcataaaaagcaggtttttgatgttctttaacgaatcgtccaaatgtgtatgccattggatttgttagcattaagacagataaaatcggcataagtgaataacgtaaaatcatgtttttagctgaaaattgaattgcacgattgactcgttcttccccgataaatgcaataatcgagtacgtaaaggttaaaaggacaattaaaagcgggacaattcctgtcataaagctcacgaactgttttccaccagcctcaaaaagaccgataaagttggttccaaaccattcaatataattcactaggaaacactcctttttaattatttaaagcgctttcatacaactgttggcagttttgataatggctttttcttgtatggaatgctttttcttttcatgtaattcttgtagtatttcggataattctttctggtgatagtcagtaaatgttttaaacttcgcaaaaatcgtttttcctgttaaaatttggcattcatgaacaatatgctcttcgtttacaactaagatagctacggcacttgttcgaaactttaatcgctccatttcagaataaagatggtaaccgatttttccagcatatttactcgcaactttattcatgtgatgttggtaatacctcacttgaaaaaaagcaagaaatgtctgagcgatgaaaataacggaagcaataaggacaattttcattcacttttcctccttataataggtgggaagggctagcttcccaccatgttacctttaattgctaaatgtttcgtcttgtagttttctaagtttccaaacagtagttgattcgtcgagtgaaacatcttcgtcggtaataaatgtgccagctttaatgtttctgcgtgcaactacttcaccgctaattagcccgattggaatatgaccttctgccgccatatctacgtgagtttcgagcacaccgcggacacagaaaccgccaatcccatctaatctttctccagcagctatatcttttttagcaactgcaactgtttcggaaacgggagctcccataggaacaatagcgtgatcgtgattcagaacagctttcgcaatagttagtggagtttctaggctcgctaaatgataaggacgatacagaatatgatgatcgcgttcaccttttttcattaagtagctaagttcatgactaacaccttcattttggcctttaacaattacgaaaacacctggcgccaagccatctacatattctacgacaccaaattggtttaaaataccgccttgcttcttttaaatcgaggtctttaatgacggaatctacgtcacccgagataccatgcattccaacgacatcgggaacatatccaatagcgtttgaaagtaagttcatttctgccattgttttcgttccatcttggaaagctgctagcatgtgagaagccatattttttccgtctgcttccacttggcaactatctggattagcgctaatttttagtttgttgttttttcctttaccggcaacaagtacttccatacccattgatttggaaaattcgtaaagttcagttatcgcagcgggttcgtctccatcagatccggtataaacgaggccagcgctatcatataattttttcattaatggtccaatagtaatgtcaatttctacatttaatagaacaagttgtttttttgcaagtaaagtttctagggaaatttttgcaccgacttctggaacgccagtggcatcgacaatcacctctacaagatcagaatgaataatttctttaaagtcatttgataatagaattttttctttttttgttgctgtggcgttgtatgcatctgcggctttttttgcggcgtccacatgaatgtcacttataccaactacactcattccaggaatagcggcaatttgcgaaatcatgccgaatcccatttgacctgcgccaataacgccgacgcgaatagggttattttctttctcacgggcaagtaactgtctatataaagtcatttcaagttcctcctagtaatcgttttcatttattaaaaataaaactccggataaagctattttatcttaataaacgaatcgtgtaacatttgtcaccactagtgacaaatgtcatatttcacaaatcaaatataacattttaactttttttcgtcaatgaaatattaaatgttttttattttaaagaaataaaaaaagcccaatccattgttggagagtgcttttggggttttatattttttttgtggtggaatattctcaatcgtttttttgtaggatgtattcagccattctatcagtaatcacaatcacatctatcaatccggcattaagtgctgaaacaagtgcgtcttttttttgtagtccatttgctaaagcaacgactgttgggatttttttgagttcttctaaactgagcccgatgacatgtgtatttatctgtgtatttgcttcttctccatttgccgtgaaaaaccgtgaattaatatcgccgacaacatctttgtatcgaagttcttcaatatcttcgggggtaatataaccaatttcttccattgtactttgattgtaagggcttgatactccaacaatagccatatcaacagttttaccttcttcaaggacttcattaatgtatttgtttttagagaggtcggctttcatttccgtatcttctacaagggcaggtgcatacaaatatttactatgacactgcatttttttctttaaatcgtagcaaatttggttggaatggaggtcaatatcgcttgatcccataccgccgattaacggaataatagttaagtctttatgagggatatacgggaattcattggcaaatttacgaattgttttcccccatgaaatcccaagcgtatttactttggcaattcttttactaagcgtatatgctgcttctttggctagaaaattaagggcttcttcttcggacatatcgtgtgtggcaacgacaatcgcttcttctaaaccaaacttttcttctagtttttgttctaaatctaccgtatagtatgtttcgtctttaatgaaaatttctacaatacctaagtcttttgcacgttgcaaagttttagaaataattgaccttgaaatcccgatttttttggcgatttgcgcttgagtccaaccataatgatagtaccatgtagcgattttcaccatatctcttttttcttcccatttcatctttgttacctccattctacataataatggaacaaaagttatctgtagtcacaaatgtttttatgctaatagtatcatagaattgcccgtctggaaagatatcggagggatatatagtgctttagtaaagagaaaatgaatttttatatggtttttgctaatttgtgacaaaataacaaacaattttattttgagatttacgagggattttgcaagcgtttttaataatttttgagtggaaagcgtgtaatttgttctccatagagaaacaccattatttgatgggtggtagtataaatttagttcttaacgagcccaacaataagctaattaaacagttcatcttagaagaggagtggattttagtggaagaattatttacatacaaagaatttatcaaaatgatgcaaaattatggaattagacataaaaaacgcaaattaagacgtaatgaaaatgtaatgaccaattcttcaagtccgaatagtgtcattttattaataaaaggttatatatgcagttacacatgcgagtcgcctgaaacactattatctgtttttgagccaggcgtatttctaagttattcgattttagaagatttgccaccgcttgtaacgaatattgcgctttcagaagagtgcattgtgtatgagtatgaaaaagaagacatcgaatatgcattatcgctcttcccagaaaactttggctttcaatatttctttttaaaaaagattggacgtcatttatactataaggctttacttaatgccaaagatcaccaagaaaaattatattatacgattaagtatttaggaaaactcattggtgaaaaggatggaaaaggcaatattgtcttaccaccagaaattacaatcaaaatcttaattgaatacagcaccttatcaaaagcggctttttatagacagcgtatccgtctaatagaagaagaaattttaaagccacataaaaaaactttcttagtcccgaagaaagtagtaaaacactatgaaaaacagctaactagtatttaaaaaggagagcttaaaaaacaatgaaaataaattggaagaaagttctggtttttgttttgattttggcgcttatcagtcccgtttactcgaaagctatagagacggaacaaagcatatcgccagaacaaccagtggagccggtagtagaggaagctataaagaaaactccagaaaaaaaagaaatggaaccagaaccaaagaaagagccagagccaccaaaaaaagaagagattgaaacaaaaaaaccgtcgaccgaacctagcaaactgaaagctaacccttcatcaatacccgagaatagtacgatagcagatttatttccggatccggtaatggcagaatcggtagttacaaacttaaataatcaaatccgctataaaaatgattgggttgtgactgatgttattacacaaaaggatttagataatctatcttcttttactgatttatccacagtaattataaaaaatctggaaggtatacagtatatgactaatctaaatagaataagtttaaggtcagatgatgatttgcaaggtctatcagctttattaaaagcaccaaatggatatcctaatttgcaggagataactattttaagaggaggaattacggatatttcaccgatcttaaaaataaatgcaccaaagttagcattcctaaacttatctcagaataagattagtgatttatctccatttgctaatctgccgaacaattttcctgtgctggaggaaataatacttgcgtctaacaatatttcaaatgtcgagcccttagctaaatatgctagtgctagtatgaggtttcttcttcttaatagcaatagtatttctgatttatcgagttttaaaaataattctatgccaaaactagtcgaaattgtgtgtacttatcaacaagtttatttagaaccaatggatctttcagcaaaatatgattttactttaaaggcagcagaggctaaaggtgtgaacaaatcaattcctataactgtgttcgatccaattgcgacaattgataatacaacttccatgattacttggaagcaaaatgtcatagaaaagaaaccagaaatatttttaaaagaaggtggatttcaagaaggcgttaaatatggatgggatgaaactactccggttaaggatgatattggcaaggtaatctttgatggtacattttttcaaccattagtatatatagtggctccaaaaattacatcatatgaaaaacaacttatttatgatattgacacgccactcacagaggaacaattgttaaaagatgcaaaaatcgtaacagaccaaccatcaaaaatcacaactaattttaaagacaaaataccgagttcgccagatcccactaaatatgtagtgacaatcgaagcttctaatatagatggaggtgagtcggtaaatgtggatgttatatttcaaccaaagccacctatcataactgcggatgaagaatatacctatttagttggtgaagctattgatgctaatcaatttagattagacgtgaatgcgactttgactggtgttggttcgctagtggatgattttgagtcagtagtagacctaacgaaagctggtgattatgttgtaacgctgtcgtctcccggaaatccaccagcttctcaaacagctattcctgtaaccgtagttgttcacgtcagagaaagtatggagctccaaattcctaatgattttcggatgggtatagatgaaaattcagaatcggtgccgatattaaatagaaaacaaaccctgaaatgttatggggctgacggaaaagtagatttaaaggtgacagatagaaggagatcaaagcaaggctggacgctaactggagcaatgacaacatttacaaatagcagcggtgacatcattcaaagttcgctaaagtatcaaagtaaatcatcaggtagcagcccagtttacttaaataatgcaaatcagcctattgaacaaaaacaagcaactcctacagaaacaggctttgtctctactattttcgacttagaggatagtttatcaatagaaatccagcctaacgatgctttagtgggggatgcttatgaatctaaggtaacgtggactctagaagatgcgcctaggccttaactaaaaggagctattcgatttgaaaaaaataggattcattatattttgttgtttattcttattcgcagcaccattttatgtagaagcaaagacggcggatacagcgactagtaaagcaagcgttgtaattaagaaagaccctcgtaaggccaaaagtgggacagatgatagaacaggcacgtatcctacaaagttccccagaaagcttccgaaaactggggagtcgggcgatttaccacttattattgccggaattagcctcattttatttgtaagtaaaaaacactttaagggggtgagggaagagatttaattgcttagcacgacaaaaaaaggataacagaaagaggagaataataatgacaagtaggacagtaaaagtaacaacagcaagtttattagcactaggacttattgtagcaccagtactttctggggattttgcttcagcagcaacttccgtaacacaagattcaaaagggattgtaaaatttgataaaagcgcaactccagatccagttccagtagatccagatccaactgacccagatccagttgttccaaatccaactgatccaccagtaggtagtgatggtctatggattttagcagtatctaattgggactttggtacacttgactcatccgaattatctaaaggtgcaataaatgcccatgctaaagatggaaaaattactacgtatgaagatactaacggaaatggtaagcaagatttaccaggagaagtttctgtaactaaagatgtaactcctttcgctcaggttagtgatttacgtggttcgaataatggttggactctttctgtaacaggtagtgagttcaaagattcttctacacctgcaaaaaaaatcgctggtgctgagttaactattccaaaatctacagttaaatcaaaagattctaccgcaaaagcaccaactggatatgataacgtagcaatttctatgactggcggagcagcagttcctgtaatggcagctaaagatttgcaagctactacaccaacagacttcagtgatgatgaaggtatgggaacttggacagatagctttggttcagcagaagtatctgcaacagaaacatctaagccgaaattatctattcctaaaaacgtggctgtagcagaaggcacttatcaaagtacattaacttggactttaagcgatacaccagcagtctaacatttttcaaaaagagaaaactgcatttttcgatgttgttttctctttttaaattgagtaattaggaggaaagagggacttgaaaaaaatattcgctatcatctttgcctgtacatttgctattatttgtttgccaaatcaacacgccgaggcagcagaaggtaatagtttttccgtaaaagcaattcttccagctaatcaggcatctagcgtgacatattttgatttacaaatggaacctaagcagaagcaaaaattagatgtcgaaattaccaatcaaagtaaagaacaaatgactattaattgcgtcgccaacacagctattaccaatgagatggggtacgtcgattactcgataccaaaaacaaaaccggatgaaacgctcaaatatccatttgctgatataacagaagtaagtgactccgagattacacttgaacctaatgaaactaaaatctggtcggtaaatatccaaatgcctgaagaaagctatgatggaattattttaggcgggttacattttaaagaaaagactaaagaaaaaacagagaaagaaacaaagcaagaaaaagaagttcaaattaaaaatgaatatgcttatgtaattggtgtaaagttaaccgaaaaaaccactatagttaagccggaactagcattaaatcaaattaaagcaggaagtaggaactaccgaaatgtagtcgaagtaaacttgcaaaatacaaaagcgaccttagttggtggactggccgtggatgccaaaatatataaacaaggcagcgaaaaagtgctacatgaagcaaaacgaacggacttatcaatggcaccaaattccaattttaattacagtgtggactgggaaaaccaagagttaaaaccaggaaagtataaacttcatttagtcgccaaaaataaagacgataaatgggaatggacgaaggattttacaatctcatcagatgaagctaaaaaagcaaatgacaaagctttaggactggagaaagattacacttggttgtacatcacaggtggaattctactcttactaattctgattactgtcacttatttaattggaagacgtactgcaaagaaaaaagatgatgaagaataaatgtataaaaagcttgaaaacgaggaactcacttgttttcaagctttttttgtgcttgtaatttggattgaaatatcgctgtgtttttatgaaaaaatcaagtgtctaatgtgagaatgaatcaaggggacttttaactagttgtgacaaattaacgaacgtcttttgtatgaatttcaggaggattaaaaaaatttttaaaaagaaaaaacaaaaaaagtgctaaattccttctctatagagaaaataattcagtttgtgcatggtaatataagtttagttctcgccaagactaacatgtgtcgctaaataaattatataaatacagaggagtgaatttttttagtggaggaattatttacatacaaagaatttatcaacatgatgcaaaagcatgggataaaacacagaaaacgtaaattcaaacacggcgaaaagattacaagcgagtcttctaaactagatagtgttattttactaattgagggatatatcagtagctatactcgggaatcacctcagaaattactatctatttttgaacctggaatttttcttagatattgtattttggaagaatctcccccaactacagagcacattgtattatcagaaacttgtgagatttatgaatataagaagcaagatgttgaatatgcgctcacgttatttccggaaaattttggttttcagtatttctttttaaaaagatttgaacgccacttattttatagatctttactaaacaataaggcgcacaaggataagctttactatgcaataaaatacttgggtgaacttatcggaagcaaggatgcacaaggaaatattaccttaccgtccgaaataaccttaaaagccttaattgaatatagtactttatcgaaagccgcattttaccggcaaagagtgtctttactagagaagaatattttgaaaaggaaccggaagacattcatcgtgcaagatggaattatggccgaattattatgaaatctaactaacgagaaggagacagaagatgaaactgaactggaagccactgttgctttttatattattattagcgctttgttctcctgtgtattcattcgcggaagaaacaagagaagcactagcaccgaaaactactgaaacgccagaattaacaaaaacgaacgacaacttaaataaaacaatcttaacccctgaaaaaaaacaagcaaacaataattcagaaaccgaaaataaaaccaaagaaagtcaaacaaataaaaaagcgcagaccccacttaaaaacctaaaaaatacccttcccccgattccgcctaatagcaaaatttcggatatttttaaagacccggggatggctaatgcaatagctgaaaatttatcaacatacaataataaaaggagtgtggattctattgtaacagaagcagagttgaaatcaattacaagtttgtggtccgtaaactggggtgtttacgataagcccttaattaaatcaattgaaggaatccaatatcttactgagctggaaactatcctttttcaaaagaatgaaataacagatttgtctccgtttttgaaatcacctaatggatttccacgcttggttaatcttgtgttggagcatagtaaaataacagatccatctgtattaccaaaaataaaaatgcctttaatagagcacatcgctctcacgggcaaccaaattatcgacctgtctatcttaaaaaacattgctgatgattcaaaaccaaaacttagaagtgtaggtttacactcacaagagattgtgcttcctaaattaaccgtttctagcaaaaagcctttttcattaattagtatgaatattataggagattctatttataggagccgttcatattctccagctgcaacatttgacacttcaacttcaactattacttggtcgaaagaagtaatgatgaaaaaaccaaatataacatttacggagcgtgtatatccgccaaaggttacaactgtacctggcgtgcactactactggcgagataattcagtctcacttggaagaattagaatggacttctctggatatgtaaaacaactacttgagtacctcggtcctccaaaaataatttcatcgaaagacgttctatatgaagtaaatacgccgctaacggaaagcaaatttttagaagatgccaagattgttacagatcaggaaacaactattactactaactttaattcgataataaaaaatacttcagttgctggtgtctactttgtaacggccacagcgtctaatatagaaggcgaagtttctaaagatataaaggttgttattaagaataagcaaccagtcatcactgcaaaaagtgaatatacttatttagtaggtgaaaacgttgactcgaatcaatttcgacaagacatcaatgcgactttaactggcccagggagcgttcctaatgatttgaaagatgactttgcttcgaaggtggatttaaataaagcaggcgattatttcgtcgagctttccactcctgattggccaccgttaaccgatgctgctaaaccagtgacaattttagtacgtgtcagggaaggcttagagatgaaaatttcagatgattttcggatggacgtggatgaaaatactgaccccattcctatttctaataataagcaaactctaaaatgttttgctcaggagggagacgctgaaatagaagtacttgatagaagaagggcgaaacaaggatggactataactggaatgatgagcccttttaaaaacgagaaaggagacatattagaaacttctcttaagtatcaaaaagagtcatcagaaagtagtccgatatttttgaatgcgactaatcaaccaattgaaacgaaacaaccaactgaccaatctggagaaattacaactacttttaatttgcaaaataacttaactctagaagttctaccaaatgatgcattagtaacgggaatttatgaagctacggtcacatggactttagaggatgtacctagataaaaaaataaatagaaggagacttcgaagcgtgaaaaaatatattctaattgttataggttgtactgttttatttctttttccattagaaagtagcgcgtatacagatacagcaataagtaaggcaggtgtaacttttgtgagagataaaaaccgccctgcacaggtttttggaacagatgacaggagcggcacttttccttccaaaggtccaattaagcggcttcctaaaaccggagataatagtgatgtttactttattttactaggtgtaagcctccttttaattgccaaaaagaacttatttaagggggtgaagtaaaaaaagctaatcttaaataaacaataacataacagaaaaaggagaataataatgataagaaaaacaacaaaggtaatttcaacaagtttattagcactaggattaatcgtgacaccggtactttctgaagattttgcgtctgcagcaactaaagtcaataaagatacaaaaggaaccatcaaatttgataaaagcacaacaccaactcccgaaccaataactccagatccaactgaaacagacccagtagtaccaagtccagacaatccacccgtgagttcggacggattatggatacttgctatatccaactgggatttcggaactcaaagtgtatctgctttatcttctggagctttgaacattcatgccgaagatgacacgctttctacgtatacagatacaaatggcaatgggcagcaagacttaccaggagaagcatccgtatcaaaaaaagtgactccgtatgcacaaataagtgatttacgtggtactaatactggttggacgctttctgttacagctagtgagtttaaagatagttccacgccagctaaaaaaattcaaggtgctcagttaacgattccgaaatctactgtcgcaacagtcaattcgacagcgaaagcgccaactggttatgataatataactattccgatgacgggtctcagcacggttcctgtaatggcagccaaagataaacaaacagcgacaccgactaactttagtgatgacgaaggtatgggaacttggacagatagctttggttcagcagcaaaaaatgcaacacaaacaacaaaacctaaattatccattccacaaaataccgttattgaagatggaacttatcaaagtaagttaacttggacgttaagcgacacgccagcaatttaacattttttaaaagagaaaacttcatctttttatgttgttttctctttttaaattgaggaattaggaggaaatttagacttgaaaaaaatattcgctattgtctttgtatgtttttttacttttattttttttcacggtcaaacagtggcagcagcgaaagcggaagggaaattctctgtcaaagcaatcctgcctgagaaccaagcgtctggtgttacttattttgatttacaaatggctccagaagataaacaaactataaaagtagaactaatgaaccaaggaaaagaacaaatcacgattaaatgtgtggccaatacagctgttactaacgaaatggggtacgtagattattcgattccaaaagcaaaaacggataaaacattaaagtatccattttcagatatagtaaaagcgagtgaatcagaagtaacacttaaaccgaatgaaacaaaaatatggtctctcgatattaatatgccagcagagagttatgatggcattattttaggtgggctacatttccaagaaaagaaagatgaagaaaaggaaaaagatacctctaaaaaagaagtccaaattaaaaatgagtacgcctatgtaatcggagtgaagcttacagaaaaaacgacgatcgtaaagccgaacttggaattaaatgaaattaaaccggcatcgcgaaactaccgaaatgtagtcgaaataaacttgcaaaatacaaaagcgaccttagttggcgggatggccgtggatgcaaaaatatataaagacggtagcaagaaagtattgcgtgaatcaaaacgaaccgacctttctatggcaccaaactccaactttaattacagtgtggactgggaaaatcaagaattaaaacccggtaaatacaaagtggagttggtagctaaaacagccgatgataagtgggaatgggtaaaagaatttaccatttcagaggaagatgctaaaaaggctaataaggtggctctaggacttgagaaagactatacttggatgtatgtgactggcggtattttactcgtgctccttgtgatagcaacagcttattttattggaaaacgagctaggaaaaaagacgaggaatcacagtaaaaagcaaaataaaaaagcttgaaaacgagattcgattcttgttttcaagctttatttttatttttcgattttctccgtttctactacacgaagtcctttgcgttctaagtgagagatgatttcgtttttcttatcttcggttactccaactggtaaggaaaccagcacacgacgaatgaaatcttctgtttggttatcgagtgtaatcaaactcgcgatgctcgaataacggtcgatgattttagtgattttagttaaggcgccttgtacttcaccggttgcaatcgtaagtacataactagtagtttttacgttccagccgtcttgtaaaagaccaagtaatttaccatgcgtcaaaataccatagaaattaccttgttcgtttaaaacagcgatatatggtagttctttaattgtaaagaatacttcaaagaaagatgcattcacacaaatgtgtttcgttgcatttttgattaagctcattacaggatcgctcaggcttccaccatttgctgcatgtttgtaaatatgcattttataaatattacctaagaatttttcgcctttttcgtctagtacaggaacacagcgataaccagattcttctagtaaattgatagcctcttgtaaagtagcatctccaggaacggttgttaaatttattttagggatacaaaggttttttatcaacatgttattcactccattcttcttctctttcattttaacttaaagtaggtcttttgtatagaaaatcactgttaactcaattacgagaatgaaaatgtgtaatttttatcatatatataaggaaacttttgtataaaggtttaatttttcttgaaaaagtgtattattaactatgctatgtaaaattgtaaacagaaagaaggatatgaaaatgcaaaaagaaatcttgaattttgattattataatcctactcatattatttttggtaaagaccgttttgcagaattaaatgaagttattcctcaagataaaaaagtattgattttatacggcggcggtagtgtaaaaagatttggaacgcttgataaagtaaaagcagcccttaaatctagagaagttggtgaatttggtggtatcgaagccaaccctacctacgaaacgttaatcaaagcaattcaacttgtgaaagaagaaggctatgactttttactagctgttggtggcggttctgttattgatggtacgaaatttgtcgctgctggcgctttatttgaaggaaatccaatcgatatttttggcagcggaattggcgaaaaacgtccgattacagaagcgctaccttttggaacagtattaactcttccggcaacaggttctgaaatgaatagtggcggggttattacttttgttgaaaagaaagcaaaacttggctttggaagtgcatttacatacccagttttctccttacttgacccagagcttacctatactttgccaaaacgtcaactagcaaatggcattatggatgcgtatgtgcatgtgatggaacaatatatgacttatccagtaggagcgttacttcaagatcgctatgctgaaagtttattacaaacgttaattgaaattggtccagctgttattgaggaagataatcatgattacaatacgcgggcaactttcatgtggtcggctacgaatgcgctcaatggaacactatctcgcggcgtcccacaagattgggcaagccacagtttgggtcatgaaattactgcattatatggaatagatcatgcgcgtactttagcgattgtattaccatctcttttaaatgttcgtcgtgaggaaaaacatgagaaattagtacaatatgctgaacgtgtttggggaattacaaatggtactgatgatgaaaaaatagatgcagcaattgttaaaacacgtgagttctttgaaagtttaggcgcagggactagatttagcgattatggtcttggtgatgaagtagtagacttactagtggatcaattagagcgtcatggtttaacaagtatttctgaacgcggtgaccaaactttagaaatatctcgtaaaatctataccaatgctttatagtaataatttttaaatatgaaagaaggcgaattttcttgagtaccgagaaggaaaagacattttttggacatccgcgcggactcgctacgttatttaatacagaattttgggagcgattctcatactatggaatgcgcgcaatattaatatattatatgtattattctgtatctaaaggtggacttggttttagtcaatctacagccactgccattatgtctatttatggctcactcgtgtttatgtcgggtgttattggtggctggtttgctgatagagtgttaggaccgagacaaaccattttttatggtggcgtattaattatggtagggcatttagtactagcgattcctagtgggggagcagcagcgctatttgtttctatggcatttattattttaggaactggattacttaaaccaaacgtatctagtgttgttggggacttatacccagccggagacaatcgtcgtgatgctggctttagtattttctatatggggattaacttaggcgcatttatcgcaccaccgattgtttcgaatgtttcggaccatgccggaagcttccacgctggttttggagtagcagctgttgggatggcaatagcactcgttgtttacgttttgacaggaaaacgatacttaaaagaagcaggcaaaaaagcaccaaatccacttcaaaaatcagaagctaaaatccttacgatgaaaattatcggtattattttagcaatcggattattaattgctgtgttaacacttattacaggtagtttaacaattaatacaattatccttgctgtaacagtaatgggagttggagtgccgctagcttactttattatgatgatgacaagcaagaaaacagaggcggacgagagatcacgcttaactgcatacataccattatttttaatcgcagtattattttggatgattgaagaacaaggatcaaccactttagcgctatttgcagcagaaagaacggatttatctatttggggtttcaatttaaacccagcgaatttccaatcacttaatcccgtatttgtaattaccttatcgcctatctttgcatggatttggacgaaacttggtgatagacaaccatctacaccacggaaatttgctttaggactattctttgctggtttatcatttgttgtaatgatgcttcctggtattttacatggaaatacgactacacttgtaagcccgctttggctagtattaagtttcttcatctgtattttcggggaaatgtttatctctccagtaggactatccgcgacaaccaaactagcaccaaaagcttttgcgtctcaaacaatgagcttatggttcttgtcagatgcgatgggacaagcttttaacgcacaagtaacgcaattctttaatgctgacactgaaattgcttactttggaattactggttttgtcgcaataggctttgcgatagcattattcattttcgcgccattcttgaaaaaatatatgaagggcgttcattaaaggatttaaagacactttctctttgtttagaggaagtgttttttgtatgcggaaaataaattagtttgccattaactcttaagattgctactattaaagggagaagtgataatttaaaggagtgtatacatggaatcatcaagcagggtagttatctatttaacgcgacatggaaagacgattttaaacacacttgatcgggtgcaaggctgggctgactcgccgcttaccgaagaaggagcacttgttgcgcatgatttaggtcgtggtttaaaagggactaattttgtagccgcttacgcaagtgaccgcggacgtgccattgaaacagctcgaattgtaatgaaagaaagcgacaaccatcatttaaaactcgaaaaattagctgaaatgcgcgagtttggtttcggtaaatttgaaggagaatataaccaaactgtgttaaaaatggttgcgaaggctcacggctttgagtcaatcgaaaattattatgataaaacttctgaaaacaattctaatatcgtgattgacacggtgcataaaatggatgaaacaggcatgacagaaaactcggccatttttgaaaaacgattgactgccggactggatgcgattcttcaggatgcgcaaactcgtggtggtggagaggtccttgttgttgcgcatggtatggttattcaccgcattattgaaatgattgatccaagtaaaaatttaagaactatcgaaaatgctagtgtgacaaaagtgatttttgaggacggtgtttattcaattgaagaacctggaaatatgtcttatgtagaagccggaaaaaaagcgcaagggggagtttaagtgaaaacaggaaaactaaatgtgtacttagttagacacggtaagacgatgtttaatacatctcgtcgcgtgcaaggttggtcagatacaccgctcacaaatgaaggcatagaagtggcagaatttttaggacgcgggttaagagaaattccttttgatgctgtttatacaagtgaccgcggtcggacgattgaaacggctggaatagttttacgagaaagcaaacaaacccatttggaattaaatgagttgagcgatttccgtgaattcggttttggtaaatttgaaggggagtatgaagacattatgttcggaaaagtaatcgagcatcttggttttcagtcagtggaagaagcttttgaaaaattcggctatgatggctatcaaatcatttccgaaacagttgaaaaaattgatgaaactggaatgtccgaaaaatgggactccatggtaactcgtttgaaaaatgctttggaaacagttgctaaagaaaatcaatctgaaaatgcaaatgtattagttgtttcgcatggaatggcgattaatacgattatttctttctttgatataacgcaaattaacccagaattagcaaatgcaagtgttacaagacttggatttgaaaatggtgaatggacgatcgaagcagttaatgatttaagctatattgaagcaggaaagttagtcttagcataaaaaaatccagagtggcgcaatacgctactctggatttttaaattattttacgaatttaatacaaactggttctggaacttttacatctttttgaagtaatgtaagagcgccagtttctttattaacaccaaaaacagtaacgttattgctgttttcgtttgttgcaactaaaatgtcgccagtatagttaaggtcaaagtcacgaggaccaacgccttctactggtgttgttgctgcaagtgttaaagtaccgttttctgcaacagcatagctaacgatagcatcttgaccgcggttagaaacatagaggaaacgaccatctggagaaatatgaatggcgctacctttattttctttgtcaaatccttctggaagagaagcgattgtttggataacgtttaatttaccagttgcgttatcatattcagcaaaaataacttcggaagttaattctgtcatgatatacacatatttagcatttgggtggaaaacaaggttacgaggaccgcttccaggttttacttctaattcagttgctttttcaagtttaccagaattagcggagtaagtagttactttgtccgttccaaggtcacatgtgataacatatttttggtctggagtgaatccagcaaagtgagcatgaggtttttcttgacgttcgtgaacacttttaccagtatgttgaatcgttgcaacagatggttttaaagcgccgttttctgttgggtaacttacgattgtgcctaggtgatagttagcagaaacaacgatagaaccatcttctgaagcatctacataacacggcgggttacctgtttgaacatcttggttaatgaaagcaagagagccatcttcttcaattgaaaaagctgcaactccacctttatcgccatcttttgctacagagtaaacgaatttttcgtcatctgaaattttaagatatgttgggttatccatttttccggctaatttattttctttaatttcaccagtagttttgtcgattactaagcgatagatcccttggctttcgactttggtgtatgtaccaatatacgcagttgcttcattatttgacatgcctattcctcctatatataagatattcctagtcaattatagcatagtaaagaaaagatagaaaaacatcacgtttattgcatttttattacttttcataaagttaaccatattttagacttttatgaaatatttttgtaataaaagtattgacttagaaacaaaagtaatgtaagatatacttatcccatagagattgtcatttgaaataagctagttaagaataaatcacttcccccatagaaatgttcttaacagcttattgcaaataaacactccttttaagatagttgtagcacagaatttcccaggttctgtgctataattatattttagtagagatgccagagaagaggcgctctttttttatgccatctgggagagaggggaagaaatgtctattcaaacaatttttggaaatgaattatataactggattaacattaatacagataaagctaacaacttagaagatatttatgctacatatgatattgatgaggaggtcattgcttattctttagatagaaatgaacgagctcattttgagtatgaccaaaaaacagatactttcgtagtagtatttaatgtacctgaccaaagaaaaatcgataatcactatgaaacaattccaatggtttacattattaaagataaacagttactaacgattacaaataaaaacaaccaatatattgtaaaaaaaatgaataaatacttaaaagagaatgaagatgtgactattttacaatttttatttagtagtttatatcttgttatggattcgttttttccgtatgtggaagagatggatattgatcgtaaaacaattaatgataagctgaaaatcaaaacgacgaagaaaaatttactttctttatctgatttagaaacgggcatcgtgtactttttgtcagcttctaagcaaaatgccgctttattagagcaaatgaaaacacatgtaatctttcgaacgttaaatgaagtggaaaaagagcagtttgaggacgcactaattgaagctagacaactggttgaaatgacagaactaagctcgcaaatattacagcaactgtcgggtacgtataataacatcttaaataataatttgaatgatacgatgaaaatacttaccgcgttgtctattttgcttacagtgccaacgattatcactgggttttttggaatgaatatgccacttccattagaacataatgcatttggatggattgttgcaatttttattagcattttactgtggtttggactttcttttatattgcgaaaattgatgagataacataaaaaaccctgctttcacactgaaagcagggtttttctatttaaataattccgtgagcaatcattgtatctgcaacttttaggaaacctgcgatattggaaccgacaactaaattaccaggcgccccatattcgcttgcagcattgcttgagtttttataaatgtctttcataatgttttgtaagtgttcatctactgtttggaaagtccagctcatacgtgtgctgttttgagccatttcgagtgctgatactgcaactccaccggcattagctgcttttgctgggccaaataatactttgttttcgtgataaatgtcaaccgcttcaagcgtagatggcatatttgcaccttctgcaactgcgattacaccgttttttacaagtgcacgagcttggtcggcatttatttcattttgagtagcgcatggtaaggcaatatcacatggaacagaccacacatcgccgcctgcataatattcagcagatggatgcaatgttacatattcactgatacgtttacgctctacttcttttaattgtttcactgtttctactttgatgccttctttgtcataaacaaatccagcagaatcactacatgcaactactttagcgccaagttcatgtgctttttcaattgcataaatagctacattaccagaacctgaaacaacaatcttcttaccgcgaatggattcaccagctgcttctaacatttcaaccgtgaaataaacaagaccataaccagttgcctctgtacgagctaaactaccaccgtatgatagacctttaccagttaaagtaccagcatcataagcgccacgaagacgtttgtattgaccaaataagtaaccaatttcacggccgccaacaccaatatcaccagctggaacatcagtatctggaccgatatgtttttgtaattctgtcataaagctttgacaaaaacgcattacttcagcgtctgatttaccttttggattgaaatcagagccacctttaccgccaccaattggtaaaccggttaaagaatttttgaagatttgctcgaaaccaaggaattttacaatactcccggtaacggatggatggaagcgaaggccgcctttataagggccaattgcgctgttaaattgaacgcggtaaccacgatttacttgtactgtgccagcatcatctacccatggaactcggaaactaattaggcgttcgggttctgttagctgttctaaaataccgtgtgcttcgtatttaggttcttttgcaagggccgggataacagagtttaagaattcttcaactgcttggtggaattccgtttcgccaggattccgttgtttaattgtctcaaacacacgggctgcgtattcttcggctgccttagtgtcgttttggatagtagatgtttgtgccatactataatcgctccttgtttaaatattttgactataaggaaaagtagaaaacctgatacaaatacaagcgatgttataaaagagaaaaacatcggcttagttgcatcaattaggtcaacttttcttacctatgttgttagtttacacattgttgagaatattttcaagcataaaaaccaatttttcagaaattttttaaaatcaagttaatgagaacgtttgcttaagcaattaatgaaaaaattttcgggggaagggaagtttttaatgcgatttcttaactgccaagcgatgtcataaaaaataaccgcaccagggggatgcggttaaagggagtattagggagtaataacgttagagcgagccaagggataagactaattcggatactagaattattgctctaacattacttgctttcttttgggaaaaaataaaagccctccacgtaaacaagtatataaaatatgctctttaaaatcatgtgctttttcttacaatagtattctttaaggttacgaaaatgtcatgtttttataaatcgttaatttctttacgatcacttgttttgcttagctttccttctcggctttgaagttcttgtttaatatcttctaatggaatgtctttttcggctagaaggacgagtaagtggtatgttaggtcggttatttctgaaatgagctcttcattattgtttttggccgcgatgacgacctcagtagtttcttcgccgactttttttagaattttgtctaatcctttttcgaataggtagttggtgtaggagccttcttttggttgagttttgcgaagtttgatttcttcatataagtcactaagcatttaaaagtcctcctttataaggttgaaaaaacagctttttttgccggtatgacatgctgggccagtttgaatcacgcgaataagcaaagtgtcattatcacagtcggtccaaatttgctttactttttgggtgttcccactggtttcgcctttattccaaagttcatttctcgagcgtgaaaaaaaccaagtatagccagtttcaagtgttttttggtagctttcttgattcatgtaggcgagcattaaaacttcgccattttggtcatctaaaataatcgttgggactaatcctttagaaaaatcaacggtattcatgggcgaatgttcactcctttttcaagtaaagtagttttgacgtttttgatactaagttcaccgtaatggaaaatactggcagcgagtgcggcggttgcgtttgtttgttcaaaaacttctaccatatggctcgcattaccgcatcctcctgaagcgataactgggacggagacagcttcggaaattgcttttgtgagtggaatgtcatatccgtttttcgtaccatcaccgtccatgcttgttaacagaatctcaccggcgccaagttgagtcgcttttttggcccattcaatggcatctaaaccagtgtcatctcgtccacctcgagtgaaaacatgccaattggagccgttccatttagcgtcaattgcgactacaatgcattggtttccaaatttgttagcaccttcttggataagttcgggtctttttattgcggcggaattaagcgatattttgtctgctcctgcttgaagtaattctttcatatcgttcacgctatttatacctccaccaactgtcagtggaataaaaacttgttctgccgttcgttccacaacatctatcatcgtttggcgtagttcaacagttgcagtaatatcgaggaaaacaagttcatcggctccagcttcattataagctttggcaatttcgactggatcacctacatcggttaatgaaacaaaattaactcctttaactacgcgtccagctgtaacatcaaggcatgggatgattcgtttagtaagcactttgttccacctccactatgtctgacatcgaaatatttccgttgtaaagggcttttccagcaattgctccgtataatccgagttcactaagggcttctaaatcagcgcgactgctaacgccaccagaggcaattaaattgattgtaacgtgtttttgaagtgcggccatctgttctaaattcggaccagttagcgtgccatcgcggctaatatctgtataaataatggtttcaacatccatcgcttccatttgtttggctaaatctaaaaagcttacttgactgatatttaaccaaccactcgtcgcaacaaagccgttttttgcatcgatgccagctgcgattttagagccgtattttttcactgctgcctgtaaaaagtctgggtctgttagtgcagctgaaccgataataactcggtcaataccggactgaaggtaataatcaatttgcgccatactacgaataccgccaccaacttggaccggcacctttgcagcttttttcatttgttggataatttctagattaacgggacgaccttctaaagctccgtctaaatcaacaatgtgcaaataggtggcgccacttttagcaaatgatttagcttgggcaatcggatcttcatttacaattatttttttggaaaaatcaccttggaaaagtcggacgcattgtccattttttaaatctattgctgggaagatttgcatgattcagtgacctccttaaacccttttaaaatttcaagcccgatttgaccgcttttttctgggtgaaactgggcgccgtaaatattgcctttatttatcatacttggaacttcaacagaataaccgctagttgcaataatgtattcgtttggacaatttgcatagtaggaatggacgtaatagacatattcaccgccgagttttttagtgagtggggtgctgcgttttatttcaagttgattccagcccatgtgcggaacggcaaatccaggttcgtctggtagtttttcgacatgtcctggaatgagaccgagtcctttagtaaagagatgttcgtcacttgattcaagtagcagttgcataccaagacaaacaccgagcatcggtttgccagattctgccatttcttttaacgtcacatccagaccgcgccgacctagttcctgcatcgcttctgggaaagctccgactccaggtaaaataacgccatccgcttgcaaaatttccgcgtggttgctagaaattttattttgaagaccaataaaatcaagtgctttgctgatgctcttcgtgtttcctgtatcataatcaataataacaatcatttacaggactcctttagtagaatttacaccttttatttcagggtttattgtgattgcttcgcgaagagcacgaccaaatgctttaaaaagtgcttcaattttatgatgtgtatttttaccataaaggacgcgaagatgaaggttcatttctgtgttaaaggcaactgcttggaaaaattcttctactaactcagtgtcaaaatcgccaagcttaggatttgttaattcggcgtcaaacacaagataggagcgaccgcttaaatcaagtgcgcaaaagccaagtgattcgtccattggcacataggaagagccgtaacggttaatactggctttatcagaaagcgcttcttttaaacaaagacccagtgtaatgccgacgtcttcaactgtatgatgtgcatcaacatatgtatcgccgtctgcttttacatttaaagtaattcggctatgtttggaaaataacgttagcatatggtctaaaaagccgacaccagttgatatagtagaatccgcttgtgaatctaggttaattgacagttcaatagaagtttctccggtaatccttgttttacttgctgatctcatttaattttcctcctcaaaacgaatttggatggctttggcgtgggcatctagaccttctttacttgcaaggagcacgatagcatctttttcttttgcaagagcttcttttgtataagaaataaaagctgaacgtttcgtaaaatcttctacgccaagaggagagaagaatttggcggttccgcttgttggtaagacgtggttcggtccggcaaaataatcgccaagtggttcagatgcatagtttcctaagaaaatggagccggcgtttttaatttggtaaaggtagttcattgggttttcaagttgtacttctagatgttctggagcgatttcgttcattatatggaacatttccgcagtgctctttgtgataataatttttccgtgggactcggtagcttctttagcaatcgcttttcgaggtagattttcaagttgtttatttagctcgatttttgtttgttgggcaattttttcactggttgtaattaaaatagcacgggctaatgtatcgtgctctgcttgagaaagtaagtcggctgcgataaaggcgggtttagctgtttcatcagcgagcacgacgatttcagatggaccagcaatcatgtcaatatcgactaagccaaacacttcacgcttagcagtagccacataaacattcccaggtccgacgattttgtctactttaggaatggatgctgtaccgtaagctagggcagcgattccgtgcgcaccgccaacttgataaatttcatcgacgcctgccaaatttgcggctgctaaaacatgtgggttaataccgttttcgctaggtggtgtaatcatcacaattcgttttacaccggcaattttggcagggaggacgttcattaaaacagaggacggataggctgctgtaccgcctggaacataaacgccaactgtttctagtgggcgaattatttgtccgcgaatgacaccatctttttcactatctaagaaagctgattgtttttgtttattatgaaagctttcaatgtttgcttttgcttctttaagagcttcaagaaaggcgggatcgactttgttggtggctatttggatgtcgctgtttgggatgcgcagttcatttagttcaacaccatcgaactttgccgtatagtcgaacaaagcttggtcaccagtgtttttaacgttttcaataattgcttttacttcgcttgcgatttggtcggagctattactagaattttccgctctcagttcgtttagtattgcctccgttgttcctgttaaagttttcatcgcgtctgctcctcctttatcgcttgttctaattgatcaattaattggaaaatttgtgttttattttgttttaaggaagctttattaacaatcagtcgggcggagataggatacattttttcataaataactaagccgttttcttttaaagtggagccggtttcgacaatatcaatgatagcatcagcgagtccaagtacaggagcaatttcgaccgagccttcgattttgatgatttcgacatcttcgccttttgcacggaaaaatttagaagaaacagctgggtatttggttgcgataattttccggcggtagctacttggatcaaaatcaggagtagaagctaggcaaaactgacattgaccgatttcaagatcgagcatttcgtaatgtgatttggaggcttccattagaacgtctttaccaacaatgccaatatccgcaacgccgtgttttacataggtcataacgtcaacagcttttactaaaataaaagaaattggttgggtgctactatggaaaatcagttttcgctttttatcattcatagaagaacaatcaatacccgctttttctaaaagtgcgaccgcgtctttctcgagtcgaccttttgttaaggcgatttttaaagctttcattattccgcctccttatgaaaaatagtttggatactatcgcgcgcaacgtgaacgacagttggaatttgccattttttcgcaaaagagatggcgtttattggagtttcaaaaaaacttaattcgctgttcggtgtttcttgcatgagtttttctgcttgttggattgcatctaggtcgtagtggattaaaagcgttgttggcgtttgttttttgatgatgccagcacggttttgtagggttgtgagggagtcgagattaagagctaaaccaactgctggagaggaagagctggtgaattgttctagtaagtgatcgtaacgaccgccacttaaaaaattatcagcagcaaggtcggcatatcctctaaaaataataccagtataataatgaaaatcttgcacgagtcctaaatcgacactaatatctgctgcgtaagaaacagcgtccacgatagtttccatttcagttagtgctgtcaaaattcctttatcggtcgttaaatttttagcttgttttaaaatagtcgttgctgggccaaataagcgtggtaaggcgagaataaaatcatcgagcgtacttggattctcggtaacaaattgttgaatgccagtgagacttttattttgaatcaggagacgaaaatccatttcagcagtttcaggtaggtttaaaagatggattacacgtctataaatcgccgcatgaccaagttcaatttgaaaattcgggatttctagagcatttaaaaccccaatcccacttaaaatacattcaatttctgctttgatggaaggatagccaatgatttcaattccggcttgtgtttgttcgttttgttcgccgccaaagtcttcatttgcacgaaagatttttccgctataagaaagttttagagggagtgtaacaccagttgtactaacgactcgaccaattggaagggtcatatctggcctaagtaccgtcaagcgacctttttcatcaaagaagcgatatagtttggcatcagcttgatgttcagaggaaaaaacatcttcaaattcgataacaggtgtttcaatacgcttaaatccacgtttcgcaaaataatgattcacttgttgctcaatctggtatgaggcccgtgcttcgcgaaagagcttatcacgagttccagttggcaagttcttgtttaagttcatctggttagctcctttacaatattttagtttattagcatattagcacgttaaagtgtttttgtaaatgatgaaaagaaaaattgtttcatatggtataattagtgtaccatttagagtacttagggaaaagaattttgaaagagggttgaatatgaaaagagacgggcatacgcataccgaattttgtccacatggtacgcatgatgatgtggaagaaatgattttaaaagcgattgaactagattttgatgagtattctatagttgagcacgcgccgctttcgagtgaatttatgaaaaatactgcgggaaatcaagaagcagttacaacggcaagtatgtcgatgagtgatttgccttattattttaagaaaatgaaccagatgaagaaaaaatatgcgagcgatttattaatacatattggttttgaggtggattatttaattggttatgaggatttcacgcgagattttttgaatgagtatggaccgcaaacggacgatggtgtgttatcgctgcattttttagaaggccaaggtggctttcgttcgattgattttacagcggaagattataatgaaggaattgtacaattttatggtggatttgaacaagcgcaacttgtttatttagcaggtgtcaaacagtcaattgaagcggatttaggagcttttaaaccgcggagaatcggacatatttcgctgtgtcagaagtttcaacagttttttggtgcagacgggcgtgattttacagcggaagttatcgcagaatttgaggcgattcttgctttagtgaaaaaacggggttacgagcttgattttaatacggcggggttatttaagccactttgcaaagaaacctatccaccgaaagaaattgtgactttagctcgagcgttagagattccatttgtgtacggatccgattcacacggtgttgctgatattggtcgtggctacaacacttattgccaaaaatgatctttcattttgacatgtccgttttctttaaatgtaactccttctgacagtaatagctcacgctgttcttcccagttcgggacaagtcgcccagctgcatttacgacccgatggcatggtgtgatttggtcacgctttgaatgcttcagtgtagcaccaactagtctggcgttttttggaaagccaatcatataggcgatttgaccatatgtagtcactttgccgcgtggaatttggcgtacgaccgtataaacacgttcttcaaaatctgctggaaccattacatacctccgtttgttcataataaatttagtatacaggaaatagttattttataaaagttaggatgattagtaaatgccagatttttcttacgcaaaaattacgaaactcgtggtccattttgctggaaataaagcgagagaagaaggaacagaagtatcagcaaatgtgcttcaagatattggctcagaaatgaaccaaaccttggcttctattttcttagagccatttacgaaagacgattattatcaattttctcatgaaacagatttggattttaatgaggtccggacttttgcggcaaatatgtttggggcggaagaagagtttttagatgaatctaagaaaattttagagcatttatatagtgaaacaacccacccgaatattaaaagtggtgatgtatggattttctttattgagggttgcgtagttgatggagattttacgaatggtattggcatcttcaaagttgaaaataaagaagtttttctgaaaaatgattttaatggtagcgagttccagattggttatgataaaggtattacaggaacggacctcgataaaggttgtttgatttttaatgtcgaccatgattcagggaataaagttttgatattagatcggcttaaccgcggggattctgtttattggaaagataagtttttaagtattgataaaataacagatgaaaaattttatacagaaggatttgtggaagtttgcacggactatattaaacaacgggaagagtcgctgcttgataaatcgaattttgtgaaagcgacgagcgaatatttggcaggggaagaaacgttaaatatcgctgaatttgctcgtacgacaattgaaaaaccggaagaaattaccgaattcaatacaatggtagatactttcgaacgagaaaacaatgtccgttttccggaaacattccaattagatgaagaaaaacgtgaaaaactatcgaaaaaaattcgcaaaacaattaaacttggaaaaaatatttcagttgtcgtgaaagacttagaacaattggaagaaactgattttgtccaaggctatgacgaggaaaaaggaaaaaactacatgattgtttattacgattaaaagaaaaaccggggattccgcatccccggtttttttgctgtctaaacgacaaacataaagtacagtataaatagaaccatcatcacatacataattggatgcacttctttataacgacctttaagtaccattgtaattgggtagaaaatgaaaccaatcgcgataccagttgcaatagagaaagtaagtaccatcattaagataacgaaaaacgatggaacagctacttcaaatttagtccaatcaatatgagcgacattgccaatcattaaaatccctacgatcacaagcgctggagtcgtaaccgcacttgtaatgacaccaagaagcggcgagaagaatagtgacagtgagaaacagatagcaataacgacagctgttaaacctgttcgaccaccaaccgcaacaccggcagttgattctacataagaagtagttgttgatgttccgaaaatcgctccaaaaactgttgccagcgaatcggaaaacagcgaacgacctgcgcgcgggattttattatcttttacaaacccagcttgagtcgcaaccgcaacaagtgtccccgcagtatcaaagaaatcaataaagaaaaatgtcaaaataacaatgagcatttgtggtgtgaaaatatctggtaagtgaataattgcttgaccaaacgttgactccatacttggtacagaagaaacaacttgagttggcacgtcaattaatccaaataacattccagcaatggcagtagttgccatcccaaagaaaatcgcacctttccaaccaattgtcatataagctacagttataataatcccaaaaacagcaagtaacaccggaccagaatgtaagtcaccaagtgctacaatcgtcgaatcatttggtacgataattccagcattttttagtcctaaaaaggcgatgaaaaagccaattccagctccaacggcaaattttagttcagttggaattgcattaacaattttttcgcgtagtcctgaaagtgttaaacaaataaatactagaccagaaacaagtacgccagctagtgcagtttgccacgggataccccactgcgcacaaaccgtataagcaaaaaacgcatttaatcccataccaggagcgagcccgattgggtaattagcgataagtcccattgcaagggaaccaacgactgacgcaagaatagttgctacaaaaacagcttttaattccattccagtagttgcaagcatagatgggttgacgaaaagtacataagccatagacagaaaagtcgttagccccgcgagtatttctgttcgaacagtcgtcttgttctcgcgtagtttgaaaagtttatccattaaaaaaagcctccctatttatgttgtcgcacataacggaaagagcctaggtaaaaaagggaataataaataaaaatagcaaaaaaatccctattaaattttacaatagctcgtagcctggcattttacggttgcctggtagaaacgaacggtccatattaccgaacttatacgactttattattgtagacgattagccgatttttggcaatacatgaatgaaataaaaataaaaaccaaacttttacataaataagtttatacttttaaaaaaataaggtataataaaatcaaataatagttggaggtaaaaaaatgacttataaatttccggataatttttggtggggaagtgcagcatcaggcccacaaacagaaggcgcagcaaatgtagatggcagaaaaccaagtatttgggatcactggtacaaaatcgaaccaggtcgtttctttaacgatgtagggcctacgaatacatctaatttttactatcaatataaagaagatattgctttaatgaaacaaactgggcataattctttccgtacttcgattcagtggtcacgccttattccagatggtattggcgaagtgaatccaaaagcggttgatttttacaatcgtgttattgatgaaatgcttgcaaataatgttgaaccatttatgaatttatatcattttgatatgccaatgtcgatgcaagaaaaaggaggtttcgaaagccgtgaagtagttgatgcatatgctacttttgcaaaaacttgttttgaattatttggagaccgtgtgaaacattggtttacttttaatgaaccaattgttcctgttgaagcaggttacttatacgatatgcactatccgaatgtcgttgattttaaacgcgcgacacaagtggggtaccatactactttagctcatgcgcttgctgtgaaggaattccacgcacttgaaattccagaaggccaaatcggtattattttaaacttaacaccgtcatatccaagaagccaaaatccagctgatttaaaagcggctcatattgcggatctaattttcaaccgtagtttccttgacccagtaacaaaaggggaattcccggctgaccttgtagaaattattcgcgaacatgacgcgcttccagaatatacggaagaagatttggcgataattaaaaacaacattattgatattcttggtgtaaactactatcaaccgcgtcgtgtgaaagcgaaagaatacgcagcccacccggatgcgccatttatgccagaacatctctttgataattatgaaatgccttaccgcaaaatgaatccatatcgtggttgggaaattttcgaaagagcgatttatgatattgcgattaatctgcgcgataactacgataatattccattcttcatttctgaaaatggtatgggtgtagaaggcgaaagtcgctaccgtaatgcagatggaatgattgaagacacgtaccgaatcgatttcattaagagtcacttgaaatggctgcataaagcaattgaagaaggttctaactgtcatggttatcatctttggacattcatggattgctggagctgggcgaatgcttacaaaaatcgttatggcttagtagaagtagatttggacaatgatttcaaacgtaccgtaaaagcatccggtcattggtacaaagaactttcagaaaacaatggttttgaagactaaatgtgataaaataaaagtattatgtgtaaacaggtgaacttccgtggctcagaaccagacaaaatatagctttattgctgaagaaatccgcaaaagaattatgaatcacgcctatccgcttaatcaacctattcctgatgagataactttggcgaaagagtttgattgtagtcgaatgacaatgaaaaaggcgcttgaagtacttgtacttgaaggcttactatatcgtaaacgcgggcatggtactttcattatcaaatcggcgctggacgcggaccgtttgcagattcataaccaagaagtaaatggtttcactaaacttttagacggaaaaaaggtcattagcaaagtaattgagtttaaagtcatctttccaacagaagaaattgcggaacgtcttcatatcgaaatggaaacgccaatctatgatattcttcgtgttcggctagtgaaagatgaaccgtatgtgctagaacatacgtatatgccggttggggttatcccaggcattaaccagcaaattttagaaggttcgatttactcatatattcaagacgatttgaacctaaaaattgctagttcgtacaaacaaattcgcgcggataaagcgacactgcttgatcagcaatatctcgactgcgcttctgatgaccccgttgtcgaagtagaacaaaccgtttatttaaacaacggtctcgcgtttgagttttccagatcgcgtcaccgttatgataaattcgtgtttactaccgttaatattgctagacgttgaaaagacgctagacaaagtgagcaatcattttgtctagcgtcttttttgaatatctaagcagtttaagttcaattctatacaaaagaatgggtttgttcacaaaatagacatatttacacgattgataataatttaggattcttgtataatatttagcccaattacgcacaaattttaaatatagttctaccgtttaggctatacggaactgtggaaagaaataatattactcctagtataagattatttaaatagtttaaagaaatcatttttgttcacaaaattgacacatttcacctcgttgataatgttttttgcctaatatataattgttgagctcaattaagtacaagattagtactccttttgataggagtgtgagcagttaaaatgagaaattagttatatgaggagggatagtactatgaagaaaaaatactttctttgcgtattcgcagtaatattatttttcacaggttttctttttggaaattcaccggtgaatgctgctgaaactgatacaagcaatgtgacgtataattacattgatatcagcacattaacagaaacgcaaaaaaatagtattatcaaaggaaatccaaacgagacacttacaaatgattatgaaaattattcctttgtgtatcaaaaaaacacatcagaaccaactacaaatacagataatacttctgacaataataaaaatcaaaatgggacactattaaaagcgggagatgttggcccaaatagttatttaatcatcctagggtttattttattcggaagtggtattggacttcttacattgaaaaaaagacacgccagacagctgctagtatttcttgttgtccttggcggtagtagtttgttagttgggtcgattgtccaagcaacagaaaatagtaacttaaaaactcaagaatctcaaacagttgcaaaaggaacgaaagaaacgaaacaacccgaatcaatggaagggtatacgtatgtaggatatatacacacaagtaaaaataatacaccgcccgtagttgaaaaagggactgtaactgtaaactatcaggatgaacaaggaaattcactggcgactagtgaaacactcgaaggcgacattgaccaaccatatcagactgcaacgaaaaatattgagggataccaattaaaagaagtgaacgggaatacaacaggaacttttacagaaaaagcgcaagttgttacttatgtttatcaaaaagtgcctgtagctaccgtaactgttaaatacctcgatcaagatggaaacaaaatccatgatccacaaacaattagcggtaatattggcgaaccatatgatgcttcaacagataaatacaaattacgaattgagggatacacattagatacaacgaaactgccaaacaatgcaaatggtactttcactaatcaagctatagaagtaacgtatatctatacgaaagaagcgcaagatgttaaaataacaattaaatttgttgatagcaatggggatccatttgttttaacggatttaacaacttataaaaacggcgatttagtacctatttatcctaatttagaccaatatcatatgagattaaattacaatcaagaaatttataatcaaggtgaagcggtgcctgatattgttattccagctaaagaaggggaaacatattcgttaccggaaagaatgacctttaatatactggatgatcaagggaaacaaatcccctacgttatttcgcaaaatgccgatctcagtagtaccgggattgagaggtgggaaaactacctaagtataccaaccaatcgcgaaggaacactgactagcgaagatgtggtggttacgtatcagatacttgtttatggggttatgattcctgagccataagtaaatcaaattattcgataataaaaaagcaatctcgtctagagattgcttttttaaatacgttctttacgtccacgaaatgccctaatactatgattgaatacttccgagagcattaatcccgctgctatagcgccagcaaccactgtaacttgtacagaaaaaccaattgcttccgtataatcacctaacacaaaattgcgcacagcttggtaagcgaggcccccgggaacgagtggcacaattccgggaacgttaaatatcgtaatcggcatttttttatgttttgcaaaaaagtgactcagaattgcgacgacgaaagcgccggcgagggaagacgcccctgttccagaatccatttgcatcaaagtccaataagccatccagccaaatgttcctgtaataccgcaagcattcagcgctctttttggcacatttgtaataatcgcaaacgtcaccgtcgcaacgtaactcagcactaattgaataataatagtccaaactaaatccattatagcgcctcctttataagaaaaagcggaaaacaaccgcgattccaattcctattgcacaagaagtaagtagcgcttccgttccgcgtgccattccactaagcaaatgcccagcaatcaaatctcgaaccgcattcgtaatcggcaccccgggaacaagcggcatcacgccaccaataatcatcgtatctaaattaattccccaaccaatcgaaatcgtcaaaacagctaaaagcccaacactcaatgaagctaaaaattccgcgagaaactttaccttcataaaaatctgcgtatagtaaaaaatgataaaaccaatcgcaccaatgatacaagttggaataaaatcaaaccaaccaccgccaaaaataaccatcaacgatccactaacaagtgaggcagcaataatttgcaaccaaatagggaagtagcgaacatctttatctaaattaacgagttttgtatgtaattcttttaaggaaattctcttttcagcgaaatccctggaaaattcattgaccatagatactttttctaaattaattgttcgtgttgggatttgctgtaattgtacattacgctcaccttcaagtgacataaaaagcccagttggcgtcacgaaactaatcccttttttattactagcgatggtggcgatgcggttcatagtatcttccacacgatacatttctgcaccactttccatcattattttaccggccatcaaacatgtttccagtaaataatctgttgtttcattcgacataactaagcacctccaaccctttagtacttctcaatcgtaacgcaatcaatccaaaaattctagtaggaagggcgctttttttgaattcacgattgtttcaatgtaatttggggtaaatatttgatagtatggtagatatagattcggaaaggataaggattattttggcaaatattgaatatgaaatcatagaagaaataggcgtattatccgaaaatgcacgtggttggcggaaggaattaaacaaagtaagctggaacggtcgtccgcctaaatatgacatccgcgactggtcagaggatcatgaaaaaatgggaaaagggattacactaactgatgaagaggcagaagcactaaaaaaactgttagattaagggctggtgtaaagaaatgaaaatgtatgcgtatgatatttatgagccaattgggagaaaagatggggagatttttccagtgatattcgcacttcacggttttggtggagacgaacttgatatggcgggccgattagaattattaatggaccgctttgtagtagtttctatgcgtggtgatgtggaatatggaccaacttatggattttatcatatggtaacagagggcgatccaaatgcgcgtgaggttgattatacaagcttacgggtagcagaatttatcgatgaggtttgtaatgattatgtctccattgataaaaatcaaatcttccttgttggatttgatcaaggagccgttttaacaatctctataatgcaaagttatggagggcaatataaagctgctgcgctacttagtggtcgtttgccacattatttggaagaaagacccgctaatttaatgctaaaagataaacgtatttttatcggtcatggcattgaggatgcagttattcaaatagccgaagcagaagaaattgctcagtttttccagaaaatgggttgtaatgtagaaaaacatagttattttgtaggccataatgttaacgaagctgaagaagacgacttatacagctggtttgaaagtttcttgccaaaccaaaatcagccagtaaaaaaataataacaaaacagcgaccaagcaattggtcgctgttttttatttatccaaagtgaggaaaagaacttttaaataattcccttcaggaaagtttttatttactgtgaagtctgctggaagtgagtgcgtttcgacaattttataagtgcgatcgcttgtttgaaacgcttcggcaattagttttttaaatgctttcatcccaaatccggcgtagtttgtagaagcaataatggtgccatttggagcagtaatatcaataatttcacggagcatagctgggtaatcttttgcagcgcggaaggttacttttttagtgcgcgcaaagctcggtgggtcaacaacgactaaatcaaaagttagttttttccgtaaagcatatttaaaatagtgaaaaacatcttctacgataatatcctgagaatttggatctagtccatttacttctaactgttcttttgttttactaagtgaccgtccagcaacatccacactggtggttttactagcaccaccaaatagagctgctacggaaaacgctccagtataagaaaaagtgtttaggacgtttttggaaacagcatagtcttcacttattcttctccgtacgtctcgctgatcaagaaaaattccagtcatccaaccatcatctaaataagtagcatagttaatgccattttctttaataatcagcgggaaagtagctttttgaccagcgacaaaatcatcttttgtatcttcttggaaacgtcttttttcgtaaatacctttaacttctggaaaagataagaaaatctctaaaatcattttttggaaagagtatacgccgaggctataccactgaatcacaaggtagccgtcataaaagtcagcagtgaagccgccaaagccatcaccttcaccgttgaaaattcgaaaagctgtagttgaatcatctgcaaataaaaattgacgcttttcgatagctgctgtaattacagttgttaaaaagtgctcatcaagttgctgttgtttatcccaggtgaaaagccagccatcgcctttattttgttttccgtgatacccacgagctataaattgaccattcgtatctattaattctactaggtcgccttcctgtagatcttttggccatttttcgaaacgttcttttagaattaaaggatagccttctttatagccttttgtaaacttaggaaatagttttagttttatcgagtttttcatcatgcaccgtctttcattaagataaaatttccaacaaaaaacctgtgaagcgaacttcctgctccacaggttactttaaattattaattaattatacgcgaccgaatccaactaggaatttaccccagccagcgccgtggatattatcatacttaacgccattgtcttgcgcgttaatcatttgaccattaccaacgtaaataccaacgtgagaaattccgctaccatagtcaaagaatactaaatcaccaggttttgcttgtgattcggaaattcttgtagtgctagcgtattgtgcgccagaagtacgtggaagagaaattccagatttagcgaatacatatttagtgaaaccggagcaatcaaatgtagttggtccgttaccaccccaagagtaagcttttccaagatgtttttgagcttcagcgattaaagcacttgcgctcgcattgttagtggaaccttggtttgtgttagtattcgtgttcgtgttagtatttgtgtttgtgttttttgatggtgtgcttgcatttgtattgttgtttgttgtgtttgttttatttgtgttagtagacggagcaggagctggtttcgcagcttgagttggtgctttagtagttgtttgttgttccgttgcagtttcttttttctcagtagtagcagtattcgcatttgaattttcttttactgctggagctgtttgtttttcagctgcaggagcttgagtttttgtttctgcttttggagctactgttttagttggttgtttaatagctaatttttgacctacataaatagaagaagaagataaattattccatgacataatatcttgaacagaaacaccgtacttcacggataatgcccaaattgtgtcgccgcttttaacgttatgtgtagtagcattttggtctactactggagcttctttagtttcagctgcttttggtgcaggagcagtttgttgtgtagttggttgttttacttctgtttttgcttctgtagcaggtttaacttgttgtgtcgtttcttttttcacttcttgtttaacaactggagtgctagttgctttgtctgttaagtatttaccgttaacgtaaccagtttttccatcattgtaagtaattttgtgccaaccgtttgattctgttgtttcaacagttactttggttccacctttaatggaagtaagaatgctgtggtcaactccagcgccagaacgtacattaagccaagttgcgctaacagatttctctgctttttcttcagtagcaacctcgtttacttgtagtttttgacctggtacgattttatcagtggttaaattgtttgcttttttaatggcgtcaacagtagtccctttgctctgagcgataccccaaagtgtatctccagcttcaactactactgtgcttgcggatgcgatagttggtgcagcaaatgctgtaaccgcaatcccagctgtagccgcgatagttgcttttttcatattcataaaactcctctctttttttcagaaaatctcagtacgcaattagtaattgagaattaattttatagtgattaatacttagtttacccagtttttacgcaaaaaacaaatagataaaagctgttataaagagagatagcggactataccaactatttgtaatgaaactgtaacaattaaaaagcgaacgtgcattcttagggcttgagatgtactgctggggagtcctttaaggtgtaagtaagatatgaacaaaaagcaacaactttcgctatgggaaacctattgctttttgttaatagaaaaatttaatacatttgtaatattattctcatcagtttttccttttttctaaacctgaaataaattgccagatgactttgtgttattctataatagaaggtatggaggatattatataatgagacagaattatgatgatcgcaaaattgtgaaacagtatcgagaaatagcccgtcaaatcgttagaaaagagggcttatataaaaatatggaccaagatgaacttcgcgaacaaacgaatttttggcgcgaaaaattcaagacaaaaccaatgactgaacgagataagattaatatttttgcattagcaagagaagcggcaagtagaattattggtttggatgccgtggtcgttcaattaattggtgcgcttgttcttggtgatggcaaagtggcagaaatgaaaaccggtgaaggtaaaacattgatgtctttatttgtgatgtttatcgaagtgatgcgtggcaaccgtgttcaccttgttactgcgaatgaatatttagcaagacgggaccgggaagaaatcggacaagtgttagaatatctaggtatttcagttgctttaaacgaatctggtttggataaagatcagaaaaaagcgatttatacagcagatgtcatttatggaacagcttctgaatttggttttgattatttacgtgataatatggtccgtcaaaaagaagataaggtacaaagtggacttgattttgttttaatcgatgaggcagattccattttaatagatgaagcaaggactcctttacttatttctgatcgtaaagaagaagatttatcgctttatcaaacggcaaatgaactcgtgcaaacgatgatgaaagatgattatgaaatagaagaacataagcgttttgtctggttgaatgatgcggggattgaaagagctcaaaaattttggggcgttgaatcactttattccgcggaagcacaggtggaacttcgaattacaatgcttctaatgcgtgctcattttttgatgcataaagataaagactatgtcgttcttgatggggaagttttaattatcgacccgcatactggtcgcgcgcttccaggtcgtcgctttaatgatggacttcaccaagctattgaagcaaaagaaggcgtggaagtaaaagaagaatcgcgcacgcttgcgacaattacaattcaaaactatttccgaatgtataagagactctctggtatgacaggtacggcgaaaaccgaagaagaagaatttcggcaaatttacaatatggatgttgtcgtaataccaacaaatttacgcgtcaatcgtgaagatatgcccgatgacattttttatacgaaaaaggaaaaaggaagagcgattgtttatgaagtttcttggcgttatgaaaaaggtcagccaacactaatcggaacttcttctattaaaagtaacgagtggattagtagtctgcttgatgctgcaggaattcctcaccaagttttaaatgctaaaaaccacgcccaagaagcggaaattattgccaaagccgggaaacgtggcatggtaactttagcaacgaatatggctggacgaggaacggatataaagttagatccggatgttcataaactcggtggattagcagtaatcgggacagaacgccacgagagtcgtcgtattgatttacagttaatggggcgttcaggtagacgtggtgaccccggttttagtaagtttatgatttcattagaagatgatttattagagcagtttgaaagtaagagttgggaaaaactgtctacgaaacttaagcgtaaagcacctcgtgatggaaaacctgttaactcgcgtaaaattcactctgtcattgtagatgctcaaaaacgtttagaaggtgcaaattacgatattcggaaagatttgctttcttacgatgaagtaatcgatttacaacggaaaatggtttataaagagcgcgatcaactgttagaacgaaataaactaggtgtttcttctgaaaaaattcttcgagaagtcgcggaatattcatttattcatccacttgaacttgaggaagaagagctggagaaatactatagtcgtcaaaaagaattacttggtggcactaaattcccaatttccttcgatcaagtgacattaatggacccagttgaggttgtggaagaaatagttgcttggcataagaaagaacgtaataaattcccagttgaaacaattactgcaattgaaaaagaagtgtatttaaacttgatggaccaaatgtgggtaatgcatcttgacgctatggttcaattacgggaaggaattcatttacgcgcatatggacagcaagatccgctcgttatgtatcaaaaagaaggtgctcaattatttgagaaattccaagctgactatcatttctattttgcacatgctttacttgaattagatccagatggattgattcaaggataaattacaacttacgcctgatttttttcaaatttatgggtaatttagtgagaacgagggtattaacctatataatagtaacaaacaaaaataaatttagacaaaagaaggtggaaaagtgaaggggacattaacaaaattcaaacagttttttattgagaacaagtttgtactaggactattaattttcttgctagtagcgcttgatatttatgtattaacaaagattgcctttatttttgatccactaatggtaattcttaaaaccgttgctgcgccaattattttagcgggaatttcctattacttatttaacccaataattgactggcttgagaaaaaaaagtggaagcgaggctgggcaattgccttgttatacttagtaattatcggtttaatcattctattatttagttttgttattccagcagtgaaagatcaaattgttagcttatttaaatctttcccaggttattgggatcaaatcacccaaaaatttgacgaatttagtcgttcgagcttgtttgatcaaataaaagataaattaagcactaatatgagcgatattatgaaaactctttcgactaaaggaacttccgttattaatagcgcgattacaagtattggaagtattgttggaacggttaccgaagttgtactagcaattgtaactacaccgcttgtattattttacttattaaaagatgggaaaaaattaccggatttcctattaaaaatgttgcctgtaaatggtcgtgcgcatactcgccaagtacttggtgaagcaaaccaccaaattagttcttatattcgtggacaaattattgttagtttatgtattggtattctgttatttatcggttatttaattattggcttaccatatgcattaacgcttgcgatcattgccgcatgtactagcattgttccatatttaggaccagcaatcgcaattacaccagctattattatcgcaattgtaacttctccttggttattaattaaattaattattgtatggtgtgttgttcaattattagaaggtaaatttatttcgcctcaagtaatgggtaaaacattaaaagtacaccctattacaattttattcgttattttagtagccggaaatcttttcggtatactcggagttatctttgcagtaccaggttatgctgtgcttaaagtagttgtaacacatgtatttatttggttcaaacgagtttcagggctttacggagaacaacctgagagtgagtatgttgtaacgcctcctgaagaaaaagaataaaactaacaagagttctattagttagaaaggtattttctagcttaatagggctctttttttgatgattaaaagtgttcacagaaaagacataatttttttctttacaagatgagtccggtaatagagcggtttttatgtaaaatttttaacgtttactaaaaagaatgtgataaaatttattatttttcataagttgtacatatttttgaagctcttttcgtcataatataaagataacgcatgacgaaaggagaaacaaaatgattttcaaaaaaacattaattgtaggattaattggcataacttcagtcacactttttgcaccgtctgcttttgcagtatcttcagaaggggattcaaaagcatcaattaaatttaaagcaggaactggggtagttaatccggttgacccagaagatccaacgaaaccgatagatccattagacccaagtaatccgactgatccgggaactggaaatactggttcgctaacaatggattatgtatcttctgtgaatttcggggaacatgaagtatccactacggaacaaagctattcttccacttcaagaaaaccgtttattcaagtatctgaccgccgcggaacaggtgctggttggaaggttactgcaacagcaactgcctttaaagacgaggatggagcagcttcactatcaggagctaaactatcatttaaaaacggagaaacagtttcttcaagtacaacagcaacaacgccaactgctgttcaaacagtagaactacctaccgatggaacttcaattgtaaatgttgtttcggcaaaagaatctgaaggtatggggacttgggttaatcgttggtttggcgcgacacctaatgatgcagctagcttaaatgacaatgttaagttaatgataccagcaggaagtgcaactctaggagaccatgaagcaacaattacatggacactatctgacgcaccaggtgtttaaaaaatttgcgtttagaatttcatttctagacgcaaaatttttattaaagacgatgaaaggaaggtttaattgaaaaaaagttttcttagcatattattccttgttccattattagtgacattcggcaattttacagaagcaaaagcagcggagggagatgtcggctattccgttcaagctaatattcccgccaatcaaatagacaaaaaacaaacctactttgacttgaaaatgaaaccaaaccaaaagcaaacagtagaaatagatgtaatgaatagttcaaatgaagaaattcaagtagaagcatccatcaattacgcgtcaaccaaccaaactggtgtgattgattacacgaaaaatgacctttctaaaaaagacaaaagcctgaagtacccattacccgcattagctacaataccagacgaccaaaaacttctaacgatacctgtgaatggcaaaaaaaccgttcaagttacgattgaaatgccagacgaatcaatcgatggagttgttttgggcgcagtacagttcaaaaagaaaaatcaaacggagaccaaaaaaacaaaaggtgtctcacttaaaaatgaatattcctatattgttggtatgcagttatctgaaaccgacaaacaagtcaaaccacatatgaatttattaagtattaaaccaactcttatcaattatcacacagcgatagttgccaaattacaaaacgaccaaccagttattatcaaaaacctaagcattgatgcaaaagtgtatcaagatggctcgaataaaatgctttaccaaactaaaaaggcagatatgacgatggcaccaaattccaattttgacttcgggattgattgggagaataaaccgttaaaagaaggtaaatatagattaaaaatgtctgctacaaatggcgtagaaacttggaattgggatgaaacatttacgattggtaaaaaagatcaagatttaaataaagaagcagtgaatttgaaacaaacgagccagtggttgtatgttgcgattgctgcaggtgttttacttatagtattaattattatactagtaattagaaaacgaagaaataaccaagaaaaataaagaaaggagctggcacattggctttcaaaaaattaatgattgtattgaccatagcggctctttttctaagttgtaacctagtagtagatgctgaaacgggtagtgataatttagcagcaaatgaagcggtagtcactaatttcgcggaactgaaagctgccatttcagaagataacgggattgatactgtttatttaggagcagatgttgaattatctggaggtattatcatcccagcttcgaaaaaaacttttactttatcaggaaaaaatccagcaactggtgaaattcacacgttaacagaaacgatggcatcatctggggcgcagagcagtgtcatcacagttaacacaaatacaggcacaaaagaaaccacgttaaaagatatcaatgtgattgggaaaaactactatggaactatttcggtttacggggctgcaaaagacgtcgttcaaaactatgaaaatgttcattatcaaggtccgcaaatgatttataatctaaatggaatagctaatttcaaagggacaaatgatataacgattgcctccgttgtaagcggatcagcagcagtaaatgaagttgcggaaattaaaggagtaaacgtttctggaaaactaaatattaatcacgcaagcggaaatgcgaatagtgcgttttggtttggtggtggaacagctgatgtcaatacttttacagttgaagaaaatgcagatgtaaccgtgctttctaacgggacagggatgttttatcgctcaggcacaaaaccaattgatattgatgtaaaaaagaatgcgaaattaaatattacctctaacaataatatttttcgtgatacaccaggtggggcggttaaaattgctgagggcgccgatgtgacaatgacaaaaactgctggctctaatccacttctttggtcagcggataatattaccgtcagtccaaatgctcgcttaattttaaataaaacaggcggaactggctatattatccaattttataatgcaaccgcgaaattagatattcaggatcctctaagctttttggttgcgacgaatagtaatacgccaatgttttactggccttatgcaaatacatttaatttagacgcacaattggtaaattactggaatacagctggagcaattgatcggacagaccaaccagcacaaatttttaatttaccgagtggggaaaatgttactgggagtctaacttattcaggaacaacaacaaaaattctgtctactaatgctggaatgacgccaactaatttcaatcaaaatacggcgcgtatgattgcgatggggcgccttgaaggaacgataaatccagtgacggatggagaaagtgaagtcaccggaacagcgacaccaaatgcatttgttaatattgcgtatacagaaaatggtgaaaacaagctattatcaggacaagcagatgacacgggcaattatcgaattgctatcccgaatggctttattaaaccttacactgatctagtaacaacaattacacaagaccaaaagcgaattacattagatccagtaactgtaaaagatgtgactcctccaagcggagatgctgttccgcaagtattaaacataggggattcgctcccagatgcacaccatttagttacgaacattactgatcactcagatggtacgacaggtgaaggtgttactattaccatactaaatgaaccagatacgaatgtttttggaccaacagaagccattgttagaatagaagacaaggcgaataattacgctgatattcatgtgccagtttttattaaagatgatttgacagaaattcaagatgagcaagcattacgagcaaaagatttttccgtaaatgtaaaagaccttattaatcttaatgatgaagaagtgaaacaattcattctagataaatcggaagcaaaagcattcaatatcgtaactggtaaggacttaacgcctgatgtgaaagtaacaagcacaaatctaaaaaaagaaacaggaacttacacagccaccatccaaattggaactttgacaaaagaaattaccattcaagtaactggtgagctgaaattcaaccatgtgccagcaacaatgtcttttgaatcaatcgaacttaataatcaaaaaagtatcgcgaaacgaaacacggattttgatttatctgtacttgactcacgaggagcaggtagcaagttcagcgtgacagcatcagtgaaatcaccgctaacttcaacaacgaatccagcacacacgttacctaatgggcttattttcatcgatagcaatggtgagaaaaagccactttcagaagaaccaattactatctaccagtccaatgcgaccgatgacatgattgttcccattacttgggcagaaaatcaaggcatccttgtagaagcagatgcggctcacgcttatacggatgaggactacgagacaacaattgaatggacattgacggatgctccgtagaaaacctgttaattaaagttaacaggttttttgcgttataagccctttgtttttctatatctagtcgtttctcgtataataacgataagtaatatgcgaaaggtggaagcaaatgacttcagtaatgtggtttcgtagagatcttcgagtaaatgataataaagctctttatcatgcctgtaaagaagaagatttaattttgttatttcaagtaaatccagaacaatttatcaaaggaagccctagtcaccaagcatttttcgcgagtgtagctcattttcaacaagaactaaataaaaacacccatttgcaaatcatgtttggcgagccaatcgagctcctaaaacaattaaaagaaaaaataccaacttgggataaagttttcttcaaccgcgatgaaacaggctacggagcgagtcgagacgaggctgcccgagcattctttgctgataaggaaatcacagttcacagctatcacgatagttaccttcattcagctgaagaagtgaaaaaatccgccacagaatactacaaaatcttcactccttactacaaaaaatggcgcgaagaaataaaagaaatgcctttaaaagtcactttaaaaccagaaaaaattaggaaagaaagcttatttccaaattatgaggaacagtttagagaactgattcaagatttaccagcctttgattccggtgaaaaagcagcgaatacgagacttgcaaactttgtaaaagaagatttagcagactatgacaaagcaagagacgtcccagcgcttgataaaacgagtcatttatcacgctatttacgaacgggagagatttcgattcgtacggtttggcaggcacttcaaaaagaagaagctacagaaggacgagcaacattcgaaaaagaactgtgttggcgcgatttttataatatgatttatgtttcttttccaaagcaaaaaaatgagcctattcaagaaaattatcgttttattgaatgggaaaataatcgcgaatttttcaagaagtggcaagacgggcaaactggttttccgcttgtcgatgctgcgatgcgccaattaaaagagacgggctggatgcataatcggctaagaatgatcacggcttcctttttaacgaaggatttactaattgattggcgttttggcgaaaaatattttcaacaaatgctaattgattacgacccagcgagtaatattggcggttggcagtgggcggcttcgactggaacagatgcagtaccgtattttagaatttttaatccaacaacccaatcggaaaaatttgatccagatggtacatttattcggaaatatgtaaaggaattacgggacttgccggataaattcattcatcaaccagaaaaaatgtctgaaacagagcaaaaagagcatggtttgattttaggaaaagattatccgcttccgataatcgaccataaagagcgacgaaaattagcgattgcgcgatatgagtttagcaaggagcattctaggggaaatatatagataatgaatcaatcattgagttaaatgattgatttttttatggcagaaggtaagcagagtgagtcttgagcaatcttttaggagtaagatcctaggtatgttaaaattcacttatcaagtgataagggggaatctaaatggcgcaatttttaaagctatttgtaacaagtgctgtagttttcttagtttttgatcttttttggttgctcgtagcttctaagaaaatgtatcagcagtttatcggggatttaatgggggatgtaaggcttgctccagcagtaattttttactttatttatgtagttggggttacttttttcgtattagtgcctggaacggagaaaggtagcttaggttatacgattttagccggagcattatttggtttagtttgttacgctacgtatgatttgacgaacttagcaacattaaaagattggccgattacgatgaccattattgatctcgtttggggaacggctgtgacgactgtgacttccgtaattgtctactttattaatctgcatttcttctcaggaggaggttcgctttgaaggagtcggagagcaggcttctattacaaagcatgttgaacggggcagctgaagtaattagtaaaaaagatgagctaaatcgaattaacatttttcccgtagcagatggtgatacagggagtaatttagcttctttaatgcaagcgattattgataatgtgtcgccacgagaatactccacgaaagaactacttgaagaagtggccagcgcagcactgataggagcacgtggcaattccggaatgatttttgcccaatatttaaatgcggttgccgaaagctatcatcatttggaatctacctttgatggactagtcgaagcatttcaaaaagcagttcataaagcctatgaagcgttattagatccaaaagaaggtactattttatcggtgatgaaggcttggtctgaggcgcttgctgggacatatgagcaagaacgttcttttcaacaatcgctcttaaatgcgcaaagagttgcggaacaagcgttaattaatacagaatttcaaatggctattttacgaaagaatcggttagtcgattctggggcgaaaggtttttattatttcattgccgggctgaccaaagcttattgcgggggaacagtttctacaccaaatagttatgtggagcaggaaactcggcaagaacacactcattttgagacaagtgaaccgatttatcgatattgttctgaatttattattaaagaagcgaccatctcccatcaaacattgcgagaagtccttgcgccaaaaggagattccttagtgattgcagggaatgaaaaacaaattaaaatacacattcatacaaatgaaccacaagaaatattaagtttactatcagaatttggaaaaatgacctatcaaaaagtagacgatatgcgacttcaatatgaggtaacgaaaaatccacgagcaaaaatcgcgattgtaaccgattcgattgctgatttacccgaagatttcttattagaacatcaagtgcacgttttaccgatgaatattttagccggggaggaaaattttctcgataaattaacagttggaccaactttgatacaacaaaaactaacgcagcaacataaaatgagcacggcgcaacctaccattcgaacagtcgacgcattattatcgttcttagaaaataagtatcaacatgtactagttattgcagtttcagctaaattaagtgggacgtatcaactaatcaagcaacgaattaaagcgcgcgatttgtcgccggaatggattcgcgttattgattccaagttgaattccgttgctcaagggcttctagtaaagcaagcagtggaattagtggaagctggaaagccttttgatgaagttactcagaaaatcgaacagttaactgctcagacatttatttacgttgcagtggctgatttggcaccaatggttgagtctggtcggataccgcggattttaggcaggttagcacagaaactttctttatatccgattgttagtctggacagaaatggcgaaggaaaattgataggtgtgtcatttagtcaaaaacaaagtatgaaaaaagtcattaaaaaagttgcaaaattacaactgaaagagcttgctattacgcatgtttcttcagaacgtgatgcgaaactttggcagaaagaacttgaggcaaaaataggaggaaatagctatttagtggatagttcagctgcaattgccatcagtgccggactttccagtgtcgcggtcgcagggattaaaaaggaggaaacaatatgatgtattggatagtagcactcgctttacttgtctattttgtactttggtttatcatttcaaaaataaaaggtaaatattcgctggtagatattgcttggggcgggggatttgttgttgttgcttggaccggatttttaactacttttagtgtaacgacgcaaagtttgacgattcttattttagttactttatggggcgtacgtttattttggcatttagcacgtagaaattggaacaagccagaagattatcgctacgttaatatgcgcaaacgctggggaacgacattggttaatttaaaagcctttttaaatgttttcgttttgcaaggtgttctcttatttattattgctttaccaatcacgcatacttttgctaatgaatcagcggaatttacttggtggcaaatcgcaggaattgtaatatggattatcggttttgtgtttgaagttggtggcgacctccagttagaaaactttaaaaagaacccagctaataaaggaaaactactaacgacaggtttttggtctgttacaagacatcctaattattttggtgaagctcttagttggtggggtgtatttttagtcgcttttacacaaataacagatctttggctgattactagtcctattgttatcactttattattactatttgtgtccggcgtcccactacttgaaaaaaaataccaagaccgcgaagactttcaagcttatgccaaaaaaacctctaaattcttcccttttattggtaaaaaaggtctgtaaaagtactgatttaagtaggaaggtgctattaattgctatttgccgactagtgcgagtagaataagagttgggtatgaaataacatgcctaaatacaatacttatgaggcgagaggggtacaacagatgaaaaaagaaaaaacagtgttaattatgaatttcgatgaagaaagtatttcttatcaagctttctctgaaatgaaaagattgcaccaagagcgcaaaatcattggttatcaaatggcagttgtaaaacatgagccaggaaataaacttgttgcacaagattttcttgattttactggtgccgataaaaacatgaaagatagccttattggtatgctaattggtattttaggtggaccatttggtattttgattggttggatggttggagcaatcgttggttccatgcaagatgctggcgaagtgaaaaacgctctatccgtatttgaaagaacgttaaaaacaattccagaaggttcgacaggcgttatcttaattgcgacagagcaagaattagctaatgtaaacgatgttgtaatggatgagttacatggtcgtgtacaacgcatggatgaagcaattgtggccgaagaaattaaaagcgctcaagaaacagaaggaaaagcaaaagattctgctaaaaaacattggtttggaaaataaatcagctaaatgaggacagagaaatctgttctctttttttgttttaataaggataaaatggggaaataaacaacataaaacagtcagatagaaacttttttcaagatggtaacgcttaactcatttttattttctgaaaactatttgcatcaaattaaaaacatgctacaataaacaagttgtgaatttcacaagaaaattttttgtttggagatgaaataatttggatgttgaaagtagtccattaatgcagaaaattgattatagtacgcgcaaaaaaattgatttagtaaataatagtattcttcgttatatcgtgcgcgcgatgttagcatgtttattcttaacactagggactgcggtcgctgttatgattggtgataaagtcgatcattttgcacccggacttggtaaaatcacctatgcatttatgtttagttggtcgctcgttatgattatttatatgaatgctgagctgggtacttctaacatgatgtatatgacaacaggagtttatcaaaaaattgttaaacctggaaaagcattacaaattttgattttatgtattgtttgtaatttattgggtggaattcttgcagggtacttagtttctctgacatctgttttccataatttacctgctgaccacttcttatttactgccgttagcggtaaacttgaaaaagcgccattacaaatttttgtagaaggtattttcgccaatattgttgtaaatacggccgtgctttgtacacttcgaatgaaagatgatgctggtaaagtcattgcgatgattttcattattttcatctttgcattcttaggattcgagcacgttatcgccaacttctcatcattctcattagcatttttcgcttctggtggaacacttgctgcaatgacagcgggcaatgtgaccgtcaatttagtccttgctttacttgggaattttgtaggtggtggccttgttatcggactaggctatgcatggcttaaccgaacaaaatcaatttataaagactaataaaaaagttacctcagaaattttccgaggtaactttttttatatgcttttaacaggtaaattatttaaaaatgaccgaatgagcggctcgaacttcggtacttccttttcaactagaaaagcgtcatgaccgtattcagaggccacttcatgataagtaaccggcacatcccattcttttaaaagttcataaccgcggcgcaaatcgtgaattcggaaaagttgatcggtcgtaatgccaatcagcaaatacggaattttaatttttgaaaaagcgggtaaatcatcttttgcgggagccgtaacgtcaaataaatcaatcgcctttgttaaatatagataactattcgcgtcaaaccgctcgacaaaagtatccccttgatattgtaaatacgattcaatttgaaaatgctcttttgagaaagcggcaggcgaagactcggcgacagtgaaacgttcaaaccgcttggagaaaagttcgctcgtccggtaagtcatcattccaaccattctcgcagtagcaagcccgccctcaggttgaccaatatagttgccgccattaaagtcgggatcattcagaatcgccatccgcataattaagttataaccaatcgcatcaggtccggcagcaagtggggaggcgatgttgataatgctatctgttatatcggcataatcaatcgcccattctgtggcttgcattccacccatcgatcccccaatcaccgaaacaatccttgtaaccccaagttgttccaaaagttcacgctgcactttaataatatctttaattgaaaatccgggaaattgtaaccggaaaggctcgcctgtttttggattaatcgaggaggggccagtcgttccactacaaccaccaaatacattcgtacaaacaagaaaatatttgtctgtatcaatcgttttccccggaccaatataatcatcccaccaaccaggggcgtcatcttcaaaatgtttcgccgcatgagctgtcccagtgagcgcatgttctaacaaaatacaattatcgcgtgaggcagaaagtgtcccatacgtttcatagccaactaaaactggacttaatgtttccccgttttcaagtagaagaggacttttttgaaatagttctttttgttgtaaggtcacttctcttcacttcctcctaaatttgctctagtgctttcgttaaatcttgaataatatcatccgcattttcgattccgatagaaagacggatggattctggtttaacgccagctgttaattgttgttcttcgcttagttgttgatgagtcgttgatgctgggtggattataagcgattttgcgtcgccaacgttggctagatgtgagaataactccacagattcgataacctttttcccagccgcgtaaccacctttaacgccaaaagtgaaaatggaaccaggtccttttggtaaatatttttgggctaaatcgtggtatttgttgtcttttaagccaggataattaacccaagcaacttttggatggtcatttaagaaattcgctacttgtttcgcatttttcacgtgttgctcaagtcgtaaagataatgtttctagccctaaaatgagcaagaaggcgttgaacggggaaagtgcggcaccagtgtcacgaaggagcgagacacggagcttggtaatataggccgccgcaccaacatcattcgtataagacagcccgttataactatcatcaggtacaacgagttttggaaacttcccatttgcccagttaaatttaccagagtcaataacagcgccaccaattgcaaccccgtgaccaccgataaatttggttgccgagtaaacgacaatatctgcaccaaaatcaaatgggcgatttaaataagcggtcgcaaaagtattatcaacaattagcgggacatcagatgcgtgcgctatctcagctactttttcaatatcaataatattaatatcaggattaccaatcgtttcaatgaatacggctttcgtattttctttcattgctttttcaaaattttcaggttcgttagggtcgacaaaagtaacatcaatgccaaacgttttaaatgtatgcgagaaaagagtgtgtgtgccaccataaagtgttgccgctgcgacgatatgatctccggaaccagcaatatttaaaatcgagtaagtaatagcggccatgcctgaagccgttgcaacagcgccaatgccaccttcaagtaaagttaaccgttcttctaaaacagctgtagtaggattcataattcgtgtataaatatttccggtttcctgtaaaccaaataaggctgcggcatgttctgggctatcaaatgtatacgatgttgtttgataaattggtacggctctagaatgcgtatctccgtccggtgtatgtccgccgtgtacttgaattgtttcgaatttatactcattactcataaaatccactcctctttaatatgtatttatcagtaatttccatcaaaaaacctccctagcagtatataagccgccagagaggatagagtttcctaaacttggatttccgacttatctttcagaatatactgctggaattagcaccgtgaaaataaattccggttgctaaggcttcaaagggccagtccctccacctttcgtgataagaaaatactattaaattaagttatatattacgctggatgaaacaaattgtcaactaagtatttaaaaagtccaaaaatagcacttgtgtgtggaatttttgtgacaaagctgttttttagactaatatttcactttaaaaaggttttaaaatccattttttaggctattatagttaagactaattatatttcattaaaagtggggttagattagcacaaataaaggggagttgaaataaaaatgaagacatttacacgtattcttgttttattagcagggattgcgatgattgtacttggaatttggttcttattccatccaggtatttcattattaacctcaacattgatgatcggtttcttattactgatttcaggtattttccacacaatttcttatttctcagatagaaaatcacaaaatgtttctgggtgggtactagctgacggaattttatccatcttactaggtttcttgctattatttaatgaatttgatggaacattaacacttgtattgctgtttggtatgtgggtattgtttgctggtattatgcgtacaatcggcgcattcactgctaaacaaaataacgtacaaggctggggctggattttaacaattggtattattggtatcattgttggttttatcgctctattcaatccagttgtctccgcaattggtatcgttcttgttgtagcgattttcttcatcgttcaaggtatcggcgcaattgcaacatttttctttattggaaaaagttattaataaaaaaaacaagcccgtttattttaagcgggcttgtttttttattttgcgattatatgtatggtttataattgtcttttagtttttgtctatgaacatcgaagttctttacacgccaaggtttcggcgataaagaaataacaccatcttcttcaagtttacgcaagttagtagcaacgtaagctcgagctagatttaagtaattgcctaagattttttgagtaaaatagtatggaattaagcaagaaccgtctgattcaattcttccaaatctctctccacaagcaattaatccagccaaaactttctcactagaaggcaaattcacataagcttctcgctctaacatgggggaaaccatactttgcataagtgagttcatttgccaaaatacatctggtgagcttaagagtttattcaaaacatatttacgttcaaattgataaacactaacttcactaatagacgtatagtttgcaggtgatttggctcctccaagtaatgtaagcggaccgatagaatcttgtttacctaagaagctaataatactatcttctttacacgtatttttactcatcgaaacgaccccgtcttcaataatataaaagtaagttgtttccgcgccttctgttaagattttttggttgcgtctaaaacgaattctcttatatggaagaaccgcttcatttgaatcttttaacaagtcgagtaaatctacgttgtaaaaattattttcctcattcagtaatgacatataccgagtccccttttctcagtgttaatcattatcattatataggagatgagtcgaaatgtgtattaatgggacttatgatgctctaagtaattttgctttaattagacgatcacgaatgagaatacctaataatgcagcgaacaccgctttaataataccaggaataataaatggtaccatcccagtcaaaaatgcagtcggccagtcaagacctgtgctaactttaagccataaaacaccgaaaattaacgtaacgatggctcctaaaatattagcaacgattgcataaggaacagtgaattttgttttttcgagcaaccaacctgtaagtagtgcattaaaaataaatccgacaataaatccgccagttggcccaaaaagaatcccaattcctgctgtcatcccttgaaaaaccggaataccaactgctccaagcacgatataaactaaaacagatatggtaccgtgacgagctccaagaattgttgctgctaaaccaattgcaaatgtttgcccagtaagtggaatagggccaagtggaatagcaacttgtgcgagtaaagcaatgatgactgcgaataaagcatctacgactaaaaatttcaatttctgatcacgcataaacgtatctctccttaatgtaaacttaatactaaattaggttaacatttattaaataaaaaaacaatactatttttttctaatcagtaccttgcaatgaacactagtgtatgataaactatagtggtagtgaacaatatatagtagtggttacttattactagtggtaatttagcagaatggaggagttagcatggaggttaacccgcaattcaaaaaaggtgtgttagaactatgctgtttgtttttaattcaaaagaaagattgttatggttatgaattagcaaatcaagtttctaaatatattgaggttgcagagggagctatttatccggtacttagaagattagttaaagaagagtattgctccacttatttagtagaatcaaatgaaggtccatcaagaaaatattatcagctgacggtaaaaggagaaatttacttgaatgagcttatctctgaatggaataattttacagatagtgttgctaagcttttaacagagggggaagcagtaaatgaataaacaagattttttaaatgaattaaaccagcgcttagaattgctggatccaaaagagcggagagaactattatctgactatcaagagcattttagaaatggtgtggaagctgggaaaagcgaagaacaaatcgtctttgatcttggaaaaccggaagaaattgcggcagatattttaagtgaaagagatattcgcgaagaacaggtagaagcagattattattatgtacctcgaaaaaatcaaaatgaaaatagatctgtgagtaaacaagttttaattggaataggtttatttttcctagacatctgtcttattattccgattatggtttcgctatggtcactcgttatttcactttgggcaacggttggtggattcttgctttcaccggtaatacttggcgtagaactattatttggcgctgattttgaattttatcaaatgtttatttccattgggcttgtaggactgggcctcatgctgctgtttgtagcaaatgcacttactaagtttacaagtaaagctactatggctattatccagtggcacaaatatgcggtcaaaggaggcggaaaaaatgcgtaaacatcatttaagtaagaaattatttttcgccggtttggtgctatttattatcggagctatcggcgtggcagtcacaatgaaatcaggcactatgattgaaaaaggcgaaccactaacaaaacagtgggacttatcggctgaaaatattaatacaattgccttttcttccgagcgagatgtactaattgaatggaaagaaagtacaacaggcaagaattatattgaactcaaaggaaattactctgcaaatgacaaaaaagccattcaaaaattagaaccagtctctgaagacggaacctcatttaatataacagttcctgaagaggatgattggtataacaactttggcaaaatctacgcttacgggcaacaaaaagtaactgtctttttaacaaaagatacgaaattagctgatttaaaagtaaaatctcattcaggagatattaatgtttctgattttaaagtaaagaaatttgttagttctacaaattctggtgagttaaaagtgaataatttagaagcaaatagcgctcaaatggctacttcttctggagatttagatttatcgaatattaaagcaaatacgtcaattgaaacaggttcaggaaaaactgaacttactagtttgacgggcgatttagaagtaaatggtggttcaggagatgttaatgctactggcgttaaagcgaaaaaacttaaaattgctattgattctggtgacatcgaactgacaaatagtaccgttacagacttagccgttttaacaactagttccggagatattgatgcaaatacaaaagggaaagtacaagctgaatctgactcaggagcgattgaacttgctggcgtaacgaataatgtaactgcgaaaacgagctcaggcgatattgatgttgcctttaacaaacaagtagaaaatatcgaagtcaattcagattctggcgaagtcgagctgaaactaccaggtgattttaaagctatttatgaaacaaaaagtaattctggtagcattaaagcaccaacaagtgattctaataccgctaaccgtgtaactgtgaaaactagttccggagatattacaatcgaaaaataaaaaatcaatgcgctaattacttaattagcgcattctttttgttaaaatggggtaaagtcagataaactgttttaacaatttgcgcaattggaaggagaatggatcatggattttcatattagaaaagcgactaattcagatgctgaagctattcagcatgtggcgactacttcatggcaccatacttatcaagatttaattccaagtgatgtacaagacgattttttgaaaagattttataatgttgaaacgcttcataatcggatttcagcgactccttttgctgttttagaacaagcggataaagtaattggctttgcgaattttattgagcttgagaaggggaaaagtgaacttgcggctttttatttactaccagaagtgacccagcgcggacttggtacggaattattagaagttggaatgacgttatttcatgtgccactaccaatgtttgttaacgtagaaaaaggtaacgaaacagcaattcatttttataaagcgaaagggtttgttcaagtggaggaatttaccgaagatttttacggctatccactggaaacaattcggtttaatttgaatcatcatgcatttgaagaggaataaaaaaatgtctattctagttgaataatcaattaggatagacatttttttattttgtcgcagcttttccacttgtcgattttccgcctcgtaaatagaagaaaataacagctaggattgccataattattcctgctaaaacagaaacaccaacagaaatgatcatgccagagacttgaataatgctaaggatgatgactgttacaacaactccgtatgcaaatccccatagcgcaaatgttgaatagctcgcttttttgctaaagccataaaatatttcgcccaacgtggaagcgactaagatgacgggagcagcaaagagaattgctgaaaaaacgagctgcggtgtgacattttcatagaggattgtttcgactaaaagtgcagaaaaaatacctaaaacaaaaatcgataaataagcaataataaaacgcatcaaaaaaacctcctaaagtacactatattatagcataaattaggaagttagcttaacatctagcccagttatcatcactatgctttacgacacgtgtaatacctcgaatcaagttgaaaatgagtatcgatacattaagaaatacgatgaaaaaaactgtagctagagccaaaaagttaatagtatcagcactatttgtactaaaaggaacgttattataaagtaaaatcattacaaccatcccagcgacaaaagttgtctgtgtcagtaaagcccatttcacgtgatgacgtgtttctttatctttatttgtacaccagataataataggtgcgataaccggggcaaagaaaaggctaaaataactaagtgcgctaataatttttttatctaacatttctcatctatcctctcatttgtttataagtctagtatagcggggaaagagaaatgaaaccatcgaattaggtgacgatattaaaatgaaaatgacagttttgtcatgtataaaaaaacgccccttcgaaaaaatcaaagagacgtttctttatatgactgattttaaggaccaaactttactacgccatcttcggtacattagaacggcgcgaacaccttcatcgataatataggcaagccaaacaccgacaagaccaagcccagcggaaattccaagtacataggagaatggcaaactaacaatccacataacgataagcccacatatgaacggaaagcggacatcaccagttgagttaagactactaatgataataatattggtggcacgtccaagctcaaggaaaatcgaaagtaagaataattctttcgtcattgcaatgatttcggtatttgttgtaaatagactcataatcggttcggcaaatagataaatcgaagcactaactataatggcaacgactaatcctattttccaactgcggagaccttgtttataagctttatcaatttcttttgcgccaaccgcacggccgataattatttgcgaggcttgtccgagcgcgatagcaaatagtgcgacaaattgactaactgttgaagcgtaaactttggtcgtaagtgcttctgtacctaaaatagcaatgattgcggtaacgacaagttgtgagccagcataggataagttttcaccggcagagggaagacctagacgtaaaatcgaataaagtagttttttggacacttgctccaattttttgaaatgaaaagtgtaaccgatgtatttttttaacatccagatagctagaaccattccgacaaaattcgcgacagcagtagaaatcccaacgcctgccacgccgtaatctaagtaagcaagtggtccgtaaagaaataagtaattaccgacaacattgataatactgattgtcacagggacgagaatggattgtcttacataaccatgcgcccggagaataggtaaaatggatgcatgaatcgcgataacaactgaactcccaccaataatttctaaaaatggcgcgccaacttggactaaatgaggatcaattcccatccaagtcaggaagtttttcgacataaaaatgaaaataatactcatcgcaatcccaattaagaaagcgaccactaagccatttgtaatcacattctcgatttctttatgttttttcgctccaatcatttgtgcgacgataatctggacaccgacactaataaaaccataaataataatcgaaatgacaagaatctgattggcaacccctgtcgcagctacagcatcatctgaataatgccccaacataaagacatcaatataactaatcatcagtcgtaaaaattgctctagaaatatcggccaagcaagtgtaaaaagactgagactagcaactttattcactgaattcaattgtttccctcccttcgttttaaatacaattaaagccattataaggtaattaaagttaaaagtatagattaatttcaaaataacactaagatattgcttgacaaaaaatgaataactcatataattagttaggtaaactaatcaaatgatagaaagaagtggagaaatgtcttcaaaaaatcaagacttggggcactcagtaatcaaggctttcatgaattttaagcatgctgaaataaagagtttccaaattccaggttacagtaaatctgaaacaagatttatttttattttatctcgtgggcttaaaagcagagggccaaaaattcgtgtttccgatcttggtcacatgcttagaatttcaaaaccaagcgtcacgcaaatgatacaatctttggaagggaaagggctaattaagcgagttcagaacccagaagataagcgctcgatgtatgtggaactaacagaagtcggagcaggtgtatcgaaaaaaatgttcgatgagtttcaagctagttttgaagatatgcaggaatttttaggtgaagacgatatgaaaaaattgattacactcctagagaaacttacagattacttaaacacaaaatccgaaaataaggaggtataaaccgcaaatgatgaaattgatgaaaagattaaaaccttattggctgagcattacggccgtattagtccttactttcgggcaagttattgggcagctttttttaccgacattgatgtctaatattattgacaaaggcgttgtaaaaggcgatacagattacatttggagcactggaatgcaaatgttacttatatcgttcgcttcagttattttgtcggtcattgtcgtttatctcgcatcgagaatttcgatgggattcgggaaagatttgcgcgataaaatttttacaaaggtagaggacttttccttacaagagtttgataaagtagggacttcttcactgattactagaacgacgaatgacgttgttcaaatccaaaatgtactttatatgatgatgcgattaatggtgatggcgccaattatgctactcggcggtattattatggcagttggcagggacgcgaaattatcgcttatttttgtcgttgttttaccgctactacttctacttgtagttattctaggtggcaaagcaatgccaatgtttaaatcacttcaaaagaaaatggataaattaaaccgtgttattcgtgaaggtttaaccgggattcgggttgttcgttctttcaaccgaaatgaagatgaactggaaaaatttgaagaagcaaatgctgactatgcaacaactgcaattaaagtcaatcgcttgttatcactaatgagtccattgatgatgttactaatgaacttaacatcgattgctattgtctggattggttcgatttttattggtaatggtgatatggaagtaggggacttgatggcgtttattcaatacgcgatgcaaatcatgatgtcctttatgatgctttctgctgtatttattatgattccacgtgctggagcttcagctgagcgtattaatgaagttttagatatgaaagcagaaatacttaaccctgaaaatccaaaaacaagtacaccaccagcaaaactatcatttgaacatgttactttccgttatgaaggtgctgaaaaaccagtgattgaagatattacatttgaagcaaaagctggcgaaacgattgctatcattggtagtaccggagctgggaagtcgactttaattaatatgattccgcggttttatgatgtcgaaagtggcgttgtgaaaatcaatggaatagatgtgcgtgaaatggatcaatctaaattacgccaaaaaattggacttgttccgcaaaaagctgtgttattcacgggaacaattgcttccaatatgcgctacggaaaagaagatgcgaccgatgaagaaatttgggcggcgcttcgaactgctcaagctgagaattttgtatcgaagcttgcaaatggtttaggcagccgcgttgaacaaggtggtaataacttctcaggtggtcaaaaacaacgactttcaattgcgcgttcactaattagaaaaccagaaatttatatatttgatgatagtttctcagcgctcgattttaaaaccgatgctaaactacgcgaggctttgaaagctgaaacaacagaagccgtaacacttatagtggcacagcggattacttcagtcgtaaattccgatcaaattattgttcttaatgaaggtaaaattgctggaattggaacacatgaagaattgaaagaatcaaacaaaatttatcaagaaattatgaagtcacagctgtcagaggaggaaatcgcatgagtggtccaggtccaggtggtggcatgagaatgcaaacagccgccaaaccaaagaactttaagcaaacactattccggcttcttggctatatgaaacctcgctctgtcgcaattattgtcgtttttatctttgcgattctatccacgatttttaatatttttagcccgaaagaactcgggaaagcgacaacagaaatttttaaaggtgttatgagtcctgagggaattaacaacgataagattttcaatatattaatgattgttttagtgttatatcttggtagttcactatttagttttattcaacaatatgtgatgtctagtgtggcgcaacgaactgtgtatgacatgcggaaggatttaaaagcaaaaatggcccgacttccgctaaaatattatgatacacgctcaaatggtgatattctaagtcgttcagttaatgacatggataacattgcgaacaccttgcaacagtcactaacccaagcaattacagcgattgtccaaatgattggtgttttaatcatgatgctaacgattagctggcaaatgactttaatcgtactagtaactgttccaatcagtattattctagtcgcaattattgctggtagatcacaacgttacttcggtgcacaacaacgcaacttagggattttaaatgatacagtagaagaaacttacggtggtcaaacaattattaaagcttttggtcaagagaagaaaacactagtaaaatttgatgaagtaaatgaagattatttcaaagcagcgaaaaaagcgcaatttatttctgggattatgatgccagtaatgcaatttgttggtaacttaggttatgtcggtgtctgtgtggccggcgggatttttgttactaacggaacgctacaagttggggatattcaatcatttacgcaatatgttcaattgtttactcagccaatttcaagtgtggcaaatattgctaatatcattcaatccactattgcttcagcagaacgtgtttttgaaatgatggatgaagaagaagaaaaagacgaaattccagctaatgttaatcaagttgctggtgaagaacatagtattgtgttcgaccacgtgaaattcggttacactccggataaaccacttatgacagatttaaatattcatgttgaagaaggtcaaatggtggcgattgttggtccaacaggtgctggtaaaacgacgataatcaacttgctaatgcgtttttatgacgtggatggcggggagattcgtatgagaggtatcgatacacgtgatatgaccaaagatgctgttcgcgagaaattcggaatggtactgcaagatacttggttatttaacggaactattgcagataatatcgcatatggtcgtgaaggcgcaacgaaagatgaagttattggagcagcaaaagccgcttatgcagatgattttatccggagacttccaaatggttatgatactatcttgaacgaagaaggttcaaatatttctcaaggtcaaaaacaacttctaacgattgcccgcgcgattttatcggatccatctattttaattttagatgaagcgacttctagtgtagatacgcgtacggaattaaatattcagcttgcaatggggaatttgatggaaggtcgcacaagtttcgttattgcgcatagactttcaactattcgtgacgccgacttaattctcgttatgaatcacggtagtgtaatcgagcaaggtacacaccaagaattacttgatgctaaaggattctatgcagacctttacaacagccagtttaccggagctcaagcagtttaataataaaggcaatgtggcttcttgctgcattgtctttttttgagcaaaaaatttgtttgattttggataaggaggtatggttaataaagaagaaattgaagaggtgaaaatagatgtatcaatcgattacggcaaatgatttagaacaagaattaaaaaacacacagcttaatatactcgatgtgagagatgctgatgcttttgttgaaggacacattccggatgcgataaatattccaattaatgaactacctgaaaaactaacgtcccttgataaagagaagccttacacaattatttgttacgcaggaggtcgttctgagcgcgcaagtcaatttttagcggcagaaggatttgacgtaacgaatgtaatgggcggcatgggagcttttcacggcgctgtaactaaataaaaaaagcgagacttccattttgaagtctcgcttttttatttaactatgttttcttttgcggaaaaagattactccgatgcctgttaaaataataccgattaagacaatcgttgtttgacttgagtcaccagtgtttggaagggctggtttttcagaagatttattctggttgtttggcgtatcattagaatcttcggatagcacaggatcatcattattatcatcatttatagctggagtattcgggtcaggattaggatctggtcctggtcccggcggtgttggtggttcgtttcctaaaacaacatttactaggacggtaataggatccgcttcaacgccatttgaacttactgcatttaatgttacttcataagttccgacttgggttaaatctacttcactatcaaagttacttgtgactgcactgccatcacttgttttagctgaaatatcttttaggaattgttgggcagttttagtagtatctttcgtgtaagtgatgctattatttgctgtaattactggtttttcaagaatagtaacagtaacttgttttggagctgcttttaaaccagcgttttcggcatttaatgttactgtgtaaacgcctggtttattaagatctacaacgctatcaaaatcactagtaacaggtgtgccatcatctgtttcagcgtgaatatctgttaaaaattgttcttctgtaacagttgtttgctccgtgtaacttattgtagaatcgctagtgatatttaatgtgtgatcgatgtcaaagtagtgatcatacgacccacctgatactgaataactattgaagcctggtggtgtttgataagatccggcgggattattgtaaagcgcattatattccatttttgtaatagtatcaaagtaatcttttgtaatgccgctcactgtaattcctttatcgtcaatgcttaatcggctgccatcaattttagtattatttaaagtaaaataagtgccagcagatccagcgttagttgtaaaagggaacatatagccatcgaaatttacgctccgctgtgtcattaaagtaaatggtacaaaaagcgtttggttagcttcatcaaagtttaatgaggagcttttaattgtgctattgattaaaacggttctaccaacattttgtccgtaagcagataagttaagtaatttagggaatgagtcaatcccgcgaaaatcattaattccacaaaattggacaaataaggtagctaaatttggtatggattttagtggcatgatgtcagtaatagaaggattactatctaaatttaaataagttaagttcggcattttattaaatttagttaatgcgctattgtcgagcttaccagggcttagatttaagttggtgatgttcgttaaaccatttaaatctggtaatgaatcagttgttaagttattcccatcaatactaagattagttagactaggtatttttgcaactaaagcgtagtctgttacccccgtatttgataaatgtaaaagcgttaaattatgcgcgtaatcaagtccagttaaatcagttaggctattattactaatagtgacgtttgtgattgtgtccatttgcgcttcggtaatgtcacttgtacttggttgacctaacagcccatttaaatagctttttaacactgggtcgggaatgttgacaatatcttgcgcagccttgataccaatgttttcttctgctgaaacattagctgaaaacggtataataaatggagatactaaaagagcgcataagccaattttgattcccattcttcgcattaatttattcctcctctaagcaatatttgttttataataccatatggattcttaaaacaattccactaatatgagtgttttaaaccctgaatatgtcgatattgtgaaaaatgagactaaaaaataaccgtaacagaggtttcctccgttacggttatttaaaattaaaagatttttgctaattcagctgcttcttttgcaccagcagaaataatgtcttttgcttgatcgggttttgcgttgtgaccttctacaatgaccatttctggttcagagatgccgaagtgagctaaaacatttttaacatagtttaaggacatttcaaagctttgcagtgggccatcggaataaataccgccgcgagcattaagtaaggcgatttttttatctgttactaatccaattggaccgtttgctgtatatttgaaagtttttccagcttgatttaaatagaataagtaagttaaaaattgtgctgggatactgaagttccaaagtgggaacgccataacgattttatcagcagctaaaaattgatctaaatacccatttgcaatatcagctaatcgtttttcttccggggttaaagtctcaccagctacttctttatgtaatccactcatcattgttacatcataataaggtagatccgcttcgaataaatctagttctgttacattatcgtccggatgggactttttgtattcagctaggaaaatttcgtatagtgccacgctgactgagcgttcggcaggtaaaccatttgcttttatgaaaagtacgtttgtcattacatcttgcctccattttttttgaattatctattaagtgtagctcattttggctattaacggcaagtatattgcttacaaaaaattagccactaatatttgagcagatattttgtgatttaaaaaaggaagcgtataatagttgatatatcatttgacatgtcaactatggaggtggaaatgctggaaccatgtacgaaacgttcagaactgctttaccggatgcatttgttatctaaagaaataagtcatgtatttgaacaacagacgaatatgagttttacgaaagtagagattttatttcatattaaacaaacgcctggtcaaagtcagaacagattaaaagaaaagctgtatattgattcagcaagtattacccgtcatttgaagcgcatggaagagcaagggcttatcgttcgtaaaaagcaagatgagaataaacgctatacgtatttatttttaacaccagctggcgaggcggaattaacttccttacttacggaaaaagaaaaattccaaactggggctttagaaggattttctgaggatgaagtcagtgccttacttaaatcagtcacaaaaatgatgaataatgtagagaaattggaggagaagttaaaatgaaagcagttgtaattgaaaattatggtggtaaagaagagttaaaagaaaaagaagtagcaatgccaaaagcgggtaaaaaccaagtcattgtaaaagaagtagcaacatccattaatccgattgattggaagcttcgtgaaggatacttaaaacaaatgatggactgggaattcccaattattttaggttgggatgtagcaggtgttatttctgaagttggtgaaggcgtgactgattggaaagtcggcgatgaagtatttgctcgtcctgaaacaacgcgttttggtacgtatgctgaatatacagcagtagatgatcacttacttgcacctcttccagaaggtattagttttgaagaagctgcatctattccacttgcaggtttaacagcatggcaagcattatttgatcacgcaaaacttcaaaaaggtgaaaaagtcttgattcatgctggtgctggcggcgttggaacacttgcgattcaacttgcaaaatatgctggagcagaagttatcacaacagctagtgcgaaaaatcatgaactacttaaatcactaggagcagatcaagtcattgattataaagaagtgaattttaaagacgtactttcagacatcgatgttgtttttgatacaatgggtggtcaaatcgaaactgatagctatgatgtattaaaagaaggaacaggtcgtttagtaagtatcgttggtatttcaaatgaagaccgtgcgaaagaaaaaaacgtaactgcgaatggaatttggcttcaaccaaacggcgaacaactgaaaaaattaggtgaactacttgcaaataaaacagtgaaaccaatcgttggcgcaactttcccattctctgaaaaaggtgttttcgatgcacatgcattaagtgaaactcaccatgcagttggaaaaatagtaatttcttttaataaataagatttttggaaagctagatgctgtcatctagctttttttgctgtttgcgtgcgtagaatggataggctataatagcaaaaaaggtggtgtctaaatggaaactagagagcttaagaacggacaaataatgacgattagagaggctacaaaagaggatgcgagcaatattgttacttatctgaatgaagtagcaggtgagactgattatttatcctttgggaaaggcgagttttcatttagcgtagaagaagaagcggaatacatagaagaaggggctaaaaacccgggctctattatgttattaagttttattgaagatgaacttgcaagtgtttctcaacttatcggccatacaaaaaagcgagaattacatacatgtgagctgactatttctacccgaaagaaattttggggtttagggatagggacacttattatggagggattaataaaacatgctaaaaaaaccgagcgtttaaaactcgtttacttagaagctgtttctgaaaacaagcgagcaattaatttgtacaaaaagttcggatttattgaagctggtgagattccagcattaatgcaagtggaaggacggtatttggacgtaacaatgatgtacttagttctttaatcctctacaagaaaggcgaggtcattagctacttctatatcactaagttgtttagcaacaatatccgctccagtattaagaaaaatagccatttgactaaggacgcgaaggctaatatcagaagtgcgaatatctttatcaataagtttttgcaaagtaccttcttttaagcgagtatttgattcaatatcattggtagtaatatgtttatttgctaacaattgttcaatcggatgcatcatatcacctcttttcgaatagttaactttatgaattaattataactaaatttgcttcgttgataaactataaagccttgaaaattgaacaaaaaagggagaagcaaatgaaagatttaaaagacagtttgaaaattttatatcaatttaagacagattacctaaaagtaacattgttgttgacgatcttgcaggcatttgtgattgggccttttatttattatttctttttctttattcttcgagttatcggagtgccagggattacagacgccaatctcggagaagttttttcgagtcctgttgccgttattatgctgctgattttagctttactcattttactatttgtatattatgaactgggtttctttataatgatggccatttatcaattgcggggagaaagctataccgtatttaaaatcatacaaaggctcaatgtaaaagcgaaatactttcttagttatcaagcgatttattttctgctatatttctttttacttttgccaattgcaggattatctttaccaattacgataacagaaaacctctatttgccgcattttattacagatgaattaatgaaaacgacgacaggcacgtggctatatgttattgcaattgcgattattttctatattagcgcgagactcgtattcgcattaccatattttattgaagataaatcactcaaaataagtggagctatccggaaaagttggaaattctcgcaaaagcatttattttttatgttactaaaatgggttttaataattgttgtgattggctttttagtatcgattatcgcgacgattattatgttaccgcttctcttagtagaaaaaataactccaggaattgcggtggttatagctggtattactttaaccatactgcaagtgataggtttctttgccgctgggatttttcaaggaattattgcgcaattattagtgaagaatgcctttgctattgaaggacaacacgctcctgtcgcacgcaaccagtttccgcataaaaagagatttattattgttgcgataatcgttttcattatttttagtggttttaatatttttacagtaaatgcgactttatatgaacctaatacgaaaataatagcccatcgtggtgatacaatgaatgctgttgaaaatacggtggaagccattgaatcagctgcaaagtccggggcggattatagtgaaattgatattcaagaaaccaaagatcatcagtttgttgttttccatgatatgacattgagaagacttgctggcagttctaagcgagtagcagatatgactttaaaagagttgcagcaaactaaagtgaagagtggcgactattcatctcatatagcttcttttgatgaaattatcaagacagcgaaaaagaataagatagatttactcgtggaagtgaagttgcacggcggggaatcgagcgatatggtagaacgacttgtcacattgttaaagaaagaaaaagtaactgataaatatcttgttcagtcgctcaaccagcctgttatagaggaaatcgaaaaagcagatccgtcactaaaaactggaatcatcctagcgcttaatatcgggaatttgccaaagacatcagcagattttattgtcttagaggatttctctattaataagcgattactaacgcaagccaaacaaaatgataaaatggtgtttgtctggactgttaataaagaaaaattaatgcaaatgtatttgcggaaaaatgtagatgggattattacaaactatcctaaaaaagcaatcgaacttagagaatcttttaatgaaaatgattctttgcgaagtcgtatcgagaataggttaggattttaaataaaaagagccgcaaacagtgattgtttgcggccgattttttattttaattcaaatgattttttgactgtgtttttgctgaagctgattaattctttggcttctacgtctactttattttgcgtatcttgtagcttatagtaatcggttatttctaaagtagctccaggttgaacatctttgtctacaccgcccatgccgccatcagcggatacggttgtttctaattgtgtcccattttggaaaacttgttgatcgatggctaccataaaggaagtattttctttactgttatttgtgaattttgttttgactgcaattgcgtcatttccagcatagtcttttactacttcagagctaaggatttctactttataatcgccaagtgtatttggatctgttttctttttttctttcgtctctgcttttgctgtttcttttttctctgtacttactttatcttctgtcccaccacatgcagttagggctagggcaaaagttataatccccattaatagtaaaacgcgttttaaatttttcattttcttctctccttcttaatttatctgtatctattacaccatgcggagataagaaaagtcctatgcaccgggcataggactaagaaaagatttctgtataaattccataaatcataatacaaacaaaaatatatacgacaataccaacttttcttgttcctttagaagaggacttaagtaaaggtaatttggaccagatgccgcataaattagtaaatataatgaaagcagggaatatcaagaaaaaattagcgaaaaagttttcgatgttattcattttaacgccttctgttggtggggtaaataatccaaatgccatgaaaatatagcctaatactgcaactaccattttccaagtatgaccagttctaaagccgggaatatgtttataccagggaataaaatctttttcgtattcatctgttgaagttgcccagtttatttcgtccgcgctgtcttctatggtagcgaagtcgcttaagtttgttaattcggaaacaaaggtaggtccaagcgaatcatttttaatagcggttcggaattcttggatggtttggaaacgttgctctgggtcgaaggatgctgcttgcatggcgattttttctagagaagtagctgtttctttgtcaggtaaattattttttccacgtaaaagttcaagcataaggacgccgatgctataaatatctgaacgagcgtcggtttgcgagtagccatattgctcaggcgcagcgtatccgatcgtcccgagattgactgtatcttgattttttcctacttcaaaaacacgagatgcatcaaaatcaattaattttaaaacgccatcactggaaatcataatattggacggttttatatcacgatggataattgcgtttgtatgaagttccgtcagtgcgtcagaaagcatcaacatcagtcctgtcacttcatcagcatcaaagggcgcatttactttcattaagtcagctaagtttttcccgttgatatattcttcatatacaatcagttcgctgccatttggaatcatcacttcaattttgggtaaatagttacttgataattttttaagttcctctagtactggagcgaaactaatagggattattttacgaactaataattcgcctgttgcggtattacgcgttagtacggcaggattttctttgttatttagattatctaattctttatattgttcttctataaaagcaagcgtcatttctcccattttctaaaatcccttctacactttatagtgaaattatagcatgaagcatagtagtcgggtacttatttcgtgatataataaaaaaaacaatcgggggtgtgccttatggatggggaaaaagagacaagtaaattacttcatgaattaaaaaaagcgacaaatctacgccaggttttagatgaaaacgaggcggaatttaaatcaagtgaaatggttacatatttaaaagagttattagtagagaaaaaattaacaaaagctagcgtcattcgtgcggcaagactccatgaaacatatggctatcagatttttagtggagttagaagaccttctcgcgaccggactatcgcgctttcttttggttttaagctttcaggtcatgaagcgagtcgattactaaaatatacggaatatccacctttatatgcgaaaaaccgccgagatgctattattatttttgcactggatcacggttatactttagatcaaaccaacgattctttatacgatttggaagaggcgcttattgaaactttcaaagaggaaaaaccgcttatttagattaatctagaaatcaggtataataaagaaagacttacttgattggagactagttatgataaataaacaattgattttacaagcagcaactagtgaaaaaaacgctggtgatttcccgaaagttatacaaggttttaaggaattaggtattataaaatatcagtttttagttcaaaaaggcgtttatgtattttgggatgaacaggataatatggtagaagcccagttaaatggcgttgctatgcctgtttctaaggaaagttcagcagaaaaattacgcgaggcaataaaacaagcacaagcgggacggatagattttgagaaatttattgaattagcaggtttggcaggaatcgaactgtgggaagccgatttaactgcaatgaaagtgaggtatatagataaggctagtgagaatttggtgattgaacccattcctggcatttgaattcaaaagacaataatttattgtctttttttagtacttttaaaaattgggaaatatgttaagctgaaaaaggtgaaagaagagaggtaacgaaaatggatatgataacatactttctaatagcgcttagtacgagtgttgtggggagctttttaggtattggtggcggagtaatacttttgccgattttactactaatgggcgtttctcaaggaactgcggcttttagttctgcgctgacggttttcacgatggcgatttttacttgtagtatttattataaacggaagcaaggaaacgtaggattagcactaaaaattgctataacgagtattccaactacttttcttggtgcaatcgtgaaccaaatgctgccagaagcggtttatcgttttatgtatggtgccttaatcgtgattttattacttctgatggtttggaaaaagaaacgcaataatgaaaaacctcattttttaagcaaatatcggataatgccttatttatttggggtaattattgggtttttagctggtttatttggaatcggtggcgggccaatcgttataccaattttattacttatttttatgctaaatcaaaagactgcctctgcgacttcaagttatgtgacgctacttacttctcttgcaagtatcggctcctacgcgattgttggtggaagtgacttttcgattggtatttatatgatacctggggcaattttaggcgcgcttattggaacaaggttaaataaacttttggatgaaaaatggattgctattctgtttaatattttgctaatagccctttttgttttaaatttaattagaatttaacgaattacaagctatgaaaattagcttgttttttgttgtgacgctattttatgttaagcttagaaggagtaggaggggttatgatgaaaaggaactggcaagactttgttgcatttttactaacaatcctaactgtaacttggataattttaacttggggattacatatttcagatattgtaccgggaggagaaaaaggcatcttttatcaattaattccactttttttaggagttatttcgacaatcagtgtttttttcgtgaaagaaaaattggtgaaatggattttgcttggttttaatattttattactcattttaatttattttgtataccatattggggaaatagggatattgtaagcgggggttgataggatggatgagccaacggaagcggtaatctatcaaattttatctaaaacagaagaaaaaaacgcgacgatggatcacttagtttttgaaatgatgcaatttccgggagctgccgcatttacgaaaaatgaattacttcttggcgtctactggttagaaacatttaattatatttttcggagcacagaagatcatacgacaagatattttcgaacaacaaaaggccacgaaaaattagcagaattagaacttaaaaaaagaaaggcttgaattcctaaaaaataggtattcaagcctttctttatatatattttgccatagtgatgtcggtatttttgaaaccaactttatcgtacaatttaatggcggtttggttatgggcgaaaacgtggagttcgattttagtgatgcccatttcttttgcaagaacatctagcgcttcaagtgtttttgtaccaaaacctttacctcgaaatgtttcgaaaatcacaaaatcataaatgaaagcatgtttttcatcgacatggaaccataaataaccgattttttggtcagtgaaaatgctgtagaggtgctcatttggtgtagtaattccgtcaaaaagtaatttgttgaaagaagcttttgaattggttaaggcttcctctttggaccatgtgccggctgctattttttctgcggcatagtctggaattgcggtagttaaaaaatcttctaaatcagaagtagtcattttttgtaaatgtaagatagggtttcctccttttatttatgctcggtgaaaacttgcatattggatgaatttacgtgacattttaatatggcccgcttcattcggatgaatgccatcagcgcaaagtaaatcctcatagtggaattcggcaagaaaactatcacgaatatcaataagatggctacctgtttcggctgcaattcgtgaaatagcattgctgtatctttcctgccagcgataaatcatctcgacatcgccacccaaaaagtggagaatattttctttgcttaggccactacgcgtaatgaaatcgaaataacgtttagcatgaaggggaggcagggtcattaaaattggtttaatatctaattttttaaggcgtgcaatcatttcaagtagttgcgtttcaaaaatgtctaaaggcgtgcttggaatgtgttctttatctggattttcagacacttctgcccaattgaaatcacagtcatttccgccaaattcgatgatggcaatgtcatttgttgcgtctttttccaagtcttttgttagaatttcgtggccttttgttatcgtccgacccattgtggaatgattttgaaaagtcaggccaagtttttcagatgctcgtttaatgcagttgtttttaagcaaagtatagcggtttttttctggattgaaaagaacgcctttcataatactatcgccccaaacaccaactgactgaatggttttcttcataatcatcactcctttcatttatcataccataaaaaaagcaaaagacgcgctttgtatctctaaaaaacgcgtcttttactttttaatttgtagctttgtataaatagattttccagtaagatgctttgttattaaatgctttttcgaaggttagtccaatctcagaagcgttgtcgattggaacggcagacaagatatattcgccgccaacagctttaaatgcatctatattaaagtctagttttttaatatgttttttcgaatctttgccgaaatcgtagtttttccctaactcggcagaaaataaataacaacgatttccccagttatcataataatcttctagaacggggcttttgtctagttcgccagcgatgatttttcgaaaggctcttttataagcaagtgggtaagaattaacgtagccatccacagtgtaaaagccattttcttgggaaacagacggatgcaggccaatgctaccaacgcggtaacttgattgcggtttaccaatgtaattttttatttctgtaaattgctccgtcgcataaaattgattgatgctaggtgagccatttccagtccggtagtaaatctcagaattattcgcgaaaacgacgacaagttgcaacacaattgctaaataagctaattttcgccaccaatttccttttttgattaaataaacgattgcgattgcgaataaaccataaaataaaaacggttgtaaaaagtgaaaacgtgaaaaattaaaagtccgcataatttctacattttctttgatccagttccagccacgataccaccaaaaaccgtaccaaaatgataaaaataaattaaacccaaatagccataaaaacagtttttctttgacccattctcgtttaataatgattaatacaagaacgagaagcaatatcggcaaaataacaaatccagctagagcctgatcgtgtgtgtgtcctacaatgaaatttttaatactaagtcgaatggaacttaaaagtgataaatctggcaaactaaattcgcttcttgaatctggttttgggtgtaggaacatcgcataaataaaacgataatttactagcgcatataataagcccatgtacaccatactgagtaaaaagcgaatattgacttgttttttcttaataacatcatataaccagatacagccaaccattactaaaaagaaacaaaatcctaatattaaactagaataaaatgggagcagtgtcagtataactacattccagattcgccgcttgttatttctaatgtttaaaaacgcccacaaagcaagtggcatccctagcgtactgagcatacctgatggccaaaaaggcgtcagtgcaaaagctaaagaaacaaaataaagcggtacgagatattttttatctttaatgagataatcccttgcccataaaaacaatcctaaaaatgcaaatacacgtgtaatcaactggctcaccgcaaacgcaataggtgtactgaaaatcatataaagccaatcaattccaacaaattctgaatcaaatgaatctcttgggacactatcatccattatctgatcaatatttgctgttccaacttttgctgtataatccccgctatccaaaaccattttgtaccacgtcacattggaatctaaattatcatgtatcctcacgtgactattcccgccaagaataaacaatggagcgacataaattaccaataagagtactgcaataattagccacttatgctttttccacatagttctcctccttcattatctctaatatatatgtacccgagaaaactattttcaattataccaaaggaaatcaggttttgttcatcaaaaagggtatatttttatcacttttttatacataatcacactttaaatatggcggaaacgtcacaattctctctgctatataggaagttttgtatgattggcttgttccagaaagccattctggctagtatgatacgtttaagaaaactattcaagtagaacgcataggtctattttgagtaattttaataatgagtagtaaaaggagaattatcatgctaaaacacaactggcaaaaagtgttcgttgtaatggttgcggttgcgcttgtttttcaactggttccatggtctaatatcttcgccggagcagaagaaaatcaaacaaaaacaacccaacaagtaactcaaccagataatcaaaaagtagcggatgaaaacaaaacaaccgtaatacctgacaataaagagacaactaaaaatctagttaatggaaagcaattactaaaaggttccgttgattggaattttacaaataaagtaacagacgcaaacgggaatacgaaagaaacttatgcaccaggagactcactcaagttttcattaagtttggcaatcccatcctattcagaagcagtcttggacgaaacttatacattttggatacaaaaagacttcttccaaggagacaaagtgacatttgttaatccagcaattgatgggttaacgccgagacaaaatgtttttacagatgattccatgaaaaactcgattggcacaaaaacaattaatggtgtccagtatattggttacacacttaaatttaatcagagcccggaagcattggcaaaatatgaagatgagccgcttactaacgctaaatttgatatgtttgcaaccataaatacgactactacaacaaaagaagattatcaagccattgtaattgaagatgataaaaatgtagatattagcaaaattgaggtgcccgtaacacctccaactccagatacagataatggcgtactcaccgcctctaaagcaatcgattctgcttggcggttagataaagacactggaaaatatgttaaagtcgctacatcgtccacaaattatacacctgaaaaagatgatctagttttctattatgtttatgccacaaacaattcaggggaaaatgccgttttagaaaaaatggtagatgaattaccagctggtttttcaattattacggaagattcaccagaatggcaggctttatcaactgcatctggctcttcgcttcaacgcggttgggttgcttcagcagaccaaacaaaccttgcccctggcgcaactagatacgaattaccattttccccagctcagactatctccaaaaatggtggcggtatttatagaacaattgcagcaaaagtaacagatccaacgaaagatttgactaacgttactaaaagcccgactaaaggcggcgaaggtaaatctggttctgtaacgccaagtgggaaagatgtttatgacatggcaattacgacaaaaattagctccacttacgataaaaacaataaatatattggtgctgttagtagcacaactacgcccgtttctatatcagaaggaagcacagttggcgtaacatataccgcgattaaccaagggaattatacaaaagatgttgtcgtttatgcctatgtaccagcaggttatgaactaaataatgatacatctgatttcaaaaatacgaatgataaatggaaatacgaaacaaccgtgcctagtggtggcggtgtgtggagtgatatcaaagtttactccattacactttctggaggcatggcatcaggtgcaactgcaactgctacgatgtatatgaaagctatcggtatgccggatgatgggacttatagcgcagtagacttttacatggctggagaaatcggttcattttctaactttaatggtgattctactttagacggagcaattaccgatgtagattcgacgccagatatgaatccaggaaatgatctgattagcaatgttgatggttctactgtaaaacctattgatggcttccaaaaagaaaaaccacatgttgtaaaagaaaatgctaaatcaacagctactttacaagatgaagatgacttcgattttgattatgtcacattcattaaaacaccagaagtaattccaacagaagaaaaagtgtttgaaaaaacacgattatcggcagctgatgcagaaaaaacagcgcgcaatatgataggtagcgacatcatgggttctgccttgaaagactatacgcctcttgcagacgatggtagaattacttcaccaaaaacatatatggtctatgaaatgaacattaacccatctggagtagaagacacactaaattcttcgttcacagatacacttccaaaagggttgaaaatgcttgaatatgatattgctggtttaaattctagcaataaacacatttatggttttacaacgaacaaatttgaaggtacaccgaaattcacaaatgcagacgggcaagacgttattgtttatcaaaaaggcttatattctgaaaaacaagtttgtatcgcaaactccactttaaatgatgttggagtaaggtattttggaaataacgcgggtaaaatgggtgtaactggttccgtaacaaaagatgcacgtacactaacccttaattttggacagccggcagcagacccgatgtatagtgaaacaaaagcagcttacaaagtgtacatgattgtagttattgacccagacgaaattgactacagcagcatcatgcaaaataaagcaacatacacttacaacgataaagttattacttcttatgaaaatagcgaaatgtactgggatgctggtggcggtacggcctatgcgaaaaaatatgttttagacaataaaacaaatgcatatataagtggaagccaatataatgtggctactcctgatgcagacggtaatttatcagttggctataaaattcgagtaagaagtgcgtatgaattcgataaatcatctataaatattggagacgttattgctgcagataattttaaatctatctctaatgtggaagtaaatggttatgaggcaagtccaagcacgggcttccaaattgacggggaacttgaaaatcctgtaccacttgctacgggtaagtatgcggtagaagcaaaagcaactgcaaacacattagctatcacaaatccggctgatattccgcaaatgcaactatataacgttcttttcaaagtgaattatcaaaaagtgaaatatggcgcgaaactagttaaccaagcagctggatcagaagttgctacggttgtcccgctaaacttaaaccttttgaaacaagacgatataagcaaaacagcattgacaggctatgaattcaaagcttattatgcagatgaaaatggaaaagcagatttaacgaaaccggtcaaagatacaaatagtaatgaaattgttatgacagactcatctggcgcagcaaatttcatcccgacaggttataaaacaacttctaaaaatcaagactggaatgtagttcttgttgaaacaaagacaccaactggttatgaatcaaatgaaaataaagagtatccagttacagtgaagagcgatgcgaatggtaatttatccattccaactagcacagaaacaggccttgaaatcaccaatgatgatcacggggcaacaacagcgactattgacaaccatgcagacgtgaaaatgattgatgtgaatggcgcgaaaacttggactggtgacaaagaagcagatcgtccagattccatcgaagtacaacttttacaagacggtgtagcatacaatagcccaattactgtaacaaaagcagacgactggaaatacgaattcaaaaatgttccagaaacaaatgcagatggaactaaatacacgtatacagttttagaaaatacagtagctaactacacaagtgctgtcacaggtcttgatattaacaacacattaatcaaaccagatgtaaaaatgattaatcttgacggtcaaaaaacgtggaaaaatgatacagaaaacgatcgtcccgcatccatcgaaattcaattacaacaaaatgggcaagattacggtttcccagtaacagttacaaaagataacgattggaaatacgaatttaaaaacctaccagaaacaaccaatgatggagcggcttacaactacacgattgtcgaaaaagcagttccaggctatgaaaccaaagtcgacggaatgaacgtcatcaacacgaaaatagatgcaccaaaaaccactgtctctggtaaaaaaacatggaaaaacgacacagccaaagaccgtccagactatatcgaagtacaacttttacaaaatggacaaacttatggtgatccagtcaaagtaacgaaagagagcgattggaaatatagcttcaaagatttacctaaaggcgatgctaacaacaacgattatcgttactctgttgctgaaatagcagttccaggctacaaaacaaccacagatggaatgaacttaaccaatacaaaagtaaccgatgagaaaaatgtaactacagcgagcggtacaaaaacttgggtgggagacaatgaaaaaacacgtccagactccatcgaagtacaacttttacaaaacggtaaagcttacggaacaccaatcaaagtaacagcaaaatcgaattggaaatacaactttaccaaccttccagagaaagacaaaacaggtgaaaaatacagctataccgtatctgaaaaacaagtatctggctatagtgtaaaagtaaaaggcatggacttaacgaatacaaaagtaacaaaaacgacaccaaaagttacacattctaccaataaaccaagtaaaacgaaaaaattacctggaactggtgatacgaatggtatgttgctatttgctggtggattagtactattattcttaggactacaccttagaagaaaaagtaccaaataaagaaaacagccgatgcgagtaagcttgggtcggctgttcttttgaataaagtaaaatcgggtatacaaataaaaatgaaataagggggcttcatgatgaaagaagagctactgcaagcaatcgaagtcggcgagccagttttacttgtaacggcaatcgggtatattgtaggaattgtggaaacaaaaggagagctcattcgcttaaacgatgtgtatatcaattgtgtttcagccagtagagtaaaccgtttcagccgaggcttagctgtgaatgtcaatcaagtcatcggtatgcaactattaagtaagtcggagaaagatgaaatgattggcggctggaaggcatatgtggcgcctacagctggttaagctatgctataatataaacagcacatacggaggtctgaacgaatgatattattagttgttgatacacaaaaattaattatgacaaataatctttacaatttcgattcactggtatccaatatagaacgattaatcaccaacgctcggaaaaataaaatagaaataatttatgtgcgacatgacgacggccctgatacagaacttacaaatggaaaagaaggcttcgatatttacgaaaaattccaaccaactaaagacgaaagaatctttgataaaaccgtaaatagcgcttttaaaggaacaggtttacttgcttatctcaaagaaaaaggaacgaagaaaattgtagtagcaggattacaaaccgatttttgcattgacgccacggtgaaatgtggttttgaacatggcttccagatgattgttcccgcccacgccaattcgacggaagataaccattttatgtctggtgagaacagttataagtactataatgaatggatgtggcctgagcgttacgcgacctgcatatctatagaagaaacgattaatgaaatggaaaataactaagagagtctaagcattacgcttaggctcttcctacttttttgatttaatggtagagtaaaaggagtgaatttttgcaggaggaaatgatgattaacttaatttttgatatcgacgacacagtttatgaccaactgaaaccctttgaaaatgcatttaaagctacttttggcaaagcggaccacctgaaaatcgaaaatttatatattaaaagtcgattttatagtgatgaagtgtatcgcaaggttgtcggaggagaaatgcctaaagcagaaatgcacgtttaccggattacgcaggcattaaacgattttgattaccaaattacgaaaaaagaagcagaagcatttcaacatacttatgaacaaaaccaacgcaaaattgaactttcaccgggaattaaagaaatcctcacctgggctaaaaagaaaaatataacgatgggaatcattacgaacggatcaaaagagcatcaacaacataaaataaatgatttacaaataaacgaatggattccagctgagcatacttttatttctggtggagtaggtatcgaaaaaccagacaaaaaaatatttgagctagtagaggaacaaatcggtattaagagcgcggaaacctattatattggcgattctttcgaaaatgatgtgattggttcaaaaagtgccggctggaaatcaatttggctaaacagacgacaacatatacaacctaacaatgccacttaccagccagattattgtattaaaaatgaacaagaactagctgctttgttgcaagatttattataaatactaaaatcttttcctttattaggagaaggtttttttgttgtaaattgacaaatttgtttaataaggatattatagagtcgttaagtctttaattaagaaggtgaaagtatgaaattttcaaaagcaaccaattatgcgctacatacgatggtttatttagcaaatttgtctccggaaaaatctgtaggagtgaaagaacttgctaccaagcaaaatgtttcgccaacgtatctttctaaagtgttaacaatgcttgtaaaagctggtttcgttgagtcagtaacaggtgtaaacggcggttataaattagccgaacctgcaagcagtattagttttttagatgttattcaagccattgaaggaaaaggtgctttttttcactgtgatcctaaaaatcatagcgaaagtcagccgcactgcttaatcggcgaagtaatgaataaggcagagcaacaaatggaagactatttaagcaagcaaactgtaggtagtattgtcgtagaaattgaaaaacatcaacattaaaggagtgctgaaaatgaatcatcatcaccacaatcaccacggggaagctggttttaagaggaaagtagattatttggatcgacctgaacggagcgaagttttagcaccagaggaatttttacagaggatcccaatggaaaaaacagcgagcattttagatttaggagcgggaacaggatttttaacgattccggcagcgaaaaaggttgaaaataccgtttttgcattagatttagatacgaaaatgttggaattaattgagacgaaagcgaaaacagctgaattagccaatgtaaaaacattagaagcgagcatggatgatattccgcttgaaactagttcggtggatgttgtgctggcatcgctcgtgttacatgaagcagattctctcgcggatgttttgcgtgaagtgagtagagttgtgaaaactggcggctactttgctagtttggagtttgatacgaaaggaacggatttgaaaggtcccccaatggaaattcaaatttcagctgagaaattgaaggaagagcttgcgggatttggatttgaagtagtgcagaactgggagcttgatgagggaatgtatgtgagtattgcggagaaaaaagaataataaaaagttcacgcctgaaatagcaatataagctatttttaagcgtgaacctttttatatttacggagaaacggggattcgaaccccggcgcggcatacaccgcctaacagatttcgagtctgtccccttcagccggacttgggtatttctccactgtgacatagaatgccgacaagaagtattgtataataatattaacaaaaataccagtgttttttataaaaggagcgtgctaaatggaaagaaaattggttcaagaaataaatttactagaaaataaaaaattggttatgaatttgaatattgttgcgattgttattgtgcttgtattaactgttttaggtcttgctttttcaggtggttttgcaattacgaatggttttatggggattatttggatgtttggtggctatgcagtagcaattgttattcatgaagccgtacacgggattttcttcaaagcttttcgcccagaatcaaaagtgaaatttggttttaaaaatgggatggcttatgctggaagccccggagcattttattcgagagcgcaattctttattatttcgattgcaccatttatcgttcttacgggattgttcatttttctgcgttttctcggtgtgaatgaagcagttctatatttaatttttgccttacatacatcaggttgtgtcggtgatttttattactgcattcttttgattaatcagccagctgggatcgttgtggaggatacggataagggaattagtttttattcagaaggttaagcttggtaacgatttcaacaaagtgttaaaataaggatatacttttagaaagaggtgcttgattttgaaacgaataacaattggtaatagcgatttaaccgcttcagaaatttcgctaggatgtatgagaatggcagatcttagtaaagaagaggcgaacaaagtaattaacacagcacttgaaaacggtattgatttttttgatcatgctgatatttatggcggcggtaaatcagaggaagtctttgctgatgcaattgatatgaatgcaactgttcgtgaaaaaatgattcttcaatcaaaatgcggaattcgtcaaggattctttgatttttcaaaagagcacattatttcttctgtggaaggtagcttgaaacgcctgaaaacagattatttagatacactattacttcatcgtccggatacactttttgaaccagaagaggtagcagcggcgttcactgagcttgaaaaaagcgggaaagttcgtcatttcggcgtaagtaatcaaaacccaggtcaaatcgaattactaaaaaaatacgtggaccaagaattaattgccaatcaactgcaatttagtattatgcatactggtatgattgatactggttttaacgtaaatatgacgattgatccttctcttgatcgcgatggcgggattttggaatatagtcgcttacataatatgactatccaagcttggtctccgttccaatatggtttctttgaaggagttttcttagataacgataaattccctgaattaaacaaaacaatcgataaaattgctgcatacaaaggcgtgactaattcggcaattgcggttgcgtggatacagcgtcacccagcaagcttccaaacagtggttggtacaatgaacccaggaagaatcgctgatattgcaaaagcttctgacgtaacacttagtcgcgaagaatggtatgaaatttacagtgcggctggaaaccaattaccttaatgtaaacagacacttgggctttttgctcaagtgtttttttatgtgtaataatgatagtgaaattcattctcaattagaaataaattttatcaattagtttgatatgatttttaaaaagtgctataataacaagtgagttaaggacgtttcctttaaaaattaattataataattattgtttagtctgtttttcgcagttgcgaaagcagatttttgtgttttttagggtaatgggaatcattatcatttggagaggatgagcattatgaaagaatggatggagcggaattggcaatttgtaacgactggtattagtggggttttaattgttgtcggtagtctaatcgggaatgatgtcggtgatttttggacagcggtgattttcttgagtgcctttgttattggcggatttgaacaagctaaggaagggatagcggcgacgattaaaacgaaaaaacttaatgtagagcttttaatgatattagcggctacaggggcttcaattattggttattggtttgaaggcgccatacttatttttattttctcagttagtggggcattagaaacgtatacgacgaataaaagtaagcgcgaaatcacgaaattaatggcttttcaaccggaacgagcttttcgttttcttccaaatggtgatgttgaagaagtagctgcaaaagatttgcaattagatgataaagtactcgttcgacctggagaaagtgttccaattgatggtgtgattgttcgtggttcaacaactttgaatgaagcagcaatcaatggtgaatcggttccagttgagaaaactgttggtgctgaagtgtttggtgggacagttaatgtcagcagtgctatcaccattaaagtaacgcaaacttttgataatacgatttttagcaagattattcgcttagtagaaaccgcccagagtgaaccttcaaaaaccgctcgttttattgagcgatttgaggatgcgtatgttaaagcagtattattatttgttttagtgatgatgtttttaccgcattttgcactcggttggtcttggaatgaaactttttatcgcgcgatggttttacttactgtagcttctccatgtgcgctagttgcttcggtgactccagcgactttagcagctatttctaatggagcacgtcacgggattttattcaaaggcggcgtacacttggaaaatttgcgcggtgtaaaagcaattgcatttgataaaacgggaactttgacaaacggaacacctgaactaacagaccaaatatttaaagaacacatcgataaacagcaagtaataaatgtggcggcagcaatggagcggcagtctttgcacccattagccgcagcaatcaccaaagcattagatatcgaagtaacggataaattaacagaaatagaagtaacggatgtgccaggttggggagtgcaaactagctacaaaggcgaaacttggcaagtcggtaaagccggttatgttggggcggaaaatgctgccaagttttcaaatggcgcgtttgaaaggcttgctagcgaagggaaaacgattgtatatgtcgctaaagaaggcgaaatcgttgcgatgtttgcgctcaaagacacttgccgacctgaggcgattcggaccattcaagctctaaaagcaaaaggtattaaaacaattatggtaacaggagataatgcacaaactggcgctgcaatccaagctgaacttggtatggatagggttgtttctggatgtttgcctgagaaaaaagtagatgttttaaaagaactatcgctgacttatggaagcgtggcaatggttggtgacgggatcaatgatgctccagcacttgcccatgcggctgttggcattgcgatgggcgagggaacggatattgcaatggaaacagcagatgttgttttaatgaaaaatgacttagagaaaatcccgtatgcctacacgctatccgaacgacttcactggattagttggcaaaatatttgttttgcaattgccgtgattctgctcttaataacagcgaacgtttttcaagtaatcaatttaccgttcggggttgtgggacatgaaggaagcacgattttagtaattttaaatggacttagactacttaagtccaaccggaaatagtgattcatttgactgctcgtctttctctagtctaagatagatgagcagtttctttttaggaaaaaaggggtattgcatgatagattggagatgagtgcatgagaaagattaactggacacaatggatagcgctgtttgtttttgcatcaatgggaatttcagtcgtttttactatctatgaaatttttaacgcaccaataaagcaaccagcaactggaccgcatgtgacattacgaggggattatatctttttattatttgaaattttactaggaatttttattttgttattgccttccattattgcacgacgcttcaaatttgaaatacctggactggtttatattttatttattgtttttttgtacggctcgatttatcttggaaccgttcaaaaattctattcaaccgtgccacactgggataaaattttacatacttttagtggggcgatgctcggagcaattggcttttcgttcgttagcttgttaaacgcaaatgataaagtagtcatgaaactgaagcctggttttatcgctgtctttgcattttgttttgctgtaacgatgggcgctttctgggaagtgtatgaatatacttttgacgggattatgaacttaaatatgcaacgctacaacctatcaaatggtacaccactaactggacgagcagctctggaagatacgatgacagacataattgttgatattattggcgccttattcatcgtcattgtaggctatttcgcactgaaaaaaggtcggccttggatggaacgctttgaattcaaacgaaaaaactggaaaaaagaaccaaagactaagtaaaatcaaaaaagcatttgagcctactcagatgcttttttagttgcacaaaaacgccgacaactttggggccatgaaatgattgactgcatcttagaacttttctacacttaaattgagaagaaaacttttaaaggagtgaggaaatgtttttagatacgggtaatttagaggaaataaagaaagcgcttcaatttccgttttttgagggtgtaactacgaacccaaccattttactgaaagaaaatcagcccagaaaaacccatattgctcacattccagcaaaattagtatttgtccaagcagcgggattaacagaagaagaaatttgggaagacgtgctgagaattcaagaaattaagccagctgaagggactgttattggcttgaaaatccctgcccatgaagctgggataaaagttattgctacagttcgcgctaagtttccagatgcgattattttagcaacggcaattttttcatccgagcaaggttatattgcggctctttctggggcagactatttagcgccgtattacaatcgcatggaagtaagtggtttagatgcagcgaaaacgatagaagaattgcgctatgttctagatttacaaggtcttgaagaagtgaaaatcatgggggcgagttttaaaaacagccgccaaattatgcaagcattagcgagtggggcggacacggtaacgattggttatgatttattcttacaaatgatgaataaaccgctcgcactcgaaagcattgaaaagtttaacgaacataatgcagctttacctaaatgaaaaaaagtaagtatccatgatattggatacttactttttttatttgtcttcgtcgcgtaatggtagattatttacgtagctatcagaatactgtaagagtttgcgacttgtttcgaatcgcttcttcacctcatctgatagttctttatttgttccgttatagttcgttgctgctccagtttcaaagctttcgtctggctgatacatgtaagaatcagtgaaatagcttccttcaggcatagtgtatcgttcaggaacataattgtttgttgaattgagaatatcagtaccaaacattatttgattgcctgtattaatacctaataaattcatcacagttggcataatatcaatctcaccgccaacatttttgatttcaccagggtttttcattcctggataatgtaggaagaacgggatacggtaatcgtctgctggatctgctttaagctcggtagaacgattgacgtattttttctgttcttctggaagttgatctgttttgataatatggtggtctccgtagaaaacgactactgaatcctcccaaatgccactatcttttaatttttgaatgaaagcgccgagttgtttatccgcgtaatgaactgcttcaaaataattgccaagttctgtatcttttaaatcactcggtaagttgatttcttgcttttcttcagggatgttaaatggcatatgactacttacactaattaattgcgcataaaatttttgattgtttttatattgtttttctaagatagggaacgctttgttgtataatacttcatcacttggagagaagccaattacgtcttcatcgccaaagaatttacgatcataaaatttatcaaaaccaactgccggataaaactcatctcgattataaaaactagcgtcatttgtatggaaagtggacgttgtataatcatttttaccaagtagtcgaggcatagatggaatgacccggtcgccgtaagtttgggtatttgtatagtatccgctcgggaaagtggatgtataaacagaccattctgcgtcggctgtatttgatttagaaactgtttggaaaaacttattggaatacattgtttcgttttgtaaactatctagcgttggagtgattgactgtccatcaattttaatatttgttaagttccgctgaaacgattctaattgcacgataatcaggtttttccctttcgcagcaccaaagtaatcaggtttttcttttaaatccacgcctttaatatcacgaacgtttttggcggtaatgtctgcggctttaacatgatcagttccagcaagagcagtactaatattaaatgtaaaaattcccatccgctttgctcgtttcgaatcgctaatgatattttgttgcatcataaaataagtaaatccgctaagcacaagtaaagtacttaaaaacgatacgccataaatacgtttagttaggcggaatgatggaaaaacatggcctttttttatgctgaagtagaggataaatggaagtaaaataatatccatgatgtaaagccaatcagttccactaagtaaactagtagcgcttgtttttacgacaccgacttctccgataagtgagaaactatgatacgtaggaacttcattatagaagcgggcataaagtacgcaaactaacataagaatgccgataaataaagacattccagcataccaataaacgtgagaacgaaccggagcaaataaatgaattagcccaagtaataatacgataaacagcaggtccattcctagcgccaagaaattgggatctttaaaaatctggaaataggcaaaagtgaacttactaataattaataaaaaataaaataaaatcaattgaattcctctttctagcatgctttgtgccgaatacgcacaaatccattctctctaattttagcctaatcatgcttacagtgcaaatcatgaaagatgattcagatatatttgggtaataggtgctattttaggaagttataattagttttgtattttttttcacaattctattgacctttaaagcgcaaaagtatactattttagaagatcgtaaaaaggtaggcgacaaaatgaattcattatttagaagaaaaccgatagaagatttaatgcataataaaagcggaagtacacatttaaaacaaacgcttggaccgcttgatttaaccttactaggggttggagcgattgttggaaccgggatttttattttacctggtactgtagctgcgaaaaatgctggaccggcgattatattttctttcgtcattgccgcgattgtttgtgcgattgctgcgatgtgttattcagagtttgcatctagtgttccggtagcagggagcgcctatacatacggctatgtcgtctttggcgagttaatcggttggttgctaggctgggcacttattttagaatacgggcttgctgtggcatctgtcgcaagtggctggtcttcttatttaaatgcgttgctttcaggttttcatatttccattcctgaagcagtatctgggccttttaatccagaagtaggtacatttattaatttacctgcaattattatcgttctcgtgattgctttcttattaacacttggaataaaagagtcaacgcgtgtgaatacgattatggtagctatcaaggtaggcgttattttacttttcttagtagttggcgtgttttatgtgaaacctgacaattggcaaccatttatgccgtttgggattagtggcgtaatgaacggtgctgcgcttgtattctttgcttatttaggctttgatgcagtttcctccgccgcagaagaagtgaaaaacccgcaacgaactatgccgattggaataatagggtcgttacttatttgtactattttatatgtagcggtttctgctgtcttaacaggaatggtaccatacacggatttaaatgttactgatccagtggcttatgctttgcaagtgattaatcaagattgggtggctggtatcgtatcactcggagctgtagttggtatgattactgttattttagtaatgagctacggggctacaagattgatttttgcgatggggcgtgatggtttattaccaaaagtactggcagaaattaatcaaaaatatcaaacaccagtcaaaaacacctggatttttgcatttattgtggcgattattagtggacttgtaccccttgatagattggctgaattagtcaatattggaacactcctagcatttatgatggtgtccattgggattatcttcttacgtaaaaataaatctattcaacaatcaggcttcaaagtgccattttatcctgtgttgccgataatttcgtttttattatgcgcatttctcataagtcgcttatctgttcacacctggattctttgcgggatttggtttgtaatcggattaattgtgtactttgcatatggtaggaaaaatagtgaattacttaaaaaataattaacttactttttgtaagtcgttttattggtatttggacgctccttgtgttgtaatgaatgtattacaataaaaggagcgttttttacatggtggaaattagtgaaaaattacgattaggcgaagttgtcttaaatgtaggtcatttaaaagagatggcaggtttttatcaagaagtaattggtttaactttattagaagaaaatgatcggattgtaaggcttggagtgccagattcgagtgaggcgttgcttgttcttaaaaaaatagaccatgcagttgttccagaagtgccgcggattggattgtttcatacagcatttttattaccaaatcgagaaagtttagcagatgtactcgtgcatttagctcagtcgggttatccgattgacggagcgggggaccatgcttatagtgaggcgctttacttacatgatattgaagggaacggcattgaaatctacgcagatcggccgaaaaatagttggatgcgtgatagcgctggaaacttaccaatggtgacagagcaagtcgatgtggatgatttattaaaaatcgcaactggagaacctttcactggaatgccaagtgggacaattatcgggcatgtacatttacaggtagctgatgcagacaaggcagagcaattttataaagaagcgcttggtatgaatttaacgacagcaataccatcagcaagattttttgcagcaggcgattatcaccatcatattggatcaaatatgtgggctggacgcaatttggaaaatcgtcgtgagaatgaagtcgggctagcttggtttacaattatcacaccagacaaagaagcgataacaacgaatctagagcagcaaggttatgaagtaaaacgatttgacgaaacgatttcagttaccgattcaaatggaattatgatacactttaaataaaaaaagaactgtttaagcgaaaaatgagcttaaacagttttttgatgcgataataagggaaaggtagattagattaattattttaatgtttacgttgcattgttttcttgaaaagccagttgcttgattggaaaagcgttaaagcaattaaaacgacgccaattccaagatttaaatacgaaagggctacagctgcgttatctggaaatgaattttgcacagtgatgaaaataataaagaaaccgctgtttgcacaaaacgcaatccaaaaccaagataaaccactaagtttaccaactacaaaagaaagtcctgagattattgctgctaaaacaattcctgtaagtatcattgacataaattccattttcatcgctcctttgtcataaatgaattattattaataataatgtaacataaatgaaatattttgtaaagaagttagaagaaaggagatacacagatgattgaattttttaaaacaacaaatgaaaaaatggagcaattatccgagttagaagatggttgctgggtgaaagtaaccgctccgacagaagatgaaattgagcaattaagtaaagaaatggatgtgccaaaaccttatatcttagatgcactcgattcagaggagcgctcgagaatagaattaaaacgagcagaacaagatgtaagacactccttagtgattgtcgactatccgtatgaatcggaggatgaacttggttacacaatgtacgaaacactgccaattggtatcgtattaacaagaaagtatctagtcactatctctttacgcgacttactaatattagaagatgttcgtacgatgaaactagaaacatacgatacgacgaatcataaacaatttttgttaaaattattgtatgctgtatcttattattacctcaaatacttaaatcaaatcatcaaacaaacaaataatttagaaatacagattaaacagtcgatgaaaaatgaacaactgtatgcgtttatggcggttcagaaaagtttagtattttttgcaactgcacttcaatcgaataaagcaatactcgataaaatggaagatgtggaacattttatgcaacaggaagataaccatgacctgcttagagatgttattattgaaaataaacaagcaatagcaatgacagatacatacacgcaaattattagtggcatgtcagatgtgttttcttctgtcatttcgaataatttgaatatcgtgatgaagtttttaacatcttttaccattattttatctttaccaactattgtggcgagtgtttacgggatgaatattaagttgccatttatgcacaatgagcacgcgtttgcattaattcttttatttacgctattaattacaacgggggtaacagtgattttttggcgtagaaaatacttttaatatatagaaaacgagggatgagcatggaaaaacaaacatacgaaaaattagcatactatacaatcaaagaaaaaattctcagcggaaagcttcatgttggtcaacatatttcagaagcgggtattgcaaaagaattatctattagtcgaactcctgtcagaaaagcaattgcggttttagtatccgaagaattaatcgaatacgaactgaaccggggggctattgttatcgaaagtagcatgagcgctggacgttttatcgaactccttgaaatggcagaaattctcgtcgtgcaaacaattgaaaaatgtaaaagtaaaaatttaacttataaaccagaacaaggcaatgaattactaaaagagatgagaatcattcaaaaagaagaaaatgtcgatgcttatctatctttgctgagtaaatggctgttacaatttgtcgcgcaactagctaacagttatgcagaagatattgtaaggaaaatgaagcgtgatttctttaataaagcacaaaaagatattaaaataataccagtgcttttggaagaagaaacgatggatacattagaacaactaactttttatatggtagaaaagaaatatgacttagcaaaagaggtaatgcaaaaattagtgaatttgtatattatccgtacatttagatagtatttctaaaatgatttgcttaaatacaggaggtgcttttgatgcggaaagtatacgaaatatttgttttagactggcgccgtctctttaaagcgcctttagctttattattagttattgcattaattattttgccatcattatatgcatggtttaatattgaggcactttgggatccttattccaatacatcaggaatcaaagtagctgtttcaattgatgatgaaggcgcagaagtagacgtaccgggaaaaaagcctcaacaagtgaacgttggggatcagcttaagaaaacccttgagaaaaataaaaaacttggttggacttttgttagtgaagaagaagcgaaaaaaggcgtaaaaagcggaaaatattatgcttcgattcatattccgaaaaatttctcagaggatatggtttcggttgtaagtgataacgtcaaaaaaccaacaattgattactcggttaatgaaaaaatcaatgctatcgcgccaaaaatgacagaaagcggagcaacaactattgtaaatcaaattagttccgagtttgtgggcacggtgagtaaggctgttttagaagagtttaataaagcaggaattgatcttgaaaacgagttaccgacaattagacgtttaaaaaccaaagtattccaagtacaagatgctttaccagaacttaaaaaaatgggtgctgaggccgtcaaaattgaagccaaattacctgaactaaaaacgaaagcaaatcaggttgtcgaactaaatgaaaaaatcccagaactaaataaagcgacagaaaacgttttattagtagaagaacagctaccaaaaatcgatcaacttggtcaagatattcttgtgctccaaaagaaaatcccagaaatcaaacaaatcgcgcagtcagtaaaagaagtagatgaaaacttcggaacgatcaaaaaaacagtcaatgacgcggtgaatgaatctggtaaggcgcttgatgtgattgatacagcgacagcagcgattccaacagttgaaaaaatcgcccaaaatggtagtggatatgtcgataaagtatccgattttgcagacgaaattaataagtcatttgatacgttagcacctgctattaaacaaaacttaacgctaatgaagcaaatggcagataatatttaccaagtaactgaagcaatcaaaaatggttctatcaactctgaacaggcgatttccgaactgaagaaaatggaaaacgatattgattccttacaacaaatgattacaaaacaaactgcaactttggaaagcttaaatgaaactttaccgaataagccgtttaccgatttaattgcaaacttaaaaacgattaatagccaactaggcgcacaaaagcaaacaatcacaaaagtacgcacagcactagaaaatggtgaacaaccagctgaggaacttttaaatcaattgaatgaacaagccaaaaatgttagcgcaaaattagaccaaattttagcaaactatgattcggaaattgttccagcaatcaaaaccggcttaaatcaaattcaaggagacttaaaagacagccaaaaattactacaaaacttgcaagcaaaaatcccagaaatcactcaagtattgaaagattccagagaaacactgcaaactgggcaaacgtatttaaaagaatttcaagagcgactgccagaaatccagaaaactttggatgaagcaactaaggttatcaatacgaaactagatacaattatcgcaggtattaacgaagcagctgatttttatcaaaatgattatccaaacgtaaaagctaatatcaaaaaagcagccaacttcattcgcgatgatttaccaggactcgaaaaagaaataaatcaagcatccaatctgatccaagaaaaaatgccagagttcgaaaaagccgttaaaatcgcagcaaatctttccagagaagaactgccagaatttgaaaaagcaattaataatgccgccaataaaattaccgatttcgataaaaattacgatttgcaaagtattattaaaatgctaagaaatgatgccgataaagatagttcctttattgcgaacccggttaatttaaaagaaacaagttactacccgattccaaactacggctcggcaagctcgccattttatacagcactttgtttatgggttggggcgctcttgcttatctcattactacgtgttgatgtagaggtgccagcggggattttcagccattaccatcgttattttggccgattattaacgttcttatccatcgggttaatgcaagcacttattgttacgctcgggaatatattcttgctcggtgtttccatcgctgaacccttactccacgtgctctttagcatgtttatcagcgtggtctttatgacgattgtctacacactcgtttctttatttaataacgtcggaaaaggtattgcgatcatcttgttagtactacaaatttcaggagcgggcgggaacttcccaattcaagtctcaccaccatttttccaagcgatttatccgttcttgccgttcacttatgccgttagtttaatccgagaaagtgtaggcggactctatatgccaactgtttggattgacatgagtgttcttgctggatttgccattttgttcattgcattaggtttgttactcaaaaaaccgctcgacaaagtagtaccaaaactatccgaaaaagcaaaacgaagcaagcttattcactaaaaatatttctatgatataattactagcgaataggggggcagacttgatggtaaataaatataaaacgttggataaaatggtctataatttacttcttgaaaagattaaaaaaggcgatttagtccgtaatgagcatctcgctgaagaaaaacttgccgctgaattcggagttagccggtccccacttcgaaaagcgattgctactcttacagctcaaggcattgtgagctatcacgaaaatagtggagcagttttaaacgatgtgctcattggttcagaccgatacgtgcaattaatggataccatcgatattttagttgatgcagcaatagcaaaagtagggcacttcagtttagtaatggatatagaaaaactacacgaacgtttacaagagatggaacgattttcttatttaacggatgttgaaagttattttgatgcacatcatcgtttcattctttgcttaattagttttgctgaaaatccatatcaagtgaagattgcaaaagatattttctttcaaatggttcatttttcggatggtattaatatttttaaatcagtcgaaattagagaatggaccaataaaaaaagcagccaaatatatgagctactcgcacaagataaaaccgaaatggcaaggaagacaattaaatcaatgtttgctgaacttacaattcaagcgtatcgttaaaagagctgtcacaaaagtgacagctctttttgatataaattaaacccattcttctcaccagaaaacataaatccataacgcagatacatttgattaagggcttcgtttgttttgatgcagtctaaccgaacaaacggaacagacatgttaagtgccaattgttcagcaaaactaatcatttgtttacttaaagaaatgccactaaaatcccttgataccattattcggtgtaagtaataagctgattgttcatgcctatcaccccataaatctgtatcccagtcactcggcgttttcctaataatcattactccagctagttttccatcagccgcttcaaaaagtgcaacttcgctaagctcaatccgttgttcaatattatgaacatcaaatccatgtaaaatatcactccactgggtcgaacccgattcttttaaccagcgcgcagtatttaccattaactcatttattgctgaacgatcatttggcaaagcaaagcggactagaaattccagtccgccagctgttattttattttggttcattattgtcttttggagcctcaggagcttctggagtctcaggagtttctggtacttctttcgtttcaggagcttctggaacttctggtgtttcgggttctatcgttgtttcaggagttactggagcttctggttctacttttgtttcaggtgctttcggaacttctggtgtttcaggttctacctttgtttcaggtccaaatccctctggatgagtatcttctacaaaaggatcagtttctcttgtaccaaatggatcaatttcttcttctacaataactgtttcttcggtgtaagttccttcgcttgctgcatataaatcatcatagaatacagcgatagaagtgattagatacggataaacataaagtgaaataccaagtgtaagtaaccaagaagctagtattaataccagtccaccaaatgtagctccagcagcaagtgctgtaattacttcagcaggatcagcagtataagaagtagtagccataccaccagcaacgattacagtacctgcaattgctacggctaaaggaattaaataccaaagtaagaatgtaagggaaagaccaaatagtctacctttatgcccgttcatcatatggcggctttctgtaatagcatcaagtgctgaaatattaggattatcgcgtaaaataaagaatgtttgtgaataggaatatgttttaataattcctggtacgattagtaataagctccataagaatgtgaaaatagaaatgagcaagtaagctaaaaacgtacgtccaaattgtttaaaaccactaaacatataagcaacatctggttgttcacggcggctaattgctaagtatacccaagcaacccccgtataaagtggtccagttaatagaaatagggcaatccagccaacaacaggaatccaaccaagtacccctccgccaacggtttcaattaaccatgcaagaacaaatatcccaatggcaataccccagttgccacgtagcgactctttagctgtctgttttacttgtgaaatagtcatcataatgaaaactcctttttaatttatttttaagtataatagcaaaaatacctacttttaaaatagcatacttttaggcactaatacagcaatatggagcgggataaaaaaatgtttaaaataggattaattttctagcaataggggaaaagtaacgttatatgatatgaataatttggaggtggcgcatatggcccatgagagtttaagagaattagaagatcgattaattgaattgcgacaacaatatcaagaagcgttaagcgaaacacgggagtttgaagacccgcaacttcaaaatggaccaattaatgctgctgaagtaagattaagtgcattacgtcacgaaatcgctgaagtagagaagaaaattaaaaaagtagaaggcaataccaaataaggaaaagacgtccttttgctaatgtcatgttagcgaaagggcgtttcttttacgtaggtttggaggtataacgatgaagccaatttttgctgtaggagatgtgcacggggaaattacgcttttagatgagttgttagaaaactggaataaagagcaagaacggcttttatttgtaggtgatttaattgatcgcggtgaaaatccagcggcggtacttaggcgtgtgaaagagctcgcggacgaaaccgaagtgatagtcttaaaaggcaatcatgagcaaatgttgctcgattttttagataacccttctgaaaaaatgcattattatttgagccaaggtgggatggaaacaatccaatctctaatcgctgactcattagataaaaaaatgacgccagaaggattagctaaacgcgtacaggaagaagcttctgaactcattgatttcatccgccatttgccactttattatgaagaaggtaaatatgtatttgtccatgcgggagtagatttttctaaaccaaactggcatgataccgaggagcgcgatttcttctggattcgcgaaccatttttattcgggaaaaataaaaccgggaaagtctttatttttggacatactccggtgcaaaatttacatagcgatggaagtgcaagaatatgggtctctgaagatagaacccggcttgatattgatggtggcgccgtttttggcggcgaacttcacggagtcgtcgttgaagaaaatgtaattacaaaaagtttttccgtaaaaaaataagcatcgaatgggctgtttttaagagctcatttgatgcttttttgtttaataatacggcgccataaataagtaaacgagtacgccagttaagctgacatatagccaaattggcatagtccaacgaacgatttttttgtgtttctcaatttgcattgtccagccccacacaagtgcaaatagcgctagtggaacaacgattgctgctaagaaactatgtgtaattaaaatgaaaaagtagattggtcggataatcccagttccgccaaacgtagaagtttctgctgagagataatggaacgttaagtaagttactaagaagaataaagttgatgtaaatgctgctaaaatgaagccacgatgcattttaatgtttttcttttttataatcgcccaaagtgcaataactaaaaatacaaaggtaaaactattaaagatggcgttcattcgcgggaagatagtaatgtcgaaatgtactgctccttgatacccaatcggtgagaagaagagtagtaaaatcactacaaccgcaacaaatgaaataatcattatcggccaaaaatagtttttgtctgatgtcggttttgtaagtttttctttattgtgttccatgaaaaaaatagccccctaaatataaaaaattgctgtacttctttcattatacatgacgaacatatcggatgctaaagattgaacttttgagttataatgggttaggaaagggtgtttctaatgtcgattattgcgcgagaactaacaaaagcggaagaagcagaaattatccgtttaaaagaagagggcgaagtgatgctcgaaactgacggaactccagaagagcgaatcgaaaaaattgccaaatatttaaaagatacctcaccggacttcgatttggcggaggaacttggttatattttagggtctctgtatggagaggctgtccgtgaaaagtatcagtggagatggctgtttatttctgaaaatgatgtagaaggatatgcaattacatcaaaagaacatggttatacattaatggcgcatgattattttatgcaagtaattgttcgaaataaaccggataatagtaaaaaattatttgaattaatgcctgatatgacaggaaataaggacggattccgagttattggatgatggaaaagtacgttattaaaatagaaatagattattagagagaaaacattcacgtgttttctctttttttatcgtttattttttattttctttcaaaattaaataatagtcacattttagacataataacgaggtgattgttcactgtttagacacaatcgccgggaaacaagtgatactaatggacttctgagaaaaatcgccatgtataatgtaatttagatggtttattttatgattctgcaactaaaaaaactgacatctaaagaagaaaggaacggatatatgataaacaaacaacatttttataaagtaattcaggcttttattggggttcttttaatagggagtgtttttatatggcttgggtcaaataatgatgtaaatgctgaagaacagagcattaccgaacctacaccaataaacgaaatttttcccgatgctaaattagcagaagtaatgagaaactatcttagcaagacgaatgtcactgatactgttacgcaagaagaactgaataacataactattgtaggtgcaacttcaactgggattgagtcgcttgagggaatacaatatctgccaaatgtgacgacttttaactttaacggagaaaaaatacaggatattagctttttatcaaattctacaaagttagagaatctggacctgtcagggaatccaataaaagattttagtccgattgcaaacctaacaaaattgcacactcttaatttaatgaattgtgagataagcgacattagttttatcacaaatttaaccgagttgaaaagcctttatcttagtaacaatcgcataactaacataagcccattagctaatttaactaaattagactatttaattattgaaaataaccaaattactgatttaactccgcttaaaaatatgaaaaacctcaataatttagttataagtggaaatcagataaatgacatcacaacaattgctgaattaacgagtttgcagaatttatctattagtgacaatcaaattgtggatattagcccattagctaatttaaacaacctaaattctttagctatccataagaataatattgttgatacaagtccattggctaatttgacgcaattaaagtttataaacatacgagataatcagatagatgatattaccggattaactaatctaactaatttaaccaatctacatttaggtggaaatgaaatatcagatctaacgccacttgcgaatttgactaatttaaaccttttggatttaactaataaccaaataagtgaggttatacctttagctaatttaacgaatctatccaatctttggttaaatggaaacaatataatcgatattagtccattgaaagatttaaagggtttaaaaaatttaagtttgtctgatcagcgaatacagaaaaatcctgagttgtttaaaaccaattttaccttaactaacaatataaaagatttagacggtggattagttgagataacagatattagtcataatgggacctacgataacccgattgttacttgggagttgcctagatatgtaaatgaaattagttataaatatacacaacatgtgcagattggtaattctaagacggattacgatgtgacggtcagacaacctttaagcttaccatcgcatactgtgaactttatagtagacgatgttttaaaaacaagtttagaagtaaaagaagaagcgttgattacacaaccagccgcaccgaaaaaagcagggtacacatttacgggatggtatgacgcgaaaacaggcggagacaaatgggattttgaaacagctgaaatgccgagaaatgatatgactttatatgcgcagtttagcgaaaatgaagttatcccagttgatgaagacgttgatcttattgttgaagaaagcggaccagtgcaagaaagtaatgatgacgtaccaccagttactgaaccgacaaaaaatatcgtaatgcttccgaaaacaggagacagtaacaacatgttatttgttggattaggtttgttattgttcggaacaggggttgttattagtaaaaaactccgctaaaacaaggaacaattatttaaagagaaagctttattgctttctcttttttgttcactttgaatggttagcgataatagatattagcaaaatattatgctacagtgaaagaattaataggctagttttagtgagaggtgataacggttgaatataaataagcaaaaagtgcaggttttaaataatttagttgagctttatggttatcaagattggtgggaagatgacaatcgtcttgctgactggctttcgatgatattaattcagcgtacgacagagaaaaatgccaaccaagctttagccaatctcgcaccttatttagatttagatagtttaaccaagatggatacggtgcaacttgaagagttaatctatccagcaggtttttataagcaaaaaagtctttacattaaagcacttattgagtggttcgttggtcacggtgctagtttggataaatttaagtcttattcaacagaagatttgcgcaaagaactactaggtattaaaggcgtcggggaagaaacggccgatgcaatgttgctatatatttttgaacgtaatgtttttattgctgatttatatgccagacgactatttactagattgggctttggtgaatataaaacgtacgagcaaatgcgtgaagaatttatgccgataaccgaaaatattccacataaactatgtaaagaatggcactcagtcattgatgttcacgggaagcattttgggaaagacaaaagtatgaatgaatcgtggttgctagaaagctagctcttaacaatatctataccttttaacctgataaactgatctaataaaatttcatataaataagcaatttcttcaaaacgaaggtcattcataatttgaatggctttttttgcttgattgtaaccttcttggatatgattgttttgcattttgattaagccttttaaaaaatgggagatattgcggtaaaaggcgctttcgttataaatgcataaagagtctagcaggataatgagtttattagcagaggatagttgaccgcgcgaaataaacatttcaatcgtattaattaaaagtgtacataaaacacgtctggcccggtcgtagtttttataaggatgaatcgccttaatgacctgatttaaaaattgaatttgtaaatcttcttcaaaaaaatagatggagttagcgcaaatcttgagttcttcaagtgtccacgtatcaatcgaaaacaaatacttttgaatagtgcatttatctttagatgtaataacatctactgtaaattcatgatatttaaaaagatgtttgactaatttaatttgcgaacgaacaaatgctttccatacctcaactaattcgccattatgtttagaaagctcgctatataatagttccaaactcgcaaggtcgtatatatttcctcgctcttgattcatgcataaataattattctcagctgataccgacaattctctgtggatataaaagaactcatccaagtccatattcatccgttttaaaattttttcaaataatgttagtgtgatgtcgtgctttcctttttcaaattcgatagcgaaggatttggaaatgatattatcgtataaatctttttgatgtattccttttgaagtgcgaatatctctcactgtttttccatacccgaccattcaagttactccttctgtttaaaaatttagatgagggctgcatctaagaggtgtgccaaggagtttaacagccattttacttttaaatcgtagcatagaaaattgggcggaagaagtcctatttttaggactttatgaaaaaatgttagtaaaacttgatatattagaaatgaaaaaaacagatctatttgcatctttttttatgatatttaacaagagaaagaaggaagttttatggctaaagcaaaatatgacgagaattttaaaaaaagtttggttgctttatatcgcagagggaaaacgaagcatagtatctgtcaggaatttagtgtccctaattcaacttttggaaaatgggtaaaaaaatttaataatgatgataatattgaatcgaacgaaatcttaaatatcttgcaagcgcaggaacttaaaaaacaacgagtactacttgaggaagagttatctattttgacagaagcgattgcggtttttgaaaatccgcctagtaacgattgaattttgtgttgagatgaaagtggttataccgaaatcaagaaaagcagttattctcttaattttaaatagaggatagctgttttttttatttttaaatagaaaatgttgtctttgggatactttttgttgatttttagtcacatttcagatggaattgcttatattaatggactgaaacggacctcattgtaggtataattgttcttagttagatacaaggatacgcaagaaaacgggggaaattgaggcagataaaccatactacaaaggaggagatgtatttgaagaaaattttacatattgttatcgcgcttagtgtaatttgttcgataattttagtgccggtggattggcccgcaaaagcagacggtaataataagagagatgatctcattaaatctgtcggtttttataaatcagatggtcaaaacgtaatggcgaaggaaaactataatgaaaagctcaattattttttagaggtagcttttggagggaattctttccaaaaaggggactactttaatattactttatcatctgatactttactctatacagagaaagcctatgatttgaaagtggatgttgacccaacagcggtaactaacgaacaagtagttggtaaggttactgtagaaaaaattaatggctcgcccacattgcactttgtttttacagaagattcagagtccttttttatgaaaaactttgatgcgaattttaaaatacaggtgatgccggctcatggcgataaaaacgttattaacctttcttacagtggagctgcgaaaaattttaaaaatattgggacgagcagtgtagaattgaacgtaaatatggcaagtgactggccaccagttggaataaaagattttactaaaaaaagcggtgatttataccatgcgattttagtatatgaaaagcctagtagcaaagtgaattacgaaacagaaattttagtatcgtatccgctttttgaaaaacgcattccgcttggaaatgtgcaaaatattaaaattgaagtttgggacgaagcgaaggagatttatagaattggtgttgcaggggtggattacggaacgattacatacgatgttggaactccatttgtaggcggtcctattttccaaatgaattgtactattccgttcaaaggtatttctactaaaactcgtgttagtttcgatattgatacgaatgtggacgggaaacctggaacaacagatccatacttggttagtctttcttctgtatcatcggctacaaagtcattagaattctatccagtgaataatgctgatacgaaaatgacagctgctttttttgggaaagtaacgacgcgttttgaggatgagttaggcaatccggttacttttaatgattatagtacggtaacaacaccgggaaaagtcaatcaagatggtaaatttgaaatagcggaaccttttttacataattccgtgcaaaacgtggataaacatgcctatgattcccttttgaatactaataaatataaattattagaggtaacttctcctaataaactatctgaaacagcggataatttaagtattcaaataaagcaaggctaccaaaatgatgttttatacaaaataaaagcactccaaaaacctgtcattagcgcacttcctgaaatcgaatatagtaaaacagtaaaccggacaatggaagagtttttggaagatgtggaagcaaaaacagatattccagctgatataaaatgtgatttaacgaatgtgaaatggggtgttccgggcgactatccagttcttattaccgcggtaaatgaggataatcaagcagcagacccagttcctgtaacgattaagatttccaaaaatcccgcaccggttataacggtagacccagaaataatctatgataaaacagtgacgaaagatgagagcacattactaaatgaagtaaatgcgcgaacaaatgatggttcgacgattacttctaatataaacgacaaagtaaaatggggcgtgccaggcgattatgaagttacgttgaatgcggtaaatgaagacggcgtagcagcggaagcgaaaacatttatcgttcgtattttaaaaagtccagcgccaattatcgctgttgatcctgaaataacgtacccgaaaacagtaactaaaacggaagctgaactccttcaagcagtaaatgcgcaaacaaatgatggttcaccgcttgtttctgatatgaatgacaaagtaaaatggggcgtgccaggcgattatgaagttacgttgaacgctgtaaatgaagatggcgtggcagcggaagcgaaaacatttatcgtccgtattttaaaaagtccagcgccaattatcactgtggatccagaagtaagctatgattccgcgataattaaaaatgagacagagctattaaaagaagtccgcgcaaagactaatgataactcagctattacttccgatgctccagataaagtgaaatggcaaacgccgggaagctatactgtgacactgaatgcggtaaatgaagatggcatcccagctgatccagtaacgtttatcgtgcatattgtagaagcgaaaaaagcgccaattgttatagaagaaaatccagctgatacgcctactaagcctagtaagcaaaaacccaaagagaaaattgttatcaagaaaacaacgaaactcccgaggacaggggatacacaatcgaaagctatcttaggtggggttctttgtttgggagcatggttcttagttagaaagaaatagcaagaacaaaaaaacttaagtgaattcacttaagtttttttggagtaatttattaaactttatcatatgcttctaaggcaacaggtagggcgcttataacagtatttcctacagccggtaaaccaacgagaatggcgctaataatctcctcacgcgtcgcaccgtttgtctttgccattgttacatggaaaggtagtccgctttctaggcgggtggcggccataacggcaatataagctagttcttctgtttttttatcgagtttacttgcggtatctagtttatgtacggtttccatccaggcagagtgtacttcgggagcttcttttgcaaatacctcaaatgatttacttactttcatcgaactcatctcctaacttttattataataaaaaaccgcccaaacaatggacggtttttgtattatctattttcggctttattataagcaccatgccaaacaggaccgatgaattcgtttagggcaaatccacctttgatagctgctgtgacaaagtcttttgcttttgcgacagcttcttcaaccgttaaaccttttgcaagtccggctgtgatagcggctgcgaaagtacaacccgcgccgtgattgtggcttggagaaattttttctacttcataaacagtaaattctttaccatcgtatagtaaatcaattgctttatcgctttctagggcttttccgcctttgataactacgtatttagcacctaattcgatgatttttttcgctgcttttttcatatcatctaatgtagttaatttgccaagaccggataattggcctgcttcgaataggtttggtgttgtgattgttgcttttggaagcagtaggtcgcggatagcttcggcgttttctggttggattaattcgtcttcgcctttacaaaccataactgggtcgattacgacattttttaaatcatatttatcgatggcttcacgagttgctttaatgatgtcgattgaaccaagcattcctgttttcattgcgtcaacagggccgccagaaaggattgtttttagttgttcacgaacaagttgcgcatcaattggagtaacgccgtgcgcccagttgttgtctggatccattgtaacaatagttgtgattgcgctaaaaccgtatgtgccgtattcttcgaacgtttttaagtcagcttgtaagccagctccaccacttgaatcagatcctgcaatagttaatgtttttttgattgtcattagtgtttcctcctaaaaataaactttagtcatttgtttctaacattttataaatggctgctgcaactccgtgttcatcattggaaagtgttacatgttctgctaattctttgacttcttcttcgccgttacccatggctacactatacccagccatttttaacatcgaaatatcattcatattatctccaattgcaaaagtttcatcaagtgtaacgcctaatttttctacataatattgtaaagaaatacctttttgtgcttcgcggtgcgtgatttcaatattatcggaaaaagaagatgttacagatagttcggattctttttctaatttttgtttcgcttttgcaagaatgtctttatcagaagagaaggaaataaatttaagaatcgttaaatctttattgcctaaaatacgttctacatcaggaatttcgtgaacgtcttttgattcaaagcgttcttctactttatccataatagtttctgctggaacgtctgggtggatacgtttgtgcatttcaatcataaattctttgccacgagctttatctgttgtgatcggacccatgtcagtgaagaattctgtatacattccaagttctgtcaaggtattgtaagtgttgcgcgctaagtttctatcaatcggatgttgcaaaataattttgccgtgttcatcgcgaatttccgcaccgttcatacaaatagctggtgcatataaattagctttattaattaaccccattgcatcgtcatacatacgcccagtacaaagaacgaaatgaattcctttggcgcgggctttttcgattgcctcgacgttttcttgtgcaatctcgatatcagagttaagtaatgtgccatccatgtctgaagcaataactttaatcataatattaaattcctccccaattttacctacctcactagaatatcatttttttaagaaaaatgcacaaaaggtagctgcgcgtagttttttgggagatgcgattactttactatatttctgtctttcatttggttataatggataagaataaaacgtggattggatgtgtcaggatgaagacagaactagaaaagatgattgcaggagaaatgtataatcctagcgacagagaacttgtacacggaagaagtcgtgcgcgtaagttctgcagagagattaacgatacaatggattctgagtctcgtaaaagcgtgcttaagcgtctgttcggcggaacaaaagaaaatgtttatgtcgaaccagattttcgcgtagattatggttctaatatttatgttggcgaaaatttctacgctaattttgattgtgtgattttagacgtttgtgaagtacatattggtgataattgtatgatggcgccaggtgttcatatttatacggcaacgcatccccttgatccagtagaacgtaatagtgggctagagcttggtaaaccagttgaaattggcgataatgtttggattggtggtcgggcaattattaatccgggcgtgaaacttggaaataatgtcgtggttgcttcaggcgcagttgtaacgaaaagcttccccgataatgtcgtcgttgccggtaacccagcgcgcgttattaaaacaattgaggttgaggaaaaatgattatttcagattcaaagatttttgaacaaatggaaagtgaattagcgaaagcacgagcagcaacgacaaaagcaagccaagataagcatttgcatggcttgatgcttcttgttcaacttgcaaaaacgggcgacgaaagaagcgaagaagtgacgaatgtctcaattccaacttctgaaccagctcaaatcacaagtatggacgggaagaaaatagagttagaagacggcgcgaatggagactcgttgcttgatttttagggggtaactatgaagaaaacaattattactggagccatttttgcagggttagcagttttacttggagcttttggggcgcatgctttaaaagacgtacttggaagttatgcaagtacttgggaaaccggcgttcagtatcaaatgtttcacgcagttggcattttaatcgttgggatattaatggaaaaacaagctagccggctttacgcttgggcagcaattttattttcaatcggaattgtctttttctcgggtagtttatatgtgttaagtatttccaaagtatccattttaggtgcgattacgcctatcggtggcgtttgctttgtcgtcggttggttcttgcttattttaggggtatcaagaagaacgatgagcagatattaattaaaaaatgatcgtcttttcgcactattttacgtggaagacgattgttttttcttattagcgaataagtgctaaaataaaggaatcataatttataaggagacagcaattacatgacttatgcacttgaaataaaagggttaagaaaaatttattccactggagtcgaagcgttacgcggtgttgatttaacggtagaagaaggggacttttatgcactgcttggtcctaatggtgccggaaaatccacgactatcggcattatcacctcacttgtcaataaaacatcaggtgaagtgagcgtttttggctatgatttagatacagatattgttcgggcaaaacagcaaatcggtcttgtgccgcaagaattcaacttcaatccattcgaaacggttcagcaaatcgttgttaaccaagctggatactacggtgtttctcgtaaggaagccattaaacgtagtgagaaatatttaaagcaatcgaatttgtgggagaaacggaatgaacgtgcgcggatgctttcaggtgggatgaaacgtcgcttgatgattgcacgtgctcttatgcatgaaccgaagttgctcattttagatgaaccaactgctggagtagatattgagcttagacgtgagatgtggacgtttttaagagagttgaacgaaagtggtacgacgattattttgacgacgcattatttagaagaagcggagatgctttgtcgtaatatcggtattattcaatctggggagttgattgaaaataccagcatgaaatcactactttctaaattacagtttgaaacgtttatttttgatttagaaccgtatgagggaactttcgaaattacgggctataatcatgtttttgaagataaacaaacgttatctgttgaggtcgaacgaaatcaaggggtcaatcatatctttgaacaattaagcgaacacggcattaaagtgctttcaatgcgtaataaatcgaatcgcctggaagaactatttttgaaaattacagaagaaaaacatcaagtgggggagaaacatgtttaatctatattttacagcgttaaaaagtttagcggcgaaagaaaccaaccgctatatgcgaatttgggtgcagacactcgtgccgccagtcattacaacttcgctttactttattatttttgggaaaatgattggtagtcggattggtgatatgaacggtttttcctatatggaatatatcgttcctgggctgattatgatgtctgttattacgagttcttacgccaacgtatcgtcttcctttttctcgcagaagtttcagaaaaatattgaagaaattcttgttgcgccagtgccaacacatattattatttggggctttttgattggtgggattggtagaagtgttttagttggagcacttgttacgcttatttcgatggtgtttgtgccgattcacattcattcttggacgattggtattattacctttttaatgacagcaattttattttcacttgcgggacttattaatgggattttcgctagatcatttgacgatgtatccattgttccaacttttgtattacaaccgttaacgtatctaggtggcgtattttacgcgatttcgatgttaccgccaatctggcaagcgatttctaaagtgaacccgattgtctatatgatttccggattccgctacggtttcctaggagttacagatgtaccagtagtaatttctttatccattcttgttgtatttagtgtcgttctgtactcgatttgttggtatttaatcaataaaggacgaggacttagaagttaatagaaattgtttaaagagagagcgggtttccgttctcttttttttcatgtttactacaattctttttcaatttgatgttaaacgttttagcgtaaaacaggagggaaaacataaagtaatggggggaatgaaaatgggaaataaaaaagtgaagcgaaaacttagcgctaatatttggtggatacttatattggccattttaataattttcgtagcctatctagtaatgggttacgttgcaaaaatataggaggttttatgatgaataaagaaaatccattaaacaaataccatacgggaaaatttgaaaaacaacggcaagattatccaggtcttcaaagtaaaatgacacctgtgccagatacgggcgaatcaagttatcaaggtgcgaacaaattaaccggaaaaaaagcctttgtaacagggggcgactcgggaattggtcgagctgcggttattgcctacgctagagaaggtgctgatgtcgcgataaattatcatccggatgaagaagtagatgcacaggaagttaaagcgattgttgaggaagctggacagaaatgcgtcttactaccaggtgatttacgaaaaaaaggtttagcgaaagagttagtgaaaaaagcatataacgagttaggtggactagatattctagtgctaaatgctggactacaacaatatcaattagatattcaaaaacttccagctgaacaattacgtgacacatttgaagtgaatgttttctctgttgtgttcgcaattcaagaagcacttaattacttaaaagcaggagcaagtatcattttaacgtcctccattcaaggcgttaaaccaagcgctcatctcgttgactatgcaatgacaaaaagtagtttgatttcattaacgaaaagtttagctgctcaactaggtgaaaaaggaattcgcattaatgcagttgcaccaggtccaatttggacggcgctacaaatttctggggggcaaccacaagatagtattccagaatttggtcaagatcagccacttggacgagcaggccaaccagcggaacttgcgagcgcttatgtacttctagcctcagatgaagcaagttatacgacgggccaagtatacggaattactggcggtgctcctattaattaaaagcgaggtgagaggtcgtgccgtggacaaaaaatgaatatcctgattcgtggaaaaatctaagaaagaccgaacgcgaaaaggcaattgaaatcggcaacgcgctattaaaagatggctactcagaaagccgcgccatcccaattgccacttcaaaagcagaagaatggtataaaaatcataaggaatcgtaatgttaaactaaaaaaacacttgaaacgctaggctttaagtctactgtttcaagtgttttaattttgataaaagaagtgtactatttaaattaagagagatgatgacaacgaggaggaacttttatgaataaaagaagatggattttcagcactgtggttgcagctttcctattgattatcggaggatatttaatttatcaacagatgaaaccaaaaccgttcaccgaagtagtggcagaagctaaaatcgacggttatgagagtggggatgaactagaaaacgctagtaatgtcatcgtaacaggtcaactagaaaagcgcggagattcaataatagagcgagcttcagatgatgctgtgataggtgtatctagaatgtccacttttaaaatagctcaagttttaaaaaatgaaacgaatgacaatttagcaaaagaaatgataatacctgtttatgaaaatgaaggttacgatgccaaaacgaatacgacataccatatcgctggctatacaaaaatggaaaaagaagaaaaatacctgttgctgttgcaaaaagattcagaaggtgactattacgtcccgacagcagttattttcggaaaaataaatctcgatcctaataaaagaaatgaattatttcctaaaaacagcgaaacagaagcagcagtcaatcaagtacaagccgaagttttaaaaaatcttgaaaatgaaatcgagcgagaagacaaataattttgttctgttgcattttagttaaattcgtcatctaattttaatacaaaaaaagggtttggattgggtgagacgggtattatataaccataagcaatgacaatgccattactttttctcccttttttgtagtggattgtctttacttaccttaaactcccttttatacttttagcggttgttagcagccactaggagtattttttttggaaatatatttgctatgttgaggggcagaaaagtgtagtagataaaatcttctcagaattgagtggaataaagaactaaaagtacattgaacacgaatagaaaaactgaatattaatcttaatactatttaccaagaatacatggaacacttaagctttaagaattgctaacaaattaataagaactagtaataaaaacacctcggacaagggaaagttcgaggtgtttttgcatttactaatatttgtaaatgccactgggaattcaagtaaacaaaacatatgggtgtttgggaaatcaccacttcaaaaatatatcattgcttgaatctaatgggctgcaatgtagtataaatcacacactaaaagaaccttaacggaatcaataataaatacgttttattccaaaatgtactagacataaaatgtatttctgtatttcttgcagtgtatcatttataacactaaataataaccaatcataaataccatgttactatgcgtttgtgcataattcattacaaaataagtaggttctattctacaagtaaaagcaaaataaactagagagcgaggggaaaagatgaagaaatggttgtttgtttttttatgtgtttgttttcttagccaatgtttaagcagaacagtatttgcggaagagtctgatcaaaagattgcctatttataccaaaaagggatagcagagggaaagatagcgagtaaacaatatccttatgatgcgtttaaagaaaattatgaaacaaaccaggttacctattcagcactgaaagatgaatttaatacaagtgattcttatgacgaatggttttctgaaagttataattatggtgcttttcctgatggagaggggcatgcgaattctgagttgaaaatagaacaacgaagtactacttctaacggaaacaggttgaaagcagcaatccaaaaaggagacatactaatagttggtggtggagtcgggcatgcagcaattgcaacaactgataattatattttagaaatgtctgggagccaaaattttgcaagttggttcataggtgggatttcaaataataaccaccaattcacaaaacaaaactggatttttggtacatccaatgaacaaggtgcttcatctgctccacacattgcgaaatggattcaattatggcgaatgccaaaccaagcgatggctaagcagtgtgcagactatgcagacgccaaattttggagtagtacacatagttatactaaaaatcgccatattacttataggcttacttctggaacactcacaacggatcctaattactgctcgaaaatggtattccaatccttttactttggaagcggatctgcaaatgtaatacaaggattttctgcggctttaacaagtattcttccaaacgctttacctaatctatttacgaataattttaaaccttataaagttggaacctattaaatatcataggtaaataattggaaagagtgataaaaatgaacaaaaatataggaagaactacagagttttgtttaggcttatgtggggggatatttggaattttagcggcaactactatgttgggatttacgataccagatataggtgatatagattttagttattggttgttatccattttattaacgagcatattttccatttctggagtagtaggttctttgtttgttcgtaagcaccatctacttggaggtgttttaatgctcggtgctgcaatcggtggagtactgtcacaaaatatgttttttattatgtatttagcttttccactcctcttgattggtggattagtagcacttattcgagggggagagtttttaaaactatttagtatgtggtggttttatatcgttttagcattatctatctttgttccacttttacttttccggggatattactgagaagtggaggaaagaaaatatgaataaaagatattatactgctctaatggttttatcgtgttttaatattctctggttgttgtcatttattttcgctacaggtagggggattggcattaaactagatgataatcaattaccgggctatataattattggtttatgtttgtgtatacttacttatgcgtattttgtaaatcgtatacagcttcgtaaaataataattgctagtttagccttattagacattttgtttatgtttctagcatgggagaaccaaaacataattaattttaatgagggaatgtttgtatttattattcctatctattttttgttatttatatgtattttttgcataattgatttttatttaagtttaaagaggtgatttaagtttgagtaattttaacatactgggaacattgatgttaatagctgttttaactttttagtcctttttccactcaataaaagaatatatgtttaaaaaaatgtactattagatgaaggctatttttagttgtggaacatgcgatgttacagaggttagaggtacacagttgaggaaataaatgggtttattatagcaagtgaatacttaaaatattttgaaataaaacaagtgcttttgttagtgagccttttttatgcaaaagaagaaaagaaaacaacttagtaaaagatagtaataaaaacacctcggacaagggaaagttcgaggtgttcggcatttactgatatttataaatgccactggggattttctaagtgaacaaagatatggatatttgggaaagcatccactttcagaatttatcacagatagaggcgtttaaattgtaatgtagtataaatcatacaatgaaagacgttcttataaaaacggcattcatttatacataccactaattactttgaaagattaaattgtatctattttttaattaatttttaggaactacgagaagctttataatttaaaagcgttttattcgtggatttttaagaaatggatttttggccattagtgagttttaagacctgtgtcattagtcctaattttgtttgtgagttgaaatgtgtctattttatgaatcttttaattttaaccttgtgtaaaatacaagtggcatatatccttagtgctataactaaatttaattacacagggggaaatatggggtttttagaagcttataagtcattttggaagaattatgtgaattttagtggtcgtgcaccaggttctgcatattggtatgtagtggtttggaacctgatgattattgtacctcttcgtgttatggcagctatttttggcgcttcatcaatgatagatggggttggctttgctggaatcgtagttatgttctttcttgttggtctacggtggttgtactggttggctactatagtcccactaacgagccttattgtaagacgactacatgacactgggaaaagtggctatcttgctttccttgctttaattccagtcgttggatccattattattataatatttatgtgtcttgaaagtgatggaccaaaccaatatggagatgtctatcataaatcagaggtttaaaagaaaaacgagctaaaactaacacttaacttttttatagatttatatgtggattttatgaatatttatatgaaaagtttatttaagtaagtgcggacgtatattcttagaagaacagtaaatttttatacataggaggaaatatgggatttttagaagcttataaatcattttggaaaaattacgttaactttagtgggcgagctccgcggtcagcgtattggtatgtagtactttggaatgttattatttttgcagtattatactttttagcttttgtttttggcatttctatatttatggaaagtgctcttgggggaactggtattgcgagtagtggtggggcgctctttatgatggttcttgtattgctatatttactagcagtattacttcctacaattagcctgatggttcggcgtttacatgattcagggaaaagtggtttatacttattgcttgatttaattccgtttgttggtagcattattatgcttgtctttatgtgtcttgaaagtgatggaccaaaccaatacggtgatttagatagtgaatttgatatttaaatattaaaaacgagctagaaattaattctagctcgtttttttaatggattccttcgcttacaaggaaccaattcacttgatttgtattgataaagtaagttaagtcatatttcgttaactcgatacatttttcgttaaaaaggttttttaggtctgctttggataattcgtggatgctgatgttattaatttttgcgtcgtcatcaagacgaattgattcaccatttactgtataaatctcgatatacatcgtaacacccctttcataacttacatttgcttataattttctttgaaaacacctagttggttaagtgttacaacgagttgctgactgaaaagtggcagcgcttggatctggtctaagtcgcttgcataagcaaaatcagctacttgtagtactagtgtatggaacgagtctgtcattgtttcattttgttgttttaagtaggagttttcttgttccaactcttgatattttgtttgaagatcttgatattttttgtcgagttcttctttttgtactgcaagggaagagagtgagtagatgcttttaagtaagtcatatacgttattttcttcaccttgattttcgcttaaaagttgaacattgcttttgacgccggaaagtagatcgactagatttttttcgcgtgatttgtcgtagctgatttgttctttgatggaggttggcgctttaaattcagctggaacaacttttccgaaaatgttggttttttcttttttagtattcttttgtgtttttctttttctccctggcttgtatttcggaatatcttctacttggataagctctttttttagtttgtaataggtgttttgtagttggcttggtgtctttggaaaaatccgcaagtcgtttaggctaagcatttcagaaatatcaaggaccttcatatcttctaaaatagcaatttggtaacatgcagaaagtagttctaattcgatttttaaccaactaatattggaatgcatatatttttcgattccaccgtgttcttcaacggcttgataaaattcagtgagtaattggtagatttcttcggcagtttgttcgttaatgccagcttctgaagccatttttttaatttcagtagcagatgaattccccggctcatctacttgttttttgatttcttgaagtaattttcttatttctgatttaggcatacaatcacatacctctctatcctatagtattattgattttctgtttatttttataataacaatatatgttagttgtgtaaagggaacgcgagtaggtcaaaaggattgggtatgaagaacctttttttaagttaaatagaaaaatataaatcgaataatgagaagttttcctttgatacagctgttacgctggctgtttttttatttttacacacaatttcattttttaaaaaaagtatagattttttctggatttggtgtaaaattttatattgcagttacaaaaaacactttattgatatatattttgaaaaaatgatttatttttgtaatctgatgaagggagtgaaaggtgaatttaccttacttgaatggaatattttttatcacttttaaaaattattgtacttttagcagtacttgctggaatttcttattttttagttaagaaaaataagcaagcgaatcgcacgagaaaaagcgaaaatgacctaataaagttgaaagacactctcttaatctctcatcagttacgagcagttcttctggaggcagacggggaaaaggtgctggctattatttctaacaatgatattcgaacggtgtcattaaaaggaaataatatccaaaatgaggcacttttccgagaattacttttgaaagaggagactaaggaaaatgcgtaaaatagcttctagacgagtatttcaagtatcttttgttgttatttttgcaatttcattggttttcttttggcccggcgtgaatgttcatgcggagagttggcttgattctcttggtgtaaatgggacagacggggttaattctagtgttgccctctttgttttagtcacggttctttcgttgtctgcatcgattgtattaatgttcacacactttacttactgtattattgtcctcggcttaaccaggcaaggacttggtgcaactaacttaccgcccaatcaagtgcttgtagggctggcgttatttttatctttgtttatgatgcaacctttaattacagcttggtatgacgatgtatataagccttcgcaaaaagaagagtggagtgcgtcaaaagtttgggacgaaacacaaccacttctaacaaaatatgttgcagaaaatacatataagcatgatattaacatgatgttgaaagcagaaggagaagacccggttacaaaaaaagaagatgcacctcttatggccttaatgcctgcttttattttgacacagattacccaaggatttttaactgggatgtttatatacttggcgtttatttttatagatttaattgttagtacgctacttatgtatcttgggatgatgatggtgccgccgatgaccattagcttaccatttaagattcttgtttttattttcattggcggatatggattgattaccaacatgatttttcaaacaattctcttttaagggagtagcaaaatgaatttaacgccgattacgcaaatttttcaagattttttctatagtgggctggcgcttattttgccggtgtcgctcatttgtatcgtggtcgtgattgtggtagcgattttgatggcgatgatgcaaattcaagaccaatcgctgacgtttttaccgaagattattgcttttgtagtggcgctctttattcttggaccgtggatgtttgaacacatgacggatttatttgtaggaatcttttccaaattacccctgatgattagggtgtaaacatggagtttgaatttttccttgctgtagtgattgttttcagccgagttgccagttttttatttttctttccgcttttaaaaggacgtaacattccgaacagtgtcaaagttgtttttgggatggcgatctctattccagttgcgacaggggtcgatgtttctggtattacgacattacctgatttgctactccgggtaacgtctgaagtggtatttggattagcactggcgaaattggtggaaattattgcggtaattccaaaaatggccggttttatgattgattatgatttaggattttcgcaagtaaacttgattgacccttcttacgggacgcaaaactcgattactgctgcgattttagataccttctttgtcgtaatattcttgtcgcttcaaggcatggattacttaatttattacttaatgaaatcgtttgaatttacggcttcggtttcgattttatttgaaaaagggtttattgatttgctgctcgggacgcttggttttgcgctcgcatcagcggtttcgattgcacttccgattatgggtagtatttttatcgttaatatcgttcttgcttttatctctaagagcgctccgcaaatcaatatttttatgaatgcgtttattataaaaattacgtttgggattttcatccttgcgtgcgcagttcctatcttgagtacagtttttaaaaatttgacagatgagatgattcaacaatatgtgtcgttttttgattatttactgaaaaaatagggaggagaaaaaagcttggcgaaggataataagacggaaaaagcaacgccgcgccgcattaagaaagctcgaaacgaaggtaatgtggcgaaaagtaaagaacttaataatgctttttcactgctgattgtagctgggcttctttatttttttggagaaatgtttattaaaaacacgatcaaagcatttgttgctcttttaaaacagccgccgaagcttgctagcatggaaagttatagtttgttttatttaatggaatttggcaaagtgctaatgcctgtcatggtgatggtagttattttcggtttaatgaactacggggtgcaggtcgggatcttgttttccgcaaaggctgtgaaacctcagttcaaacgactgaatccggcgaactattttaagcgtgtgtttagtgtgaaggggattgtcgaggttgttaaagcattacttttaatcacattactttcttatgtggcttacattggctttcgggatcacttagatacactcattagttacactggacaaaattggctctactcactcagtcaaattttcgctttatttaaaaatgaatttctagctttattcctagtaatcgcggtaattgggctgctcgacttcttttaccaacgctacgattataaaaaaggtttgcggatgtcaaagcaagaaattaaagatgaaatgaaggattcggaagggcgcccagaagtgaagcaacgccaacgaagcattgcacggggacttctccaaggttcgattacgaaaaaaatggcggacgcaacttttgtcgttaataatccgacgcatatctcggtcgtgatgcgctatgacaaaacaaaagaccatgcgccaaaattgctcgttaaaggggaagatgagctggcactgtttataagacaggtggcggatacggacggggtaccgatgattacgaatagacaactggcgcgaagtatttactatacgacgaatccagatgaatacatacaagaagatttatataaagatgttattgaagtgatgaaagaattgatggacgcagacaaaatcaagttctaacaacatatgagcgacctttctaaacttagaaaaggcaggtttcaaaatggggaatttaggtgctataaaaaaatattttgctatcttgattgcggtctcgtttgttattgcacttattgtgccattacctccatttgtgttggatttagtgcttgtgacgatcttggcgttctcagtgttagtttacatgcgtgccacatcaattaaagattggaatgaattgaagtcatttccgtctttactacttttgatggggatatttcgtgtttcgattaatatttctacgacgagggcgattttaactacaggagatccgggtcaagtaattaaacagttcgggaactttgttattggcagtaattttgttgttgggattgtaatttttattattctaatcgtctttcagtttattgtggcaaatggttcatcgcggacagctgaggttgctgccagatttacgcttgatgctttacctggtaaacaaatggcgattgatgcggatctgaatcaacgtttgattacagagccggaagcgaaagaaaaacgcgcatacttgaatatggaaaccgaattttacggggcaatggacggagctgggaaatttgtaaaaggggacgttctttttaccgttttgctagctgttgtcaatatcgtttttggtttaattgtcggaatggttcaaggcggactgtcattcggagaggctgcggttaaatatacggagttaactatcggggacggtatcgtgagccaaatcggttcactactaatggcgatgtcagccggggttattgttactcgagtatttgatggctcggatgataacgttgcggtcggaatttttaaagaattaatgcaaaactcggtggttgtatatacgcttgctgcaatgtttatcttaatgggcgtatttagcccactccctgcgattccttttgtcggaattgggattgtgcttggtattatcggttaccgtacgcaatttaatttaaagaaaaaagaacagttggaactggaaaaagaaatggagcttatccagtcggaaacaagctctgctgaagcggaacacaaccaagcatttggggcagcacgcgagaaattcccggtggtagtcgaactcggcttaaatatcgcggcactcgtgaaacaaaaaatgaatggtgaaacggcgaaagataaagtcgtcttgatgcgaaaatcgattttacaagatttaggcattggcgttcctgggattaattttaaagataatacaagttttcaaccgcgcgggaaatacgaaattaaagtaaaaggtgttgcggttgcgagcggggttttaaaagcaggacatttattagcgttaaaaacaccaggcgtgatgatggatcttgacgctgagccgacgaaggatcccattttcggggaagatggttactggattttgccgggagagttggaagatgcgcaaatgaaaaactatcaggtgcttgagccgcttagtattttaattacccatctggatgtcgttttacggaaaaacttacatgaactactgatgcgccaacaaattaaagatttaattgacgggcttgctgatgaaaaccaaattttaattgatgaaattaagaaaaaagaaattgattattcgttgattcaaggggtacttagacaacttttgaaagaaggtatttcagttcgtgatttaccaacgattgtcgaaggaattattgacggacaaacaatttatccgaatgatctagacggaattacagcttttgtcagagagcggatttcaaaagtcatttgtgagcaagcgaaaaaccaagatggcaaaatttacgcgctacttttacaagattcgattgaaatggatacggaaattgttaacacgccgtattatggctacgcgctgaactgggcgctcgataaagaactgccaatcatccaaaaagtaagagataccgtaaataaagcgcaacttactggacgcgaaccagtcattttaacaaggcggaaagattttcgttttggctttgtacgagttctagaaaggtatcaattggatgtaccggtgctctctattagtgaactgtcaccggaaacggaagtggagcaaattgcgttgattgaaccaacttgatgagggaggtaatccgtagaaatgggaaaacatttagtggaaaagatggaaatttttaaggcgaattccaagcgagaaatacataaaaaaattcgcttagtaacgaacgagccatataaaattacggatgaacgtgtcacaaagcttgggatttttaagaaacagtatgaagtgacggcggtcattatgagtgaagtagcgatagcagatggtcgaatggacttccaagaaacctttcaaaaatcagttgtgaaaacgagaccaaaaacggacgatttattaaaaaaggaaaaactactagaaatgcttgccgcgggggcggaacttgcacagtcaacgccactccttgaagaacgtaaaacacaagaagaagagcttacaactatgcgccttgaactggcggcattaaaccgcgagcttgctgtaaaaatgcgtgaggagcgcgagcaaaatagtgatttcgtgaaatttttgaagagccgcggaataagcgatacgtatgtggcagactttatgcaggcgggacggaaacagtttaagcaagtggaaacagctcatttagacgatattaccgattggtttgtcccgtatttatcaggaaaattagcggtggaagattcatttgacttaagtaaccaccgaattatttctttaattgggcaaactggtgttgggaaaacgacgacacttgtaaaactcggctggcaacttttgaagcaaaatcgcacagttggttttattacaacagatactttccgctcgggtgcggtagagcagttccaaggttacgcggataaacttgacgtcgaactcatcgttgcgacaagccctgctgaactggaagaagccgtgcagtacatgacgtatgttagcggtgtggatcatattttgattgatacggttggtaggaactatttggcggaggaatcggtaagtgaaatcgctgcatatacgaatgtcgttcatccggatctaacttgttttacattttcttctggtatgaaaagtgctgatgtgatgacgattttaccaaaactagcagaaattccaatcgatggttttattattacaaaaatggatgaaacgacccgaattggtgatttatacacggtaatgcaagaaacgaatttgccggtgctctatatgactgacgggcaaaatataaccgaaaatattttcagaccaaaaagtcgttggttggcagaacgatttgttgggacggataggaggcaggtactggaatgaaaggattatacattggagcagctgggatgatgaactatatgcaacatattcaggttcattctaataacgtggcaaatgcgcagacgccaggttttaaatttgatcagctcacaagtgaagttatttctaggaataaggtgaactatcagaacagtcctgtcgctaggcaagttggaacgattgattacggcgttcgaccagcggcgacacatattaatttaacggctggatcaagttatattacgaatcgcgaccgagatttctttatgcaagacacaaatccagaacaaggtagtaattttttcattactgccaaaaatggtgagatttctctttcaagaggcggacagttccatactgatcaatttggttttttgcggacggcagatggcgccaatatactcagctcaaccggagaagcgattcaagttggccaaaaaacagctatccgagccgaagcaaacggtgatttatataatgcagaaactaatcaatacttgggacgtcttggaacaaaatttgtttcagcagatcaagtggacagcttagtgaaagacggagaaggaagacttcacgtcaatggaataaacactatgaatctaccagctggacaagggaatattcaaaacggtgtactggaaacatccaatgtcgatttaggcgttgaaatggtacaactgatggataaccagcgtatggtacaagcttcaaaaaatgtcgtgaatatgtttgacaaagtatacgacaaagaagcaaccggattaattcgtcagtaacgacctagctaaggggaggggaaaaagaatgattccagatttggagaaggattatctttactttactcgtgtcgtcaaaagggacttaggtttagatttaacgctttataaagaaacacaaatgaaacggcggattttatcttttatcgtgaagaaaaaatatattacatttggagaatttttcaaacatcttaaaaaagatgcattgcttttagatgagttcattagtttgattacaatcaacgtttctgctttttttcggaaccgcaatcgctgggatgtgctagaaaaacaagtgattccaagactgcttgaagatagtcgcgggaagcttcgtgtgtggagtgctgcttgttcatcaggggaagagccgtactctctagcaattatgatggaacgttcggtgggcactcgacactatgatattttggcaacggatctcgaaccagctattttaaaacgagcagtcatcggagaatatcaaagccgccaaatggaagaattaaacgaacaagaacgacgtagcgcattcattgaaaaaggggatacatatcagattttacctgaatatcgtaaagctattcgttttcgacgtcacgatttgctgacggattactacgaaaaaggctttgacttaattgtctgtcgcaatgtgctgatttatttcacggcagaaggaaaacatcaagcataccagaaatttgcagattcactaagacgtggcggtgttcttttcatcggaggttcagagcagattttgaacccggctgactacggactggccacattaaataattttttctacataaaaacctagcaaaaatgaaatggagttggttagatgggacgaatggaaaacattaaaaatttagcgttttttgaggacaaaccaggactcgcagaacaaattttaatgcttgaaaagaaagagcaactttttttaccaaatgaatttgaaattagacaaacagttggctatgaaatcggggataaagaagtcattcttggtcggctcgagtcgttttattttctcgctttaaaaggtgttaaagaagataattaccgctcgcaagcatttgccagtgaagcggatgccaaagcgtttttcgttcatttaccagaaatggaaaacgagttaattgctttttggttaaatgaagtggaattagttcgctgaaaaaagtaggtgggagatgaagtaacgtggaaataacaacgattataggacttgtgttggcagtgatagtcattgcgggttcgtttatgattcaaaatatatcactggcgatgttatttagcgcagaagcattaattgttatcattcttgggacaattacggctgttatgatggcgcacccatggagtgatgtaaaagtagtaccgaaactgtttaaaattcttttcactaaagaaaagatgccagacaaagtagagatacttgtgcagtacaaagaatatgctgacgaaattaggcgtagcggcgtacttgcgctagaagactcagtagatgaaattgaagatccatttatgaaacgaggcatgcgtctagtagtagatggacaatcttccccagaatttttacgggatgttttggaagaagaagttgcgagcatggaagaacgtcatgctgcttatgccaagatttttgcatcagccggagcatatgcgccgacgcttggtgtacttggagcagcaatgggactcattcatgcgatgggagaaatgtcgaatccagataagcttagcgaagcaatagccgcggcgtttgtttgtacaattttcggtattttcaccggttacgtactttggacaccatttgccaataaattaaaagtaaaatcacaaaaagaagtgcatttgcgatatatgatgatcgagggagtcgtcgcgcttcaagaacgaaatgcaccacgtgttgtggaagagcgtttattatcttttttaagtccaaaagagaaagatgtgctgcgaaatggaaaagggaagaaaacgagagaagtggaggaaattgagcgtggccaagcgtcgcaagaaaccgcaggaggaacacgttgatgaaacgtggttaattccatatagtgatttgctgacacttttacttgcgctattcatcgttctgtttgcctccagttccgttgatgctaagaaattcgaacaaatgggaaatgcatttaagaaaattgttgaggaaggcgcggcaggcaatcaagcatatgtatccaaagaaaaaggaccagatgatccaaatgtgaatgcagtcttgaaggcgatggaagagcaggataaaaagaaagaagcaaacgaacaagagaaagccaaaaaagcagcagctgccttacttaaaaagcaaaacgaagaaaagattgaagcatttaaaaaacaaatcgatagctatatagcagcagagcatttgggagcaaaaatcacgacaaaatactcagacgaagggcttttaatcaccattcgcgatgatattttattccaatctggtagcgcagaattatctgcagacaaacgcgagatagccaaagaaatcggcgaactatttgcgcaaggtaaaggaacgatggaagggattgtttctgggcataccgataatgtgccaataagtacatcgatttattcctccaactgggaactaagcgtcgcgcgtgctgttaatttcatggaagcaattattcaagaaaacagcgaagtcaacccaggtgagtttagtgctcgtggttacggagaattcagacccgtcgccaaaaatgacattgcaacaaatcgcgaaaaaaatcggcgtgtagaaatcatggtgcgcccaattaatcgcgatacacttgatgaagataagtaggtgagttgattgcaactttttttaagcggttcccatacattaacagattatgacaaacaagaaatacaagcatacctagaaaaatttgcaccagtgaaccatattcacttgctttgttataaatcaattgaaaatgaagttttacaatattttctaaaaaaagagcatttggctccgcggttgtcaatttatacatttgcaccaaaagaatgtttaccagagccatttttatccgcgatagactacttggagcgcctaggcagtagctatcaatcatttggttattttgatacggtgataaccaagccgacttatgagaaattcttagcacaaattattaataaaatggatttggtttgttgtttttataacggggataagccgactgatgtgataccagtcgatgtagcaaaatcgttcgatgtgcaaagtatgatttatgatttacctaaagcgaaaaaacatctactacaccgggcgagcagcgataaaataaaattagtgaattaattgatagaaagagggaagattcatgcggccgttaatttcgatttgtatgatagtcaaaaatgaagcacatattttaagacaaagtttagcgtcttttagaaaatttacagaagaaatcattattgtagatacaggttccactgacgacaccaaggaaatcgcaaaagaattcactgattttgtctatgactttgaatggacaggcaacttttctgatgcaagaaactttgcagctaaacatgcaacgggaaaatggattttagccattgatgcagacgaatgtttagaagaagaaagttatcgcaaattagaaaaacaattaaaatcaccaatcgaaccaattcaaatggcacaaattattagttttacaggggaaaaagggcgagtaacaacaacgaaccaaatggcgcgggtttataaaaatgatgggacgatttgtttccgcggcgtcattcacgaacaactagaggcagtcgataaacatgcgattgaagcaggtcttgccgaagtaaaaatttatcattatggttatatgtctgaaattgttgaaaaacaagacaaatcagaccgtaatttgcgcttattagaaaaagaagttaaaaataataaaaacagcggctttgttcactttaatattgggcaggaaatgaatcggcttggaaataaaaaagaagctttgaaagaattttcggaggccttccgtttacgcgataataaccattatatttgggcaaaactaagtgcctatcatatttccgaactacttgaacaagaaaaacgctacgatgaaagtttggcaattattgaagaagcgaaagtcatttggccgaacgtaccagaatttccactgaaaaaagcaaatatcttatacgttaatcaccaactcgaggatgcgaaagaaatttataaaagtttgctagaaaatactgcgatcgactatcaaccaattgttttatacgaagcaacgaactttatgccgcacaaaatgcttggaacgatttacttagaagaaaaagattacacacgagcaatgactcatttttccaaagcatatgcagaaaatagttctgattacggcgtgatgttccaaatgattatgttactgagcaaattccatcaaccaaaagaaattttcgcatttatggaacgtcataactttatttctagtacggaaacaggattgcggttactttcgatgacaacacaacaaggatacgcagagttatctgaactcatcgttcagtcgctaacggatgtttacccgccagtcgcagaagctaccgaagtgaaaatcgcgaccattcgtaacgtcttcccagtaattagcgaatcggccattttattcgggattaaagaagaattaattgacgcggctgacttatgcttgtggcactatgaaaatccgcaattaccaatcgaacgcgtcatgaaaaatagcgatgttggagaaatttatgattttatctttgaaaacggtccgaaaatcagcaaaaaacgttatttatttgtattagaacgagcgattgcgcttggaaaaggcgagtttgccgattacttacttgcgcttcgaaatgtctaccatgatagcattaatagccacattgctgacttgttcttccaatatgattttgccgatattgcgcttgatttttacaatatcgtcgacgcagatgaagtgactaaacaaggctatattaacctcatcaattatttagtagatgccgatgtactggatgaggcgcttgcgattgcagaacgaggtatcgataattttagtaccgatttccgtttctacctttgggcaatcaaaattgataccgaaaaccgcgcgaatcgtattagcgaagcaatggacgaattcccaaataatcgctatttagcaaaattgttagatgaagttacgatgctacaagatacagttacaaacaatcgataggaggccagtaatatgacagaagaaaaaggaattttactacaaagtggaacaaatgaattagaaattgttacttttacagttggcgaaaatttattttgtattaacgttttaaaagtgaaagagattattcatccgctagaagtgacgcccgtaccagattcgaatccggcaattgaaggcgtttcccaagtccgcggcgaaatcatgccagttgtgaaccttgctcgtgtgatgaaattaccagaaatcgaaccagaaaatacgaaattcattatcacagaactaaaccaaatgaaaatcgttttccgtgtcgacgaggtgcaccgtattcagcgcatttcttgggaacaaattgaagaaccagagaaactatcgattggcttagaagaattagctgttggaatcgtgaagctagatggtaatttagtactcttacttgattatgaaaaaatcatttatgaaattagcggaaatgccgattttgccgttactggtgaagatcgtattactcgaaaagtaaaccgcgaagagaagactattttcattgccgaggattcgcaaatgctacgtcaattactggaagatacacttcatgaggctggctatacaaatctgcagttctttgctaatggtcgtgaagcgcaagaacatattttcaaattactcaaagaacaaaaagagcaaacgtttgaaaatgttaacttattaattacagacatcgaaatgccacaaatggacggacaccatttaacaaaagtaattaaagaagatgaaattggtcgtgaattgccagttgttattttctcttccctaattacagaagacctggaacataaaggtgctggggttggtgcggatgcgcaagtaagtaaaccgaatattcatcaactcattaatattttggatgagctcgttttataaaaagaagtgtttggacaatttttctgttcaaacacttctttattttatttaaaaaaataatttataaaaacggaaaaacgttgatattaagccgaatttccatttttatataaataaaaacaacttatttttacatttttaacaaaaaacatttgattttttaaaaaaatgaagatataataaagcatatagagaagagaagtcttttctaaaccgaatgtaggagggaaacacaaatgaaagtaaatactaatatcattagcttgaaaacacaagaatatcttcgtaaaaacaacgaaggcatgactcaagcgcaagaacgtttagcatctggtaaacgtattaacagttctcttgatgacgctgctggtcttgcagttgttactcgtatgaacgttaaatctacaggcttagatgcagcaagcaaaaactcatccatgggtattgacttgttacaaacagcggattcagctcttagctccatgagttcaatcttgcaacgtatgcgtcaattagcagtacaatcttctaacggttcattcagtgacgaagatcgtaaacaatatactgctgaattcggtagcttgatcaaagaacttgatcacgttgctgacactactaactacaacaacatcaaattactagatcaaactgctacaaatgctgctactcaagtaagcatccaagcgtctgataaagctaatgacttaatcaatatcgatcttttcaatgcgaaaggtctttctgctggaacaatcactctaggtagtggttctacagttgctggttatagtgcattatctgttgctgatgctgattcttctcaagaagcaactgaagctattgatgaattaatcaataacatctctaacggtcgtgcgcttctaggtgctggtatgagtcgccttagctacaatgtatctaacgtgaacaaccaatccatcgcaactaaagcatctgcttcctctattgaagatgcagatatggctgctgaaatgtccgaaatgactaaatacaaaattcttacacaaacatctatcagcatgctttctcaagcaaaccaaacaccgcaaatgttaactcaattaattaacagctaataacatatcaaattcatttatcgaacattgtttacccttagcctctcgtcaccccggacgagaggcttttcttttgttttataaaaatattttcggattgaaattatggcccagagccaatgttaagctagttaactattttttgaataattttattataaaaaacggatattttttaagaaaaaggtagaaattgtcttatttttattataaaatgatattatgcgatttttttaaaaaatatttataggtataggaatgggagttgtattttatgttgaagttgttgattgtcgacgatgcaatgttcatgcgtacgatgattaagaatatcgtgaaagatagcgattttgaagtagttgcagaagcggaaaatggactggaagcagtgaaaaagtacgatgaagtaaaaccggatattgtaacacttgatattacaatgccagaaatggacggcttagaagcacttgcacaaattatggcaaaagatccatcagcaaaagttattatgtgctcagcgatgggacaacaaggcatggttgttgatgccattaaaaaaggtgccaaagactttatcgtaaaacctttccaagcggaccgggttttagaggcgttagaaaaagcagctaagtagagaaatggaggtgggtagcatgactacaaatatgttagacctgtttatagaagaagcttcagaacatttacaggcgctaaatgataatctgttacagcttgagaaagacccgacgaacggtcagttagtaagtgaaattttccgttcagcacatacatttaaagggatgtccgcaacgatgggcttccaacaggtggctgatttaacgcatgcaatggaaaatgtactagatgaggtacgcaataatcgattagctgtaacagaacatttggtagacattatttttacatgtacatctcatttggaaacaatggtttcggatatccagcacggcggacaaggcgcggcggatatttcaaaaaccgtagctgacttagaggcgcttttacatcctgaacaagaaacagatacagcagttgagaaaacgtaccgtattgccattcaaattgaagaagcagctattttgaaagcagtgcgggcggtaatgtgtttagagcgacttgcagaaatggggattatttcagaaacaacgccagatagagaagcgattgagctagaagaatttgagcattcgtttgaagtagttttagaaactgcgcaaacaaaagaagaaatcgaagcggttattctagatatttctgaaatcgaaaaagtgacagtaacagaagaagtggaagaagttcagattattgaaccaatcaaaaaagccgcaaaacaaacaaccaaacgattagaaaataaaaccattcgtgtacaacttgaaaaaatcgaaaagctaatgaacgtttttgaagaaagcgtcattgaacgggcgagaattgatgaaatcgcagaaaaaacgaataacaaagaattgatggagcatctagggcgattcagctccatctcaaaagaaatccaaaatggtttactcaacatgcggatggtaccggtagacagtgttttcaaccgctttccaaaaatggtacgtacgcttgccaaagaattaggaaagaaaatcgatttagtcattgaaggcgctgatacggaagtcgacaaaatcgtcattgatgaaattggtgacccacttgtccacttaattcgtaattcagtagaccacggcgcagaaacagtggaagttagacgtaaaaatggaaaaaatgaaaccgccacaattaacctaaaagctttccatagtgggaacaatgttgtgattgagattgtcgatgacggtgcgggaatcaataaacgcaaagtcttggaaaaagcgattgcgaaaaatgtcgttacaagagcagaatcaacgaaaatgacggactcggaaatttttgatttattatttgattccggtttcagtaccgcagaccaagtatccgatttgtctggtcgaggcgtggggctagatgttgtccgtaatacgattcttaaaatcggcggaaaaatcagcgtagaatcaagtgaaaatgctggttcgacattccgaattgagattccgctaacattatcaatcatccagtcgatgctcgttgcaacctctgaacgtcgctatgctgtaccactggcaaatgtggcagaggcaattacgattaatcccgcggacattcaacatgttcacggcaaagacttaatcaactaccgcgaaaccattattgaagtactcgatttaggcgaatgcttccatgaaacacctttaacagatacggatgaattactattactcgtcgtgaaaaatgccaagcgaacttttggacttattattaaagatattatcggtcaacgggaaatcgttttaaaaacacttggcggctttttcagcgaaagtcaaattgccttttctggggcaacgattttaggcgatggccgtgtcgtattaattttaaatttagaaacattttaaggagggaccatgatggaacaagtatttcaagtagaacttcctgaatgggaaccgaaagaaccgagccaagaaggacgcgaaaaaggctcaatccgccaagtagacaatattggcgttaacttaatcgtccgccttggaaaaaaagaaatgccagtaggggacattgccgagttaagtattggcgatgtcctcgaagtggaaaagaaacctggccacaaagtcgaaattttcctcgatgaaaagaaagtcggcatcggtgaagctattttgatggacgaaaacttcggaatcgttatttcagaaatcgactaaagaaagagggcaagtgatttgaagcaagaggcttacaacgcagtgaagatgaaagtggaccaagagaaaacggccattttaaaagaattgcaattattactatccaaacgggaaaaagttacagaaaaattagcacacgaaaaagaagtctattactcgagaacgaaaaaagaaagactccaagtggcggtattagccggaagcatgcaacttgatgccttttccccgagccgcattcaacaaatggagcgagaaattcaccaaattagccagtacattaaaagcaatgaacaaatcttagaaaaactcgaggaaaaagggaaacaggcgaaaaaaatgtacgatgacacaagaaaaaaatggcaacagcttgaaaataaaaaagaagaacaactattacgcgatttgaaaatggtgctattaaagtaaaagggaggaaaactcatgctaatcccagataatttgctacaaccacttgtcggaaaaaaagaaatcgaaccaaaagaaatgttagcagaagaattagtagaattaccttttatttcacttttaatggaaaatagccctgcgccgctcttaaagggagaagcgggaaatgaagagctagccaccattccattaaaggaaatcgcaccaccactcgtttcagcaaaattacttgaaggtgagccggagaccaaactaccggatgcgccacttgagctgaaagaagttaaagacacacttgcggcaatcgccaaacaagcaattgaacaaccaaaaatagaaaacgccccgcaagccgtgcaaactccagtaacaaatacaccgaatgaacccacaaaaaatgctaccagagaacaacaaccgccaccagaacttatcatgcccacaaaagaatcacctaaactagcagaaaacgtggccaaaaaccaaccagtcctagccaaattacctcaagaaaaagaagtcgtgcaactttttaaagcgagcattaaagaaccggtaacagcaaaagaagaagtcgctgtcaaaaagccagctgaatcaagtaatatttggcacgatacggcaaaacaactcacaccagctgcaaaagtcgaagtaccagtaacgctgaaacaactcgataaaaccatcaccgaccaaatcgaacagttgcaaaaatttcaagtaaagcaaaataaagcctttttcgcgattcaaccagagtcactcggaaaagtcgaagttttacttaaaaaaatgcccgataaaatatttgtacatatcgaatatcaggagcaaacagcgaaacaaaaactcgaacagatggcgcaagatttgcataatcgcttccgagatcgcggtgtagaagttgccgtaacaatgaccgaaaaacaagcgccaaaagaaaatggtcaagggtcagatggacgacaccaaggcgaatctaaaaaagagaaagaacgcgaaaatccacatcaggaaagagctaaacaagaagcatttgatttagaggaggagacgtaatttggacggaattagtagtttatcaggggcgagtcaggatacaaacaatgcagtaacatctagcgtatcaaaaacccttggcaaagatgacttcatgaaactatttttaacaagtttacaataccaagacccatcgagcccgcttgatacgaatgaaatgatgtcacaaatggcgcaactttccttaatggaacaagttgccaatatgaccactgccgtagataagctatctgaacaagcacaaaactccgccttacaatccgcggttaatttcatcggtaaagatataaaaggagtttcactaaacggcgaagtaattagcggccaagtcgaaagcgttcaacaaacgacaaacggcgtcatgctgaaaataaaagaccaagatagcctcgtgccaatgacttatgtaacagaaattaattaaaaatttgggagtgtgaattatgaatcaaactatgtatacagctatttctgggatgaatgcgttccaacaagcattatcagtgacatcaaataatattgccaatgcgaacacgacagggtataaaaaacaaagcgtcgttttcaatgatttactttaccaaaacacaatgggatctgttgcaggcggactttatgctggaacaaacccaatgagcttcggttccggttcgaaaattggggcaattttaaccgattatacagcaggttctccgacatcaactggcagaaacaaagatgcagcactgcaaggccgcggctttttcattgctggcgataacgctggtgggaatatcgtttacacacgagacggtagctttgcagtatctgacaataactatttaacaacgcaacaaggaaaatacgttatgggatatgcaacagataaaaatggcaacgttttaaacggaaacttgcaaccaattcaaatcccattaaatagcgcaattccaggcgaagcaacaaaaaatggtagcttaagcggtaacattccacttgattggggcgaaaaagatacgatttcttccgagctttctgtatacgataatgctggtggaaaacataaacttcaagtcaatatgaaagctgcgacaccagatgcgagtggcaatgtttcctatgaatatgaaattcaaatggacggaaaagcgttaactcctccagtaacaggaacacttaattacaacgcgcaaggcgaacttacaaaccctgatgcacttaaaaacattcaaatcaattccactgttaacggcaaacaagtcaatatgggcttaaacctaagtggcttaacaaactacggtaccaaccaagtattctcaccaacttctgacggaaaaggcgctgcaactgtaaaagactacgcagttaccgattctggttatattgcagtgagttactcagacggtacagttatcccagttgcccaacttgcggttgctactttctccaatgaagacggcttagtcaaaatggggaatggcgaatatgttccaggattatcttctggagatgcagtttacggcgttgctggccaaaacggagctggcggaattagcggctcttcattagaaggctcaaacgtagatttatcccgcgaattcgttaacttaatgacataccaaagtggtttccaaggcaatacaaaagttatccgtgttgcagatgacgtgatgaaacaaattgtgaacttgattcagtagggagtttagctaaatgaaaattaatcatactattccactcagaatcgacttcgagttaggacgcacgaaacagccagtcggtagtttgttagatgtaaaaaaagggaccgtttttcggttagaagattcaacaggcaatgtggttaaaattacaatttcaggcaaatgtatcggttacggcgagattttgacaaaagacggcaagatgtttgtcaaaataacgaaattaggagagggaagttcttcatgagagctagggagtgacaaaaaatgagcgataaattaagtcaagaacaaattgacgccctgctttcccaaatgagtgaaggtaaggtagttgatgaaagtacggaaattggcgactttgggcgctttcatccctatgactttcataaaccagagaaatttggtgctgaacacctcgaaagcttaaagacgattgcatcagcatttacgaaaaaaagtatggagtttgtttcccagcgtatccggattccaattcataccgaagcaacccttgcagatcaagtttcctttgcgagcggttatatcgaaacaatgccgaacgatagttacattttctgcattattgaccttgggaatccggagctcggccaaattattatcgaactcgatttagcctatatcatttatatccatgaatgcttatctggcggaaatccaaaacgaaaattaagcgagcgcagactattatctgtttttgaagagctgacgttgaaatctattttagaaaaattctgcgaagcactcaaagacagttttaaatcagtgcatccaatctcaccagaaatcgttaatatcgaaaccaatccagcgcttctacgtgtcacatcaccaaacgatatgatggcgcttgtgagtgtcgatattaaatcagaattctggattagtacaatgcggattggcgtgccatttttctcggtggaagagattatgaataagctggaaaatgtcgttgagtatacgtttgataaaagacggaactttgatgcggaagtggagcaagaattgcatcaagttgagaaagaagcgcgtattcgggtgggggaaattaaaacaacatggaaagagcttaatatgctagaagttggcgacgtgcttctgacagaaactcatatacgtgacacacttaaaggttacgtcaccgaaaaatggaaatttgaatgctatatgggaaaaagtggtaaccaaaaagccgttaaatttatgcgtcatacagggcgaacagagcaggagaggtagaagtggagcaattactagagaaaaatatcacgcaaatggaactagatgtgataggagaaatcgccaatatttcgtttggctcagcttctacggtcttatctgatttactacaccaacaagtcactatttctacaccaaaagtagagattgttgatttatataatacgaaagacattgatattccacatgtcgtgttagaagtgaattttcacaaaggaatcgaaatgcggaatttatttgttctgcaatcagaagtggctgcggctatcgcggacttaatgatgatgggcgacgggaatatcgatccaaacgaagagctttcagaacttcatctcagcgccgtacaagaagcgatgaaccaaatgatgggacattccgcaacagcaatgagcaatatgtttggcgaaatgattgatattacgacaccagacattaaagtaatcgcgttaaaagaacaattagaagacacaaacgaccaaacaatgataaaagtcggctttgacttaattatcggcgacttaatcacatcgaatttaatgcaacttattcccgttgataaaggtcgtgaacttgcgaaaagattgcttggcgacgcaatccctgagccagagcctgtaaaagaagaaattagcttaactgccgaagaattagatgtctttttagaagtttgtaatatcggcattggctctgcttcaactgttctatcgaaattacttaatcgcaaagtttcgctacaaatcccaacagctcgcgtgattgatagtaaagaattcgagtttaatgaacgaccttgcttagtaaccagtgtggaatttgtcgaaggactgcgttcaagtaacacctttatcattagcaaaaatgccgcgttaatcatggcagacttgatgatgatgggggacggaatcgttcaagaagatgcggaattaacagaacttgaagtcagtgcagtgcaagaattaatgaaccaaatgatgggcttctcagcgacagcgatgtcagaaatgctcggaacaaagattgatattagcccgccaacgatggaattctgcaattttggtgatacgatgattcaaaaaaatattgcagaaggaaaaaccgttgaagttatcttcccacttgaagtagaaggcttattaaaaacgccaatgtatcaaatttttaatccggcagcagcaaaagaaatggcacaattaatgctcgggattcaagcaaaagaagtcgcggaaaaagaagcaacaccagtagaaataaaggagcatgaaacgaaagagccagcgcaaccagtagttatggaagaaaaagaaacactatccgaaatggaacaaattttggaagatattcctgtaacgcttgaagtggtgttcggtacagctaaagtaaaactagaaaaatttatctcatggtgtgaaaaagatgtgattatcctgaaagaaagcatgaatgaaccacttgtcttagcgctaaatggcgtaacgattggcaaaggaattttagttcgcgtggatgatcattttggtatacaaatgactgagttagtaaggtgaaaaatgtgcgaaaacttggactgatgacaattttattttggatgtttatttctgttcaagtattcgcggcagaaccggaacttccgatgatttcacttgaaaaggaacagcagatttttacgtcaggtgaagtgatttcatttcatatcgaaaatgcggaaaagatgaaaatcgttttagtgaatgaacaaggtcaaaaaagactcctagatggcgaaacatatacggtgacggactttgatttagagggaagctaccgcgcagaattttacgcaaacgacaaccctgaagcgattgttactatagatgatttattccaagtgcaacagctgaaggaagttgaaaaagatgaaacggcacctagtttaacagatattaccttcgcgcatgacgaagatgttttacatacaagcgcccttcatgtggcagcagatttagccgatgcagaaacaggtgtaaaacaagcgatattgataattcatagtgattcgaacgacgcagaagctgaattaatacaaaataactggactgggaaatttgaaggcgaagtaccgttagaaaaatttcaaccaggagaaaaactcacttttcagttgaaattagttgattttgcggagaatgaaatcacgattgacttagaaaaaacgattcaaatgtatcagccgaatgagccacatctaagttataacgctgttgacatcaccaacgacgagaaaaaaatcgtccaagttggcaatcaaatcaaattaacgctcgataaatatacaactgaatttccagaagctgaaacggaaagtggtattaacattccgctaaaatggcaaaaaaacgccaacgaatggattggaattctcactttaacaaaagaattatccggcgaaattatccattttcaaggaatgaacatagcaatgctcgttcgctccacaagtgagccatttgcggagattaacttaatcaataatacggttttaactgggctaattaatccggattttgctttaatcacagcattatccgtcgaagtaaatgggcaaacattccgcaccgttagaacggataatagcttcaaaagtgcggaaatctcaacaaccggaaaaatcatattacactggatcgactgggacggccgggcttattctaaacaattgagtcaagaaatcaagccagtgattcctgtaccagataaagaaataattgcaccaccaccagttataccaaatgaaaaagagccaatacttgcaaaacctgcccctaaaccatctactgaatccagcgaaaaacctccaaagaagcaggctaagaaggaaacctcaactaaaaacaagtcaagcagtatcccgttttggattccggcactcatgattataggcgttattattttttcaggtaatagagcaatgaaataaaagcagaagtgaggtggacggaatgaaaatagatggcattcaagaatccgcagaaaatcgtaatcagctagaacgggaattaattaaacaaaatccattattaaaagaaggcagtgcaaaggcacaaatgaatacagaagtcgcggtaccaaaaacgccaccagtatcattttcctttaaagaactaagcagtttgcaattaaacggcaccacaaccgcaaatctagaattatatatgaaattaatgatgaataacgccaaaaaagcgaatgacttaattttttacgtcatgcgcgcaggtataaaaaatccaactgactcggcaaaatggcaaacggtcagaagcgaaatcagcagccaattaagcaccatcttaatgaaacaacataattttgaagcatatttttctgaaaatccagccaaccaaaagttgtttttagccaatcaaaaaattatgaacgaaatttcctttttgctaaaaatgttaccaactttaacatttgaaacaactggaaaatatgattttctccgtatgatgcaaatcgcctctggaaatatggaaactggtatccaaatgatgcgagagtttcaaggtcatctggaacatgcgacaagacttgaaccagtagttgacgctaagcaagaaacaaactggatgattaaagtattacgtgagtttggcaatatgttccattcccgccacttactaccatatgaattacaagctgaaaacatcaacatctggaaactaggtagcgaatacttaaaactaatgaaccaacttttaccacaaattggcgcatttccaaatggcaatattaaaatttttcaccaacaagcgacaaaaccattaacggagcttttccaagaactacaaagattagctgatggacaaatgactcaaggcgggattgctgttattctcgaccgaatgcaaggtcagctttcaagactcgcgcagctttttcaaaaaatggaaatcgaagcgggctttacagattctgagcgaattttaggaagtgtagacgcagaattcgctagtgatatgacaaagatgatgctactcgcacaacaagaaatgtcgtttttagatttattagtaaaagattttcgaagcgtctccaaacaaccaatatttttcatgatagttgctatatttattattttattattaattattttattttaaaaaagatattttttcaaaaaatatatactttttcaggttgtttcagtataattaaatagaaaaataaggtttagaaagcgaaaatgagtttttcgggggaaaaaggatgaataatgtttcaattagccagatttcgcagtccaaacagacgaacttagttaggggaatgcaagaattaaatcaaacacaacagctctattttgagcaaatgaaggcaaatggcaaaaaacaaactccttccctgactgaaatcaatgaactaattaccgaagtgacagataaaaaatcacttgttgaaatggatatgactgtagataacgttttgagctacaaaaaagcagtccaaagctttttgaatttttatgttaataatgtgatggattatgacaatatcgaaagccgacatccaaaatacgggttttcgcaaaaaatgacgattttaaaacaagtagaaaaacaaaccaatgaactagatgatgtaatgaatttaattgatacaaaaactggacatttagatatgctaaatcgaattggtgagattactggcatgattctcgatgtcgtattgtaggtgatgggaatgcaaaacgaattaattaatcaattagaaatcttaatcgaaaaaaatgtaaaagcggccgatgaagcgaatgtattaggtaaattactacaagaagaaaattggattgaagcagaagagcgccaactagggcttcagcgcgaacttgccggtttacaaaacgaatatcacgttttaaaaacaattattggcgaagataatacacttagaagcttgcaaaaaacatggacacctgctgaaaatgcatttattgatgaacgtaaaaaaatgctgcttgaaaaagaaagccttttacgagtaactgtttctgaaaatcaaattagaacagaaatgcaattagctttttcggaacatatggtagatgttattacggggcatcacgcggaaactcaagcagaaaataatatgatgattaacgaaactttttaagtaaacggagggattttttgtgcgtttaagtgattttaatacgtcattatcgggcatgtcagcggcgcaaatcgctaatatggtcgctcagcaaaatattagtaatatgaatacgccgggttatattagacaagctgtggatcagacggcagtttacggtgacggaggtcttctcggcgggaaacaaacaggctacggggtcaaagtaacagatattaaacgactgacaaacgcagctcttacgacacaatataataatcaaatcgccaaacaatccgcttcgttatatcaaagtggggcgctcggtcaagcgcttaatttatttggtactcccgggaaaaatacgccaagtgataatttagataactttttcaccgcttgggctgcgttagcaaaaaatcccgatcaagcaacgaatacaacggcacttttatccagtatgtcgatttttacggaccagttaaatcaacttcattctggcttaaaagaattagaaacaaccattgcagcagatacagatgccgcgattcaagacttaaattcattaattaaaaaactaggcagtatcaataaagcaatcggaaatgcaggctccaatccaccgaacgatttactgaatcagcgcgatcaactacttagtacgatgtcgggctatgctggtatttctgttagcgcccacccaaataacccagatgtatacgatgtgacaattggcggacgtcttgtcgtacaaggtgatgaaacaactgaaattacctcgacacggacagcgacaggcttcgaattctccgtggacggtcaaaaactcaatatgccagaaggttccatcatcgcttctgtacgcgttaaccaaaatgaaattaaatcctaccaagaaaaaatcgaaactttttcaaatggcctagcaaaagcattagatgatattcaagtcaaaaacgtcaacaaaacaatggacgacttgcaaaaaatcaatgatgcccttcaagctaatccgaatgacgaaaaattactcagcaaccgcgaagaacttttacgtcaattagaaaaattccctggtgtgacgcgttctggtgatacgctaaccattggcggagttgaccacgcgattgacacacttggtacaagtacatatgtaactgatgtgaacgatttttcgattccaattttcacccaaagctctggtaaatggatcctgaatcccgcaatcactagcaatgctgaaaacaagccattcttaggtgttatcgcggcagatattgcatctttaaaaacggataaaaatattcaaggaacaacttttccaagcttcatggatggaatcattacagaagttgcaacagatgcgagtaaaagtagtgcaacttccacggcagacacgcaagctttaaattccctttctgaatcaaaatcatctcttgaaggagttaatattgacgaggaaatgacaaatatcatgcaataccaaagttattatgtggccaatacgaaagccatgaacacagtgaacgatatgatgaaagctctcttagccatgttataaggaggaaaataatgcgaatttcaacgaatcaacaagcaaattcaataattaaccagctgaataatgtctcaggaaaccttgcaaaataccaattacaagtatcttccgggaaaaagtatgaatcgatgagcgaaaatcctggtgctacagcacaaattttatcctataatcacgtgcttagtcagcttaatcgtgaaaaaacggacgtaactgaagcgaaatcattattaaataccgcagaaacctctctttcatccatgtccacatcgatgaaccgggtaaatgctctagtcttacaagcaattaacggtacgagcgataaagacaatatgtcgcaatcagccgaagaaatcaaaggtttacttgatgttcttatttctgttgctaactcagaagacgatggcagatatgttttcagtggttctagtacaagcgttaagccatttacaacggataaaacaaccggagaaatcatctataacggaacgacagaaaataaaaaattccgcgtaacggacacattagaagtagaagttttccatgatggcagcgcgatgacggatgtttttaacaacattcaaaaaatcgttgacgcaatgaaaagtggcgataaagatgctttgtctgccttgcaagaaacaaatagcaaaaatatcgaaattattaccaattcgatgacaaatatcggcggacaaaaaaacggcgtgacagcctatgacaatgtactttctagcaaaattgttgatttctccgaacgaaaatccaatgtcgaagaagtcaatatgccagaagctgtaagtaatttaaacaaaacgtctatcgcttaccaagccgcactgcaatccagtgtgatggtacaaaaattaagcattctaaattatatgtgaggtgaaaccaagtgggaagttcgattgcaagtagtttaatggatccgacgcaatattattcgcaatttattagtctccaaaaagccagtttagaaaaagcaaaaacaccatatcaaaaccaaatttctagctaccaatcacggattgatctttatgctagtttaaaaaatgctttgtctgactcgctgaaaacgatgagttctttcacgacttatgaaagtaaaaccaaactagcgacttcatccaacgaaacaagttttaccgtttcatcaacgagcagctccgtcaacggcagctattccatcgaagtacaaaacttggcgaccgcagacacttacaacaaagcagtacctgatattgaagcaaaaattggtgtaagtgggacaattaaaatcaacggtaaagaaattaaagtcgatgcagatagctcgatgaaaaatgtgatgaactcgattaatagcgctggtgcgaaagtaaacatctacacattaggcgaaaatatggtcgttacagcttcaactactggtgtcgaaaacagcattaaatttgaaggcgattccgcagttttagaagcacttggtttagtacaaaattcaccagaccatttagcggcagaagatgccaaactgagaatcaatggagcaactgtcacaagtgcaacaaacaaagtaaccaactacattccaggcgtgacaatcaacctcaaaaaagaaacaactggcgctgaaaaattaacgattcaagatcaaagcgatgaaaaagcagccagcatgattacaagttttgtaaatacatacaatgcgctaacaagcacaatgaaaacatacacgggaaaaggaaccattttacaagcatctgctgctgacctcgaagcaaatcgtgcgctaaacaatgtatttcaacataaaaaagacggaaatacattatttgactttggcataagcgtcgataaagaaggcgttttaaaagtagatgaaacagcgatgaaaaaaatggtagctgaagatccaaccgccgtcgaaagatttttctttggtattggtggaattggcgatgaactttatcaatctttgaataaaacatttggctcgacaggctttatcagtgatgaaacgacctcgatgacgaatgaaatcaataaattaaatctcaagctaaccgacattactagccgaaatgacaccttactaacgaatattaccgaccagtacaacaaatggctcgaaatgatgcaagccatgcaaagtgacgcaatgactctcgacgctctaatcgatggcatgaacagttctaataaataaaaatggtaggtgaaaaaaatgcaagcttggaaacgatatacccaaaatgaactaaatacgagcaaccctattaaaaacaccatttatatatacgaacgttgtattattgaatttaaaaagttggacaaagcactcgaacaactgcatttctcagaagcagaccttattctcgataaaatggaaaagatctttgaagaactaaaattacaattaaatcccgaagccggacaagaactttacgataatattttcggcttatatgaatggatttctgaacaaattcgtcaaatgcaactactaaaacaacccgttaatatcgatacaattattcacgtcatcacgcagcttaaagaaggctacgagggagtgatgaaacatgaatcaagcaaagacacatttggctgagttaaaagcactgtttcactcgacgggacaattaaacgttaacctcgaagaatatcaagcgaaactaaatgaactactaaaaagcaccgaacatctaccaaaagacacaaaagaagccattttaaaagaaacaagagaagttataaataaaggtattcttttcacccaaaaacaattagaatccactgaaaatgccttttctgaaaataaaagtcgcaatgccgccaacttgaactatgcgaaatttttctaaaagaaagaaggaaatcacaagtggaaaattataccacgcatattggcaactacttgaactatcttcaaacagcgaaccaagtagtttcaaataatatcgcgaatgccaatacgccaaattttaaagcaagtgaagcgagttttgaagaatcattcggcgcgagcttgcgagcatccggttcgaacaatatcgaatcaacgggaaatttaacgaaaacgaacacgaagcatttagccggaaccgatatagacgaaacaaatgcgaaactcacgactaaaagcggctccatcaacgaagacggcaacaatgtcaacgtcacttctgaaatgattagcttaactaaaaataaccaaatgtacgcgctcgctatcagtgcactcaactataattcatctatcaacacagcagcccgtggaaagtaaggtgaagacctatgtttgaaggaataaacacaagtggttccgcgttaaatgctgcgaaacaatggatggaagttagctctaacaatattgcaaatgctgattcaagcgccgcaccaggtgagacaccttttcttagaaagcgcgtcgtactatccgaaattacgccatttgaaacagctttaacaggtacaaaaggtgtgaaagtaagcgaaatatcaagcgatacaggaagcgttaagcgcgtctatgatccaactcatcctaacgcaaatgaagcaggttacgtcaactacgcaaatgtggatatgacagccgaaatgaccaatttaatggtcggacaaaaaatgtatgctgcaaatacttccgccttacaagcaaatgaaaaaatgatggaaaaagatttagaaataggcaaagtataaaggagtgttttaaggaatggcaattgaaagtattaatgcagcaagcgtcttacctaaagttacgcttggtgaaaccgcaaaaacagacaatgcgacaggtgccggaaatacctttacgcaaatgctggatagtatgagtgatacacaatcaaacgcacaaacttccgtatcaaaccttttaacaactggcgaaggtaatgcgagcgatgtactcattcaaatgaaaaaagcagaatcagaaatgaaaactgctgcggtcattcgtgataatgtaatcgaaagctacaaacagcttttaaatatgcaagtgtagcggttagactagtcgggggagttttagtcaatcgtccacacgagaaaaatggagcgaagtttttaagatggcaaaaataaaaacaatgtattcgaaattgaagaattggcataaaggcgcgatttttgtcggcctttttgtcgtagtcacggtgttattactctacatgaacacgcccaaaacagaagttaccctttataaaaatttatcagaaactagccaacaacaagttacagaccaattagccaaaatgggcgttgattataccgttgataaaagcggcaatattttagtcgatgaaaaagtggagacgcttgttcgtgacaaatttgctgacttaggaatcccgtatacaggccaagatggcaatgatattcttttaaatagttcgcttggagctagtgaagaagataaaaaaatgcaagaaaaagtcggcacaaaagttaacttagaaaaagaaatcgttcaaagttacggcacgaccgtggacagcgcatcagtccaactaactttgccagaatcaagttcgatttttgaagaagcgagccaaaaaggaacggcagcagtcacgctaaaaaccaaaaataaccaaacgctaacaaaagaacaagttctcggtatccaacgaaccgtaagtgcggctgtgccaaacgttgcaagcgatgacgttgcaataatcgatacaaaaaatggtgtgatttcagaagcagatacctctaaagaagaaggtagctcagcttataaaaatgaagtcgacattcaaaacgcaatcggaaaaaatgtgaaaacagacattgaaggcactctttcaagcatttttgctctagataatttccgagtaaatacaaatgtcacagttaattttgatgaaataaaacaaaataccgagcattatccaaatgacggtaaagtccgaagcaaccaaaaagaaacgtccaccgatacatcaaaaggctccaccaaccaaacagagtcaggaactgcttcgaacgctgacgtaccaaattacaccgaacaaaatggcgatgatactaacacctatacgagtgaaaaatctagcgaaactacgaactatgagcttgattctaccattcaagaaattaaaaaacatccagccttggcaaaaacaaatgtcgttgtttgggtggaccaacaatcgctcaataaaaatggcgttgatatggctgaatttacgaaagctattggcgtttcggcaggactaactcctaacatgacgaccgaagaagctggtgaaggcggagaagcagcagccacaccaacattcgaaggaacattccaaaacggcgacgtgaccattatgccaatccaatttttagacaatcaaacaccagtagaaaaagatactactgaaaaagcagaaccagcaagtaaagcttgggtttggtggcttgtaggaagtttactatttgccctaattgcagctggaataattgcctatatcatcttcttgaaacgtaaagaacaaatagaagaagccctagaagcagaagagaaagacttcatcccagccgaagaggcgatagttaatccagaagaacatccagatttcaacttccaaacagacgcattcgatttatcagaaccagaacttaaagctcgtaaagaaagcttgaaaaataaactcggcgaaatggccaaagaagatccaggtcgcgccgcagcagtcatccaaaaatggctcaatgaaaggcaggaataaaaaatggcagaaacactcaaagaaaccttagaagaaactagcgctgaactggaaactgtcgaagtagcagaaccagaagaaaaagccgctactcaactagattcaggtatttcaagacgtgaaaaagccgcccttattatttggagtctagatgaacaaatcgcgactgaagtagttgatttacttccagatgcctccaaacaacgccttgcacgtgaaatggccaaaatgaaagaaatggatggcggcgcagtggaagaagcaacaagagaatttcttgatgaactagagcttctttctggcgggattgctaaacttgaccgagaacacttgcaacgcctattccctgacatgacaacagaagaattgaaccaattaatttacggggtagaagcagaatcgcgtatcggcgaaacagcattagatattttacgagaaattgatgatgtcgattccttgtttacgattattagtgacgaatcaccgcaaacgattgcgatgattgcttcatacatgaaaccggaagaagcatctaaactcctagcccttttaccagaagaaaaaatgattagtacggtaatcggcatcgcgagcttagagcaatttgatagtgaagttatgcaaaatgtatctaatttactaagaattaaactggatacaatgtcgaatagttcgcttaataaaacggacggaattaaaaatgttgcgaatatcttaaataacgttactcgtggtttggaacgtactattttcgagcatttagacgcagaacaagccgaactttctgaacgaattaaagagaaaatgtttatgtttgaagatattattctgcttgacaatatgaccttacaacaagtgcttgccgagattcaagacaacaacaaaatcgcccgtgcactcaaaaatgaaaaagaagaactcaaagaaaaaattctttcttgcgtatcgaaaaaccgtcgcgatatgattaccgaagaactagaagtccttggcccaatcagactttctgatgtcgaacaagcacaacaagacatcgctaatgtcgttaaaaacttggaaaaagatggcaaaatagttatccaacggggggaacaggatgtccttatctaatccaagaatcccaaaaggcaaagtaactttatccgacgtgaaaatggaactattctatttagaagatatggaagaaacagaggaagtcgaatcaccatattccaaagaacttgaacaactagaaaaccaccaaaaagaactcgaaaagcatatgtcagctatcgaaatcgaacaacaaaagctagcaaatgaaaaagcagcactaaaagctgagcgccaagccattgaagaattaaaacaaagcgcagaagcagaaattaaagcacaaaaactagcttttgaacaagaaaaaacacagctttacctaacaattaccgattttctttgggatgaaagcatcgatctcgcggaaagaattgtccaccaagcaatcgacacccgccaaattgaagtcttaccaatgctaaccgaagtcattcaaaaactcccagttgctttcgacaaactaaacgtcaccacccatccagaaacattaaaagcacttaaagaagaaaacaccggaacaaagtacgactggcttttagaaaatattcattggaacttcgatatgcggcttgattacggcgaattcactgtagaagaagaaaaagaatacttcgactaccgaatcacagaaattttccaaaccttacacaagcaaaatgcagaacggaaaattctaggaggagataaatcgtgaattggtcgccagaaaccgaagcttggcaagaactaaaaaacaccgtcccatacatccaaaaaggaaaaatccacaccgtccaagaacaagtctatatttccaaaggcccacaagtgaaaattggcgacaccgtcatggtcggcgaaaacaaagtgctttgtgaagtgatttctatcgaaaaagaaaacaacatgctactcccatttaaccaaagcgataaagtagcgtatggtgactgggtgtacgtgactgacacaaaaatcactattccagccgatgaatttttactcggaaaagtgttaaatgcatccggtgatattttaaatgaagaagctggtactgctaaatttaaacaaaaaatgccactggaagcaccgccaatccatgcttttaaccgagcggaaattacggaaacacttgaaactggaatcaaagcgattgatggaatgctaaccattggtataggtcaaaaaatcggtatttttgcagggtcaggtgttggtaaatcaactttgcttggaatgatagcacgtaacgccaaggcagacattaatattatcggtcttgttggcgaacgtggtcgggaagtaaaagatttcttgcgtaaagatcttggtgaagaagggttgcgtaaaagcgttattgtcgcagccacttcagatgaaagccatctcatgcaactgcgtgctgccaaacttgcgacttcgattgcagaacatttccgcgatcaagggaaaaccgtcctattaatgatggattctgtcactcgtttcgctgatgcaagaagaagcgttgatattgccgtcaaagacctaccaattggcgggaaaaccttgctaatggaatcctatatgaaaaaattgctagaacgttccggtaaaactaaaaatggatcgatcacaggtatatatacagtactcgttgatggagatgatatgaacggaccagtacccgatttagcgcgggggattttagatggtcatatcgttctaacccgagaactggcaacaaaaaaccactatccagccattgatgtccttggctccgttagccgggtaatggaagaaatcgtgccagaaagtcagtggaaatctgcttcgaaaatccgcgaatggatgagcatttaccaagaaaatgaactgtacttcaaattaggaacaattgaacaaacaagcgacaacgcagccatttttacaagtaaggaaaaatcatattttattcatcaatttttaaaacagctgcgggatgagagtgtcacgctagaagaaacgagtaaaatgatggaaacgttagtataacaaaggagtgccgtggatgaatccagtagaacaagttattagtgctagacaagccgagtttcaaagcgcatttgaagcagcgaaacaatcggccaccacttttgaaacgaaattaaatgaacgtttaaatgcgacaaagcaaaccaccacaactaatgtgcaaacagtcaccgatgccgaactagctcgcgcccgtgaagcatacgaagctttaataaataaatccgaaactaaacaaactcctagtgcaaggtcaagtgtaacaaccgaaactccagcagcaacaaccggagagctaactaattggaacaactaccaaattaaacctattagcgctgaaaatgaaggcaaatatagcgatttaattaaaacagcagcaaccaaatacggtgtaccagaagcgcttatcaaacgagttatccaagtagaatctaattttaatccgaatgtggtttcaagtgctggtgccactggtctaatgcaactaatgtacggctctaatcgaaccgacccagcgactaatatcgacgcagggacaaaacagcttgccggttacatcaaaaaatacgatggtgacctaaaattagcattagcagcctataacgctggaccaggtaacgtacataaatacggcggggtcccaccattcaaagaaacgcaaaactatttaacgaaaattatcgggtaggggagaataaatcatgggaaactggcaacaaaagtgggaatcatggcgcgatatgacagcagcaatgcaacaagaaattaaaatcgaagcagctgacaaagtaacttcctacataaaaaatgaccaatttgaagaagcaattaatgtcatcagacaaaccgaaaatctcctaaatgaacttgattttgaagcaaaaatgaaccgcgtcgaagaacaactccaagccttcacatccgaccaagaagcatctaaatcattcgaagcgagccaacttcaaaacctagaaaaaccaagtacaaccgtaagtttcgacctcgctagcgtaaaatcagaagccatcaatcagttcaccaaacgcgatttcaatctagtagactcacatgatacccacatgcaatttctaaaaggcaaccgcaatttttacatggacattttcaaccccgaagaaagcgaagaacatcactacgctaaccttcatgaaaaatgccaatacaaaaatatcggattcatctgccaaaatgaagcagcagccgaaatggccgcaaacttaacgagcgaatggcttgaaacattagaagcacccaaaaagaaatttttaacagttaacatcgctaacttaagcgcaatgaaacaaaaccctgaagtactatttaaataaaaaatgtgaactgttttctgtaaaaagaaagcagtttttttgcagaagggttgacaatcaacctactttgtattactatatacttgtacctagtaacaactagtagaggagtgaattcaaatgaaaggacttaccgagttactcaaaggtagtttagaaggaatgatattagagcgaatttctaaaggtgaaacatacggttatgaaatcaccaagtatctcaatgacctaggttttgatgaaatcgttgaaggaaccgtctacaccattctcgttcgtctcgagaaaaaagaactagtcaatatcgagaagaaaaaatcagaattaggcccacctagaaaattttacacattaagcccagccggcgaagaagaactagcaactttttggaaacgatgggactttatccaatcgaaaatcgtccaaattaaaggaggaccagcatatgtttaaatggtacacaaaataccgcgaagaaaaacgagactataaacaatacaaaaaaagaatagacgcgctcccagaagactataaaacagcaatgaaagccattgaaacctatttatggaactttgcaaaaggcgcagggatgttcgaaatcctaaaaaacgtcctcgaaatgttcgaaaacgcagccgctgatcaattagaattaaaagctgttgtaggcgatgacctagccgaattcgcagacagcttactaaacgaatatccagaagaaacatggatggataaacaacgctcaaaattacgtaattcaatcaaataaaaaacagcaagtctctccgaatataagagagacttgctgtttttttatttgcgtttcttcacaacttcaataaattcatctaatgtttcatgggcttttatttgctcgttacaaacatcgctatcgtagcaaatataattaccatttgtcgtataaacgccatcactggaagatttcgttttcgccataaacagtgatactttggaatgcgtttggcaaatggaacaaacacccttttgaatctccggagaaatagtcccatttacgccgaccaaatttccgtcctcataagtcacgatatatttacgctgctgagcaatatcattccagccgtanaaagtataatcgcgcaaatcaagtttcgaccatgcaggaatttttaattttttcgttttcgcaaaaagttttttaagtttcacatcgctaggcggagcgaaaggaatcacataggcttttaacctttctaaaaacggctctgcttctttggttgaagttatcaaatggagctcgctaaaaagttccttatgctcttctagcacgctctccggaaatagttcgttgattttctcctccgtcaaagactttaacgccttcaaagtggatctatcattcgcggaccgataagcgcgtgaaacattttctatttgttttttgataaaattatattggtatggttcgataaactctttcattaataattctcctttaatagtttaattttggttaaactagctgaaggattgaagagtttatttcactcttactttctaaacaatcctaaagccattgttagaaagtcgagagcagtgcaattttgtttgcatctctttgatcaccaccttgccttcattataagcacttctgaattgttcgtcaattctttttcatgaatattcttccaaaaacagggtaaacgaaaactattggacattagagaaaacatccatgggaggagaaagtataatgaaaaaagtaaaagcaagtgaaacactcgtacaaacattaaaaaattgggacatcgatcatgtttatggtttacccggtgattcgattgataccgtggtcgatgcactcagaaaagaacaagaggcaattgaatttattcatgtgcgtcacgaagaagtcgcatcactagcagcagctgcctataccaaattaaccggcaaaatcggagtcgctttatctatcggcggacctggtgcgattcatcttctaaacggtatgtatgatgcaaaaatggaccacgtaccaatgctcgttttagctggccaagtgacaacggacgtcttaaatacgggctttttccaagaagttaatttaccagctatttttgaagatgttgccgtttataataaacaaatcgataatgctgaaacgctggcagatgttgttgatgaagcgattcgaactgcctatcaagaaaaaggtgtcgctgtcttaacaatcccaaatgatattccatcacaagaaattaaagcgagcctaaaagcaaaaccagtaaaatttgaacaagaaattccaaaactagacgaaaaagcaattcaagaagctgtaacattaattgataaagctgaaaaaccagtcattttagcaggcttaggaacaaaacacgctggaccagaattaatcgcttttgcagagaaagcgaaaatcccgattattcattctttgccagcaaaaacaatcgttccagatgaccacccaaacgcacttggtaaccttggtaaaataggaacgaaaccagcatatgaagccatgcaagaaactgatttactcttaatgtttggcaatgattatccttatagcgattacttacctaaaaaagctgaatgtattcaaatcgatattaacccggcaaaaatcagcaaacgttatcaagcgacagttggtttagttggcgatgccgcagaaataattagcaatttaacaaccaaaatagcaccggttgaagaacgtaaattccttcaagcatgccaagaaaatatgcaagaatggtggaaatggttggaagaagatatttcgcaaacaacggatccaattgccccagaagtcgtgatggctaatattcaaaaaatcgctgataaagatgctattttctccattgatgtaggaacagcaacggtttggagcacgcgttatttacacttaacaccagaaaatgactttatcgtatctgcatggcttggtacaatgggctgcggtcttcccggagctatcgcagcgaaaaaagcctatccagaccgccaagcaattgcaattgtcggtgatggtggcttttcaatggttatgcaagatttcgtaaccgcagtaggccttgatatgccaatgattgtcgtcgttttgaataaccaacaactatcatttattaaatatgaacaacaatctgccggagaactaaattacgcaatcgaccttccagacatcaattacgcaaaattcgccgaaagttgtggcggaattggtttccgagtagaaaaaatggcggacctagaagctgctttcgaaaacgccaaactagcaacaaaaccagttatcatcgacgtttccgtggatagcgcagccgctccactaccaggaaaaatcgtgatggacgaagcattaggttacaccaaattcgaaatccaatcagtcctagaagaccaccgtttcgccaaaatgccaccacttaaaactattttacgtagatttttataaaaaataaataaaaaaataacaatatcacccattttacgccgatattcgctagttattataatgtttttttattaaaactaattattttacaataaaatatggagtttttttaaaaaatatgagataatgaactagaattagagaataggagtgtggaatgggtgaatttaattaaaaatcgtaaattgaaaacaaaactaagcattaatattattataaccaccatcatgttaatcggacttggcgcaacgagtttccttggatttcgtcatgtagcgacactttcagataatatggttgataataatgttgctccaatgaaagaaatcgcaaaaatccaaacaaacatggcacaaatcaatatcgacatcctgaccatgttcgatactatcaacggaaaatcaacccttattaaagatattgatacgctttatgctgaaaatgaccaagcaatccataatttcaaaaaagccaatttaacagcagaagataaaaaacaattagcttactttgaagaaaaattagcagatatgaagtcagcagcatcctctgtcatcagtgatacttcaagtgcgctggacgacgcagaacttctaggagcacaaaatcgatattaccaaaatgttaaaacaaaatttgacgacgctacaaaacaattaaacgttttaaatgaaatgaactataatgaagtcgaaaaatcttcgcaagctatttctgattttggcgtaaaaattagtttaatcttcacagccgttatcattgctgtactgatttcactattcattttcaacgcttatattacacgcgttattttaaaaggaattcgtcacttgcaaacagctgtacataaagtagcgagcggggatttatcataccgtagcacatacaatggtaaagatgagctaggcgacatcacgaatgacctaaacgaaatgagcgaaaacctaagattaatgattgaagatattaaaaaagcttctacagacgttaaatcttccagtgataacgtcattattagttctgaaattatttctgcaatgacaacagagatggacatcgaaatgaaaatgatgggcgaacaaatccaaacgcaaatcggtagcatgaaagaaagtaccgatgcaatggatcaaatgacaggcggcgttcaaaacgttgcggaatatgccctgaaagtatctgacttaacaaaagactccgcagaaaaaacaaatgatggaattgctgttattaacaatttagtatcacaaatggatcgtatcagcggtgtaatgcgttcgagcacagacgtcgtatctcaactcgttaatcgtgttggcgaagtcgaaaaagcacttgataccgttacaaatatcgctgaccaaacgaacttgctagccttaaacgcagcaatcgaatccgcacgtgctggcgaacatggccgcggctttgcagttgtagctgaagaagtccgtaagttagcagaacaatctcgtcttgctgttgtcgacattaatacggtactgaaaaaaatccaaaccgaatcaaaaacaacaattgaagtaatgaacactgggctttccgaatcagaagcaggtcaaaaaatcatttctgaaacagaagcgacatttacagatttactcaaccgtgtgaacgatatttccgctcaaatgcaaaacgtctctcaagaaacagaagaaatggctgctggaattgaagaagtaaacacatcgattagcgatgtaacagaaatctctaaccaaattggtgaaaaatccacagccgcacttgaattcgcggaagttaacaaaatgaaagtggacgagctagtagttatctcagaagaaatgcaaaaaatttccggctcattagaagggtatatcgccaacttcaataccgaagtaagcgaagaagtggtcgaagtagaagaagaaccggaaacaaaagaacccggagagccaatcctagctgaaaatgtctaggtagcttgtacaaatgcgaatttggataaaatcactacttgttattacagcttgtatatttagtttgacccttctaaatacgaaatataccttttattcaccaaccgtcaaactcgaaagcgccaaagtagtttataaattagacaatgaaccttttaatgtaagactcgacgttcctatcattaatcaaatggatgcacctattctttttaacggctgtgaagtaacgagtcttgcaatgctcttacaattcactgggaaaaatgttactaaaaatgaattagcagcgaaccttccaaccacacctattgaacaaaacggcttacacggaaatcctgataaagcatttgttgggagcatcagtggagatagtaaagggctcggggtgaatcatgctcccatcgccaaacttgctgctaaatatgttaacgaagcgcatgtacatgacattagcggcaatgatataacagatattatcaccgtacttagcacaggagcacccgtttggattatcacaacgaccgattaccatgcaccaaaaaattggcaaagcgtccaaacaaaagaaggaaaaaagaaaatcacttattccatgcatagtgttgtcattactggatttgataaggagaatttttatattaacgacccatacggacataaaaatcgcgctgtaaaaagagctgtcttagaagaaggctggtctgccatgggaaaacaagctatttatttaagcaaaccataaaaaaacgtttggaagcataagcaagcttccaaacgtttttttatatttttttcttaatgaagagaacgactgctaagactactagaagtactccgataacaatcggccaaaccgaaaatgcatccccggtcgaaggtaaaagtgacgcattacttgtatgctcgagtgcataaaccgtgctcacacgaaaataaataaaacctagtgaaaaaattaaagcaatactagaaactattttttttgataaaaccatacggctcgctcctttttctatcataactatattattagtcatttgtttttttttgtcaatgtatagaccaattttaaacaaacggctatatataatgcttgacctagtatacatattattgtaaaatagatttgtttccttgaaaagtattgaaggaggatagtacaactgaatagaagcgccagaactgattgggacgaaaatgcttaaaggtgaaattcctggaaagtaaacaatcagttgacgaggaggagattaatcgaaatttcggcgggagtctcccggctgtgcatgcagtcgttaagtcttacttacaaatcatttgggtgaccaagtggacagagtagtaatgaaacatgtgcaagaaccctccaaggaaaccaaaaaatgtagagggcttgaaattggacaagtctgccctcaagttaattattggaggaatttattatgtgtggaatcgttggatatattggaacaaacaatgcaaaaggtattttattagaaggacttgaaaaattagaatatcgcggttatgactcagcaggaatcgctttacaaaacaaagatttagtaacagttgtaaaagaaaaaggacggattgcagaccttgcgagccttgtaccaagtgatgcatttggtacaacaggaatcggtcatacacgctgggcaactcacggtaaaccaaatcacgagaacgctcatccgcaccaaagcaaatcaggccgttttactattgttcataatggtgtaatcgaaaactacacgcttttaaaagaagaatatttaaaaaatcattcatttattagtgatacagatacagaagtaatcgtgcagcttattgaattatttgctgaaaaactttctacaaaagaagcatttaagaaagctttatcgttacttcacggttcatacgcaatttgcttaattgaccaaacggatacagaaacactatacgcagcaaaaaacaaaagtccattactaatcggaaaaggcgaaaacttcaacgttattgcaagtgacgcaatggctgttcttaaagaaaccgatgaattcgtggaaattatggataaagaaatcgttatcgttacaaaagacggttttacattagaaacattagaaggggaagaagtaagccgcgcaagctacactgcagaactagatgcatctgacatcgaaaaaggcacttacccgcactatatgttaaaagaaatcgacgaacaaccagcagtaacacgtaaaatcatccaagcttaccaaaatgaagctggggaaatcaatgtcgatcaaacaatccttgatgaaattttatcttctgaccgtattcacattgtcgcttgcggaacgagctatcatgctggtttagttggaaaaaatttaatcgaaaaaatggcgaaaattcctgtagaagtacatgtttctagtgaatttggctataatttaccgctaatgtctaaaaagccgttattcattttcattacgcaaagtggggaaactgccgatagccgccaatgtcttgtaaaagtgaaagaacttggttaccggacgttgacattaacgaacgtaccaggctctacgcttgaccgtgaagcagatcattcgatgtatctctatgctggaccagaaattgcggttgcatcaacaaaagcatataccgcacagatttctgttttagcagtacttgcagtttcacttggtcgcgaaattggtgacgctgaagcacttagcattaatttggctgctgaattaggtatcgttgcaactgcaatggaagcaatggtttctagtaaagaagtcatcgaacatattgcgggcgaatacttagcgacttctcgtaacgctttcttcttaggtagaaacatcgattatttcgtagcgatggaagcagcacttaaactaaaagaaatttcgtatattcaagcagaaggttttgcaagtggggaattaaaacatggtactatcgcgcttatcgaagacggcacaccagttttagcacttattacgcaagaatctatcaattggaatattcgtggaaatgtaaatgaagtcttagcgcgcggagcaaaaacttgtgtatttgcaatggagaacgttgcgcaaccaggtgaccggtttgttattccacaagtacatccattattaacaccactagcaagcgttatcccgtgtcaactattagcttattacgcagcacttcaccgtgactgcgatgtcgacaaaccaagaaacttagcaaaaagtgtaacagtagaataaagtattcaagaccttttctaatttcgaaaaggtctttttttatgcaatcaataaatttgcacgacccccttgttatactataaacttagagaggaatgggggaaatcagccaatggaagtatcacacgtaacactcgaaccaaataaagatagtcgccccgcagtattaacaatcggtaagtttgacggggttcatcttggtcaccaaaccattttaaatacagctttatccatcaaaaaagaaaacgaaattttaactgctattagtttcagcccacatccactttgggctttaaaacaaatcgaaatataccgcgaaatgctcacaccaagaatggaaaaagaacgctggctcgcgcattacggggtagaccatctcatcgaaacagccttcacaccaaggtatgcggaaacaacaccagaagaatttgttacggaccatttgtctaatttacaattatcgcatatcatcgttggttctgagtttaattttggaaaagggcgcgattctgatgtggatttactgcgggacctttgcaagccctatggtatcggcgtcacatctgtcccagtaattgaaacaaaccaaacaaaaatcagctccacaaacattcgagcttttattcggcgcggtcatttcctagaagcagaacaactccttggtcacccgtggtatattaccggaatggtagaaaatggtgaaatggtcggcttagatgactatgttcttcctgcaaccggcacttatcaaaccgacaagaatctcgtaaaagtgacgaatagcagaactatcaaagtagatttaccagacggactacaacaattacatatgaaaaatgaactttcctagtcattaggaaagtttttctttacattttataaaattagtaatatactaatttagtaaattactaaaatttaaaaggggaaatctaatgaagattccaactaccttaaaacataaaccagtgattgttgccgaaaattacgaagaagtagacggtaaaagcgcgtatcattcggatgcaaaaggtctttcgcttggtcttgcgcagtggaatgatcgtggaaaagtagatatttcagccaaagtttggcgtcatacgggcgataaatggtcgcgccaatccgaagagcttccgttacaccgcgtacttgacttagctattttaattgcaagaacgaaggttcattttaaagatgcttatcgtttacctaatttttacgataaagaaaatccaacgcttgatcgtatcggcttgcaaggagatgcgctgactatcgcagtttgtgaagataacgagtatatcgacgaagacattcaattattcgaacaagcattaaaaaatgatgatgaactactcagcgaacgcctcaagacacttagcaaacttttacaagaagcaggatactaaggacgtgaaacaaatggataaagaaaaccgcaaagagctgattcgcgcatacaaagaaaaagcccctgacgccggagtataccgttttatcagtacaaaaactggcaaatatttaatcgataatacaatggatttaaaaggaatagccaataagcttgctttcggagtgaaaattggagcaggaaatatgctaccaccagaaatggcaaaagaagcaactgaacatggtatcgacaccattcaatttgaaattcttgaaaaagtagacattaaacccgaaatgacaaaagaagatattaaagaagaaaatgctgtacttctcagtttatggctagaacgcgaagatatttaagacctctccagatgagaggtcttttttttatagttaaaattgtacaataaaaagataatttaaataaaaatacactaaatgtctacattttttgtgtgaattaatggtatactaataaatgactataaaaaagggaggttttacaacatgaatccaagaaaaccagaattcattctaacattaatagcaggaattacaggtattatcgctggtattacaggaatcgcaggtggaggtattcttgctgctttatctggtagcgaagaactatctggagctgcaacaatgtctactactgatacagaagcacttgctgctgctggaggtttcgcagtaattttatctgcaatcgctttagttattggtattgctttgattgttttcgcagtattaattaaacgtaatgcgaaagtatttggtatcttaacgctagtagctggcgtaggcggtttcttcttagttagcttactatggatcgttccaggcgtacttgcagttatcgcaggtattatgtgcctagcgagaaaagtacaaactttctaaaaggtgctttaaaaaaatagattgtaacaatgtgagaaatcattttgtttacagtctattttttttactaaaaaagcactgaaaatcagtaaatattcatcgattttcacattttattcacattttaaatataattcggaaaattgagtctaattttagtacttgttaattttgtgttgattgtatactggttaagtaccaatttcataaataagcgtttatacatctaggaggaatgattaactacatgaaaaaaacaatcacaatgtcgctactagtcgtatctctcgtcttaattagttttattagttctccaaacgccaatgcagccgaaaaaagtattttaacatcaccgaaaccaataaatgaggtttttcctgatgaaaatatggctaaagtaatagctgaagtcacttataagagtagttcagcagatgaagtatctcaggcagatttagataacattacaaagttagatggcagcacctctgaccgtatgccggggccaataatttattcgatagagggtgtcgagtatcttcaaaatttatcggaatttaatatttctgggcagtctgtaagtaatatttcaccgttagaaggattatcagagttagaaactgtatatatttctgaaaataatattaatgatttatcaccacttagtaaatctccaaaaataaaaatattagatgcatcgaataataatataagtgatataagcacacttagctcattgccaaatttaaattcggtaagactaaataataatagtataagtaatattagtgtgttaagggatttcccgacaaaccaatttgtttatatttatttggccgataataaaatcaaggatattagcccgctcgctggtaaatcgtttcaacaattaacacttaacaataatgaaataagtgatattagtccattaagtaagatgacactatattcagaggatccattggccgatgatttttatattgatattagcaataaccacattagtgatattagttcgttgaaaaatgctgattttggcaaattagattacttttttgcagaggatcagagtattgtcaatcaacccaaagctttttctacaaatttcacactggaaaataaagtgaaaaatatcaatggaacacttgtgacgccgaagaatattagtaatagcggtagttattcaaatgctatcttatcttggcaacttccaagcttcgtagcaaatctagattattctttttctgagacaactcagattggcaggtcaacaggggaatttagtgggaaggtcacacaatcccttgttggaggatatacagtaacctttgacaatgaaggaacactatctacaaggacttttgctagtgatgaattagtaactgaacccgcaaagcctagcaaaacagggttcacgttcactggttggtacgatgcaaaaactggtggaaagaaatggaacttcgctacagataaaatgccagcaaacaatatgacactatatgctcagtatgaagaacaaacaacagatccagttgatcctgcaagtccagttgccccaacaaaaccaacagatccagttaaaccggatgaaatagtctcctccgagggatcgggtgatatggagattaagggagaacaatctggaactatagcggcatcagaaaacgcaacttctttagatgactcaaaacaacaaagaacactaccaaaaacaggtgatactaacttatacttggtgctgattgggctattatttgttggatttgctagtttattttggaagaaaaaacaaatttaagccattcaaaaagacgataaaccgaggtttatcgtctttttttattaattattattcggatttacagctgattctttctccaaagaacagtggcagaacttaaaagcaagattcctactagtgaaggaattagtggactcttatcaccagtttttggaagttttggcattcctactgtgcttgattctgcttttgttatcgatttattaaaagttgttttgttcgatggtgatttttctgaactgtcttctttttgatatacaaaagtgacttttttcggtgtttgatcaaatgttccgagctcattagagggctctttttttagtgtgtatcctgttatttctttatgagtgattttatacgtttttccaatttctccttctactattaaaggattactgattggcgtgtttgtggaatcaacaaattctacttcgactttaccaatttttgcttttagtaaagatttgtctttagtgtacacgtaattaacgctttgtttagtatcagaaaatgtaccgttcgcatttgttggtgttgtagttagcttataaccttgaattgttttggcaaaagaagaataggaatctccaatattgccatctaagacagtttgttctgctaactctttacctgtatcgctcacataattaattgttacagactcagcaggaataatatttttagtgtaaatgtaattcactgtttgttggtctgctgttaattttccgttggcgtttgctggtgtttctactaatgtgtatccttcaatcgttttttctgtagaagtataatcatcgtctataaaaccagtgaatgtttctgatggcgctagttctttacctttatcatcaacatattttacagtaactggtttagcaggaacggggtcttttgaataaacataagtgactgtttgtggatcattaaaaaaagtaccgttcgcattagctggcgtttctgtcagtgtgtagccaggaatcgttttagcttcagacgtataatttgcttctaataaaccttttaaagtttcagaaggagcaattgtttctcctgtggtacttttgtattcgactgtgacatcggagccttctggaggagcttccacaacgattggcacccgtacttttgcaaatgggttggaggtagttgataaggtgcttttaatcgtaatgaaaccttcaccttctgttgtggctaccccgttttcaagcgttgaagaaccgtcgtcgtaatattcgaattcgtgagtagggtataacgcattatttgaagctaatcctagtttggatttatcaggagtcagttgtttaaagtctgttttgtaaggaactacgattggatcgcctttataaaccaattgatcttgcttttgacgataattgtaattctctaacatgtttccgccattattatagttatctaaataatcaacaggaacatctgaagtaatttgatttccttctgtatctataattagttggccactgcggctagcccatttagttgtaaaaatcttatcaggaatggaaattaaattgttattacgaacatcgagacttgataaatgggaagacatattcgtaatttcttcagggatttcactaatattatttcgttgtaatagaagcgaatttaaagctggtaggtcataaacaactgttggaaattcagtcagcttattattataaaaacttaaaaaggttagctttttgagttcaccaatactctctggtacttccgtcaaagttccttgtgttatataaagcctagttaaatttttatagtctgttatattatcaggtatagaagaggcgcctactggatcaagagaagtgattgtttctacatctgctagtgtaatatcttctcgttttttattgagatttctctctgttgccgagatgaaagcttcgttaccatctaattctgtttcaatccaggacgtcggttcagtattagcttttgggaaagtgaaggggacgagtgttgcgagtagcatggagcaaatgaggattagaaaagtttttctcaagaggtattgcacatccttttataatttgttttattatttatgagttaattatagtccttttccacattttcgtagtactaaaatcagacctataaaacgcgtatgatttcttaaatgtgaatatttggtgacgaaatcacaaaaatggcgaaaaacagggtttgttcaaatttagacccgatttaacttttttataactattttggatgctgtttagactaaaggagactatttagaaggcattgatttgaatgcttttttgaattggaaaacaagtggtatcaacgtgttattaggtttttcttctgtggatacttgttttgttcatgaaaataattttcgattttttgaggtaaatgtgtcaaagaaaagtgcttgaaaatcaaaagacacattgcttttatgatataaaatgttcgaaaaatgttcacaaatggtgattttaggtaccttattaggcatttttacaatattgtttagcgtataattttaggagtaatcaaaaacactggaggttatacattaatgaaaaaagctttactttgtctttctgctgttgttctctcattaaattttgtttggggttatcccatttccggaatagcatcagaaacaacaaaagaaacaaatcaaccaattaatttaaatcaaagtaatacagatattgttacttctgaagatttaggaggacaagcgtggttaatcaatgaggtaaatagacaattggcgccgaaaaaagtcggtgttgatctaacttttgaggatttggctaagattaagaccatttctttaagcaataggtcgcttacgggagaagtcccaccagagattaaaaacctagtgtctctcgaaagacttttactttatagtaataatttatcaggggagattcctagtgaattaggtcaattacaaaaattaacagaactgcgcttagattataatcaattctcaggaaaaattccggatggtcttggaaatattccttccatcgctttgcaaggtaataaattagtcgggcaactacctttaagtttgtatgaaaatagaactggcgcaaatgaagtaaatgtttctggtaaccaagtgacgattaacagtcaaaaaccagaaccaagtgtttactcagcgtatacgttcatttatccagctaatacaccagagtatagcggtcatattaaagcaaataattcttttatttctaatctaactaatgatatggagcttacgccatttttaaaaaatagtcctacatttattaatttacaagtagtatatatgtttgactcggaattgtttgatgggcatgatgtgacgattaccgatacgaatgatggcaaggtgctttatgacggggcgctgacatcggatattagcattccgttaacgaattttaaatcaggcatacatgtaattaaagtagttcttgataatgcgactaacaatcctcaaaaccaagcaacttttttaattgatattttaccagttaaggcaaaggatttaacggttaaatatgtggatgaaacaggagcagagattcacgagtcgcaaacggtaagtggtaatgtaggcgatgactatgatgtgacgacgcctgaatatgaactagcaattgataaatacgaactcgatactaaccaactaccaggaaatgcaaccgggacacttagtttagatgagcaaacggtcacttatgtatacaaaaaagcagacggcgcaccagtcacagtaaaatatgtaaaccaaaatggcgaggaactaaccacttcagatattttaacaggtaaattagatgatacgtatcaagctgaagcaaaagaaattgctggatttacattagatgaaagcaaactgccaacaaatacaagtggcgtattcgaaacaaactcgcaaacagtcacttatgtttatcaagcagtacctgcgaaaattaaagcgcacgattcgacgatttatgtagacgatgcatggagcggagaggacaattttgatggtgcgatagattcagtcggtaccgctgtttcctttagtgatgtgcaggtggacggtgaagttgacaccacgaaagcaggtatttatccggtcacttatagctttggcggcgaatcaataacgattaatgtaacggttaaagaaaaagccgttccagcgcctccagttacaccgctaaaccctgtagtaccagcgcaacaaaataacgaaactacaccagctacaaaccaccaaacttcagcagaaaagacagaaacaataaaaataacgccaactcaaagtgaaaaatcaactatagctggtaaattaaaacttccaactactggcgataaactttgggatagcgttttgtatagcatgtttggcttaatatttgtatttgcagcgcttggattattgcgccgtaagcacaaacaaaattaaatgtctaaggagtccttatctatccgataagggctttttttattgactaaaaattcttcttccacaagctctgttagtaaattagatatgtttggctgggttgtgcggcaatatcttgcaaggactgactgattgataaagtttggtaacacaatctcatttctttcttcatcttcagtgcccatctctacagcaagattttctaaagccatgtaaatccgttctttcggcgtttttgcaatcataccaagaagcgcatagtgacgagcaaaaacgtcagcaatacttgtcaaaagaaaatcattcacatcaggtttgaccgataaaatgtttagtaaaaagtctgcttctattttatagagcaccatttgctcactcatgacggtaatactatgttttttctttggaaatgacgagaatgcatcaatccctaacacattatttggaagaacgaatattgaaatatagtttgtttttcttaaattgtcctctaattctaccgcagcataacctttcacaacaaaaaagatatgttttgctttttcttgttcaaaaataattttttcattcattgtataggttttctttgttacatatttatagtagtcaggaaattcttttagataactgagcactgtattgaatttttccgtcattaggaccactccttttttacatatttacccatttattataccttaattcttttcaaaaagagttatgaacagtttgtgactcctgctaaagtcgcttggagagagggataaaagtttgaaaagaaattttgtagtgggaaaaacgcttgctcgatatatgaagtatataaatgaagcgattttcctttgatatagtacattcatagccagtgtgacccaagtggtacggtgatacggacagacaggcgaaaggaggaaattatgaagtttgatgatagtaaacccatttataagcaaatcgttcattatattcatacagaaattgttacaggaacatacgaggctggtgacaagctactatctgtaagagaattagcaacaaagttagaagtaaacccgacaaccatccagcgagcttatgcagaactggaagaagcgggaattattttcaccgttcgcggtactggtaaatatttgacagaagataagaggagaattgagcaattggaaaatcacatcgcaaaacaacttaccgaaaattttattagtgaaatgagtaaattaggaattaataaagaaaaaatcatcgcttgggtgaaaaaagtagaggaggtagaagtaaatgctagtgggaaataatattgctaaatcttatccaaataaattagtcttacaaaatgtggacttcgaagcaaaaccaggcgacatgatcgtgctcactggtgaaaatggcagcgggaaaacgaccttgctagatatgttagcaaatttgaagaaaccagatagcggcaaattacaactagataatgaagttttcataacgagtgaaatccgtcagcaaatcgcttatctaaacaatgaactttacgctaaaaaaagtactactatagaagaatttatgaaacaacatgcgcttctttttgaaaatatggatttagataagtgggaaagactactttcaggatggcgcattagtaaacgtttaaaacttggtgaattatcgacaggcatgttgatgaaagtgaaaattgctagtgttttagcaagacaagccaaagtgtatctttacgatgaaccatttgcaagtattgatattatggctcgttcagaagtaatgaaggctattattagcgaaacagagccagatgctatcacgattatttcttcgcatcatttagaaggcacggaaaaattatataacaaactttggttaattaaagataatacattaaaaacaatagaaacagaaacttatcgcgagagaacaggcaactcattaatcgatttctataaggaggaaatgaacaaatgacaaaaatgattactttttatttaaaacaaattagtcctattcttttgattggacttgcaattatcttggggctgaactttctagggttcacgataaatctactggagggaacggatttactttttagagcgattcgaggaacgacggtgataagcttaattctcgttcttatcacaacttggaaaatcacgaaactcgacacatcgaaagaaaacttaacgctcgcttctctttccggattttcggaaacaaagaaatttttcggaaaactatttgctgcttatttatcagcaattgcagttattttacttcaaagtgcttttatttggtattacggttttgaaacaggacgaattggagcaggcgatgcgttatcgtttgtatctggaacgctgatgatgtttttatttatcgctatgtttgtttgttactttgttattccggtaggttggttaaaagatcacgtgaaggctagttctcttcaaaaagcagccgttgttctacttctttttgcaatcctaataatcaatttattagctgaatactacttgcatatttataacagtgcgggaattatctctattttgccaaatggtcattttgagatttcacttctttctattgtttggaatgtaggattatgttcagttattgcaggcagttatatctatatgaagtctaaaaaaatggatactatttgaaagtaggagaatacatgttagaaattaagcacttaaaaaaatcttacaaacttggaaagaaaaacgagactcctgttttgaaagatattaatgtgacgattcaagacggggaatttgcggcaatcatcgggaaaagcggtagcggtaagtccactttgctgaatattattagtgggctagataccgactattccggacaagttttatacaatggcgctgatttacaagatatagacttagacgcctatcattttaatcatattggttttatttttcaaagctttcatttagttaaacatatgtctgttattgaaaatgtcaaagttcctttatatttgaatgcctaattatcggaaagtgaccgaaatgcgagagcactaaatttgttgaaacaagttggattagccgaatttgctagtaaaaaaccaacgcaactttctggtggacaaaagcaacgggtagcaattgcgagatcgcttgctaacaatccagatatgattattgcggatgaaccaaccggagcgcttgatagtgtaacttcagaggaaatcattaagctattaaaaacgttagcgaaacaaggaacaacagtcatcatcgtcacgcatgatttaaatattgcagaccaaaccgatgcggtattacgactagcagatggagaagtaatttcatttgaacggaaaaaagaagttatccaaagagttagccacaaaaatgaaaaaaagttgcgtctaaactggtgggccactgctaaaatttcttttaaaagctttttcaatagaaagtttcggaatttgctcgtagcacttgggacttcaattggaattatcgccattttattagcattcgggcttgggaatggagtaaatcaaagtctttcaaagatttttggaacgactttttcacctaaccagattacgacttattataaagaagatggtggttcgaaatcacctgaaccgactactccattaacgagcagtgagattaagaaaattaagcaactgtatgaagatgaaaatattacagaaatttatgaacgcactactgtccaaggcattaaatttgaatacgatagcgaatatttgaaaggtatttctggtgaaatgcaagaagccaactttaagccatcacgctatgaagatttgacggtcaaagatgaatatcttctaagtgggaaaatggtgacaagtgatgaagcaggagcagttatcccttctaatgtagcaagagctattcttgggaaaaaggattctgatgacttaacaaaaagtgacggtgataaactcattggtaaaaaaataaccttagtttatgccggaagaaacagcgacacaaaaaatacggtcaaaatagaaacaaccatttctggtattacaaatccctctaaagaaggttttgctaggggatttgacgtttctacaaaaacaatgaatgattttattaaaacaactggtattgaaaaaccgattttatctgtagatgcattcacaaaaacaacagcacaagcagaggaaatcgttggaaaatatgaggatgacaaagactgggcgaattattcgattactaatgcgaatgctttcgtagatacatttagccagtttaccgatattattgtgtacttgattgcctttattgcaggtctttcgctggctgttgctggcgtgatgattgctattgtgctttatatcggtgtggttgaacgaacaagagaaatcggggtattccgagcaattggttatcgaaaacgtcatattcgcggacttttcatgatggaagcaagctatattattattttagcaaatgtactatcaagtcttgtcgccgtgacaattgcaaaaatagcgagtcctattttagaaacgaacattggttttgaagatatgattcacatttcgttctggaatttccttgtcacactcgcaataacaattacaattggctttattttctcgatttatccaagtaataaagcagcaaaattagatgcagcagaagctttaagatcagaatgacccaactaacagaaaagaggaatttaacatgaaaaaatcactaaaaatcagcttaatcgtcgtaggaatcgcagtagttatatttgcaggagtgatgctatcctaccgttttattaaatcaatggacgttactgaaaatgccgaaataaacaaatcagctacaggagatcacgtattgctggcaactcaaggtagtaaatttaaagacagcgtaatggatcaagtgaaaaaagacatggaaggcaaaaacgtacatgtttcgattatcgatacaacaaaactagacaaagtaaaagcagatgattatgacaaagtagttctattcactacagtacagtccgatgatattccagaaaacgtaaccacttttatgaatgataataaagataaaagtatccatattgcggtaacagcagattctggccgctgggatgataaaccgaaagatattgatgcaatttccgaagcatcgaaagcagaaaacaaacaagattttgtcgatgatttaacgaaagcaattgtagcggaataagaatgagagagcactcacctttaggggtgagtgttttttaatatcagataaatttgctaaaaacgctatatcgttattcccattttaaaatatgctatacttagggacaaataaacctcaagaaaaaggcgggtggtagtcattgaagaagagtagaacggttcaaattcttttcgttttttccgttattgcgctagttgttagtgttgttggtgtagcgtcaatttggtacgggcaaaaaaatcatcaagtaaacaatacaaattcagctgcccaaaaagatactactgtaacgaaaaaacaagatacctttaaaataactgcactcggcgactcacttacatatggcgttggtgacacagaaggcggtgggtatgttcgggttgtggaaaatttctataaacaaaaagagaaaaatgtcgagaacgtcaatcttgctattagcggggcgaaatcaggacaattactcaaacaattggaacaaaaagaagtacagaatcaaataaaatcagctgatgtagtcttaatgacaatcggcggcaatgatttatttcgcggcggggaagcacttgatgatttcaaaagtgatgcgattaaacaagccgaagcaagctacacgaataacttaaaacaaatttaccaaacgatacgaaaattaaatccatccgcgccagtttttcatattgggctctataatccgtttatgtcgttagaaaatgcgagtgagatgtcggctgttgcgaatgaatggaacatgcaaagtcaaaatctatcacaaaatgagaaaaacattatttacgtgccaacatttgatttatttcagcaaaatggagcggcttatttagcaagtgataaattccacccaaatcatgcgggataccagtttatcggtaatcgggtgacagaagtgatacagacgggagggggaaaaggcgatgacggagctagcacttcaagtaactaacctgcataaaaaaatccgcaaacgagaaattatcaaagggatttcttttgaagtacgaccaggagaagtattcggttttctaggaccaaatggagcgggcaaaacaactacgattcgaatgatcgtggggttgattaaaccaacatctggaacgattttaattggtgggaaagatattcggaaaaatttcaccgaagcaatgcgcggtcttggctctatcgtggaaaatccggaattctatacatttttaacagggcaagaaaatttggcgtattttgcccgaatggatccctcgataaaaaaagaacgtattcaggaagtaaccgagctagttgggctggaaaaacggataaatgaccgagtttccacctattcacttggtatgcgccagcgtttaggcattgcccaagcgttactttccagtccgaaattattaattcttgatgagcccacaaacggtttagatccatctggaattcatgaaatgcgcgactttatccgtgcgcttgccagaaatgaaggaattagcgtgctcgtttcttcgcatttattaagtgaaattgagcttttatgtgatcgggtggcgattatgacagacgggacgattattaaaaccgaccaagtttcacacctccttagttcccgcgcacaattacgctggctggcgactccttttgaacaagccaaagcatttttggcaagtgtaaccgaagtcgaagtggacggcgaatatctcgtgaccgcagtgaatgaacgtagcgccgaatggaacgaacagttggttgcaaaaggcattcaagtccatgaaatcgacaagaaaaaaccatctctcgaagacctatttcttgagttaacaggaggtcattcgattgattaatttagtctataatgaacagctaaaactttggcgcaaaaagcgactcatcgttattttagcattggtagcaattatcgtagcgattttcacgtatgcgcagttccggcagtatcaagaagatgaaaagcaagctgggacaagtgattggcatgtacagactcagcaacaaatcgtcgaccttgaaaacagactcggcacagggcgactacccgaagaatatcaaaaatatttcaaagtgcttgtcgggcaactacaatattatttagataatgacatcaatcccaatgcacctggagcaccaactttcttaaaaacgttcgtcgaaaatggtattagtttgttgtttccactttttatcatggtaatagcagccgacttaatcagtgctgaaacaagcgccggaacgatgaagttcctgcttacaaggcctgtgaagcgatggcggattttgacgagtaaatatatatcgatgctactctcgatttccgcaattatggtattatccgccgttattgcctacctgatttctggaattgtctttgggtacggtggctgggatgcaccagttctcaccgggtttggtgtgaaagatggcgcgataacgacaaccaatgtgtaccagcttccggtttggcaattactgctcatggagttcggactcgcatggtttgtcagtgttgtggtcggcgtgttgacgatgtttgtatccgtgctagtccgctctacagccgccgtgatgggaattatgcttgcttcactcattaccggaacgattttaaccaatctcgtcagctcttggccaagcgcaaaatatctatttatggtcaatttacaactaacgaattacttgaacggctccagtccacccgtcgaaggaatgacattgaatttctcgatgcttgtgttaacagcgtggatggtagtcgctttcatcttatcctattttattttcacaaaacgagatgtgtattaaagagcgcttaacggcgctcttttttgcgtacattaaaagttacttactttttgtgagcataaaacttttctttttaatagtttagttataaactatagttagtaatcaagaaggaggtacaaacaaatgattaaaggcattcatcacgtatccgcgctaaccaaatcatttagcgagaaccatcatttttattcagacatattagggctacggctcgtaaaaaatacagtaaatcaaagcaatattcacatgcgccacctattttacggggactatacaggaagccccggtaccttgttaacatttttcgaagtacctcgcatcggctcaagctacaacgagcgcgcctttttcggtaatatcacccttggaataccaaaagacacaagctcttactgggaaaaaaggctaaacgattttgccatttctttcaaaaaacaagaccagacttttagattacaagatcccgatacaatgggcataatcctaacggaaataccagaaaccatttctaacccaaccattcacaccgatataccagtcgaaaaacaaatcgttcgaattatcggcgcagactatcacgtaccggacccagctgcatctagtcaatttttcacaaagctttttgggttaaagcaacagaatggggtaatagtagataagagtgaaatgagttttatgaaattgtacgctactaaatcagacaaaaaatcccgcacaggacgcggaacaatcgatcatattgcatatactttagaaacgaaagaagctgttgatgaacttcatgatttagcagtaaaaaacgacttggaaattgaagaattcgttgaccgtgagtattttaaaagtctctatatccgcgaaccaggcggcttaagaattgaatttgctagcgctggccccggttttactatcgatgaaccacttgaaacaatgggcgaccacttagccttaccaagctttttagaagaaaaaagaacagaaattgaaacttattttggaggagatttatcatgattaaagggttaaaaggaattcaccacgtaacagcaatgacaagtagtgccgagaaaaattatgcgttttttacagaagttttaggaatgcgattagtgaaaaaaacagtcaaccaagacgatattcatacgtatcatttgtttttcgcagatgacaaaggttcagcaggaacggatatgacgtttttcgactttcctaatttaccaaaaggacgtcacgggacagatagtatttctcgcgtatctttccgtgtaccaagtgacgcggcgcttgaatactggcttgaccggtttgaccaattagaagttccgcatagtgacatccaaacattatttggcaaaaaatatcttaccttccaagactttgacgaccaacaattacaactaatttcagatgaaaataacgaaggagttgcagcaggaactccttggaaaaaaggaccagtttcagaaaaatatgcgatttacggtttaggaccagtatttttaacagtagtttcgctcaaaaatatggaagcaattttacaaactatttttggctttagaaaagtgacagaagaagatggacttcatttatacgaagtgggtgaaggaggaaacggggcgcaagtgattgtggaagaacgtaccgatattccagccgcgatgcaaggttatggtggtgtacaccatgtagctttccgcgttgatgaccacgaggaattacaaaaatggattgaccgcatgaatacaatcgaagcacccaactctggctatgtaaaccgcttctactttgaatcattatatgtaccagtttcagaacgaattttatttgaattcgcaacagatggcccaggttttgcaggcgatgaaccatacgaaacacttggtgaaaaattggcattacctccatttttagaaccaaaacgagctgaaattgaaaaaatggtccgcccaattaacacgaaaaggagctgaaaaacgtatggaacacatttttattcctggaaaaaataacaatttagcaccgttattactacttcacgggacaggtggcgatgaaaagtcgcttgttgaaatagcggaatttattaatagtgatgctgctgttttatcattacgcggagatattaaagaaggcggagcaaatcgatttttcaaaaggtttcatgatggcagcttagatttagaggatttggagcttaaaactgcagaattaagcaagacgacacgcgagttagcggagcaatatcaacttgattttgaacgaatgattgcagtaggttattcgaacggtgccaatattgcagccaacgcgctactacaagcagaagatagttttcataaagcaattttgtttcacgcgatgccagctggaaataaacaacccgagttttcaattagccaccgcaatgtatttctgtcagccggcttaaatgatccacttattaccgcaaaagcatccgaagaattagtggaaatcctcgaaaaacggggcgcgaaagtcgaaacagtttggacagctgctggccattccttgactatggaagaactagaagaagcaaaaaaatggtatcaaaacaaccagaaatgaggtaaataaatgactgtttttcaaagtgcagatttaacccaaaaagaaaactataaatttttaacaggaagtattattccacgaccaattgcttttgtaacaacgcttgctgaagacggggagacggttaacgccgccccgttcagtttttttaatgtcgtttcgagtgatccggcgatagtatcgattgcggttcaacgcgcagatggcaagcaaaaagatacagcgaggaatgcggcttttacgaaagaactaaatattcatattgttagtgagtcatttgtggaagaaatgaataaaactgcggcaagacttgcaccagatgtaagcgaaatcgataagacaagcttgcatttagagcaagttcctggaatgaaaactccgaagatttccgaggccaatatcgtgcttacagctaaactagaacaaattattccaattaagaatgacgctgatgaggttgtttctgatttaattctggcacgtattttgacgtacgattttgcagatgaagtgtttgacgaaaagcatcactatattttaccagaaaagcttgaaccagttgccagactcgctggaaatgactatacaaaacttggcgatattttccggattgaaaggccaaactaacgagaaatagttgcgaaacaaaggccatcatgttaaactaggggcatctaaattgaacggagggttgcccatcatgcgttatattagactacgtttcccaaaaaatctatgcaactaatttaatagtgcgggaatatccatgcttatttagtatgggtaacgggattggtcttgcgtgcatgtatggcacccaaaataaatatgggtagaatgaaggcgaaatgctttcatttgaaggcaagctagtatcttttgatgctgtttttgtgtttttatctactcaaaaaccctgaccgcgctgaatctatttcaggaggtccttttttatggaaaaaaatgtattaatcgttggtgttagccaaaaacaaaaagattttgattattcaatggaagaattagccaatttagcggctgcaaataatatggaagttgtgggcgaattacgacaaaatatcgatcgtgaaaatcgtgctacttacgtcggaaaaggaaaagtggatgaaatcaaaggcttagcagaaatgcaggatgctcgcttgattatttttaacgatgaactttcaccgtcgcaaattaggaatttagaagaagcgctcgagcttgaggtaatggataggactgggctaatactcgctatctttgcaaaccgagcaaaaactaaagaagctcaactccaagtccaaatcgccaaattacaatatgaattaccgcgaatttttggacaaggggaagatatggaccaacaaagcggaaaaggcggacttagtaaccgtggttcgggtgaaaagaaaatcgaaaccgaccgtcgtaccatcaaacatcaaatccgccatttacaaaaagaactagacatgctcgtagatgaccgcgaagtacgtcgtcgcaaacggaagaaaaatgagattcctgtggtgtcacttgttggatataccaatgctggaaaatcaacgacgatgaatggtttagtgcgtgcttatagcgaaactgcggacaaacaagtttttgagaaagatatgctgtttgctacgcttgaaacaagtgtgcgcgaaattgttttaccggataacaagcaatttttactcacagatacagttgggtttgttagcaaacttccgcatcaattagtgaaagcattccgctccacactagaagaagcacgtgatgcagatttactcatacatgtggtagattattccgatccgcattataaaacaatgatgaaaacgactgaagaaacgttgaaagctgttggtgtggaggacgttccagttatttatgcatacaacaaagcagatttgatagaaggagaaatttatcctaagcaaacggaaaatacaattgtcttttcagcgcgcgaagaagaaagtttggaatttctaaccgaagtaattcgtaaagaactttttgctagctatgaaaaagcgacctttttaattccgtttgaagcggggaatgttgttgcttatttaaacgatcatgcagatgttttagctactgaatacttggaaaacggcacagaaattgtggctgaaattagtccagccgatttacagaagctagcagaataccaagtagctgagtaaagcgagttccagctgaatttgctataatgaaacatacagcaaatttagtgaggagatttctagctatgaaaaaaactggatggggtatacttggtgcagttgctgctttcacaggatatgcatactggtcaaccaaacatttaactgtaacagattatgaaatattatcagataaaattccggcagaatgggacggcgcgacttttgttcagctgtctgatctgcatagtgcgagttttggtttatataataatcctttgcttagtatcgtcaatgaactagcgccggatgctgtttttttaacgggagatatgattgatggtgatgagtctccttttgtaacaatggcagtcgtccgtaaattagcaaaagaatttccggtcttttatgtgagcggaaaccacgaaggtagaagcgcattttatgaagattttaaagcggacatggaaaaacatcatgtagctgtccttgaaaacgaacgctattttctgagaaaagatggtgcggcaatcatggtagctggtgttaaagatccgcgatttgttagagatgattgggccgagaaagaattgcctaaacaagtttgggaagaagaagcattaaaagaagcgctagatgaggcgacagctaatttatccccggactactttacgattctactcgcccatcgtccagaattttggccactttatcaagcttatccggttgatttagtattgtctggtcacgcgcacggcggtcagtttagactaccactcacagaaggactttttgctccaggacaaggctttatgccaaaatggacagcgggactccactcagctggcggaaaatcgcttatcgtcagccgtggtttaggcaatgttactaagctgccgcgtctatttaatgatccagaaatcattcgaattacgcttaaagcaaaaggggatgctagagaaaattgatttatttagacaatgaagacgtgcttgaccaagcatataattttgcaatggaagaatatgcgctccgttttttggatgaaaatgaaacttattttatgttttaccgaatgaagccaacgattattgttggtaaaaatcaaaacacattagaagaaatcaatcattcctttgtaaaagaacataatatcgatgttttgcgccgtttatcaggtggtggggcagtctacaacgatgaaggaaatattagttttagtatgattacaaaagacgatggaaatagttttcaaaactttgccagattcacagaaccggttattcaagcactccaaaaattaggtgtaaatgccaaactcagcggaagaaatgacattgaggtggacggcaaaaaaataagtggtaatgcgcaatttgcaacgaaagggcgactttatagccacggaacgctactttttgatgtggatttatccatgttagaacaagcactacaagtcgatccagaaaaatatttatctaaaggcgttaaatctgtgcgcagccgtgtgactaccattcgcgagcacttagcagaagatatggatattcaaacctttaagcaaattttacttgagtcgatttttgaaacgacagatataccgaaatataatttcaccgcggaagataaaatcgaaatagaaaaattacgcactcagcgctatcggaattgggactggacttacggaaaatccccaaaagcaaccatcaaacgcaaaaaaagatttcccgctggcactatcgaatttcagctatctttaaataaagggcaagtggctgaagcgataatttatggtgatttctttggtacagaagatgttagtgagttagcagctaaattaatcggttgccgttttgagcgagctgcagttcaacatgcttgggaaaacctaaatacaaaagcttattttggtaatattgaaaaagaagcgatattagatatgttgtttgaataaggattaaaactctgagatatagattctcagagtttttttgtgtataaaagaaaacgatttcatttttatattgacagaaattaaatatatatagtattatttaaatatgataaatactaattaagtataattaattaaaaggagtgaataatttggttatcgcaaaccgcgcttttatacaaacaagcaccgaacaaataaaaaaagaactaaataatcaaaaattagctgacatgtatgaaaagtgtatggaaaacacattagacaccaccattaaaatcagggaaaacggtctcacatttattttaacaggggatattccggcaatgtggttacgtgattccgtatgccaagtacgaccgttcctgcttttcgctaaagaaaatgaagaaattgagtcgatgttgattggtcttagcaaagaacaagtccgattagttggaatcgatccttatgctaacgctttcaatgaaacgccaaatggagctgggcatcaagctgataaaacagaaatgcatccacaagtatgggaacgaaaatatgagattgattcgttatgctatccgattcaattagcgtactttatttggaaaattactggaagaacagaacaatttgacgctgcatttttcaagatgttacaaacgatttttgctttatgggaagtagaacaacatcatgaaacaaaatcgccttatcgttttgaacggctggactgtgttccttctgatactctaaaaaggaacggattaggaacagaaacagcttacacgggtatgctttggtcaggatttagaccaagtgatgatgcttgtgaatatgggtaccttatcccttcaaatatgtttgcagtagtagttttaggttatgccaaagaaattatagaagctttttatccaagcgaagtagaaacgataaaacaagcaattaccttacaaaatgagattcaattaggaattgaaaaatttggtacatataatcatccgacttttggtgaaatatttgcatttgaagtagatgggcttggaaatcaattattgatggatgatgccaatgttccaagtttactttctatgccaatcatccaatatcttgagaaagagtcgccaatttatcaaaatacgcggaagtttattttaagtaaatcgaatccattttattttgaaggtgaactggcaaagggtattggtagtccgcatacaccagcaggatatatttggccaattggactggcgattcaaggactcactgcaaacgatacatcagaaaaactggagattttacaaatgttgttaagaacggatgcagggactgggttaatgcatgaatcgtttcatccagatcacccggaagactttacgcgtgaatggttttcatgggcaaatatgatgttttgcgaattaattcttgatgtagctggatttcgaatggcaagtgttttaaagaactaacgaaggaggcttaatgatggcaacgattagaaataaatctgttcaaatacatcaacaacgaatggcttacctttttattgcgcttccagttttattactagcgatttttatgattcttcctattggaatggctctgtttgtcagctttacagattatgatattgttaattctcccaactggatcggctttgacaattacataaaaatgtttagagatccttattttctcatttcattaaagaatacgattatctacacagccttgtttgtaccacttggtcttgtagcatcgcttggggctgctatcttgattaatatgaataaaaaaggagcaggtttgtttcggacattnttttatgtgccggtattatgctctacggtagcaacagcgactatctggtattggttgcttaatccgcagtatggtttgattaatcgtgttttaggatggtttgggattaatggtcctgcatggctttatgattcgaactgggcaatgtttgcgattgtgatgatgagtgtttggatgacatttggaacaaatatgatgatttttcttgctggtcttcaaggcatcccagctaacttatatgaagcttctaaaattgaaggcgcttcaagatggaaaacgtttcgttatgtcacttggccatccctttcccgaactacttttctcgtaacaacgatgctaattatcaacgcttttcaggtgtttgatcaagcatatgtactaacaaaaggcggcccaggaaactcaactatcacccttgtctactatatttacaatgaaggctttggaggattaaaaatgggctatgcttccgcgatttcttttgtactatttttaatcatactagtattttcgattattaatatgcgtgtgaataaagaagatagaacagcttaaggagggttggtatgaataccataaaattaaaaaaagggagcaagtcgttcatttggtatattgcagtacttctaattagtttagtgactgttttcccgcttatttggacagtatctacttcctttaaaccaacgagtgaaattttaagtaatagcatgaatttaattcctaaaatgtttacttgggataattacaaagatgtgtttagtacaaccccatttgctcgctatctagtcaactctttaatacttgcagttggtggagtgctcactaatttattctttggctcactagcagggtatgcttttgctaagctaccttttaaagggaaaaaaggtctttttatgacatttttaggaagtatgatgattccagctgtagtaacaatgattccatcgtttttagtattaaagaatttcccgttgatgggtggtaatgatattactggccatggtggaatgggttttattaatacttactgggcaattttgattccaggagctgctggcgcgttttcgatcttttttatgaagcagttctttgaaactttgccagatgaactttcggaagctgcaagaatagacggttgttcggagtttaaaatcttttggaaaatctatatgccacttgctaaaacagcacttgctacccttggaataatgacatttcaggctggctggaatcagtttatgtggccattgattgttcttaattcacaaaaaatgatgacagttcaagtaggacttgcttcctttcaatataacgaaagtgccaattatggggctttaatggctgggacaatcgtttcgaccattcctgtattgtttgtttttatttttgcacagaaatattttgtagaaggtattgcgcataatggcggtaaataaactaaaaaggagtgtataggatgaaaaaagtattgttagcaattcttagtatggtattgttgctcagtttagcggcttgtggtggaggttcagacagtagtaaggataaggacggaaaagaagaaattgttatgtggggttcttggtcaggagatcagattaaacagttagaaaaacaaatcgatagttataataagtcacaagataagtataaagtaaaatatgtaatgcaagaaaatgtggaagaaaaattattaaccggaattgcaggtggtgaactccctgatattattatgtgggatcgctatcaaacagctctttatgcaccaaaaggagtgcttgaaccactagataaacttgtcaaagaagacaacgtgaagatggacgatttttatgaagaatcggtgaaagaaatgacctatagtgataaattatatggtttaccactattaaatgataatcgaattctattttacaataaaaaattattacaagaagctggcgtaaaaccaccaactacatgggatgaattagcaaccgctgcgcaaaaaacaacgaaatgggatggaaataaaatgacgcaagcaggaatgtcgcttcaagatgttggcttgtttaacttatatttaatgcaagcaggtggcgaactagtaactcctgataataaaaaaacggcattcaattcagaacaaggcttagaagtacttaattactgggataaaatgcaaaatgatttaaaagtgtaccaacgtggttttgatgatggttctgatgcttttgcagctggaaaagaagcaatgacatacaacggtccatgggctttagcggattataataaagtagagaatcttgattacggtgtagtagaaccgccaaaaggaccaaatggtgataaaggcgcgattatgggcgggtttggattagtaatgcctaaacaagcggaacataaagacggcgcatgggactttatgaagtggtggacaacaaaaccagaaaatggtgtagagtttgctaaaattagtggttggttaccagcgaataaaattgctgctgaagatgaatattttacaaaagaccccaattattctgtttttgtaaatacaatgaaatatgctaaaatccgtccaactgtggcaggttatgcagatgtagaaggtttagcaatgaaacctcaatttgagaaattcatgaatggtaatatttcagcggaaaaagctttatcacaagctgaaaaagaaggaaaccaaattttaaaagaagagagagataaataaacgatgaaatggtccgaatatgcaaatttagctcaacaaagtttagaaaaattttatcttgcggatacaaaagaacaatttttaaataacttttatccgacagaaaatcctgaagaagataataaggtttttaattattggtggctagctcacttggttgaagtacgattagatgcttacttacgcacgaaaaaacaagcggatttggaggtagccgagaaaacatatctgcataataaaaacagaaatggtggaacacttattcatgatttttatgatgatatgctttggaacgcacttgcggcttatcgtctatataaagcgactggaaaatcaatttatttagaagatgcacagttggtttggcaagatttagtggatactggttggaacgacatcatgggcggtggctttgcttggcgtcgaccacaaatgtattataaaaacacgcccgtgaatgccccgttcatcattctttcttgttggctatataatgaacttaatgaaacgaaatatttagagtgggcaatgaagacctatgaatggcaaactaaagtacttgtacgtgaagatggttttgttgaagatggcattaatcgtttagaagacgggaccattgattatgaatggaaatttacttataaccaaggtgtgtatatcggagctaatttagaattataccggatcactaaagaagcaaaatatttagacacagcgaataaaactgcggctatatcattaaaagaattaacagaagatggtatatttaaagatgaaggaaatgggggagacgaagggcttttcaaaggaatcttttacagatattttacagatttaatagaagaaacggcgaataaaacttaccgagattttgtactaaatagttgtcaaatactcgttgaaaacgcaaaattagatggatatttgttaatgggaatgaactggaaagaaaaaccttctgggaaaattccttattcagcagaattaagcggaatgatcgcacttgaaatggctgcaaaattagaataataaaaaaagcacttcctacttggaggtgctttttagtggctcgactgaatctccttctacaagcagtggaggtaaagtttctttatttatcgtatctggtttaagcacttgatttaacagcatatcaactgctttaacgccgatttcatactgtgcttgttttatatgtgtaaattggaatgcggaggtatcaaaaaaattatccggatgatcaaaacaaaccacagataaattagtaggaatagatttgcctaacttattacatgcttgttttatcaaaagggcgatattatattctgtcgctacaagggcagtaatttccgggtgtgtttctaaaaaacgagcaattttatcaatatctgtttgaatcgaaaccgttgaatttggcattactgattcaatttcacgaaaaacataatcagaatgaaaagcggtatggaaagatgcatgtccacgaataaaaccattcactcgactatcaagcgtagaaactggactagtagacgttatcattccaatgtgcttatggccaagttcaaataatttctctgtaataatacgaccagcttctgtattatcagaactaatagaggatattggtaaaccttctaacgtacgatctatcacaactaaagggaatttttgagaagcaagctccagtaaggttggtgaaacaaatttagaactagcaggtaaaataagtatcccagcaacattcatttcaataaactcttgcagtatttcttcttctcgctcagtatctcccagtgatttttttacaataatatgagctttagagtcactgtgctctagcatgccagataataaaattgttccaaaagtgtcgtcgaaatttgtcataatacaaccaaaaagtggtttatcgaacttcctcgtttcgatttgctcactatttggcgagtcattaataacaaaagtaccgacacgagggcgccttgaaatataaccatctttttttaataattccagcgctttttttaacgtaatactgctcacatcaaattgagccattaattcattttcggtcggcattttgctaccaacaggaatcttgccttcttgaatggataatttaagctgatcataaactttttgatatagtagtgttttcatttactcacccattaaatatattttataatattaattatatttaattttaagcataatgtaaactaattacgataaaaaagtgaaaatctctgtacaaactttaataaatggatgactcatgttaaacttaaatttaggaaaaaaaggaaaaggtgtagaaatggctataaaaaaattaaacgatttttattttaaaaaacttagtagctggaatttaatacatagctttatgaaaggtttttggagagcgttttttttattagtgctgcttttaattgttggtaatgttatagtcatgaatttagtggataatcgtttttttattccagtaattttggttagtttactctgtattccacttttttattacctattgatttataatcgggcgaaaaaatttattaaaacccgttatcagttgcgtaattttaaagagttagcagttatgcgtcgctatttattatttgcttatttagaaaaaagtggtttcagttcaagagacgacttagaaaaactgcttcggtttattcactctgaaatggcggaagagaaaaagaactataagccacttagcacgatgataggcgtttttatagctgcatttttagctatattaggcgggtcttttctatttttaatgaataatgtagcggaacgactcattgcggcagtgatcattatcgttatggcaatagtattgtattttttcgggattacgattatgtcagttattcgttctaaatcagaaataaatgcaaaaaaagagcacgaactaacaaaagaaataattgctattcaaacagctatgttagtcacagaaaatacgagttaccatccctttttggcgatggagaaaaaagtgaatgaaaacgattttttgaaagagattattacatcacggtcctttttataacataattttttaggcatacttaggaggaaaagtaatgacaaccaaacgcaaagagactagagaaagtgtttgttatcgggaaattaaaaagaagattagaaacggggaactaaagccaggtgatcgcttaatagaaaacacgttatcagagcagcttggtattagtcggacgcccattcgtaaagcaatcgggatgcttgctgcagatggatatgtggaatataatgatttccgcggcgcttttgttcgggacagtattattaataaagaacgttattttgaaatgactgaaattcttggtttatttttaaaacaagccattcaaaaaattcgtactaaaaaaatcagttttaataagatgcgcgtagtcgctaagttagtagaaattgaacgtgacgtagaaccaagtgatccagcagtttattttgaatatgagaaatggtttgttaatgatttattaacctatatgaaaaataattactacttaaaaattagcaatgacttttttaataatattcaagagtttggtgatgaagaagtaattaaaatcgctcaaaacgcttgtgttaaaacaatcgctaatattcagcgttttatcgatgcgcttgaagcacaaaattacgacgaatgtatggcgatcattgatcaagtcattgatgcgcatgtattagtcgcttatcggtaaaaaagcattgtccccattcaaaagggacaatgctttttttattttatttttactaaatatcttccggttattccgccattcatgatttggtgaagggcagctggtaattcagaaaaattgatttcagtagcaagctcatttaaattagttaatttaaaatctgttgcaagtcgtttccagatgcgttctcgttttggcattggacaaagaacggaatcaataccaaaaagttgaatcccacgcaagataaaagggaaaacagttgtatctaattttccacccgctgacataccacatgtcgttactgccccaccgtattttacagcagttagtaagtatgaaagtggttttccgccaacacaatcaatcgctcctgcatatagttgtttatctagagcgcggattttttctggttggaatgcttcgcggggaacgacttctttcgcgcctagtttatgtaaaaatgtttctgcgtctttttttcctgaagaagctacgactgaatatcctcttttagctaagatggctgtgctaaggctaccaacgccgccagtagcgccactcacagcgatttttccagcatctggtgttacgccgctaaattccagcgcatcgaccgagagcgctgctgtgaagcctgctgttccaaggatcatagcttctttaagcgataaaccttttggtaaagcgaccacccattcagcgggaacccggataatttcgctatagccaccagaatagctaacaccaaaatcatagcttgttacgataacttcatcaccggccttaaaacgagctgattttgattcaacaacgacaccacttgcatcaattcccggaataaaaggatattccttcacaatttttccatcaggaagtactgccagcccatctttgtaattaataccagaatagtgaacctcaattgttacttcattttctggtaagttatctaaagtagtttctctaaaatgaagtgaagtattgtctgcctctttttcaatgaaaagcgcttgaaatgatttcatttataaattcctccacaactctattttgtgttcatcttcactttacgacttttttcggcatttttcaaggctgtgactggtacaaatccccatttcaaggtaaactatagtagtgaagatgcctatattatgtgtgaaaatataaatagaatttttttgcaagagagggtgagtgcgatggggaaggcactattgattgtgaatccatcatcaggtaaagaaaaaggaaaaacttatcaagggaaaacagaagaagtcttaaaaaaacgatatgatgaagtagaagtacgtttaacagaaaaagcaggagatgcaacggaatttgcgtcttgggcatcggaacaagggtttgacgcagttatcgcaatgggcggtgatggaacgctaaatgaaactataaatggtttagcaatccatgaaaaacgaccagatttcggctttattccgcttgggaccgtcaatgatttggcgcgttcagtaggtataccgctaaaaccagaaaaagcgattcaagcgcttgaaaaagcaaaagcaattccaatggacatcggccgaattggcgatcaatattttatgaacgtattagcgattggaatgattgcgcaagctgttgaccaagtgagcgtagaacaaaaaacgaaatttggttcagtagcatactttttagaaggtctaaaagcgtttaaccgcaatgaactacttcattttaaactagaatatgacgaggaagtatgggaaggtgaggcagcacttgttgtggctggcttaacgaaatcagtcggcggaatggaatcatgggctcctgatgccaaaatcgatgacggttatcttcatgtcgtcgtgttaactaaactcgggctacttgatgcggctaatatgattccgcaattaattcgtggtaatttaaaaaatagcgatggcgttgtttatattaaaacgaagaaattaacgattgatgcaagcggggacgacttaagcattaatgtggacggcgatccaggtccaggcgttccagccgagattgaagtccttggaagccatttgaacatcctcgcacctaaaaaaagcagccagaagcgcttcggtccattcatactgaaaaagtaacagctagcgttgttattataaatgtagaagaataaggagatgagaagctttatggaagaggaattagaagtcattcataaaggtcttgccaatgcgaaaaatggttttaaagcggtccctgggaagctttatttgaccgaaacttacattgtacacaagccaaatgattactttgacgaagaaatcaatattccactgaaccgcgtctctaaaattcgcggagtccgaacaaaaattcttggaaaagagttattatccaacattttagaagtagatatgatttcaggtgtgaagtatcaatttgttgtaaataaacaaaagaaatggcttgaagcggtcagaaaagtactagaaagccgcggtgaaccagaaaaattaggataaaaagaagctggcgcaacaaagtgtccagcttctttttttatgctaaatgaaaggcagttgcaccaattaagttggcatcatttccaaactgacaactaactacagttgggcgaattgtagcaatcggaacactcgcctttacttgatcgacgtagctatttagttcagttataaaatcagggcgttcactcacaccgccaccgatcacaaccatctcaggatcaagtgcatactgtaaattaaaaatacttcgagctaaataataaaacattgtctcaagttcttctttggcgacctcatttccttctgaacgaagcttaaaaacaagatgaccatcaacttcatcagcaggaagttcaaggcgttctgaaatccgagtagcagcatttacgacagtaccaagctcgctaagtgtgtgtccatcacggtccatcaacatataaccaaattcgccgccatgtaaattcgcgccatgatgtactttaccaccacgaataaccgcgccacctacgccacttccaagtatcataaaaataatatcttgtttatctttagctgctccaatccaaacttctgctaaagccgcacagttggcgtcattttccattgtaaccggaagtccgagtttttcttcaagtaattgtttgaaaggaaagttatgtatgtaaggaattgcgctcgctccgccaatgatgccggtttcattatttactgcaccaggacaactaaacgcggcaccttggaaagaatagtcataattagatttcacatccaccaataattgtatcatttcatccaaattatcgggagttgtaaatttacctttttctagtattgcgccttctgttgttaagacgccatacttcactgcggtaccacccatatcaaatgctagtatcgtcataatccgatctcctttttataaaaagtatatacttatcatacttttaaataagacaaatgacaaataaaaagtgaaattactttgctaaaaattaccgtcactttcgagttttgtgctataataaagcaagaatttgaagcgcaggaggaaatggttagtggagataaaggttcaaaaaaaattgactgacggcagaatcgcttttagtagtgaatatggtgaatgcgttggtatatgggccgatgaagacccagaaccaagtagggtttacacggtagaaattacgatacctgatatgattaccgcggaacttttgcatgaaagtgaagaaaaacattgtttattagaaatagatgaagatggcttagttcatgtagttgggaagttggaggactacgaggaagatggctttgcggtactccgtctagaagaaagtattatttgttttgatacgaaattcagcgaagaaatcgaaatgctccatggaagatttgttgaatttgtcattccggaaatagaattaagtaatgttggtatataaattaattggttttaaaagtctataaaaatatagtcaatagaaaaagagacctgcatgagctagatttaaagcttctcagtgtctcttttattttcttcatatcctataatgaactaaatagttataattgattaaagtattagtttgggtagggaggaattggttaatttagataaatttaactagttcgtctagaactgaatcgtatttcacttgactaggcattgttccatcttcaccagctgtattttttaaaagtttaatattacctgtacctaatgaataatctaagtttacaagtgatgtgagattatccttgtaaagaactaatttcatagactctacagattttacatctaacaatacagctaggtttagccaataaaggttatcaacagagatacaatggttctttttatctcggatgctaacttcactatagctgctctcatcatctgttgatttatttctaaacttaatactagtaatatcgcctaaaggattccgaactatattcatggctataatggtttgaatagatgttttaacatagtcagctgtagaaatattctcacttttatttttatattttgcatctattgatttacagaaaacattaataggctctttaaaagaatctagttctttattaactttatttcttacctcttttagtaaattttcttcaatattaaatagtttttctttaaaattacttacatgtttatattttataggattcttaaaagaatcaataaaagtaagagtattttttatgcgcccagatgcagttctaaatttgtcttctgtattaataatattattaatctcttgtgtacgaatatgcaacagttgtcttctgaaatcatattctactaaagttggaaaaataaaattataagtttcatcctcttctttatcatatctttgaagtatttgactatcaattaataatagtctcaatgattccacggtaccaggagttccttcaactagtttatacccacataccttaaaatccttctttgtagatattcctatattttcaagtatttcaatggtatttggaagtttccaattgattaatctttccccgttagtttttaattgctcacttgataacttataaatgtaagaattaaacaaagaatcttcagtaataataaatagtatttcgtcaatttgctcaatagttaaaatttcattttttaccatggcagctagactttttgaagcataatcataggatttattgtttttttctctaaactttcgattatactctttaagtgtatttttcaatgaatactcttcttctttttttgtgcttatttgtttaaatgcatcttggatttttccgattttgataaatgggctaaacaaaacaatatttttgtagattctttcatcatattctatcatgtgttttcatctccttgttgttataattcctccctatttttagtatacacaattaaataaaataaatctttttcgaaagtgcttttctcttttttagttgttcttataattatatcaacaggaaattataagttttattatgaaactgtatcaaatacaatatttataattaagagataataaatatttttttatgaataaattgttagcaaaaacgccatgcttcatttccctaaaaacagggaagtaagcgtggcgttttttagctatatgtagtaaatacagcgagcattttttctaaatctttttcagatcttgcaaagagcatcaaacgttggcgattagtttcaatgactaacacaccgtcttccgataaattcattcgttcgattttagcgtatgggaagaatagaagggcataataaagtcctgtttctttaaaaacagcttttgaactacggaagaaacaaatatagatgaataatacacccataacagcaagtaataccgaagttgagaacggaccttcacgaaagaatgtattggaaacaaataaaagaacaatgattccaacgaaaatatagccatcccaacgtccacgagaacgcaatttgacacttaagactgttttaccttttgaaagaggaattactgcatcattatacaagatatacagtaacgtcaatatgttggcaatgaataaaaagatattagtagcatcccaaaccatttagttatcactcacaatctatcattggtatagtttagtaatattgtaacataattaagtaaataaaagggagaaccggatctaattccggttctccgctttttcattttagttcattatcctagcggtgaatacccagctggtggaagtcctaaaataccagaccagtaacctagaataccaacaacgaatagccccaaaattagccataaagcattgacttttttcttcagaatccacatacaagcgaatgttagcagaagggcaagaagacctggcattaattggtccaagatactttggacagtagttggaacgtctttaccagttttagaatcttctgttgtataagctacaagtggaacatagattgttgtccacttattaacgagggcacccataacgaatagtccgagaatggaagctccttctgttagtttttgaagcagaccgccagacatatcagatacaacatctgtaccttttgtatatccgtagaatacgccccaataacggaaacctagacgaattgcattaaatagtacgaagaataaaattggcccgatgatactaccgtcagttgcaaaacctgcacctaaagcggcaagtaccggacgaacagttccccagaaaattggatccccaacaccggcaagtggtcccattaaaccaactttaataccattgatagcaccgtcgtcaatatcagcaccattggctttttgttcttccatcgcagtagttacacctaagataggtgcggccatatatggatgggtattaaagaactcaaggtgacgtttgatagcttgttccctatcaggtcctttttcaggataaagacgtttaattactggaattactgagaaacagaaacctagagattgcatacgttcaaagttccacgacccttggaagaggttggaacgaatgaaaacgcccattaaatcacttttcgttattttcttttcattaactgtaatttgttcactcatattttttctcccccttccttagtcgtcaaggtcgtcgtcgagatcatcatccgctgatcgtccgccgccgcccccaccgtattgttggatagcttctttcaattgatatttaggatttagttggatatatacgattgctgcaactagccctagaacacctagtgctaccaagttaaaggcagtaaatgctgctacaacaaaacctaagaagaagaaaggcattaaatatttagctgacatcatgttaataaccattgcgtaaccaacaacaacgataaatccaccagctacgttaagaccattaacaataacatcaggaatggcattgagtaaattttctacggcgctagtaccaactgttaccgcaacgataacggctggaattgcgatacgcattgcttgaagtagtagtgcagtaacatgtatccagtcgagacttcgcagattaccttccttaccagctttatcagccatgtgttggaaagcaactgtaattgtacgaactagaattgtaagtacttgaccaagagcagctaaaggaatcgcaagcgaaatacctacgctaatatcttgtccccctgtaataactaagatagtagaaataatagatgcaagtgcagcatcaggtgcaacagcagctccgatgttcatccagccaagcgcgatcatttcaagtgttcccccaataatgataccggttgtaatatcccctaaaacaagaccgattaatgtacaggcaattaatggacggtgcgtttgccactcatccaaaatactacccataccactaatacatgatacgaggaatacaaggattaattgtattgctgacatatatttccctcccaatttttctttaaaatgataaaaaagataatttcaatatgatgactgaataatgaaagcgtctgttacatgagcttttattcatgaatcacccctttaaaggtcttcctttaaacatttgcatatctttctactttaaaaatgaaagcctacttttctttatcaagtagtggaatgagttttactttattatcagaagcgactttacggatttctagttcgattcctttttcgtctaatttgcggaatgctgcttcgtctgttgcatcgacggaaactgcattggtaatcatgtgtttaccttcgcggaatgccatgccaccgatattaacggttgtgatattgataccagcttctactaaagttaatacatctgttgggttagtaaataaaagcattactggagtttttgcgtatttaggattattgtatacacgaattcctttttgtacgtcaacaacactagctttaactcctggaggtgctacttgtgtaagaagggttttacgcacttcatcctttgctacatcatcacttataacaataatacgttctacctgtgtttcttttgtccaaactgttgctacttgaccgtgaattaagcgatcatcaatacgtgctaagcgaatttccattataaatcgtcctccccgacttcggtttctttttttggtaatgattctttcagtgacttaacgccatcacttcctgctgttaaggcagtttttactagatctttttgattacttgcagcacgcatggagagtgtttcaagtaacattgggatattgacgcccgttataacgtccatattctcttctggaagggcaatttggctagaagcattataaggactaccaccaaataagtcgaccataaaaataacaccttctgaagtatctaatttgtctagtttttctttatatttggtaataagcgtatcagtgttttctccaggaacaaacgtaataaattcaacattgtcctgtttgccgataatcatttctgctgatttgagcaattcacgcgcagcttcaccatgtgtgccaataataattgcaactggcataagtatctcctccttaaagcgtggatatgaagcatccattaatactaacgcaaaaactgtgccaacttttctgtattaaactaccccctttattaatagaagtggttcaaggcttctgtaagcgtgtactaaaaggtgaataggagcttaatacgctatataactacattaatacactaaatatttatcttagacatacatacaacattaccctaaaaaatgtagcagaaaacgcaatagttgaaaataaaaaaagccaacgtaacaattttgttggctttctgatgtttatgaaagtacttctggttgaatttcgttcaaaatatcatacaaataacaaagttcatcatttgtaagctttaagttcattttgtagatgacttctttatttgtttgttctaatgcactgaaaatatctgtgtctagcatggtttttggttcgcggtagactaaaccatcatttaaaaccattcgttctagagcgcatcctacatggatgagtaaattaattttaaaagtattatccagtttgtaacctagttttttctctaatacagttgcaaaagagctcagaatttcgattgttttctttggattaagataggttagaaattcattaaggctttcttcgataatttcttttgcgattcgaccagtttcgccttttttaacaataatgttgcgttgtttaactaggctaactaattgttcttcaccgtcaatgccaaaaagtcgttcaagcgggatgaaggggatttggatttttggatcttgaattccgacagccattaaaatatcgttttcttcttgtagctgttctaatcttgtatccatttcatgtaaaccgattgggatgactttgatggcgtcggttgtgatagtatctaaaatattttcaataaatagttgaagtttttcagcagttccttcgccagtcgcacaaatagtaacgatagcgtgtggtttttgattggaatcgagtgtgtcatcatcagaattataacccccgtagccacggaaatctttcagtgaatcgtaaatactatctagctccatatcaagaatgtttgatttacgtacggcttcgataactgtcgcggttgaaaccatatcaattgagcgaaccggaatgcccgtacgttcagaaataactggagcaaaacttgtgagtgagcccatatcaacaagtagaagtagaccacgtcccatatccatttctttcgctcgttcagtcagcttatccagcacgattttcggactttggtcaagcggcatatcaattccttcgaccaatccttcgccgagtaattttttcgcaacgctaaccatactactagcggtattatttccatgagtagcaacaagtacagcaacgcgcgcattttcttgttctttaagcaaggagctaatgagaagggttagatacattacttccatatttggaacgcgaatgtggaaagtagcttcaatatcatctttaatttcacgagataattcgtacgcttcaggttggtcattaactacattttcgatattcgtgtattttaacggtttgttactttcaatgcgtttaataaaggaagtcaagtgcagactaaaggcgagtaagaagcgctcatttaactttttgcctagctgatgctcgattctttgttcaataccttctgcaaaattaaggatttcttcattcacgatttttaaaatattttcgcgattgtggatggtgtttttgaatttgttatagaaattgttgaggtgaatatcaatatccatcttgataaatttcttaatatcgtcatcttctacaccttgatccattaaaatagaagctttatcttcaataattttataaagattgaagtttggctcatattcgtcggaagtaattaacgtgttgtttagctcggggaaaatggtcgtgtaaggctctagatattccgcgatggcttgaagttctttgcgccgattactaaagtggaaaaagccatctttaatatttatcggtaaagttttaaaatcgattaaaatttcatcgtctttatcaaaactgtttaaaaaaccttgcgcacaaacgagttgaatgtttgatttcaactggccgatattgccgtaagtagtattaccaatcagcgctttggcagcctcatcttcaatccgaatcggtttatttacacggtgcgcctcgctagaaagtaagtatttaagcagttccactcgttcaaaagcagttctttcttctaagcttggtaaagtaataataatcggaatacgacgcataaatgtttttaataaggaagattccggattttctgtcgttgctccaataattaaaacattggattttcgagttcggtcagtttcgccgagtttgttgtaggtaccagagtccatcagataaaaaatcatttcttgcccttcaggagggagacgatgaatttcatcgaggaataaaatacctccttctgctttttcaacgagtccgcctttatcattttccgcaccagtaaaggcacctttgacatgaccaaaaatatgggacatcaagagttgcgggttattgtagtaatcggcacagttgaaaataataaacggggcatcagccggcaatcgtttggcatgttgcgagaaacgatacattaagttagcgaacaatgttttacccacaccagtttgtccaagaatcattgtatgtaagccgtttggtggataaagtactgctgctttggcttgttcgacaggggttttaagactatcatttacgccaattaaatcatcgaaagggcttctctcaacgatacttggctttaaaattttcagaagtgcttcacaactttcaaattctagttcgttatctgaaagcacgcgcccaatttcttcttccaccgttcgtttcggaaaataaagcactggtcgcccaacgattttaataattttgccttgtctatggagttcatttaattccatgctgacgttatttcttaaaatatctaatgtttctgaaatagtagttgcagtaaagccttcattattttctagttgctcacgaatcgacttagttgaagggttttctaaaataaattcataaatacggtcaatacgcttcaattataaaacctccaattagtgtattgaaaaacggagtgtgtattgaatgatgctaatacactctagaattctgtatttatcttagcattcctagtgaaaatgtcaatgattatttgcttaaaatcaaattgactccccgcgcggatagtactattatatagaaggaacaaataaaatcaatgaggtgttttcataatgtcaaaagtactatttattaaagcgtcaccacttccaaatgaagtatccagaagttcgcaagtagcagctacattcatcgacgaatacaaagcgaaaaatccgtctgatacagtagaagaattagttttatataatacagaagttccgttattagatttagaattaatgacagctggccgcgaattacaagctggtaaagcatttactgatttagctccagatgtacaaaaaagattaaatgcctacaatgcgcttactgagcaattcttagcagcagacaaatatgtattcgttttcccactttggaaccttggaatcccgccacttttaaaagcttatgtagacacttttgttattgctggaaaatcattccgctatacagaacacggcccagaagcacttttaaaaggtaaaaaagcgattttgattcatggtagcggtggtatttattctgctggaccaacaagttcatttactcacggagaaccttatttgcgcacaattttacaatttatcggtattgatgtagtaccatcgatttttgttgaaggtattgaccacaatccaagcaaagaagcggaaatcgttgcagctgctaaagcggtagcgcatgaaagtgctgctgaattctaaaaaagtttgtgaaaaatagtttttaatattaaatgttaatatagtattatcaactgtctagaccaataaaaacatataaaaagattgctaatccctttataaattggtaaagtagagaagtagattgatggataaagtgctgactcaactcggcactttattctgtttagttactcgaaagggatgaatagagatggaagagcaaaaagaagaattgcaaagaggactgaaaaatagacatattcagttgattgcgattggcggagcaattggtacagggctttttctaggagcagggaagtcaattcatttagccggaccttctatcatgttagtttacttaattattggggctattttattctttgttatgagagctttgggagaattattaatacataatccaacaacaggatcttttaccgaatttgcggaacaatttatcggaccgtgggctggctttattactggttggacttactggttttgctggattgtaaccggaattgcagaaatcacagcagttggaatgtacgtgaagttttgggtacctgatttacctcagtggattccagcactaggttgtgttttaattttactattatttaacttagctacagtcaaagcttttggcgaaattgagttttggtttgcgattattaaagtggttgttattatcgctttaatcgtaatcggatttgtacttgtatttattggttataaacatggaactagtacagcatcattttctaatttaattgattatggtggctttttcccaaatggagtagctggatttttacttgcgttccaaatggcgaccttctcgtttgttgggattgaacttgttggggtgacagcaggagaagcagatgatccagagcggacacttccaaaagcaatcaataatattcctatccggattttgattttctatattggtgctttattagtactaatgtccatttatccgtggagtaatattgatcccgacacaagtccattcgttagtgtatttacgatgattgggattccggccgcggcaggaattattaatttcgttgtattaacagccgcgatgtcttcttgtaatagtggtatttttagtactagtcggatgctttatacactttcagcagaaggaaaagcaccgaagaaaatgcaccacttaagttcaaatggagtgccagcaaccgcgttaatcacttctacagcatgcttacttatcggtgtatttttaaactatattctaccagagcaagtatttattttagttacaagtatcgcaacgatttgctttatctgggtttggggcattattttagtggcacatttacgtttccgtcataaacatccggaaatctctgccaaaagtaaatttaaaatgccattatcgccatttatgaactgggtgagtttgattttctttgcaggattattgattattctaggatttgcagctgatacacgtatcgctttatttgtaactccagtatggttcttaattctagctatagcttatcaaattttaaaagcatcaaaccgaaagacaaaaattagacataattaacgagaatacagtcattcgctaaagaaagcagttttagcgggtgactgcttttttttgaagccaaaatagctccgcgaaattctttacaaatcaaaaaaatcgtgtagaatgataggtgtttagaggttttgatgcctttacgcatttcgagtgagtactcactcatttttataaatgcgtacatatgtgaagcagtatacaattaacgaatgatatgtgaatttctgtacatatcaagtagggcgtaacgaaagggatgagaaaatgattcatgcaggtttagatgtgggatcaacaacagcaaaagccgtagcacttaacgaccagggggatattttatttcaaacgtaccgaagacatttttccgacattaaaaaagtaacactagaaatcatgcaagatatgcaaaaaaaatgtggcatgaccgaaatgacatttaaaattacagggtcttcagggcttgccatctccaaatttttgaatgtaccatttgtgcaggaagtaattgcttgtacagaagcagtagaacaggtcattccagagacagatgtagtcattgagctcggcggggaagatgcgaagattatttatttcagcggtgggattgagcagcgaatgaataacgcgtgtgcggggggaactggtgcttttattgaccaaatcgccacactacttcaaaccgatccaactggtttaaatgaactagcgcaaaatgcgaatacgatttatccaatcgcttctagatgcggtgttttcgcaaaaacagacgtgcaaccattacttaatgaaggtgctagaaaagaagatatagcagcatctatttttcaaagtgtcgttacacaaaccattagtgggctagcttgtggacgcccaatccgcgggaaagtagcttttcttggaggtccgctaacgtttcttgatcaattacgttatcgttttacagaaacgcttaaaatgaaagacagtgatattatcgcacctcaaaatgcggaatattttattgcgcttggaactgcttttacagggctaaacgatgtaccgataaaagtggcagatatgattaatcgtctgtctaacatggatatgacaacaatggcgaccgatacggttattttgccagcactttttgaaaataacgaagacttagaagattttcgggcacgtcataatcaaatgaaagctaaacgggcgaagttggaagagtatgaaggcgacgcttatttaggaattgatgccggttcaacgacaacgaaattaattttaatgagccaaaccaacgaaattttatactcattttattcaagcaataacggtaatccacttcaatctgttattgatgcaacaagcgatttatatgaaatcttaccagaaaaagttcgaatagcgcagtctggaattacaggttacggcgagtcgcttattaaagccgcacttaaaattgatgttggcgaaatagaaaccgtagcgcattatcgtgctgctcgtgagtttttgccggatgttgattttattttagacattggcggacaagatatgaaatgtatgaaaattaaaaaaggggcactggatagcttaatgctcaatgaagcttgttcagccggatgtggttcgttccttgaaacttttgcgcaaacacttaatttatccattgaagaattcgctgccagagccttggaagcaaaagctccagttgacttaggttcgcgctgtacggtgttcatgaattccaaagtgaaacaagtgcaaaaagaaggcgttagtatggaagatttatccgcgggtctcgcatattccgtcgtaaaaaatgcccttcaaaaagtaattaaactccgtagcccgaaagatattggtgaaaaagttatcgtacaaggcggaactttttacaatgaatccgtattacgtgcttttgagcttttaacagggcgggaagttgttcgaccggatattgcgggaatgatgggggcttatggtgctgctttaatcgccagggaacattatgaaactggcgaagtaaccgagatgctcgtactggaaaaattacgtgaatttagtgcagatacgtcgcaatcgcgttgtaacctttgtagtaacacatgccagttaaccgtgacaagatttggcgatgaccggatgtttgttagtggaaaccgttgtgaacgcggggaacgtgtcgaaacaaaacgcaacttactaccaaacttatatgcgtataaattaaaacgtacctttgattacaaatcactgaaaaaatccgaagctacaaggggcaccattggcataccgcgtgcgctgaatgtttttgaaaactatccgctgtggcatacgattttaacaaacttaggtttccgtgtcgttttatcttctaaatcgtctaaaaacctgtatgacaaaggtatcgaaacgattgcttctgaagcggtttgtttcccagccaaattaacacatggtcatattatggatttaattaagaaaaaagcggatcgcattttctatccatctgttgtttatgaaaaaccagaatttggcgaggcgacaaataactttaactgtccagtggtggccggttatcctgaagttattcgtgtgaatgtggatgctttggaagaaaaaaacatcccgatgattagtccatttttaacgttagataatgaaaaagcattaatcgaacaaatgagtctcgcattcccagaaattccagctgctgatatggaaaaagcagtccaagctggattagaggaagcagaactttgccgtaaagatattcaagctgaaggagaagcggcacttacttatattaagaaaaataaaattaaaggaattgttcttgctgggcacccgtatcacattgatccagaagtgaaccacggcattcctgaacttattacgatgaatggcatggcggttcttaccgaagattcaatttctcatcttggtgaaattgaccataaactccgcgtcgaaaatcagtggaaatatcacgcaagactatatcgcgcagctagctttactgctaaaagtgaagatttagaatttgtgcaattgacgtcatttggttgcggacttgatgcaattacgacggatatgtgccaagaaatcattgaaggtcataataaagtatatacactacttaaaatcgatgaaatcaacaaccttggtgccgctcgtattcgcgtacgttcgttaaaagcagcaatggaagaacgtgagaaaaacaatgtgaaaccaggaattatggcaaaaccaaaagaacgaccattatttacaaaggaaatgaagaaaacctatactattttagcgccacagctagctccgacccattttgaaatgttagaagcagcttgtaaagtgggcggttataacttggaagtgttaccagcagttacgcctcgcgcggttgatgaggggttacgttacgtaaataatgatgcatgttatccggcgattttaactatcggacaaatgatggatgcgctgaaacatggtgattatgatgtgaataatttagcggtattgatgacgcaaacgggcggaggatgccgggcaaccaactatatctcgatgttgaaaaaagcacttggagaagctggccttgaccatatcccagttatttcgcttaatgctaatggtttagaaaaacaaccaggttttaaaatgacgccaaaagttctcattcgtttcttggctggaattagtttaggtgatgccctcgaccgaatgctataccgaaccagaccatatgaagtcgaaccaggcagtgcgaataaactattccgtaaataccttgatgccggacgtgctctaatggaaaattattccttcgtagcatataaaaaattagcaaacgaaatggttcgcgcttttgacaacctaccaattacaaatgaagtgaaaccaagagttggcgtggttggagaaattctcgtgaaattccatcccggggctaataataatattgtcgatgtcattgaagacgagggcggagaagcggttgttccagacttaacagatttcattttatattgttgttatgacgatcattttgcagcgaatactttcggacgttccaaagtaaaatcattcgcaaaacaaagcgttgcgattccgctcattaatcaattccgcaaaccagtgacagatgcgctgaagaaaagtgaacgctttgaagcaccagcaagcatcgaatctatcgctgaaaaagcgagtcaattactatctctcggaaataaaatgggtgaaggctggttcttaacaggagaaatgtttgaattactcgatagtaacgtaccaaatatcgcgtgcttacaaccatttgcttgtttgccaaaccatattaccggtcgagggatgattaaaggactcaaaaaaatgtatccagaagctaacatcatgtcgattgactacgatgccggatcaagttctgtgaatcaactaaatcgaatcaaactaatgctctccatcgccagaaaacaactagaaacgacagaagttatcaccgaaaaagaaaccaatacacgatttaacccaagagaaaaaatccttggtaaagcaaaacaagtaagagaaagcgccccagtcgaaatgattggaaacaaagtgaaacaagcgcgcgatgcagatccagttggcgcgatagctcagaaagtaaagcacgtagcttctagcaatgagcatgtccaaaccgataatgattaattaaaaagccgcccatccaacgggcggcttttttctattcaatagttaaattcttcttttcacagtaatatcctttaccacccacaaacactttttctatctcatcattattactcaatgctaaattaactaagacttcagaaggcgagtccaaagaatagccctgttcaaacagataattctcttttcgcaagtaatgatttttataaagataacatgctaaagcagcattcgaagtccctgttgctgcttcttcattaatgtcgtatagcggggcgaaattccgacaaataattcggtcgttattaaaagtataaagatgcattccaacgacatcataagtcgcactaacttcccggatcttttcaaaatttggctctaaggcatgtaaatctatttcacttttgattggaattaatatatcttttaaaccagttgagacaatttgaacttgatagtgtgtattaaccttgtttaagtcaaagcattcagttagctcatttggcgggattatatcatagaaatttgggcgattttgctccatgaagatagtaccgtcttttaatgtaatagtaagaacaccgctatttgtttcgattgtatattgattcttatgaagtttatttaaatgcatcaatatcgcaaaagaaccaatagtcgcatgcccgcataaatcaacttcttcttttggtgtaaaatattctaatttataatcggcaattttagaatcggttacaaaagctgtttccgcatagcctagttgttttgcaatcgccattttttgttgggtagttaatgttggttcatttaatactacgccagctttatttccgccgttgttatttttgctaaatgcgcttgcaacgtatacggatatgttcataaaacatcattctccttcgttaaacttaatcttcggtaatcattgcaaactccgcacgcactactttttttaagtcaaaaggggctagttcgatttgaagtcctctttttccggctgaaattaagatagtatccagctgttctgcactattatcaataaaagttggaaatagtttcttcataccaataggagaacaaccaccgcgaatataacctgttagcttttccaacgtatcaactggaattaattcacattttttattcctgctaatcttcgctaagtgttttaaatgcaaggttttatcagctggaatgcacgcgacgatatttcctgttttatcgccagtaagaacgagcgttttaaaaatttgcgcaggattattccccgtttcttctgcaacatgaagtgcatcaagcgcgtcttcactccattcatactcacgtaattggtaactaatcttctgtttatccaaaattcgacacgcatttgtttttttattcaattgtttcacctcaattaattttaatttatgtacaaattatgacacttttagttaaatagttggcttttatcgctgctttctgtacaatgaaatggaattcaaataagaaagggagatttattaatgaaaaaagggttatttagcatggttcttgtgcttgcgatggtacttgttttaagtgcatgtggcggcgcatcaagggttgaaccaaaaaaagcaggagaaatcacagttaacgccgttgtttataataaagacacggataaagttaaagacgtatatggtgaagatggttctaaattcgaaaaagaatttgaaactagttttaaagaaagcttcattagtacattcactgcaagtttttcaagtgatgttaacttagacaaacaagtggatgatttctataatgcacttcgtaaacaagtaaacgaaaaaacatcgtacactactaaagtaacaaatgacgacaaagaaagtccagaaattcagttcgctgttaaaggcctagacatgaagggcgttcaaacagaattagtagaagaactaacaaaagcagcaactgctgatccatcaattgctacagatgatcaaaaaatggctgaaaaaacaatggaaatctacactaaagctgttcaaaatgcagatgcagtatcagaagcaaaaacaattacacttaaactaaaagcagatccagatgatgattcattatggaaaatgcaaaacgatatggcattcatgcaagaattaacaacagcattcttcatgggtggcatgaactaagatttttatagacactagcaactttcgggttgttggtgtttttttgtttttagcaatagatgttataattgcattaattagttgactaggagggggcacatggttacacttaaagtcgctttagtacaacaacaagcagtaccaaatgacaaagaggcaaatttaaatttatctataaagtatataaaagaagcgcaccgaaaaggagccgatttagtcctttttcccgaaatgtggtcaaacggctacgcgccaccttttgagacagcctttgatgagccaatggatgctggttttgaagaagagcgcacgcggtggttggcagatgcagtagcacgagatagcgcatacgttactactttaagaaaactcgcgaaagaactaaacattggcgtttgtgctacttatttatctaaaacaaaacaaaaaccgcaaaatacagctattataattgaccgaaatggagaaataattctagattacgctaaagtccatacgtgcgatttctctttagaagcattgctgcaaagcggggacgaatttaacgtttgtgagtttgatggcataaaacttggtgtgatgatatgttacgacagagaattcccggaaagcgccagagttttaatgttaaaaggggcagaaattatccttgttccaaatgcatgcgatatgaatccagctagactgaaccaactaaactctcgtgcttttgaaaatatggttggcgttgcaatggcaaactatcctggagagaaatggggcagatccactgctttttccccgattgtttttgatgaaaatgaggattaccgcgataatacgattattgaaacagacgacgtttcagaaggtatttttattgctgaatttaatttagacgagattcgaagttacagggaaaatgaaacgtggggaaatgcctaccgaaaaccgcaaacctatacagatttaataagtttagatgtaaaagaaccatttaaacgaaattaaaaaaacagagacgagcgattctctgttttttcttttaaaaataataaagccccgcaacaatcagcgcaacaaccaaaatccccggaaccagattcgcgacccgaattttcgttaaaccaagcaggttgagaccaatagccaaaatcataattccgccagtagccgttagttctttaataataagtgccatcaggtctgctggaatgaattgatcaatttgtgttgcaaaaagcgcgataaggccttcaaataaaaacaccggaatagccgagagcataacgccccaaccaagtgtcgtactaagaagaagggcgataaatccatccatcactgatttcgtataaagtacatcatgattaccacgaatgccactatcaagcgcgccaataattcccatcgcgccaatcacaaaaataagtgtagcagtaacaaagccttttgaaacattactttttccttttgcaccgactttccgttcaatccagtgcccgagttgattaagatggtaatctatattaagccattcaccaataacagctccaaaacaaatacttaaaataacaataagcgagttgctcgttttaaatgccatttgaataccaaggacgataacggataaacccatccctttcatgacagtatctttcatacgttcagggatattatgtaatttcatgccaattatagagccaattaaaatccctagcccattaactagcgcaccaagtagaaccattttcttcctcccttttttgcatatagcattagtatacaggaattttctggcaattgggagtattatttcggataaaaaagtcgaaggaagcgttttgctccttcgactttcgtgttattttccagccactgtaaatcgttcatttaagtggtttggtcgctcaatctcatctaaaacggcgatagcataatcttccatgctgataaaactattaccatcactaccaaataaaagatgatctttcccagattgatattcgccagtacgttcacctggctcaaacatggcagaagggctaatgtaagtccaactaaactctgccttatttgcttttaaatgttccaactgttttgcttgagcacgagcagttggatagtatggtgcttctctaagtccttttgattctaaaagggtgttaccatcttcatcaatttgaagacttgctgccccgccaacgacaattaggcgcggagatacagttccatttaaaacagaaatcagatgatcaagcgaatccacatgtttttctgcttcatctgggctgacaccataagcatcaacgacgacattttgatcagataaatctgaaagcgttaaatcaaaaatatctttttgtaaaatattaatatctttatgcgtttgcgttattttcccagcatttcttacaatagctgttacttcgtggccacgactttttgcttcttctaaaattcttgaaccagctcgacccgtagcgccaataataccaattttcatgaaaaaagccccctattcatttttatggaatagcttctcgcttgatagaagaattattcccgaaagaggggaccggaaaacatttttttatgattgttcttttgcagcggttgctaattgtttgatttttgctgcggaataaatgtgtgaaatcgtgaaaataataagcgccaaccaaatgaacatgaaggcaaataattggatgtggtcaaaactttctttgaaaagtaagacaccaagagcaagcattaacgtaggtccaatatattgcaagaagccgaccattgtatagctgattttcttcgcagctgtcgcaaataaaagtagtggaatagcggtaacaatcccagcgccaactaaaataatatttgtttgcgcggcatactgcattaatccattcgtcgcgaaaaagagtacataaatgagtgcgaatggcgtgataatcatcgtttcaagtgttaaaccagtccatacggaaacggaaacgacttttttaatcaacccataaagggagaaggaaacagccataccgattgctgcccaaggaacggacccaagatgccatgtgagaattaagacgccaattgttgccgagataactgcaataatctcaccgcgactcaatcgttcttttaaaatcaccgttgcgagaagtacatttacaagtggatttatatagtaaccaagacttgcttcggtcacatgcccgctattcactgtgtaaatgaataaataccagtttccagtaactaaaaaagctgccgcaataatggcgataagcgtttttggtttaagcaaaacgtcctttgtttcttgaaaaaccatcgaagtctttcgtaaacaaacaatcaaaaatagcataaaaataaaagaccatataattcgataggccaaaatctccataggagggacatttgtggctagcttccagtaaatcggaaggacaccccaaaatacatatgcgagagctccggcgataattccacctagctgcccattttgtttattttccatagcgatgttagcctccttttttaaaaacaatagaactattttatcctaaaagggagaataaagctacaaaaaaaaccacgaataggctagctactcgtagtttcagtaattatttacttgcttcaatttggatgtttaattttacttcgtcaccgataagtacgccaccagtttctaatgcagcattgtaatttaggccaaagtctttacggttgaatttaccttttgcttcaaagccagctaccatgttaccagtgtttggatcttttccagtaccttcatagcttacttcaagtgtaagaggtttagttacgtcgcgaatcgttaaatcaccagtcacttcgtattcatcatcgccgtctgctgtgatttttgttgctgtaaaagtaacgtttggatatttttctacattaaagaaatcttcactttttagatgcccatcgcgttgtgcttggcgagtatctacagaagctgctgatacagagaagtttaattttgctgttgttaaatcttctggatccatttcaatatctgctgtgaaatcgctaaatgcaccttttacttttgataccatcatgtgttttacttgaaattcgattgaactatgcgctgggtctacgttccatttttctactgtcattttttcattcctccaaatatgtttttttataaaagcattctcttataatctagcctaaattgtttgatattaaaccttagaaaaaatacttttacacgttagaaaagcaattgcttaactgtttataagtaaactatatcatacttacttttaataagcaactataaaaacgtattagaaatatatttttttcgtaaatatgattgagtttttctgataaagtgcgtagaataggtggtaagaggaggttgaatgatggaaaaaattaatacagatacagaaaatattagtgaattattaaaaacttattggtcaatacagcggatttcagcgggatatgccgatcaaaatgcggctagcttaggactaacaattcagcaacttgcgatgattaatgtgatttatagcacacctggcatttcagtggcggatttaacgaaacgattaataattactggaagttctgccgcagctaatgtggacgggttaattagcttaggccttgttgtaaaattaaacaaaacaatcccaactgataatatggatttaacactaaagctttcaaaaaaaggagaagacttatccaagcgctccactgcaaacgcttttatgtacaaagcgatgatgaaagtatttgaaaatttgaccgaagaagaaatagaagaattaatccgcttaaataaaaaagtagaaaccttactcaaaaagagtaaataaaaacatctcctgtatcattcaagtaaaaatgaatgaacaagagatgtttttttatttttgatcaaatttgcagtcttccagtggaatgacttttgttttatttgtaaatttaaatgataaccagaagataaggaaaatagggaggccgatataagaaataccgattttttgccaccaagcaggattcgtaaattcaggttttaaaaatgccgcgtaatcttgaccgacaataactaaaatacataagattaaagctaaaatcggaccaaaagggaaaaatttggctttatattttagttcgttcaaatcatggccttgcttaatgaaagctttacggaatcggtaatggctaatagcgatgccgacccaagcgataaatccggttaaaccagaggcagaaaggagccatgtataaatcactgtcccattttcggtaagcgtagtaatgaatgtcatcgcaccaacaatggttgtcacaataagtgcagccatcgggataccacgacggtttactttgcctaagaatttaggagcttttttatcacgagccattgcccaaagcattcttgtggaagcgtaaaggcctgaattaccagcggatagaacggaagtcaagataaccgcgttcattaccgaagccgcaaaagctagcccagccttttcaaatacgagcgtaaatggactaatcgccacatctgttgcctcagcgctcagtaaattcggattagtataaggaataatcatcccgataatgaaaatcgcaaaaatataaaataacaaaatccgccagaaaacttgcttaatcgctttaggaacacttttttctggagtagcgctttcaccagctgcaatcccaaccatttcagtaccttggaaagaaaatccagcaatcaagaacgtgcctaatatcgcgaaaaatccacctttaaatggtgcatctcctgctgtaaagttagaaaagccaatcacttcgccgccaagaataccaacaattgtcagcacaccgacgataagaaaaataataacagtcgctactttaataattgagaaccagtactctgactccccgtaagcttttaccgatagggcatttaacccgaaaatcaagagtaagaaaatcgcactccagagccaagcaggcgtattcggcaaccaaaattgaacaataatcgccgctgttgaaatatcgaccgcaagcgtgatcgcccagttaaaccaatagttccaaccgagtgcaaaaccaaaagctggatcaacaaatcgactagcatacgtactaaatgagccggaaacaggcatataggtagccatctcacctaagcttgtcattaaaaagtacaccataatgccaatcgcaatataagcaactagcgctccaccaggcccagcagtatgaatcgcatttccacttgctaaaaataatcctgttccgattgaaccaccaattgctatcatggatagatgccttgtctttaagtcacgacgaatctcgccatgtgtttcttttttcactataaatctccctttcttttatcagaggaagtgcgcaaaaaaacagccaatctgcaagaaattggctgttacgtattttaccaacatcattttgtcagatagcacacctataagaaatttcgacaaattcttatagcagtccagctcctttaggaaactgtcccaacaactatttcgatacaaagaaaaaatagtcacttcggcgattaacctgttcgttttttgtcattggcgtctttgtttcgcctcgaaaaaattactagtgcatctcgcaacctctacctcaccatttggatgagggtttatatttgattatttacccataataacggaaaatgggttgttttgcaatatgttttagtaaaattgtagtgcttctttgattgtgctataagtagttaaactagatagattttcttggtagcgcattaaagtcatcgcaaatttaggtgaaattccggtgataattagttccacacctgttagcttcataaagccatggaacttcaaagattcattacagcgtcttcattaaaatcagcaagaccagaaagatccataattaagtaatcttctttcccattatccatgtattcgctgacataatcggacatgtgctgaaaccggtcgtgggtcaaggaaccaattagcggcagcacacaaatattttccttaatgggaacaattggcgtggatagtttttcgatttcccataaggatttttcaagttccagttgataattatgctcggtcgtcacatctttttgaatgccgacaaaatatagatggtcattatcatcataaatcggttcaattgtcagctcattcataaatgaagtgccattttttcggtaattttttagtagaacgttcgcagttgatttttcgttaatggcatgacggattttcgcaacttcctcttgtcagtatcatctccttggcaaaagtgacaattagagccaatagcttcttctttagtatagccagtaatattttcaaagcctgtgttcacaaaaataatcggattgtttttttgctcaggatctgtaataattactcctacactagacaaatttaatgctttcaaaataacatcgaattttggataagcgctcatctgcgtgtttctccccctttgtaaatacatacctatcataacacgcaaaggaatgaaaacccaatgtctaatttgtgaaataaatcgaaagtaagcaactcacgcgaaaacttagtaactcaggtgtataatagagttagaggtgattggttatgtatataacatttacagatagcgccataaatcggctaaatgcgcttcgttcaaatctttccggtcagttgcatttatactacgatacagaagggtgttcctgtgaaaacagtggtatatttacccttcgattagtagcagagaaaactcctgaagatgatataatagattcaaatatcggtcctgtattaattaagcgctggacggaaatatttctagaagatgcgttaacgatcgattataatgacacagaaaaaacgctggtattaaaaagtgatggacagtattataatcgtaatttgttgcttgtgacagataacgataaagtaattagttgtccaattagttaaatagcgagttagcctagaataaattttattctaggcttttttatgaaaatttcatgagaatgtggtgaaactttcgacatatagttacgctggcttctgatttgtagtaacatggaataggaagtttatacatatggaaggagtgtcatcatggaacaaccatcagtagacgaactaaagcattggcgaaatgttatgcttcttcaccgttttgctctagaagaagtgaacacgaaacttaaaatattgaatgaagaatttcaatttattcacgactataatccaatggaacacttgaaatcacgggtcaaatcactcgaaagtataggggcaaaactggaaaagaaaaatgtggatattacaccagaaaatgcacttaaatatgtacacgatattgcgggaattcgtattacctgttcttttgtatccgatatttttcgtattcatgaaatgcttgccggccaaagtgatataacgattaaacgagtaaaagactatgtgacaaacccaaaaccgaatggctaccggagtttacatttattatgtgaagtgccagttttcttaacaaatcgttcggaaaaaatgacggtggaaattcaaattcgaacggttgcaatggatttttgggcaagtttagaacataaaatttattataaatatcaacaagaagcgccagaagaattagtaaaagaattacaagacgccgcaagaatcattacccatttagatgaaaaaatgaaaaatttaaatgatcaaattgataaatataagaatgaaaaagaaaagtaacttaatctaacagctttgtttctttgtaaagtgagcaaatacaaaggagctgggctgttttatatttgcgagatagtttattttgcttcataataatataggagaataaacgaaaggggacggtacatattggagatatttttatatgttttagcattacttgtagctatttttatttctaatttgcttaatcggtttgttccctttgtttcggtgccgttaattcaaatcggacttggtgtaattatcgctattatgccaattacgtttgatttacaactcaatccagaactttttcttgtaatgtttattgcacccttgctatttaatgatggcagacagacggataaagcggcactttggggaatgcggatgccgattttagtattagcgctcgggcttgtgtttgcgacggttgttgtgattggttattttgtccactggatgattccaaccgttccgcttgcagcagcttttgctcttgcagcagctcttgcgccaactgatgctgtagccgttagttcactttctgggcggattaatttgccaaaacggataatgaatttactagaaggagaagcgcttattaatgacgcttcaggactagttgctttccaatttgcgattgctgcgatggtgacaggcgtatttagtttaatggatgcgagtattagcttttttattatcgcgattggtggtattttagtagggctcgttttaagttggttaaaattccgattgttaaaatgggttcgcggtcttgggatggaagatgttacttttcacatgcttatccaaattttaacgccatttattatttatttagcggcagaggaattacacgtttcaggaattttagcggtagttgcagccgggattatgcattcaatggaacaaaagaaaatggatccacaattagttaaattaaatgttgtttcgcaaagtacttggtcggttattatttttgttttaaatggcttagtgtttttactgcttggtacgcaacttcctgcgattaccgaggtagtatggaatgattccggtagtagcaatttacaagtaattgcttatatactttctatcacagcagccttgattttactgcgcttcttatgggtttacatatcatggagcattggcgcaaaacaaaggcaaaaacagaataaaaagacacagctacctaaatttagaccagttgtgctcacatcgctttctggtgttcgcggggcagttacgcttgccagtgcgctcgcaattccgtttttcttagatgacggatcactatttccgcagcgctcactgattatctttatagcgtcaggtgttattctgtgtacgctagttattgcgacgtttatcttacctttactagcaaaaagtgaagaagtgacaacagaagatgaacgagctgaaattgcgacacggattcgaattttgagaaacgtgattagagaattaaaagaacagactttaccagaaacgaaagccgcaacagatgaagtaattgaagactaccgcagacggatttatgatttacagcaaaataatatttcgaatcgaggcatggatgaaagagaacgggcgaaacgattagaaattatccagtgggaacgtgaaaacacccaaaaaatgaccgatgaaggacgcattgttgctacagatagctatcgttatcaacactatcttaatatgatggaacaagcgattaaacaacgcttccgaacaaaaataaaaacagcatggatgttcctttatcgtctaataatgcttatcattcacccgaaaaaatggcgtagaatcacccataaagtgaaaaaaggtatttctaaagatagcgaacgattccaagcaattcgccaactacgagaagaaaatgaaatactcattatttctaaactcaaagaacaattaacgaaagaaaatgctgatattattggaccgttaattacggaacacactattttcttagaacgcgtgagaaaagagcacagtccaagaggtaagcgagcaaaattcgaacagaaaaaacgcgaagtccaagtagtggctttccaattagaacgagatattattcagaatatgtttgaaaaaggcgggatctcaagggaattagcccgggacttacgccaaaatctcaacatgattgaaacgtatttatatgatgactttttagaataagagaagaccttaaggacaatgcaacgttcttaaggtttttttgttttaaaatgatttatctatcgtagaaaaaaatcaaaaaaactattgtccatggtaaggctttgttgtataatgtagcttgctgtaagtaaactttgtgtttaatattggtaaacttctatgacttgaggtttactatcactaaacttgagagaaaggacatagacatggatattggcaaacgcataaaaaatcttaggctcagtaagaatttgacacaagaagaattaggcgaacgaacggatttgacgaagggatatatttctcaactagagcgagatttaagttctccttccattgaaacgttatttgctattttggaagtgttaggttctactccgaaagatttctttgatgaagaagaacacaatcaaaaagtaatatacggagaactagagcatactttctttgaagatgaagaaaaaggttacagaattaagtggcttgttccagaatcaaatgaaaaagaaatggaacccgttctacttgaaatagaagcaaacagttgttttaaaagctttgaaccatcactttcagaaacttttgcttacgtgctaaaaggggaagtgaccgtgctgcttggtcgaaatgagtatgtggctaaaaaaggagaagcaatttatttccacgccgcagatgaacatcaaattattaatcgatcaacggaacaagcgacactcatcttagttgcgacagagtcatatttataagggaggtaaatgattgtgacagaaacaattattcgttttgaaaatgtaacaaaacaatttgataatgatccaccagtgcttgacaatgtcagctttgaaatagaaaaagggaagttttatactttgctcggcccatctggttgcgggaaaacaaccattttgcgcttaattgccggatttttagaagcttcagaaggacaaatctacttaggggataaggtaattaaccaaattccagccaataaacgtcctgtaaatactgttttccaagattatgcgttatttccacatttaaacgtgtacgaaaatgtggcttttggactgcggattaaaaaactaaaaaaagacgcaatcgataaaaaagtacaagaagcactgcgctttgttaacttaaaaggctatgaaaaaagagaaattagcgaaatgtctggcggacaaagacaacgtgtcgcaatcgcgcgggcaatcgtcaatgaaccagaagttattttgcttgatgaaccactgtcagcgcttgatttaaaactacgtactgaaatgcaatatgagttgcgcgatttacaaaaacgtcttggaattacgtttatttttgtgacacatgaccaagaagaagcacttgcgatgagcgatgaaatttttgtgttaaataaaggcgaaattcaacaaagcggtacgccaattgatatttacgacgagccaattaataaatttgtcgcagattttatcggcgaatcgaacattgttaatggtaaaatgattcaagatttcgaagtggaatttgtggaaagacgttttgaatgtgtcgaccaaggtttccgtccaaatgaagtcgttgaagtagttattcgtccggaagatctagagattacttcggctgaaaaaggaaaacttcaagtaaccgttgattggatgctattccgcggtgttcattatgaagttggttgtattgatattgatggaaatgaatggcttgttcacacaacgagaaaagttcgtgtgggtgataagattggcttagcgtttgaaccagaggcaattcatgttatgcgtcttggggaaacggaggaagaattcgataagcggcttgatagctacgatgaggtgcagtaatgaatagacgcacccgtacagtttatctcgttccttatgttctttggattttactttttgttgtcgcaccgattttattaattgtgtattattctttttttgatgtagatggcaattttacgatagataattatattcactttttcactcctgccacacttaaaaatgacagctagttcgttctggtacgcgtttttaattaccgtttttacgttgttgatttcttatccaacggcgtatctgctaacgaagctaaaacataaacaattgtggttattactcattattttaccgacttggatcaatttactgcttaaagcgtatgcctttattgggatttttgggacatacggggcggcgaatcaatttttagaaatacttggaattggctcgaaacagattttatttacggactttagtttcttatttgtatcaacctatatttttattccgtttatgatattaccgatttttaatgcaattgaggaaattaatccaacgttgattcaagcgtcacgcgatttaggcgcatcgagtatgacgacatttagacgagtgattttcccacttactgctgacggtgtgaaatcaggatgtcaggctgtttttattccagcgctatcactctttatgattacacgattaattgcaggaaaccgtgtgattacgctcggaacagcgattgaagaacattttcttgtcacgcaagactggggaatgggttcgacgattggcgtatttttaattattgcgatgattttaattatgttcctaaccggttcgaaaaagaaaagaggtgcgcgtanaatgaagaaagtaaatggggtacgatttatttagtgcttggttttgtgattttatatgcgccgattttctatttgattttttattcgtttaataaaggcggcacgatgcataattttagtggctttacgcttggttattataaagaagttttccaagatacgcgtctactaattattgttttaaatacgtttgtaattgcgctgctttcttcggtgattgcaactattattggggtttgcggggcgctggcgattaaatttatgccaaaaccttttgcgaaaaactcacttttaagtttgaataatgtgttgattgttagcccagacgttattattggtgctagtttcttgattttcttcacgattttaggtgtaaaattaggatttatttccgtgctagtttcacatattgcctttagtattccaattgtcgtattgatgattttgccgaagttgcaagaaatgagtccgacgttaatggatgccgcgagagacttaggtgcaagccagtggcaagtgctttcaaaagttattttgccgtatattatgccgggcgttttggctggatttttcatggcattaacttactcgctagatgattttgcggtaacattctttgtaactggaaatggcttctcgacattggcggtagaaatttattctcgagcaagacaaggaatttcgctttctatcaatgctttatcgacactgattttcctatttacaattattctcgtgatcggttattactttatcaaccaacgtaatacaagtaaaaatattcggacgggggcgacgaaagaatgaagcaactgctgaaaatttttgtaccagtaattgttgtcgcgctcctaatgatgctacttgcaacaacgatgaaccgctctgagggctacgctgggagtaatacgctgacaatttataactggggcgattacattgatccatcgctcattactaaatttgaaaaagaaactggcatcaaagttatttaccaaacatttgattctaatgaagcgatgatgacgaaaatcgagcaaggtggaacgacctttgatattgcggtgccaagtgattacgcgattagtaaaatgaaagaagaaaatttgctgattccgcttgatcattccaaactaccaaatgaaaaataccttgatccgcgttttatggacttgtcgtttgatgacgataataaatattcgatgccttatttctggggaacgcttggcattatttataataaagaaatgttcccggacaaaaatttcgatacgtggaatgcgttatttgatcccgaattgaaaaaccaaatattgctaattgatggggcgcgtgaagtgatgggacttgggctgaatagtctcggttactcactgaacgatacgaataaatcccacctacaagctgccagagacaagctagaaacgatgacgccgaatgtcaaagcgattgttggcgatgagattaaacttctcatggcggacaatgaagcgggtgtcgcggttactttctccggagaagcagcggaaatgctaagtgaaaatgaagatttagaatatgttatcccaaaagacggctccaatttatggttcgacaacatggtcattccaaaaacggcaaaaaatgtcgatggcgcgcataaatttattaacttcatgctaaaaccagaaaatgccgcaattaacgctgaatatgttggctatgcaacaccaaatgaaaaagctgttaaattgttacccaaagaaatttcgggtgacgaacgtttttatccggatatggacgaactaaataatttagaagtatatgataacctcggtaaacgaatgttgtcgtattataatgaattatttttggagtttaagatgtatcggaaataattgggaatcttggtaaaaaataaggagaataagctaacatttttacttctggtttcccaaaatcaaccccaaaaaagcgacgaaattgtcgcttttttttttggtttttcaaccagagaattttagctagaaatgggagataaaaactgtttttaaatgtttctttcaagaatgtttttcaataatttttttatctgtaattatagttagttggtatatatttcaattgaatcattggcattatttgttttttgtagtattatcttcatgtaaaacgaagggggattaattgaaaattgataatatagtttaagagaaatatttgataactatcaataatttctctgggagttttcggggtaatctaaagggagaagtgatgtaagatgcatttgaaaattgcgatatgtgatgatgacaaggtagtctgtgcccaaattgaaagtatgattctacaatatgcgcaagaatctgggtttgatgtcaccattcatatattttatgatggaagttcactaatggaagggattcaaaatgatgataattttgatttaatctatcttgatattgaaatggatggaatcaatggtgtagatgttggtatgacaattagggacaaattaagggatcataagatgcaaattgtttatgtttctggaaaaggacaatatgatcgtcaattatttgatgttcagccattattatttattccaaaacctattgaggaaagtaaactagtaaaatctatcaatttggcaagggaaaaattggcattaacaccaaagttatatcactataaaaaacggaaagaatattttagtgtttggatggaagatatcatctattttgagaattctggtaggaatgtgaaaatcatgacaattgatggcacggatctatttgttggaaatattaaagacatagccaaagaagttctcccatacggatttattcaaattagtcaatcgattattgtaaactataactttgtgagtaaatattctcgtgaggagattattttaataaacaaagaaaaaattgcaattccaaaaaataaaaggaatggcgtaaaggaacaatttttaagagaaagtgataagcatttataaggcgttttaagcttgtatttgtttactaaaataaggaatagtattagggagagaataataatgatattcaatatgcaaacttttttcgttcatgtttatgttagtggattggagtatttactaatatactttcttttttcacgatataaaccaatgaacccacgagtgtcaaaggagaaactcattctaattttttgcatagctagcctagtacaagcattgtttgattcatttgaatactttaccatcaatgtaatagtttctgcgggattatttctagttggatctttcttcttttttacaaagtggcaggatattttgatgtcttcaatcattgctacagcagtaatcgatattggagaaggtattgctttaatgtcattaacgagtacagcgataggaaggcaagatgtaggagaatttatgttgcaaccttcaaatacaatgctactttttactatttctcgtttgattagtttgggattagtgctgattattttaagatttagaaaaatacgtttaggaaatggcagtttaccaactatttattggacgacatttttatttattacaatgaaagacattttatgggtgttaatcttagcggattcccctgtagaaatatccttctactattgggcagcagttattccactcttaccggtatcctatattttattttattatacacgtcgctcaatagaaaaaatggtgaaaacgcaagtagacagtaaagtgctagatgaaaaaaataaatactatgaacaacagctcgttacaatgaaacaaacacttgagtcacaaagaacagttcggcatgatttaaaaaataagttatcacccctaatttatctagcggaaagtggtaagaccgacgaattggttgagcaggtacaagagcttggtagtttaagtgtacttggtaaaatctatgcagattcagggaatataacgattgactatattattaatctaaaactgcaagccctagcgaataaaggcgtaacaatattttgcgagataaatgtccctaatgatatagatgttgtcccctttgatttatcaacggttttagggaatttaattgataatgcagctgaagcgttagagtatgtgcaaaatgaaaagtggattgggattaaaataagttatcaagttggctttttgatgatacaggtggcaaactcttttgatggaattgtacatttagataataagaaaatcatttctagaaaagaggatactgagaatcatgggattggtttaactagtattaaaaaaattgctggtaaatatgatggggaagtggttgttcaacatgatgataagcaatttgatgtgattgtaaaattattggcttaatattttgatataagaggcgtttcctttagataggaaacgcttttttgttatcacgaattaaatcgcaatggataagataaattaactattgaaattgctagagataaaggaataaattttgatgattttaaggaaatgtgcaaaatattacgtttagaggggcgaaatcagactgatatagttaaatgggttgtagatgagttatcatatgcagtgcatttgtttttgactacaagattaagtgcacaagatttttaattactaaagtttaacttctaaagaaatgacaaaaaagaaggacaaaataaaagttaagatttattgaaaggggaacataaagtgaagaaaaaaagtatagcaagtctgttaattagcggtattatttttagtcagttagcaccaattgttagttttgctgtggaacaagaagcaaatgaaaagccaacagaactgacgcaattagaagaaaccccgaattcaacagatgaaaaaacaaatgaagaattaaatcaaacagaaatagaggaacaagaaatacaggatgaaaaaagtcaagatactgagagtaatacaggcacggaacattctcaaacacaagagtctagcaaggagtcaaatgagacaactaacacccagagtgaaataagtgctgaacaagctacaaaagagaaatctaatgtagaaaaagatgtaaatcctgaaataatcaaaggatcatggggaacagctccttatgaatataatcaggatactggggaacttaaagtaggcggtggagatttatcaaattggtataacactaccggttttattataagtaaagcagatgacgcagaagttaaaaaaattatttttacagaaccggtaaatgcaccatcagattctactagattatttgagggagatggattcaagagtttagaagaaatatgcgatttatcttatttggacacgtcaaaagtaacaattatgaccgctatgtttcatggtttgaaaagcgtaaagagcttagatgtcagtaacttcgatacaaaaaatgttacagatatgaggtacatgtttcagggaatgatagccttagagagtttagatgtcagtaacttcgatacaggaaaagtgagaagtatgtactacctatttgcgaatctgaaaagtataaagagtctagatgtcagtaactttgatacaaaaaatgtgacagatatgggcgccatgtttatgggtatgagtagtatagagagtctagatgtcagtaactttgatacaaaaaatgtgacaaatatgggcgccatgtttatgagtgtgagtagtataaagagtctagatctcagtagctttgatacaaaaaaagtgacatatatgacaagcatgtttagatattcggaaagtctgacaagcttagatataagcagttttgaaacgaatagttctacaactgaaatgaagttaatgtttgacggagccaataatttgtccctcattaagttaggaaaaaaaataaagttttatactgtggctacgtatgaaaaacttgttaatccaccccgcagtgcaccttataatggaacgtggacgaaccctcgtacaaaacgaacaattttgtcagactctttaacgatgaaatacgacggtgcaaccatgtatggatattatcattggtctgctgtaaataatatcatagccattgattctactatttattcaggtgatgactggaaagctgaggataattttatttcagcaacggataaagatttcaatctaattgattttccgctggtaacagtaacaggatccgtagatactacgacacctggtgaatatgaaatcacatatagtgtaaatggcttgactactacaatcacagtaacagtgaaagaaaatcaagcaagtgttgtagcggaaaactcaactatctatacaaaagaatcgtggaaagccgaagataattttgtttcagcaaccaataaaaaaggtaaaattgcagatatttcgtcagttaccgtaacaggggaagttgatgtaaatacaccaggagactacgaaattatgtatacaattgatggagtctctacaaaaataattgtgacggtgaaagaagataaaagcagtatagaagctaaagattcaattctttatataggtgatacgtggaattccaaagacaattttatttcagcgacagataaagatggtaatccggtggactttaaggatattaaagtagaaggcacagtaaacacgataaaaccaggaactaacaaagttacgtatttgtatggaaaccaaagtaaggaagttaccataacagtcaaagcggatcaatcaactttagaggccaaagattcaattatttatactggagataagtggaatgccaaagacaattttattacagccacagataaagatggtaatccagtagactttaaggatattgaagtcgaaggtacagtagacacaacaaaaccaggaactaacaagattacgtatatatatggaaatctaagtaaggaagttaccgtaacagtcaaagcgaatcaagcaactttagaagccaaagattcagctctttatgtaggtgatacgtggaattccaaagataattttatttcagcaaccgataaagatggcactccagtagactttaaggatataaaagtcgaaggcacagtagacaccacgaaagcaggaactaacaaggtaacctatttgtatggaaaccaaagtaaggaagttaccgtaaacgtcaaagcggatcaaacaactttagaggtcaaagattcagttatttatactggagacaagtggaaagcagaagataactttatttcagccacagacaaaaccggaaattcagtaggctttaaggatattaaagtcgaaggtacagtagacacaacgaaagcaggaactaacaaggttacctatacgtatgcaaatcaaagcaaggaagttacgataacagtcaaagcggatcaagcaactttagaagccaaagattcaattatttataccggagataagtggaaagcagaagacaactttatttccgctactgataaagcaggaaagacaattgactttaaaaatattaaagtggaagggacaatagataccacaaaagctggtaattatgacatcacttattcttattcaggagtgactcgtagtactgaattgagtaaaacaattacagtaacagtcaaaaaaaatcaagtaaacttggaagcgaaagactcaactctttatgaaggagacaagtggatagctaaagataactttgtttcagcaaccgataaagatggcaatacagtggactttaaagctattgaagttaaaggaactgtaaataccacaaaagcaggaacttacaaaatcacctattcatatgcaggcatcagcaagacaattacagtgacagttctagccaatcaaactaaaatcgtagcgaaagatttaactatttatgaaggcgacaactggaaagagcaagacaactttgtttcagcaacagataagtttggacaagcaattgactttaattcagtaaaagtaacaggttcagtagatattcaaacaccaggtaaatatcgaatcacctacagcatagaaggtgcatctacaaccattacagtgacggtcctagcagatcaaagtaaccttgttgctaaaaactcaacgatctatgtaggcgacaaatggcaatcaaaagacaactttgtttcagcaacagataaatatggtaaaccaattgatctttcacttttaacagtgacaggaacagtggatacgactacacctggtgagtatgaaatcacatacagtgtcaacggattgactactaccattacagtgacagtgaaagaaaatcaagcaaatattgtagcagaagattcaactattcatgcaaaagaatcgtggaaagccgcagataattttgtttcagcaacagataaaacaggtaaaaacataggtctttcatcagtttccgtaacaggaaaagtagacatcaatacaccagggaattacgaaatcacgtatacaatcgacggtgtaagcacaacaataactgtgactgtgttagtaaatcacagccaaatcgaagcccatgacgctaaaataaaagttggaacatcatggaaaccagaagacagcttcattttagctaaagataaattcggtgaaacagcagacttctcagatgtaacagttgaaggaacagtagacacaacaaaaccaggtaaatatcaaattacgtatacaattgatggagtgtcagtcactattacggtaatagtagaagataattcaaaaggttcatcaaacactatcaccatcccaccaactaatcactcaattggtgaagaagaaacaagcaattcaaatgacaaacaacttccaaaaactggagaacaacaaaataacttcatcttattaggtggactagttttagtagcactagcttttatcttaggcaaaagaaaaatgtataaataagtaaacaaaatagtagaaaatttgtttttaaacgaggaacttttaaattatctatagaaagtgatttgttaaatgagacgtttcctttaaaactaggaaacgtcttttttgtactaaaattgatttcaattcaataaataactatcggatagattgttatcaataaaacaggtgaaataaatttataagaggtagaaaaatgaaaaaaataagtttaacattcatgcttatctgtttgagtctaataggaggtattttctattcatcctctgcagtatcagcagcaggatttaattacacagcaacacctattttaccaagtagccaagaacaagatgttaccagttatttcaaattaagagtgacaccaaatcaagaagaaacattacaagttaaaatagagaaccagtcagacgaaaatcaaaaatttaaagtgattgtcaacacagcttcaacgaatcaaaatgggattatcgattacagtttacatgatgttgaaaaagattcttcaatgaaatattctattcaagatcttattacaagtgatttaccaatagttgaggtagcggcaaatagtgagcaaatcgtttctctcaagttgaaaataccagaagaatcatttaaaggtgtccttcttggtggaattacaattgaaccttttcaagatgaaactaagcaagaacaagtaaacaatgtatacacccgtacttttgcgattcaaatatctgaaaatgacgaaccaattccggctaagttagaagctggagaagtttctctttctcagattaattatcacaatgtagtcagtttattaattaaaaataaagcaccaactattattacttcagttgaagcaaacattaaagttactaaaaaaggccagacagagccactgttaaatgaagtgaaaaaagatatgagtattgcaccaaattctcaatttttccttcctgttgagtggaaagatcttttttcagctggtgaatacgagtatgaagtaacattgcatagtcatcagcaagattggaatttcaaaaaagcgtttagtgtgaaagacaaggaagcaaaaaaattaaatgatttatcaattgatgaaaaatcagatagcggaacatatatttacccaatccttgtatttattaaagtagctgttattttaatagctttgtatttgttcaagaaaaaaagatgatttcatttgaaagtttagaacaaattatcgttctgtaattccataatatgataggtgagacgttttctttaaatcgaaaatacctcatctcaaacaattagactcttgtattctaatacaagagtcttttttacggttccttatttttgattagatgaggcttggtttgcgtaagaaaacaaattttcagttaaagttagggagaatgttgtcctatcaatcatgcccactattttatcgctgtcatacaaatctagtaaaaattgggccatttcatcacttgtatgataattattaaattttttgtcatagtcatattcgcttacatcatttgctttttgcccaaattcggttttggtggcagctggtgctaatacttttgcttgaagtggagaaccgctttctcgtaattccaaacttagtgcttcagtaaaggaactaacatagaatttactagcacaataagttgttgcagtaggaaccatcgtatagccacctgctgaagaaacattaattagttgtgtacctgattggtcatgatactttctaacatacaagaccgataaaactgttaatgcttcaatattcaaatgaagaagctgtaaagtcttagttaggttctggtttttaacttcactataatatcctagaccagcattatttacccacgtttcaatgaaataaaggtccaattcagaaaataatttctctaaacggtctatttttgttaaatcaatcgctttgattaggacttcaacttcgggtacttccttctcaatctcgtttttcaacttcaccaaattagctactcttctggcaattaagattagattttttttgcgttttgcaaactgtttagcggtagcatagccgatgccggaactcgcgcctgtgatgacaacatattttttcatagcaattcctcctagcattttagtatgaatcaactataaatgctggagttaacaccatgtcaactcttcttatacgagcaaaaattatttaatatctcgttcactcaacatttccttataaatatctattttatttagtagaaactgggtatatagctcaatttcttcccttttctcaactaaaatatcgtattgcctatataacaaagtcattcgttgctcgatggtttgatctcccagataccgaagttttgcatattccttaatatctttaattggcatgcctgtctgctttaatttttttatgaagttaatccaagtaatatccgaactatcataaattctacggttaatctcatttctttttggtaaaattagtttttctttttcataatatcgtaatgtatcaattgataaaccgacttcttttgaaaatgcaccaattgtgtaattcacgagtaatcatctcctattttaaatggatatggtgttaactccagcatactacataaaaaggagcgggggaaggatgagtgaaacgaatacgatttttactgaatatcgttctagaggaaaattatcaacatatattatataatgttctaaactggatattttctgcttgtgatggaccgaaaataaagctaccagtatctttcagcaggttcacgcgagagtcacaacacgaacattaagcatataacttgtgaaatagatcagctatccgctaaaataatgttacgcaatttttttcgaaaaggagaattggttatgactaaggagaaagtgttatggggttacgatgaaaagactgggccagaaatgtgggggcatatctgctctgactttgaaatcgcacatactggaaaggcacaatcgccagtaaatattgaacaagctgacgttgtgaaattaaaaccatcaacaatgaaattttactataaagaaacagactatacgattaaaagaaattgagcatcggtgcatgtttttccgcatgacaaagaacaagggctacgctttaacggcgagtattatccgcttgtatcgttccatgcacatattccggctgagcatttgcttgacggttatgtatatccgatgaatgggcattttgttcatgaaaaaccagacggcacaacacttgtaatgagtgcttggatggaaattgataatacaaataatgtcgaattcaaagatttaccaacctatttcccagaagtgttcgctgattttgaaacagaacgggaaattactttagacgtgaatgaatttatgccagaagaacgtgttttctatacataccaaggttcacggacgacaccaccaaccgtggaaggcgtgacttggatcgtgttgaaaaatgcgaagacgcttggccaagaagattttactgaatttgaaaaagcaattggtaatacaagccgaccagtacaagatttaaatggtcgtgaaattactttttacaattaaaaaactagaaagcctcgctcgaatcttgtatagtatagacatagattctgagtggaggcttctttttatgtatgaaaaagcgagacagatgatgatcgaagcgcatagtggccaagttcgcaaaattactggcgagccttatttttcgcaccctttaaatgtagcgagaattttacgccgtgctggttttcgcgaagaagttgttgtcgcggggttgttacatgatgctgttgaagatacggagatgactgatgccgatattcgcgcaacatttggtgacgaagtagcagatttagtagcttctcatacagaaaataaaacattatcttgggaagaacgaaaagcccatacgattgaacaagtccgcactggtagcctagaagaaaaagcgttaatcgtggcggataagctagataatttaacctccgtcaaatatgccttaagctcagaaggcaagtctgtctggggctattttaaacgtggctatgaactgcaaaaatggtataacgaaggtattaaaaataatatggaatacgggttaaatccatccgacgttcctagtttctttgatgaatacgcgcgacttgtgaagtggatttttaagaagtaaaattttgtatcaaaatatctgttaaattaggtatttagaattaaaatgataagtttttagaaaataagtttctttttccagaaaactattgtaaaatgaaagcgttataaaacttacgagaagggaagtttttttgaatggtttatggagcaattgaagcaggcggaactaaatttgttgtagcaattggtgaaaagtcagggaaaattattaaacgcgagagctatccgacaacggaacctgcagaaacaatgaaagcagtcattcaatttttcaaacagtatcaagatgaattaaaagcaatcggaatcggctcttttggaccgattgatattcaaaaaagtagtgctacatatggttacattacccaaacgccaaaactagcgtggcgtaattatgatattgtgggcgcaatgaaaaaagaatttaatgtgccaattggctttactaccgatgttaatgcagcagctttaggagaggtaagtttaggcgcggcggcaggtttagacagttgtatttatttaactatcggaacaggaatcggtggtggtgcagttgtttctggcaaaattctagaaggtttctctcatccagaaatgggacatattatggtgcgtcgtcataagcgcgaccgtttcacgggaagttgcccaagccatagcgattgtttagaaggtctcgcagctggtggggcaatcgaaaaacgctggggtcaaaaagcagcagaactcgcagataatgaagaagtgtggaatttagaggcgcattatatcgctcaagctttaatgaattacacgcttattttatctccagaaagaatcgtgttaggtggaggggtcatgaaacaacgccaacttttcccacttgttcgtcaaaaattaaaagcactcgttaataactatgttcagctaccagatttagatgaatatatcgttcctccaaagttagaagatgacgctggaattactggctgtgtcttgctcgctgtggatgcggaagagtccaattaatggcgaaaaacagctctagtttatagggctgttttttgatatactaaattgtgataaaacaaacaagaacgcaggaggaaaaagatgtcgattacgaacttattaaatattaaatatccaattatccaaggtgcgatggctcaaattgccaaagctccacttgtagccgctgtgtctaatgcaggcggtttaggaattatcgcttctggcggaatgactgccgagatgctacgcgaagaaatccaaaaaacaaaagcactgacagataaaccatttggtgttaatttaatgctaatgatgacaaatattgctgaattaaccgaagtaattatagaagaaaaagtgggaatcgttacaactggagcgggaacgccaaaaacatttatgccaatttggaaagaagctggaattatcgtgattcctgttgttccatctgtcatgattgctaaacgtatggaaaaaatgggcgcagatgcagttatcgcagaaggaacagaagcgggtggacacgttggcgaaacaacaacaatggcgctcttacctcaaatcgtggatgctgtaactattccagtcattggcgcaggtggaattgccgatggtcgcggaatcgctgcggctctagctctaggtgcaaaaggtgtccaaatcggcacacgcttccttgcaaccgatgaatgtccagtacacccggacttcaaagcagccgtgattaaagcttccgaccgcgacacaatggttactggtcgaaaagctggcgcgccagttcgctcaattaaaaataaaatgatcaaagaatacattcgtttagaagaagaaaacgccgatcgcgacacattagaagagttaactttaggctctttacgaaaagcagtacaagaaggcgacacagacaacggctccgtcatggccggccaaatcgctggtttaattacagaaatcaaaccttgtaaagatgttattgaagagatgatgacagatgctaagaatgtgattgctgggttagaattaaattaatgttttaaactgctttcttttgaagcgtttgaataaaatagcttcgatagattccttaatattggatttttagtaagtcataaaaagccgtgccagttcactcagtgctgatacggcttttttagttagtagaaaaattcatttctgtttcatcaatacatcctctatgttatactaatgtaaagttatattgttgcaaatgcaataaaaggaggttggcgatgaaagatatattaagagatataggtgttattgcacgtgcacttgattcaataagtaatatcgaatttaaagaattaaatctagcaaaaggacaatttatttatctagttagaatttgcgagaaccaagggattattcaagaaaaactagtagatattttaaaaatcgatcgaaccactgcttcgagagctattaagaatttggagaaaaacggtttgattataaagaaacaggataagaataataaaaaaaataaactattattcccaacagagaaaggacagcaactatatcccttaattatccgcgagaatgaatactctaatgcagtagctttaaaaggatttactgaggctgaaattaatatgctcaccgatgcgctcaagaaggtcaaagaaaatattgcagatgactggttatatgtcaaaaaaggcaataaaagaagttattaatttggaggaaatgtaatgataaaattatgtacaataagtgattcccaagcactcttagaagtaagttataagacatttgatgaaacatttagagcgcaaaataaaccggaaaacatggatgcatatttaaaaacaaattttacggctaaaaaattaagcgatgaactaaaaaacccacattcctatttttattttgtttttcaccaagaagctattgctggttatttaaaactaaatataggagatgctcaaacagaagaaatagctgggaatacaatcgaaatagagcgtatttatgtattgaattcattccaaaaaaagggattaggtaaagagttgtttaatcaagcaatagagatagcgaaagaagttgatgcagaaaaaatatggttaggtgtttgggagaagaataagaacgctattcaattttatgcaaagctgggttttattaaaaatggacaacatgattttttcatgggcgatgattgtcaaactgatattattatgataaaagatttataaaaaaagttgagcgcatactaagctcaactttttttatcaaaattaagctgccaaaacaccccaaaccggtccgtcacctgcgcataagtcgaaccccagaatgccacttgcaactccatctccactttacccgtagcgcttaaaacttcataggcgtacttaatatcatcctctgtttcaaaattaatcaggatcgtcacccgattaccaattgtaaaaccatcataaggcgcatcggtaatataaataaattcttcgccgttttttgctaaacgactatgcatcaatcgctcaccaaaaacggcatcaccatcaaaattgttcatttctttaaagcgctgtacacttgtaatttcagcttgaaaaacatctgcataaaatgttaacgcatcctgaccttcgccgttaaaaactaggtatggtactgtaaaaggcatggaatcatctcctttagaattaatagcttaagtataagcctaaaccgctttgaagtcatgtttgagagaaaaggatatttgtaaagaaaaacgaaatacttgcaataaaacgtgatatattatacaattataataagaaagcagatattttaaataaatatttttttgcaacaaaataaagtaagtacttgcttttagtagtaggtacgtaggaggtagatgtatgctttgggtaaaagagtcagtcgagcaacttcttagcaaactacacacaaatttagacacagggttaacgaaagaacaagtgaaacaaaaacatgcagagtttgggacgaatgaatttgaagaagggaagaaagaatcactacttcaaaaaatcggtcatcatttgattgagattacgacgattgtcttgctttttgcagcagcaatttctgcatatttagcaattacaaccggatatggttgggcgaaggttgttgttattttaggaatcgttgttttaaatatggtgctcggaatttaccaggaaaacagcgccgaaaaagcacttgctgcattacaaagtatgaatgcgcatttaacgacggtcgttcgtgatggtgtgcggatgcaagtggacgcaacggaattagtgccaggggatattattgaaatcgttgcaggagatatgattccagcagatgcgcgaattatttcaagcagcagtttacaagtcgaggaatctgcgttaactggcgaaagtgttcctgttgaaaaggatgcaaatgcggttgtttcggaaaaagcaccaattggcgaccgtctgaatatgctttactcaggctgtcttgtaacgaatggccgcgccacggcagtggttgtggaaattgggatggaaacagagatggggaaaattgctggacttttaaacagcacctcaaaactgatgacgcctttacaacttcgcttaaaagaattagctaaacgacttagtattgtagcacttttagcaggtattttaatttttataattgatgtatatgtgtatggggaaacgattattgaaacattgatgatcgcgatttctctagctgtagcagcggttcctgagacgttgccggttattgtgacattaacacttgcttacggcgttcaaaatatggtgcggaaaaatacgattatccgccgaattccagcagtagaaacaatcggaaatacgtctgttatttgttctgataaaacaggaacattaacgcaaaataaaatgattatccaacaaatttgggcagcagaccacgcaccgataaaagcaacagctgaatttgatactgcagaacaaaaagtattagaaatgctgagtctttccagtaacgcgacgattgatgtaacagacggcgaagaaaccattattggtgacccaactgaaagcgcgattatccgtttactagaagaaaaaggaacaacgaaaaaagcattggaagccaaatatccacgcgtgttcgaacttccttttgactcagatagaaagttaatgacgacgattcaccaagtagaagacggattcctttctattacaaaaggtgcttttgaccgcattccggtaaatttttcagcggagtttttaaaagaggcagagcaagtacatgacagttttgcagaagaggcattacgggtgttagttgttgcctataaaaaatatccggaaatgccgactgacttgtctagtgaggcgcttgagaccgacttaacttttgcgggaatggttgggatgattgatccaccaagaccagaaagtaaagcggctgtgttagcggcgaaaaaagcgggtattaagactgtaatgattactggtgaccatattgtaacggcatcagcaattgcaaaagaaattggtattttaacggatggggacaaagcgattactggagcggaactggcagaaatgtcagaagcagatctggagaaaaatattcgagattatgcagtatacgctcgggttagcccagaagacaagattcggattgtcaaagcttggcagaaaaatggtgagattgtaacaatgacaggtgatggtgtcaatgatgcgccagccctcaaggcagcggatgtgggagcagcaatgggaatcaccggaacagatgtatctaaaaacgctgcagatatggttataacagacgataattttgcaacgattgtagatgcagtcaaagaggggcgtactgcctatgaaaatatccgcaaaacgatttactttttactaagtacaaatttttctcaaattttcattatgttaattgcgattattcttggctggggcgcgccggttgtagctgttcagttgttgctaatcaacgttgtatctgatgggattccaggattcttccttagtcgtgaaaaagcagatgattcgattatggagcgtaagccaataccgaaaaacgctggaatttttgcgaatggacttgggaaaaaaatggcgacacaagcggttgttttcactattgtaacgttagctgggttttatatcgggcagtttgtaacgattaataattcgattggtgcaagctatgaagttggaatgacaatggcgttcgttattttagcatggtcatctgtcgcgcacattttcaacgtaagaagcgataaatcgattttcactatcggatttttatcaaaccgtggcttgttctttagtgcgatttgttcgatgctgattattctagggcttgcgattattccaccacttgctaacatgttcttcttagttgagatgagcttaacgcactggattcttgcatttatcctgtcgatgttcccacttctattcgttgaaatccaaaagctaattcagcgtaaaagagcaaaagcttaaaggaggacaactaaatgaatgaaactcaaaaattagtagcagcatctcttgaacgtaactttggaaaagacatcggggcacgttatgaaggaaacgaagaagcgcagttacgtgccgaagaagttattgaggaaattgctatcgttattgcaccacttgtagaaaaattaggaatcgaaagtaaaacagtgaaaaaaacgattccatttttatacgaacttcaaaaaaatcaattttgtgacatgagtgcctatccgtatccgcttcttttggtcaatggaacgagcgcggatactgaaaaatattggcgggatttaccgacatattggacagatgaagctaataaaatcgtgctcccatatgtattagaacatattaaaaataataaagtacgccaaaaactattatctttccatgcatggttgttaggtgaggtagccgagatgaacacagaactcggagctcagtttcgggtgaaattagtttttgagtcagatatgcgcattcgtcttagaatttatgaagtcgagcaaattgccatcgaagttcattttttagataatcatgatacggaacaacaacatttgggctatgatgtgagtttggacgcggaacttgaggtcaaagctagactattgctacgccaagggattttaacagaaaacctaggattggtagcattaaaagcttatattcgctccgttttaccaattgcacatagtttgaaaaagctagaaaaattaacggatgaagaggcgaaaaaattaactaagtggttaacgcacgaagaaccaaaaatcatggaagatacagatttaactagtaaagcactcgatttcttacaaaaagtagcacagcaataagaataaaatgctatttggaggaaattgatcctaaatagcattttatttttgcaagtgagattggtagaatagtaaaatgatacaatgatattagaaaagaggatgtaaaaattgattcgacaagccaaaaaatcagacgcgccaaaaattgcgccacttttactcgtaatatggaaagatatggagttaccaattttagaagtagaaacggaagaagcaattacaaatgcattaattgaagcgattcaaaccgaggattaccgttatagctacagacatcttcatgtatttgaaaaagatggagatattgccggagttttagctggctatcctgggaaaattgaaccggaaatcgaccatgcgtggaacgagattgcgaaaaaacacggaattacttacgatgcgccgatttttgtggataaagaaacatttccaggtgaatggtatttagattcaatcgtaacaaatgaaaaataccgcggtcacggcgttggaacagctttacttgctaaattaacagaaattgctgcaaacgatggtgaaaaagtagtcggtttaaattgtgataaaggaaatccacatgcgaaacggttgtatgaacgcttaggttttcatgtgactggggaaattaaactgagcggccacgactatgaacatatgcaaaaataagaaatgaggcaaaccaatgaaaaaaattattttcacgctgttacttagtttagttttagtactcgcaggatgcgccaatgtaacgaatacggtgaaagtcgacaaaaaaggtgaggcaatgatttcctttgacatcgatatttcatctgtagcaggaattttcgcatcaggttattcaaatcaagtggaagctaaactaaaagaagctggctttactgttgataagaaatcaaatacaagttatcatatcgaaaagaaattagcgaaggatgaaacgacgaaaagcgatatggagccagaagattttggcgtgaaaattactaatacgaaaagtttcttcacacaaaaaatcaaagtggatgcaaatattgacatcgagaaaatctggaaaaaagaagtagcagatgtcccgtttcctaaagaaatactaagtcaaatcgactatacttttattttagatttaccagtgtcgtcaattggtgataataatgctaagagcgtcgatggcggaaagctaacttgggacgttccacttgatcaaaaatccgaaatgtattttgaagtcactgtgccaaacgtgaaaaatattgcgattgttggtggaattctactcgtagcgataattggtttattgatttaccttattagaaaacatcgtaaaaagaaaagattataataaaaaagtgtgaatcagttagctaagctgattcacacttttctttacgtctttttctaattcttcatagcaagctagttttttctcgatttttttaaatgcgcggtccagttcagcttgccggcgatacatatcttgttgatgttctttaagtacagcgattcgttctgatactgtttcgtcgccacatttagttaattcaacaatttctttctgtttcgcaagtggcattccagtgacacgtaaacaagtaagtaattcaagccagtgcagggcatcattatcgaaaatccggttattatttttatcacgtgctagaaatggaattaatccttctcgttcataatagcgaatcgtatgggcgcttaaacccgtgtgctcagaagcttctttaattgtttgttgcactaaaatcacctctttttttcttaataatagcaccttgaaaatcgaaaagccaaatgtttgcctttgagtatactctaaggtgtatagtaaacgtgttaatacttttaggaggcggataaattgaacttaaaagatacagtaaaacttgcaaatggtgtagaaatgccacgtttaggatttggcgtatggaaagtgcaagacggcgacgaagcagtaaattctgttaaatgggcaatcgaagctggttacattagcattgatacagctgctgcttacaaaaatgaagaaggcgttggtcaagcgattaaagagtctggcgttaaaagagaagacttattcgtaacaaccaaactttggaatgcagagcaaggctatgaatctactctagctgcttttgatgaaagcttacgtaaactagaacttgattatgtagacctttatttaattcactggccagtcgaaggaaaattcaaagatacttggcgcgcttttgaaaaattatataaagataaacgcgttcgcgcaattggcgtatgtaacttccacgaacatcacctaaaagaattaatggaagatgcggaaattgctccaatggttaaccaaattgaattacatccgcaattaacacaagaaccattacgtaaattctgtgctgaaaacaacattgtagtagaagcttggtctccacttggtaacggtaaacttcttgctaacccagaaattaaagcaattgctgatgcacatggtaaatcagttgcacaagttattcttcgctgggacttacaaattggcgtagttactattccaaaatcagttcaccaagaacgtattatccaaaatgccgatattttcgacttcgaattaagtgatgaagaagttgcaaaaatcagcggattaaataaagatgaaagaactggcccagacccagataatttcaatttctaaaagaaaaacgaagaaactgctaattaaaataaaatcccttccgacttttcatagcgggagggatttttgttatgtttttatgctacaataaactaaaaaaagaggttactatggagcgaaaaacgattattcaaaagcggttcataaaccaaagattagctgagactacatggctttcgtcccctgaagaagtagtgtttcattttggcgcaatgcagtctcaaaattatggtcaatcactttgggcagttggaagtagattaattactccaaatgagcaaactgtaaaacaagcgattgatgaaggtgaaattatccgaacgtggcttttgcgaggaacaattcatcttttttcggcacgtgattatcactggttgatggatttaattgccccgaggatagataaaatttgtaagccatatcgaactaaattaggtttaacagaagacattctaagtaaatctacggaggttgtaaaaacacttgtagcagagcatgcgataacgcgaaaagacttagctctgaacttagcgaaacatgatttacctagcagcggcatcccgtttgcgcagttattggtctacttaagctcgcggaaaattatttgctctggcgcggatgaaacctttcgaaacacaattcatattccagctcctgagtacacttatacccgagaagaagcgttgaaagaattggcaaagcgctacatacaaagccacgcgccagctacgttaaaagacttttgcttttggtctggattgaccgttaccgatgcaaaaatagctctagaagatttcactaaagaaggcgacttttatttatccagtacaattgaaaaaagtagtccagtacacacggttccgctagcaggttttgacgagtggattatcggatacattgaccgctccatcgttttaccagaagagtggcgtgaagcaattataacgaagaatgggatttttagaccagcgattatttcagccggccaagtcgtggataaatgggaaaaacctaagaaaaaagcggaactaaccggggattactggaaccgttacatccagtttcggaatatgctatagtcaagtaagtgcagaaaatttaatttgaggtgattaaggcaatgaaagcttttgataaattttataaaaaaactttagaagaacgtcgtgcggttttagccgaatatgctgatttaaatgaagaagaacaagcctttttagcttccacaggggctctttctcttgataaagcgaaccacatgattgaaaatacggttggcatatactcgcttccgctcgggctaggaatgaatatgctattaaatgaaaaaaattatattgttccaatggcaatggaggagccttctgtcgttgctgctcaaagctcaggagcgaaattaatcgcgcaaaacggtggtatgaaaggcactgcgactgaccggaaaatgatcggtcaaattgaattaattaacgtgccagatgtccaatctgcggaagaagaagtgcttgctaaccgagaaaaactcattgctattgctaatgacgcccatccttctttacaaaaaagaggcggcggggctattgatctacaagtacgtacagctaaaacggcgagcgaagaaactttatttatcgttcatttacttgttgatacccaagaagcaatgggggccaatatggtaaatacaatggtagaaacgttagcgccagaattagagcttttaacaggtggaactgcaaatatgcggattttatccaatctagtagatgaagcaaccgcaactgtgacctgtcgactttcccctctaagtttagcgacgaaaacgcaaagtggcgagtgggtacgtgaccgaattattgccgcttatgaatttgcagatgctgatatttaccgagcagccacgcacaataaaggaattatgaatggtatcgatgcagttattatggcttttggaaatgattggcgagctgtagaagccgcaagtcatgcctatgcttcccgtacaggaagttataagcccatgtctaagtggtccaaagatcaagatggatatttggttggcgaattaactttaccaatgccagtagcctttgtaggaggttctatcgggattcatccgatcgccagcctttcgaaaaaaattgcacgagtagaatcggcgaaagaactagctatgttagtatgcgcagttggcttaacgcaaaatttagctgctttaaaggcactcgttacggaaggcatccagcgtggacatatgtcattacaagcaaaatcgctggcaatgacagcgggagcagaagcaaatgaaatcgaaaaagtagccaagtttttacaagaaagcaaacaaatgaatgttatggcagcgaaagcatatatcgctactttacgatctgaaaaataaaagtctatgtaaacgacctttacaaaaacttaacaatacattcggaacgcgttaaagcctttattttcaacgtttcacattgtttttaatagaacttcctttacaaaatgaaaaaaatctatttacctcgcttttactttcttttatgatgaaaaaagagtgaaattacaagattacaaacaaaaaggagattttcatgggagacataaatattcagcagatgatttttcaatttattggaggacttggaatttttcttttcggtataaaatatatgggggacgggctgcaaatggcagccggcgacagactccgtgatattttagataagtatacaacgaatccttttatgggtgtacttgccggaattttagttactgtattaattcaaagtagctcaggtacaactgttttgacggtcgggttagtaagtgccgggtttatgaccttaaaacaagcaattggtgttatcatgggggcgaacattggaacaaccgtaaccgcctttattattggtattaagttatccgagtattctttaccaataattgctgtaggagcagtacttttattcttctttaaaaatcataaagtaaaaaatattggacaagtattctttggatttggtgcgttattttatggactggatttgatgggacaagggatgaagcctcttgctagcatggaagctttccatgagttaactgcgcaaatgagtacgaatccattcttaggtttgttaatcggaacgatctttaccgcggtagtgcagcttcaagtgcgactatcgggatattacaagagctatatgggcaaggtgcaattgaccttcaagccgcattaccagttttatttggagataatattggtacaacgatcacagcggttcttgctgccattggagctagtgttgctgctaaacgtgcagcagcgactcatgttattttcaacttattaggcgcaattatattcatgttgattttgccacttttcacatcgctcgtagcttatatgcaaggtttatttggactaaatccagaaatgaccattgcggttgctcacggaacgtttaatgtgacaaatacatttattcaattctggtttattggggcctttgcttggctagtaacaaaactaataccaggagacgattcgcgcattgattataaagtgaaacatctagatacaaacttaatcgatcagtcaccggggattgcacttgaaatggcacgcgaggaaacacttcgcatggcagattatgccaaattaggcctacaagaagcaaaagaatatctcgttaaccaggaaccaaaacatgccgagtcaactgttcaagtcgaagaagcagtgaataatttagaccggaaaattaccgaatacttaactaaaatttcttcggttgctttaacaaacaatgaaacagaagaacatgcgctgatgcttgataccgttcgtgatattgaacgggttggcgatcacatggagaacatcgtagaaaatatcgaccaactgattaaaaacaaagcgaaaatgtccgaagaagcttccacgcagctaatcgaaatgtttgaactgacaacatccaatttcgaacgagcagtaaaagcaatgcataaaaaagaccgagcacttgctgaagaaactattttggttgaaaaagatattgataaagctgaacgtagattacgtaaaagccacatccgtcgcttaaatgaaggcaaatgccaagtagttagcggaattttatatatcgatattgtaagtgatttagaacgaattggtgaccatgcaaataacattgcagagtctgttttagaattaaacgaataataatcaaaaagaaattagctatcgttttagctagtttcttttttttgttaaaaatctacactttttctagtccttgtgaagcattgagtataagcgaatagtggtgtagaataagaatgattataaaactagaatgactggaagtgttgagtcttatgcgaaatagaaaaacgatggatggaaataccgccgcagcttatatttcttacgcatttacagaagttgcagcaatctatccgattaccccttcctccaccatggctgaacttgtggatgaatggtcttcaaaaaacaagaaaaatttattcaatgaacccgtaaaagtagtagaaatgcaatcagaagcaggagcagcaggaacagttcacggctcacttcaagcaggagccttaacgagcacatatacagcgagtcaaggtttacttttaatgattccgaatatgtacaaaattgccggcgaactattaccaactgttttccatgtttctgcaagaacaatttctgcagcctcacttaatatttttggcgatcatagtgatgtgatggcagcgcgccaaactggatttgcgatgcttgcagaaggttccgtgcaagaagtaatggacttatctgccgttgcccatctagcctcgttaaaagggagtttaccatttttaaatttctttgacggcttccggacgagccatgaattacaaaaagtcgaagtgctcgaatatgacgaattagaaaatttacttgataaagaggccttacaacaattcagaaatcgcgcaatgacgccaaataatcctaaaacactaggttccaaccaaaatccagacatctttttccaacaaagagaaacggtgaatcgttattacgaggaaatccctagtatcgttcaaaactacatgcaagaaattaatcagcttcgtggcacagactatgacttagtaaattactacggagcggaagatgcaacagacgttattgtggcgatgggctctgtaacacctgtcatcgaacaagtgattgattatttaactacccaaggcaaaaaagtagggctattaaatattcgtttataccgtcctttcccagcagaaactttcttagcaaaactaccgaaaacagtggaacgtgtggctgttttagaccggacaaaagaaccaggatcaggcggggaaccacttttacttgatgtacaaagtgtgctttatgatagtgaaacgcgtccgctcgttattggcggtagatatggcttaggttcaaaagatgttacaccagaccagattcttggtgtttattcgcacctaacgaccgaaaaaccaaaaccgcgctttacgattggaattacagacgacattacgaacctttccattgaaaatactggaccaagtgatctgacttcagcaaaaacattccaatgtaaattctggggtttcggctcggacggcacagttggcgcgaataaagccgcaattaaaatcattggggataataccgatttatatgcgcaaggctatttctcctatgattcgaaaaaatcgggcgggctaaccgtttcgcatttgcgttttggtgaaaaccgcattcgttctgcctatttaatccaacaagctgattttgtttcatgctccacctcggcctatttacgctcctatgatttattaaaaggcttaaaaccaggcggaactttcttactcaatacgatttgggaaggcgagcagctagaacgccatttaccagctgcgatgcgcgaatatattgcgaaaaataatattcaattttatacattaaatgcgatgagaattgcgggtgaagctggacttggtagaagaattaataccgttatgcaaacggcctttttccgagtgaccgatattttaccgttcgaaaaagcactggctgatttaaaagcatcggctatcgctacttacgggaaaaaagatatggcagttgcggagaaaaatattctcgcgatggaccaaacagttgctaacttgcataaagtagaagtgccggaaagctgggcaaatccagttttaacagcagaagcaagtaccgccactgaaaaaccagcgtatgttaaaaatattctggaacctgtgaaccgtttagaaggggacaacttgactgttggtgatttaatttctaacggtatggtaagcggcgcatatcctccagggacagcagcttacgaaaagcgtggtatcgcacttgaagttcccgaatggatttctgaaaactgtacgatgtgtaatgaatgtgcctttgtttgtccgcatgcagcaatccgtccaattttaacgaatgaagaagaaatggaatctgcaccagaaggctttatgacacgagaaatgcgcggaaaagatggacttcgttatcgtattcaagtttcaccaatggattgtactggctgtaacttatgtgcggaaacatgtccggcgaaagataaagcgctcgtaatgaaaccttttgaagaagttgccgcaaaagaaaatccgaattggtcatttgcgattaatgtcaaaccaaagaaaaatcctggtaagaaaaatactgttcccggcagtcaatttgaacaaccgttacttgagttctcaggagcttgcgcaggttgtggtgaaaccccttatgttaaattattaacgcaaatgtttggcgatcgaatgatgattgctaatgcgactggctgttcctcgatttggggcgcatctgcaccagcaacgccttatactgtgaatgatcaaggacacggcccggcgtggggaaattctttattagaagataatgcagaatatggttacggcatgtatttggcgaaccaaacgatgcgaaaagctttaaataataaagtcacaaaagcacttgcgaatgaaacaatatcagaaggcttacgtgaggctctttctgattggcaaaatcaaatggacgtttcagaagacacacgtgaccgagcagaagctttgcaactcgcccttttaaatgaaatgaaaggaaatgccttgcttgaatctatttaccgtgacagagaattatttattaaacggtcgcagtggatgataggtggcgatggttgggcttatgacatcggatttggcggaattgaccatgttttagcatcaggtgaagatgtgaatatttttgtaatggataatgaagtatactccaacacaggcggtcaatcatccaaagcaaccccaactgctgcaatcgctaaatttgcttctggtggaaaatcagtcggtaaaaaagatcttggaatcatggccatgagttacggtaatatttatgttgctcaaattgcgatgggtgcaagtaaacgccaaaccttgaaagctatcgaggaagcggaggcttatccaggtccatcgttaattatcgcttatacgccatgtattaaccacgggatttctagcgggatgaagacgatgcttagcgaaactcaaaaagcagtcgaatgcggatactggagcttatatcgttataatcctttactagaagaaaaaggtaaaaatccgatggttatggattataaaaaagtggattttgatcaatttgaagacttcttaaaacgcgaaacacgctattctgcattatataaagcgaatccagaagtagcagctaaattgtccgaaaaaacacgcttagatgctgagaaacgcttcaaacgctatgcgacaatggcaggtcttgatttagaaaaaatattgaagaaaaaagaagtatctgaagaagcaaccaaaaaaccagtagatgatgaccgcgcagcaagaaaagcagctagagaagctagaagattagcgcgagaacaagaaaaataaagagaagacccagtgatcactgggtcttctctttatttgcttttgatctgtgggaatcagaagctaagtgggaatgaatagatattcttttatgaacgttataaagaaataactactattttaatataactttttttactaaaacgtgcactagtaaaaatagaacataaatagttaataacgctttatttgttgcagcccagtcagtctagcacttgtgaaagttttaagacaattctaaatctatcgtttaactgttttcgtgaagcgaaccattgcggtaagcctcaaggagcatttttaaatcggtagcttgttcattaagatttttaccaatatctgtatctcgtacacgctttcgattaatttccatctcaataacttgtcgcgttgaaagaatatcggtctcattttttatcgcatcttctttcgtcgtaaacggttgatgactgactaactgcaaaccgtaactattatagagtaatgtgtaaccagcaagcgtcgtttctttatgataggccttagcaaaaccgccatcaatcacgagcattttggtgtttgctttaattggactttcgcctttaccttctttaacgggtgtatggccgtttataatatgtccacattcaccatcgagaccaaattcctccaagatttgtttgcaaattgtttcttcgttgcggagtttataataaggatttttttcttctttgtgtgtttctttttccgcaatgaagtagcgctcaaacgtagtcatctcactttttccaaataacgaagataccgctcctgtccataaataccaaacaatatcacaagcatatttcttctcttttgttccaggtttacgcacgtaggcttcacgagtaagaatttcaaactgttctaaaagctctcgtccagaaaagttttctccgcgtagcttcatttccataaaagttccatcttcataaagaggaatacaaccatgataaagtaagttgccattatacgttaaaaacatactaccttttgaataaagaaattgaacatgtttttgtaatcgacgacaatttttaaacgatgccgtaatcttttcaataagctccttttcttcttttgttagcttataagggtcattaggatctatcgttggaaaatgagtatcaagtaactggtaatctttcccttttaaatggatggttccttttttataatcaatcatttgtagaagcagacgatgattcatatcaaattctttacgtcgattgattatctcaccctctagtttaaactgaatgatcgaaatcgctttatgcattcgcgcaatttgggtaatttcagctttactatagtttaaattatcttcatttttaggttggaaataggtgcaaggatcatttttataaatttcatcagcaaaaagtgcaagtgggcgaagagaaataccataactatcttctaaaatatctaagtttaagtaacgcgcagaaattcgaatgacgttagcagcacaaactcttgagccactagccgctcccatccataaaatatcatgattaccccactggaaatcaagtgagtgataattcatcagtgtatccataattttatctggataagggcctctgtcataaacgtcgccaacgatgtgtaaatgatcaaccacgagttgttgaattaaacgtgataatgcactgataaattcagctgcacgatccagcgaaatgatatgttgcaaaatttcttcatagtacatttttttatcttcttcgttatagttttcatgtaacaattcttctaatatgtaagcaaaatcttccggcatggcttttcttactttcgatctagtatattttgaagcaacatactggcacagttcgattaaacggaaaagggtagtgcgataccaatcatgcatatcgtccatttcttcagcaattaaatccattttctcttctggataataaatcaatgtactaagagaattgatttcagcatcatccaactcatccccaaaaatatcgcggattttacgctttacaactccagatccattccgtaaaacttgttcaaaagcgctatattccccgtgcacatcactcaaaaaatgttccgttccttttggtagattcataatagcttcaaggttaataatttctgtggccgttttagctatagtaggatattgtttggctaataaatgtaaatatttcatatcgatattttccactgataaccgtctccttttttaattggtatagctattatatttataaaatataagtaaatcaaacgttttgttttattattggtctatacaaaaagacgagccggagcccgccttagaaaactggatgaagaaaataaagtacaattggtagcgtaattatacttaaaacagtactaataaacgtcgtactggaaaccaaatctggcttagtatcaaattgaacagccataagagttgtatttgctgctgtaggcattgctgctaacaaaatcatgatttgctttgtcatttcatcgacaggaagaataagagtcaaaccaaatgcgataaacggtgctatgagtaatttcaaaactagcgcgatgccaactttatccagttcaatccgccgaaaagaaataaccgctaactgcattccaagaacaatcataattgttggaatcgcagcatcaccaacaagtttcacacaagtcattaatgcagatggaagcggaatatgtagtagctgaagcataagaccaagtagcgccccgtaagcaatcggcattcgtaccacacgtgtcatgacagttttcataccattcgcatccttgctcccttttgcagcaaaatagattccaatcgtactcattgcaagttgttgtaacaccattaaaacaaccgcaatatcaagtccagccgccccaaaaacaagcaatacaacaggggtgccgtaattcccattattcataaaagcactagctaaaataagcgcacaacgatcttgcacattgtaaccaagcagaaaactaataacactaacaagtaaaattaagcttaagcataaaacaaaaatataaatcgccaaataaaaataatccatcgttagcggattagtataaaaagtattaaatgcaagaaacggcgacataagataaagcgtcagtttcgataaattaggaatatcgaattttaatgttttctgcccaataaaaccaattgcaaaaattccgaaaactggaagtaaaatgaatagaaactccatagcaacacccttttctatatagattgtaaattattgtaccacaaaaagacgttttatatttaaaatagaccaatagtagcccttataagttatctttaaacgattatttttgctaaattatgctagtccgcctctctaacatctgttcttaaaaagaatcgaaagcagctaaatgtactgttttaggaataaaaaagctctttttcatcataaaagtcctaaaaaagtactaaaaaacagagggagtttgacctatgtcattaaatagacactaaaaagacaccttttagccacaaaaataactaaattggtctttttttagtataaaaattttcatcgtataatctataataaatgtgttgattaagaaattttgcaaattccgaaaagtttcattgttgataagaaagtttttactgaaaaataaaaggagataataggaatgaaacgaggctagactgcattaattaacgaagaattggttttatctattaattttcaaaataagggaaacaagaaaaatagttcttttaaatactaaaaaacaatcagcaaaactgctcattcaaaatagtttgaaaaaggaaatattgctaatttgttattactagaaatgagtattaaaagagacgtacaatggggtattaaaacaacacaacagttgactgggaaactactttatgagaaaaacgcacaagaaaggaactgtttatgcctactaaaaaatataccgaaaaattcaaaataagccttgtttatttatatcgcaaaggaacttctaaacaaactctatgcgaggattttggagtttcaagcgcttcactttctagatggattaaatggtacgatgtgacagacgttgatttgaatgaagctgcaaacatcttacaaatgtacgaactaaaaaaacaaaaagataaattagaagccgaagttttagaacttactaaagcgattcaacttttcaattcagatttaaatacagtataaaaaaagcaagcaatcccgaaagtggggttgcttgcttttttagccctctcttttaaggagctttgtattagctaaaaatagtgcagcgacaagaagtaaaatcgcgcctgagagtattagcgtagatgttgcactagaatgatcgacaataataaatcgaataatcgctgtgataccgatataaataaagtagcgcagcgggaaatgaaaatgggattcgaaatattttacaatgagcgcaataaattcaaaataaaggaaaaacgtcaaaatatcctgtgtcatatagtagtaagaaacgtccgtatctaaaaagaaaatattattgaaaatcgtaaatgcctctctaattaaaaaagcaacaagagtaaatccgaccataataagcgccaaatttagagtaatccgtagcaggatgggaacaatagaagaaatcttttctaatcgtttcatcagttgcctcctttccaaaacaatatcgcttttttagtcattttacactataatgggaaccatgactatttttaaggggggagtttgtcattctaaaaaggttttttagttattataaaccgtatcgaacactttttatcattgattttggttgtgctgttttagctgctattttggagctcgcatttccggtcgctgtaaatcacgtgattgatacattacttccaggaaaagattttgggctaattattactgcagcactagccttgttattcttttacatacttaatacttttatgcagtacattgtcacttattttggccatatgctaggtcttaacatagaaacagatatgcgcagagatttattcagtcatttgcaaaagcaaccatttggcttttacgataatcaaaagacggggaaattgatgtcgcgaatgacgaccgatttatttgaaattggcgaagtggcgcatcatggtccggaagatattttcatttcaattatgtcgctatttggcgcatttttcctaatgctaaacattaacgtcaagctggcgatttctacatttattttagtccccatattgacggtactaatcgtatactttaacaaacgaatgaccaaagtaacgaccgggatttttaaagatttagggaattttaacgctggagtggaaaatgcaatcagtggtgttcgggttgttcaggcatttgccaacgaaccgcatgaaaaaggtcgttttgccgttttaaatcaagcgtaccgcaaatctaaactcatgttttacaaagtgatgggacttagtttttcatttaactattttcttatgcgattaattagtttatttgctttgttattcggagcttactttaccattaatggcgaaatttcatatggtgaatttgtcgggtttattttactaacgaatgttttcatccgaccaattgagaaaatcaataatgttatcgaaagttatccgaaagggttcgcgggctttaagcgtttcctagaggtgatggatacggagcccgcaattcaagatgaaaaagatgctaaaccggcttcagctttccgcggtgacattgaatacaaagatgtttcttttgaatatagcgatggaaaaaacgtcttaagtcatattaacctttcgattaaagctggcgaaacagtcgcatttgttggaccaagtggtgctgggaaaacgacgatttgtaatttactgccacgtttttatgacgtttcagatggggaaattactattgatgccgaaaatataaaacatttcactttaccatccttacgagcgcaaatcggcgtagtgcaacaagatgtctttttattttccggtactgttcgtgaaaatatcgcttacggaaaattagatgctagtaatgaagaaattgagcatgtcgtaaaactagcgcatctttctaaagtggtagaagagatgccagacggtctagatacaattattggtgaacgcggggtaaaactttctggcgggcaaaaacaacggttagcaatcgcccgaatgtttctaaaaaacccaccaattttaattttggatgaggcaacttcagccctggatactgaaacagaacaagtaattcaagcttcattagaagaattagcagaaggtcggactactttaataatcgcgcataggcttgctacgattaagcatgctgaccgaattatcgttgtaaatgaaaccggcattgcagaaactggaacacatgatgaactgttagcaaaagaaaacggtgcatataaacgattatatgatgcacaatttaatacgatttaagaaaaagggattccaacttggaatccttttttaaatttgcggacgagtccttttatagagaataaaaatggcaacagttatcaaaatgacgcccatcacggctggagcagcgtgaccaagagtgatataaatttgaccgccgataataggtccaatgatacgcgcgagtgattgaatcgcttggctaccaccttgaattcgcccttgttcactggcgcttgccgatttcgaaaccatgccattgaaagcggggttgaaaatcgaatcaccaaacccaaaaacaaacattccaatgactagcagctgaggaaggataaaaatcgaggaggccgcaataagcgcataaccaataatttcagcaatcatcccgagaatagcaatttgtttatcactaagcctgagcagtagtttaggcataacaaaggcttgtgaaagaatatcttgaacccccataatcgaaaacatcaaaccaattaaagctggtttccaactaaaattatcaatggcaaattgagacataactgcttgaagtgagccatttggaatccaaatcaagaatgccgcaataagtaagcgacctaaatgtttaatcgtcaagatattaaggagttgcgagaaaggattaagtcgtataagcggaattcgttttaagcgattttcctcttttaaagtttcaggcatgtaaaaatagccaaacaccaagttaataaaagtaatagccgccccaaagaaaaacggcatcgcatatccaaaatgggctattacgccgccaaaagcaggaccaagcgccgcacccgcacccgccgcggcactgacccagccaaagtatttcgtacgctgttcttcgggtgtaatgtcagcaaagaaagcgaatagcgtgctaatactaccgccagtgattccttcaattatccgcccaagaaagagtacccaaagcgccccgccaagcccgaaaacaaagtaaccaattgccgaaccgataaaacaaattagtaacaccggacgtctgccgaaccgatcacttaaagctccaagtccaggtgctgcgaagaacacgcaaagggcataaacagatgttaatagcgtcaccataagcgcttgttcactagaattacttacatacggtgcaattagaaaaggaactacaggcataatgatactgaagcccattccacaaagaaaaacagatataagaccaaaaagtaaggtttttgtattaatgaaagatttagttgaagacatgtgattctcctatcgaaatataattagtgtcctaggaaacataaatagcttaactcctttttgtttccttgtcaacaaaaataaaacgataaaaaacagcctaactaataaaagcaagactgttactaagtttattctgatttcctatctaaaatttttttcatttcagcatctaaatgacggctatatttatccacaaattgtaaaacttcctcatattgtttatcagaaacatcttcaaaaacaactttatcccggtcaagaaactcttggtgcaaattatcatgcacttggttgatttctgctcctttggtcgttaatcgaaaatagatttcttttttattttcaggtttttgatagctttcaatatatcctttatccattaattttttagtgattttactaatcgcgctttttgtcatatagaaagcttctgcgagtttagttacgtttgggtcctcatttttagcaataaattcaatgcagtgaacttcggaaggtttgtatccctcaagcgctttttccattttcactttgttaatccatgcgagtttgttaaataaatctctaacgtttgccatgacttgttcgtttttatccatgccatgccctcctaagttatctctctggttgtagtatagttgttttttgtgtccgtttcaactattttttgcctttattcgctaaaataggaagttggaagcgctatttgttaagagtgtgtaaattatccatgttatcaatattatttcactgttaagatttgttatacttaacacatagattgattggaaggggctgaaatgattggagatttaccgcaaaagcgcggcagatacatttaaacaactagaagcaacagaacaaggcttaacaactagtgaggttacaaaacgacaagaaaaatacggttttaacgaactgaagaataaaaagaaagatccactttggaagctttttctcgaaacgtttaaagatccaatggtcatcgttttagtcatagctgccttggtgcagttggttttaggtgaagtagttgaatcacttattatctttttagtacttattgtcaactcaattattagcgtagttcagacgagaaaagcagaaagttcactcgatgctttacgagaaatgtctgcgccagttgccaaagtaattcgcgatggctctaaacaaagcattcatgcgcgcgaactcgtcccaggtgatgtagttattttagatgcaggtgattttgtcccagcagacggccgcttattcgaaagtggttctttaaaaatcgatgaaggcatgctcactggggaatccgaagcagtagaaaaatatattgatactatttctgatgaagtaggccttggtgaccgtgtgaatatggtgttcagtggctccctcgttgtttatggtcgcgggatgtttgtcgtaacaggtacagcaagcgaaacggaaatcggcaaaatcgcaggactacttgaaacagcagaagcaaaacaaacaccactacaacgaaaactagaatcatttagtaaaaaattaggaattggtattttagcactctgtgtacttatttttgcagttgaggctggtcgcgtattactcggcgacaattcagcggatatggcaacagcgattttaaatgcctttatgtttgccgtggccgtagctgtagcagcgattccagaagcactttcttctattgtaacgattgtgcttgcggttggaacaaacaaaatggcgaaacaacatgcgattattagaaagctcccagcagtggaaacactaggctccacaagtgttatttgtacagacaaaacaggtacgttaacccaaaataaaatgacggttgtcgattactttttaccagatggaacaaaggaaaatttcccggatagcccagaaaactggtcagaaggggagcgtcgtttaattcatattgcggtactttgtaatgactcaaatattaacagtgaaggtaaagaactaggcgaccctaccgaagtagcgctaattgcctttagtaataaaaataatcaagactacaatgaaattcgcgaaaaattcatccgtgaaggcgaaattccatttgattcagatcgtaagttaatgtctacgcttcacacctttaatgaaaacaaagcaatgctaacaaaaggcggaccagatgtgatgttcgcgcgctgtagttatgttttccttgatggcgaggaaaagccgatgacagaagagattttaacgaaattaaaagaaacaaatgaagaattttcaaatcaggcactccgggtccttgcttacggctacaaacggatgcctgctgatacaactgaattaaaattagaagacgaacaagacatcgtactagttggtttaactgcaatgattgatccgccgcgtgaagctgtttatgcgtcgattgaagagtcgaaaaaagccggtatccgcaccgtaatgattactggtgaccataaaacaaccgcacaagcaatcggtcgcgatattggtttaatggatgcagacgacatcgctttaactggtcaagaacttgatgctatgccagaagaagaacttgataaaaaactagaacatatcgctgtttacgcccgtgtttctccagaaaataaaatccgtatcgtcaaagcttggcagaaaaaaggtaaaataacggcaatgaccggagacggtgtcaatgatgcgcccgctttaaaacaagccgatattggtgtcgcaatgggtagcggaactgacgttgccaaagactctgccgcgatgattttaaccgatgataatttcgtttcaattgtggatgcagttggcgttggtaggaccgtttttgacaatattaagaaatcaattgcttatctatttgcaggaaacttaggcgcgattatagcaattttattcgcgctagtactggactggattaacccgttcacagcgctacaactactatttatcaacttagtcaatgactccttaccggcaattgcgctaggaatggaaaaagcagaacctgatgtaatgaaacgcaaaccgagagatattaacgaaggtatttttgccggcggaacgatgcgtgcagttattagccgcggtgtattaatcggtattgctgttatcatctcacaatatatcggaatgcaaatttcaccagagatgagtgtcgcgatggcatttactacgcttatcttagcgcgtacattacaaacattcgcagctcgttcgaacgtccaaaccgcatttggcgcaggatttttcagcaacaaatacgtcatcggcgcagtattactttgtttcgtcctatacggaattacagtattaccaggagctcgcgaaatcttctcaatcccagcaacatttggtttacacgaatggtcgattgcagcaggattagcactcgcagcagttgtgatgatggagattataaaagtagttcagaataagttttttaaagaagcgtaaaaaaacagaaatccctttttgaagaggggtttctgtttttatgtcataaaaagctacttattggtaaaaagtatacaatgattgacggtgaaatcgcaagttatcatttcaggatgctatacttataaccaacaaagatttgaaagtaagttttaaataatgaaaaatgatattttttaattctctgctacaaaataaaaaggggcttattttagtgtggaaaatatgttaatcttgataagaaagtaggtaatagataataaaaaatatttgtggctgtaagattacttagctagtatgtgaaaagatggaatataggtgaaaactagttggaaaatacagaaatctaataaagtattacttacttaaataaatttttcaaagacgggggaaaaaaatgtttgagaaaataacaattggtataaaagtgaaaaaaaataatcattttgagcaaatagatgttcattttattaaggataactctattgtaaatgatgcagagtattataatcagggaaatgattatatgaataaaagagatgttataattcaagtaaaaatgaaggaacaaacttttaatgttgaaatcgaatttttaggttatatagttgatgaaattgatggaataagacaagaatttgaaaaagcttataatgaaaaaaaaatcaaaatggagtcaatggatgaagatgaggatgaggacgaatatgacaatatagatagtcgcaatgaaattaagccgtatgaccctaatttaatacgggttgaccagaaacaatttactattgaaaattcagtaagtaaaattggtaataaagaaattgatttgaatcctgattttcaaagaaaatttgtttggacggacattacaagaaagtctagattaattgagtcaattcttttaagaatacctcttcctgttttttatttatcagaagatgaggatggagtttatcatgtgttagatggtctccaaagattaacagttttgaactcatatttaaacaatgaatttagattgaaaaacttagagtatttagaagaagagtgtggaggtcgtttttttgcttctgaggaaaaaaaagcattagataatcctgatcgttttctttctaaaaaatatgttagaagaataaaagatactatgttaaattttaacgtggttgattccagaacacctgatcaggcaaaatatgatatatttcgaagaattaatactggtggaaagcccttgaatcgtcaagaaatgagaaatgcaatggcaacattgccgacgcgtaaattattaggaaagctttcaaatttagaaatatttaaaaaagctactggttattctgttaaagacacaagatttgctgatcaagagttaatacttaggtttgttggattctatttgatagatcaaggttaccgaaattctgtcccatacaaaggtgttatggcaacatttttagatgaggtcatagaggtgctaaataaatattattcatataaagatgaatttatagaaagaatatttaatgattttaaaactgcaatggaaaacgcatatttcatgtttggtgataaagcttttaaacgaacacaagtcattaataaagcattatttttagcagtatccagaaactcatataaattccatttcgataataaactaaatatagggagcaacatcaaaaatagagatgctttttttaataataacaataatgttttttggaattctagaattgaaaattatgaaacaaaaagtgatttgataaatgattcgcttagtacaggtactaatgaagtattaaaaatagaacattcttatactattatgcaagacttaatggaggttttaatgaatgaaacaaatttctagtttagaaattaatggactgaaaagttatacagaaaaaactgagattaaattaagtcaattaaatgtattttcaggagttaactctgttggaaaatcaacagctattcagtcaatatcgttaataaaatcactttatgatagttatattaataagaataagattattagcgaagcgttcttaaataatgagatgtttggtttagaattaggaacatatgaaaagataatcactggaaataataattattttgaaataggaataaataataaattgatacaaatagaagctaaagaaggggatgctctaaaagtacaagcaaatatgaaagaggtaacagaagaaataaaagttaatctatttcatggtcatttttactacttagctgcggaaagatttggtcctagaaactatcaagttatagatagctacggcatagacaattgtggaatcaaaggggaaaatgcatttcatattttaaataaatattcagaaaatattatagctgatgatttattgtttcagggtacagcgaataaagcagaaaaatcgttaaagaaacaaactgaaaagtggctgaatactttttttgatggagttgaatttagttctactttggaaaatgctttaagattggtaaaattagaggtgaaacaaagcaatcaagatatgggatatgtttctttaagtaatgttggctttggtttatcatatgttttaccaatattattaacatgtttaacttctaaagaagattctttgataattatagaaaatcctgaagcacatttgcatcctaaaggacagtctttattaggtcaatttttagctcaggtaagttcaagtaagaggcaagttgttgtggaaactcatagcgaacacattataaatggcatgaggcttttttgtttgaaaaatagtatttctccaaatgaattgacaataaacttcttttctataaaaagctcaaaaacaaatgtaaagaagatatcgttaaatgaaagaatggagcttttggaatggccagatgatttttttgatcaacaagaaaatgatttaaggcatatgagagaaataaggaggaaaaatggatagtatcatttcaaatgagatttttcaaactataaaaagtgaaaatgttcaagaatatttaaatgacattttgattttgatgaatgaggttgataatcataactttaaaatgaaaaaacataaagatatttgggaagttgaaattaatggtgaatttttttatgagtggttatatagtaaaactccagctgagctagtagatttgaaaacagaattttataggcgtatggagagagtaagtgatattgatttagatgagtataaagcttttgagtcttttctaaatgaatctaatcctaagtataaggactatgataatcaatttttatttatcaagaaagataacatcaaagaaatacatgtactatcatctttaaaaagattttattctctaagaagatggtatttggagaaatgtggaaatcaaaaaaatttttataatgatttaccattattattccctaacatttattttcatgagaatgttaaatcaacattaagaaccttgaataatgactttaatttaattcttcccgaaattgtggaacatttatctgctttagaattatttcatcacttgaaattagcgaaagatggagattcaaatattgagaaatgtcaaaagtttgaaaagttttctcaaattagctgtagtcctgaaagtaaaagagcgacagcagaaaaactttcttttaaagatgaccggggagagaaaataaattgtgaatgtcacactaaattcaaaaaaattgcaagagacaaaacaaaacaagataggatttatttttcttttgggcagaaaggttatcaagaagaagcaattattgtttatcatataggaaaacatatttaataaagtagaatattctcactagcactgttagtaagaatatccttagatttcatggggtgttactttttgaataaaatttgtagagttagttcttcatatgaagtctctggttcaacaatattactccaattgactttccgtatctataagcagtaatactgcagaagacctattgaaaaagtatttaattttttgtgaaaagttattgtgctttctaaattataattcaaaaagcagaatatgactcggaatagtaaatatttagctattttctttctatggatttgagtggatattttgaaatacattcataatagcaaaactagatgcttagattattagtcctaaataaagagtataaatccactaaaaaagaaacaaacaaaactctagtacaaccaccaaaccaaaaccccaacagtccaaaccatcgcaagtggcactaaaatccgaaacttcggcttttgcgttttatggtgaaacaactgcatcgacatccaactaccaaaggcaccaccaagaaatgcggagagaagtagtactgattcaggtatccggtatgcgtgtttaattgctttccgtttatcaacagcgaataatagaaaagaaataagcgttatcgcgattaaatatatcgttaaaatcatctggaaatccccctttattgctaaaactaactttattgattagaataaaagcataccacaaaagaaagcagggataaaatggcaaaagaaattattcaaacctcgtcagccccaaaagcactcggaccatattcacaagctgtaaaagtgaatggacttattttcacatcaggtcaacttggtattaacccagcaactggagaattagcagaaggcgcaacaaaacaagctgagcaagcttttaaaaatttagcagccgtactagaagaagcgggttctggactagataaaatcattaaagcgactgttttcttcaaagatttaaatgattttacagctgtgaatgaagtatacgctactttcttttccagcgatttccccgcaagaagtgctttccaagtagccaagttaccgcttgacgctgacattgaaatcgaagttatcgcagaagcataaatattcagaaataaatttgacaatcacgagaagtaaacgatataataagaaccaattacatagtaacttatcaagaaaggtggagggttctggcccagtgaagccttggcaaccggacttttcacggtgccaaatccagcagtatcactgacagataaggcacgcgaaacaggtaaatcactctttcccttaaaagctgtcttttgggggaaagtttttttgtacataaaaataactagaattgaggcgaagaaaatgaatcaagtggcaccattttatgcagatcatgttggaagtattttacggacaaaggcaattaaagaggcacgcgagaaattccaaagtggcgaaattacaactcaagaattacgtgaaattgaaaatgaagaaatcaagtacattgttgaaaaacaaaaagaagtgggtttaaaagcaattactgatggcgaatttcgccgcgcttggtggcattttgatttcttagagaatttggatggggtagaaggatacgatgcggcgggaggcattcaatttagcaaagtccaaacaaaatctcattcggtgaaaattacaggtccaattgatttcacgacgcatccatttatagaagattttattttcctaaaagaagccgttggtgaaaatcatgtagcaaaacaaacgattccaagtccggcgatgcttcattatcgtggtgacatggagtatcagccatatatagacgatgctgataaatttgtggctgatttagcggctgcttatcaaaaagcgattcaagccttttatgatgccggttgtcgttatttacaattagatgatacatcgtggagctatttatgctctgatgaacagcgtgaagtcgtacgtgagcgaggttttgaccccgatacactgcaagaaacatataaacgcttattaatgaagctatcaagtataaaccagcagatatggttattacgatgcacatttgtcgtgggaatttccgctctacgtggatagcagaaggcggttatggaccagttgcagaaacattatttggcaagctaaatatcgatggtttctttttagaatatgataatgaacgttctggagatttttcaccactaaaatatgtagcgcgcccagatttgaaaatcgttctcggcttaatcacctctaaaacaggggatttagaagatgaaacggcaatcaaagcacgaattaaagaagcgagtgagattgtgccgctaaatcaattatgccttagcccacagtgcggattcgcctctacagaagaaggcaatattttaagtgaagaagagcaatggaacaaattacgttacgtcgtcaaaatcgcagaagacgtttgggggaaataacaaataagaagaactggcctaggctagttcttttttcgtctttacaaaaacagcaagtaggaatagaatagatgttctagaaggaggggaagccctttggatgacaaattacaaaccaaattaaccttattacctgaatcaccaggttgctatatttatagagatgaaaataacgaaatactttatattggcaaatctaaatgtttaaaaaaccgtgtaaagtcttattttcatagtaaacaaatcggtaaaactgcaagacttgtaagacaaattcgtgatttagaactaattatcactacctccgaaaaagaggcactacttctcgagatgattttaattcaaaaatatcaacctcctttcaatatccagttaaaagaaggaacgagttatccctatattaaaatcacgaatgagaaaaatccgcatatcgaagttgtatttgaagtgaaacaagatggcgcgcactacttcggtccatatcctggtcggttttcagcaaggcaaacagtagaacttattgaaaaattatatccgctttgtagatgtgacggaaagccgggacgtccgtgtttgtactatcatttaggactttgcctaggaccttgccaagcagaaattgaacccgctgtatataaaaaacaaattcaaaaaattagtcgttttcttgaaggcgatgttaaaggcgtgaaggggaagctcactaaagacatggaagcagccaccgaaaaactggaattcgaaagagctgctgaactacgcgataaaatccatgctattaatgaaaccatcgaaaaacaacatattattttccccggactaaaaaatcgtgatattatcggctgttatgaacaagataatcatttaagtgttttcgttttctttgtccgaaatggcgcaatcaacggtagtaaatggcatgttttcccaatcgaaaattcgctccaagaagacttagccaattttatcaaccaattttacgaagatccaaataatatccaaccaaaagagttgctaatcgcagaaaaaatcgataaaattactttgaaagagccgctccgtaaggcttcttccttcccgcaaaaaggtggaaagaagaaacagcttaatttagctatcgaaaacgctaagagcacgtatgccgcatatgctaagatgaaagaatacgattttgaaaaccaattgaaaaacagttagaagctagctttcactgattagcttctttgttttgctgtattgaaaatcttatcataaataactatggtcaataatctagccttatggtaaaatcttacgagtacggaaaaaaattaatgctacataaaataattaattatagctaaacacatatagagggaggacacaatatgaagaaattttcacgcttcatactaacaatggcagttgcatgtgttgccatgttcattttcacaggaaacgggttaaatgcaaaagccgcagaagaaacatacttgattggtacagatactacttttgcaccttttgaatttgaaaaagatgggaaacatgtcgggattgacatggacattcttaaagccattgccaaagatcaaaattttaaatatgaaattaaagcaatgggattcaatgcagccgttcaagcacttgaagctaatcaagtagacggtgtaatcgctggaatgagtattacagacgaacggaaacaaaaattcgacttctctgatccgtactttgactctggcgttgttatgggaatcctgaaagataacgacgaaatcaagaattatgatgatttaaaaggtaaaaaagtagccgttaaaacaggtacagaaggttacgctttcgctgaaaaaataaaagataaatatggttttgatattgttgtatttgatgactcagcacaaatgtatgatgatgttaaaacaagaaattcagttgcctgttttgatgattatccagtactcgcttatggcgtgcaaactggaaacggcttaaaaatcgttactgaaaaagaaaaaggaaattcatatggttttgccgttaataaaggccaaaatcaagaactcttaaagaaattcaatgccggtcttgttaatattaaagctagcggcgaatatgataaaatccttgaaacttatttaggaaaagatgctgttaaagaaaatactactgaaaaaggcttcatgggtattattaaatcttcctggccagcacttttagctggaatgtggttgactattcgtctagccgttgtttcattaattattgccttcattattggtattacatttggctttatgaaagtgagcaatagtaaaattctacgtgggattgcaacagtttatgtagatattttccgtggaacaccattaattgttcaagcattcttcttctactttggtattccagcagcgctcgactttaggatgccagtattcttggcaggggtcattgcgctaagtttaaatgccggtgcttatatggtcgaaattgtacgcggcgggattcaatctgtcgacaaaggacaaatggaagcagcaagaagtcttggtttaccacataaaaaagcaatgatgaaagtcgttctaccacaagcaattcggatgatgattccatcctttatcaaccagttcgttatcactttgaaagatacgtcgattatgtcggcaattggactcgtcgaattaacacaatctggtaaaattattatggcgcgtacgtttgaaagtacatggacttggcttatcattggaattatgtacttaatcgtcattaccattttaacgaaagtgtccgatcgtttggaaaggagattacgaaatgactaaacttaaagtaacaggtcttaaaaaaagttttggcgcgaatgaagtgctaaaaggcattgatatagaagtaaaagaaggcgaagtagtttgcgtaattgggccatctggttctggtaaaagtacctttcttcgttgcatgaataacctagaggaaatcacggctggtgaagttgttgtagacgattttaatattacagataaaaaagtagatattaataaagttcgcgaaaacatcggtatggtttttcaacattttaatttattcccgcatctttctgtgttagaaaatattactttagctcctgtagaactgaaaaaaatggataaagaagcagcgaaaagtaacgcgcttcgtttacttgagcaagttgggctaaaagaaaaagcagatgagtttccaaatcaactatctggcggacaaaaacaacgggttgcgattgccagagctcttgcgatggatccagatattatgttgtttgacgaaccaacctccgcacttgaccctgaaatggtcggggaagttcttggagtaatgaaagagctagctaaagatggaatgacaatgatgattgttacccacgaaatgggctttgctcgcgaagttggcgaccgtgttatctttatggatggcggttatatcgtggaagaaggaaagccagctgatatttttgacaaccctacaaacgaaagaacaattagtttcttagacaaagttttataataaaaaagcaatatgcctgtattattcaggcatattgctttttttattggtttgttaaaacgggattttttcgattctttgaaatctgttcgtaagcatatcccatatttagtaaagctatgtccgtattacgtttagagacaaaagttaagctcttaggttgatttgattcagtatcatagccagctgggatagtgagttccggatttccagcgattggagctaggaacttcacagatccgccgacacctgctgatacgatagcgtctaatctttcattttgtaacacagaatccagttcgttttgtgtaatatgaataagttcattagctacgttatccgcttcttgtttcgtcattgtactattctgcgacgctacaagttcactttggccgaacttcatgtttctagtaggattagttttattaaaagcgataatcgattctaatgtcgacataggagaacgattaatttgtaaaaattgattaagatctcgtttgaaatcggcatttaataaagtgatataatcagtatccacttgttctaattcttccaatgtgatgccctctataacggttgcaccagcagttgttaaatcttttttaattttctttaggatggctgtttcttcattgctttcatcatcagacagtagtccaatccgcttattttttagcgcatctttggaaagtggtgtttgacttgcttcatccattaaaacattggttgttaaataagcatctgtaactgttcttgtaagtggaccaggcgtatcaaatctacttgagagtgggataattccctcattgcttacaaggccttgactgggtttaaagccaacaacagattgagctcctgctggtaaaatgatagaaccatttgtttctgttccaatcgcaattgcagcgaaatcacaagtagcagcagttgcagatccagagcttgaaccaagtggatctagttcggaagagtaaggatttttgctacgccctttttttcctgagtagccatttggtactccgtcgtccattgcagctgcccattctgacatattagtttttcctagaattaaagcaccgtttgttttaagtttgtctacgatagccgcgtctttctccattacccaatctttaagggctacagtaccggcacttgttggcagggtaatagtaccaatattatcttttaaaacgacaggcatgccgtataaagctggtttatttggctcgttttgattatcaagttgttctgcttctgcaataatagtaggactaacctctgtgattgcatttaacataattccattttgatcgtgtttttttattcggttgaggtaaattcctgctaattctttataacttagttggttagttgcaattaaattttgaagtttggctatgtcagccccaattacgagatgctctttttcttcaagagccgctatatccaatgattctagttgtgcgtcaattggatccattactcgttctttatcataaaaatttatatcttggattggcgtctcttcggtcggttcttgtttacctggatttactttcccaggttttactttactcggcaaagtgttattcggtgtagtgttattcagcttagaacttcccttttttttcgctgctgctgttttgtcgtttgttaatttaatttcgaaatttttgttttgattaacagattcctgtgaaacttttccagttaatctaccaacttctaatgttttattgccaaaaccagtttctagtttgaagttttctttatttgaaccgatttttttatctttatcatgttgattggaatctttggatttggatgttggcaggtcttttttggaaaggctagaggttctttctggtgcggaagtttgttggcttgttaggtagagataggtaccggttacactaaacgttgtaataactgtggcacatatgatgataattcgtcttttcatgtaattcctccgatgtctgatatatgtatcttattatataggaagtataagagaaaatcagtgacaataatgtgaagataagaattatatttttagacttgatttcatgcataatagcgatatattcacaatctgattacttaaaaatcttttatgttgttttcttttcacaattttgtcacaaaatagcgacttttttccttttagttaacaattattgattattatattttataattgtaagaaaggtttacaaatccacttaggaaactttatgtgaaaaaggcaattattctttatattaatacgatattatccaaaaaaattcggttttcaaacgctttcttgaaaaaagtcacgaatttaggttagtttttagattaatagggtatttttactaaagagaatatggtaaagtaaggaaagagagataatgaaaagaatgaaaactaatttggaagatggagtgatgagtttggataataatcaaaaagatttgaatcaagtaatccgtcagctcaaagaaaaaggtattgtggttgaaaaaaccaaatcccgaaaagatatatggaaatcggtaagcgggaaagcgatgccgaatatgacacttcgattgcaataaaatcgataagtggggactttttatatgttatttgtctgcgttttttgtaagtgaagttacgaaaaacgatagaattcgcatgtaaaattactccactttttttctttgtcataaattagtcattaagttttgatgtttctgttatcctttttaagcgaaaatgttgtatgatggtatggaagacttctgtgaatgaagaaaatagaaatagagtgaggcaaatacatgaaaaaagaagcagttaatcaacaatctatttatgttcatattgatcatgttattaacaatgtggcgacaagcggcatttctttttgtgattttttaaatggcgttgggcaaccgcctgaaaatatattgttaatcaaacataatatggaagatgcgtcttataatgcacacacggcttttcattacttagagccaggcgatttggcaaatatatctaaagaaaatttcagtccactttgttggattgattttgaagatgtggaacttttaaaccaacttacaccgcaagaagtggctgagatgctttatcttgcgcatacgggacgccaccttcgttctcctttttactataaattacaaaataattttgtttatttaacgagagaagacggtcgctacaataaagtatattatcgaaatttaaatcatttttatatgttgctaagttatgtcattgcccggaaaacatcggaactcgttaatgagaaaggcattttttcgtttggaaagaaaaaatatgtttctgaaccaccagttgagctactcaaaaaaatgtccgatcatttcaaagacggtgcttgtatagcaatggatgatgtcgttagaactagaacccaaatcgaagtaccaattggccttggtcttacggaagaaatgactgaactagaaataacttcaaaaatttactacgaagaagaagtcgcaaaactagtctatgatttaaaacaaaatgaatggaaatatatcgaaaaataaaaaatcaaaccttttcctttacgtttggttttttatttgatagaatttaactaatgaacgttagttaggaggattattctaatgacgaaaaaacttatcaaagaagtagcattaaccctttttgcagaaaaaggatatgatggaacggctctttctgaaattgcaaaagctgtagggattaaaacgccatcgttgtatgcccactttccatctaaagaagcgctttttatggaagtgtatcaagatagcatccacacagaactaagcgaattaagtaaagtagctgatgaagaagcgctaggaggagaagaaaaactgcggacaatcttttttgttgcgactgatttttcaagaagtcctgatgagaaaaagtttttccaacgagcagtattttatccaccaaagtctctttttgaagagttaaaagaagagacgagaacttatgagcagttaacgaatgatattttacgaaaaacgcttgagccggcgctccctgaagatgctttaacaagatggatgcatgtgttctatgcgttactcgatgggcttagcgtcgagcacgggatctatgatgaaacggaatttgagttgcgtaggaaatccgcttgggaagttctcgcaagtttactcggataaattggaggtaaggaaaatggcttggttttatttaataatggcaggattatcagaaattgtttgggcttttgggctgaaagaatcgcacggctttacgatgttagggtggagccttttaacgatagcgtttctaatagttagtttcggtttgttttcgatttccatgaagtcgattccaattgggacggcgtatgcagtgtttaccggaattggggctgctggtacggcgattattggaatgatttttctttcagaaggcgtttctttttggaaaattatttccctaatcgtacttttaacaggaattattggccttaagttagtggatggcaatgagtctgagaaggaggctaaataacgatggattggatatttttactcgtagcaggtttgtgtgaaatggtctttgttgtcatgctgaaattatcagacggatttaaacgtctcggatttgcgatactcaccgttatctttatgtcagcgagcttcttcttattatctctcgcacttaaaacaattccgattggtacgggttatgcgatttggaccggaattggggctgttggtagtgtcacactcggaatgattgtctttaaagagcgtaagagtgttgggaaactgctcttcattacgatgattattgcaggcgttgtcggtctgaaattaacatctggtgtttaaataaaataggttgaaaaagatctttttggaataggagcacgtcattcttattcgaaaatgaagattttttcaacctattttttagttatgtcttttcatcttgctaaaacatggtaaaatagataaagcgaataatgacggaggggtattatgaaaaccaagttaattttattatacggtggaaaatctgctgaacacgaggtttctttacaaacagcattttcagtaatcaatgctttagatttagaaaaatttgaagctgaaccaatatatattacaaatgaaggtgagtgggttcaaggaccgctactttctggaaaattagattttgtcgagcaattacgtttctcggctacagatagagtgaaacttgctacagctgaatcagaaaaatcagaaggggaagcaattagcccagctgttttagaagctgacggacaagaaacagttgtattcccacttttacatggtccaaacggagaagatggaactgttcaaggcttattcgaagttttaaatattccttacgttggcaatggtgtcctagcttcatcagcagcaatggataaaatcgtgatgaagaaaatttttgcagatgctggtattccacaagttccagcagttgcggtgcgtttaattgattggaaaaactatcaagaggaaatggttactgaaatggaagaagtgcttacatatccagtcttcgtaaaaccagcgaatcttggttcaagtgttggtattagtaaagcaacgaataaaacagaattaattgaagcgatgacagaagcatttttatacgaccgtcgtgttgttgttgaacaaggtgtggttgctcgtgagatcgaaatgggcgtgcttggaaatgatacgccagtttgctcagttccaggagaaatcttgccagaaggtgcagttgctaagttttatgattacaaagcaaaatatcaagacaacaacactgcattaattattccaacagaagtagaaccggaaattttagaacaaatgaaagaatatgcagttcaagctttcttaggtcttgatgcaagcgggctcgtgcgtgctgactttttcttaacggaagataatcagttgttcttaaatgaagtaaatacaatgcctggtttcacaccatatagcatgtatccactactttggcaggaaactggcttaccatacggagcgctaattgaacgattagttgatttggcaaaagaacgccacgcagctaaaaatgcacttaaatataaattagaagactaaaataaacaagaaagcagttttcagatgcggaagctgcttttttatggaagagagcgatttaatttgaaaaaaacagtaggcgaagtagtagcaatgttagatagttccatccatgtagatacatttcgcgatgtcgtcattactggcatttgttttgacacaaggcaaataaagtcaggagatttatttgttccgtttgtagggaatttacgcgatggacacgaattcgtaagtcaagcacgagaaatgggagcagtggcgactttttggcaaaaagatgtacccaatccaccaactgatttcccggttattttagtggaaaatactttgctagcacttcaagagctggcagcgaaatatattcagcaagtaaaacctaaagtaattgcaatcactggcagcaatgggaaaacgaccacaaaagatattatggcagcaattgttgaaacgacttataaagtgcactatacgggcgggaattttaataatcatattggtttaccttatactattttaacgatgccggaagatacagaagtggctgtacttgaaatggggatgaatcatcgtcatgaaatcgaagtgctgtcaaaaattgcaaaacctgatattgcgattattactaatatcggcgaggctcatattgaataccttggttcgcgtgaagaaattgccaaagcaaaactcgaaattacagcaggcctaaatccaagcggtattttaatttatccacatgaagaaaaccttcttttaggaaacgtagatggcgattttagacaactaacttttggtaaatcagatgcagcggaaatttatccgttagaaattcgcgctgaagcagaagggacctcttttataacaaactgggagccagatttagaaatttttgttccgattattggcgagcataatgttttcaatacaatggcggcgatgcttgcggcaagagaaattggtattgaaggcgaaaaaatacaatcagcacttaaaaatatggaacgttctaaaagtcgtttagaatggataacgaccaaaagcggcgcacgtattttaaatgatgcttacaattccagcccaacagcgttaaaaacagttttaaaaacttttatgcatatggactcaaaaggtaaaccaaaatatttagtacttgcagatatgcttgaattaggcgatttgtcgacaaaactacatcaagaatctgctgaagtactagaaaatgatacgattgagaagattttcttatacggtgaagcgatgaaagctttcaaatcagtggctgaggcaaaaattggtcagggaaaagttcaacattttgacacaaaggaatcgcttgagacggcgcttctttcagaaataaatggaaatgaatggatactggtcaaaggttcttacggaatgggcttgaaagatgtggtagaaaatcttattattaagtaacgaataaaattggacatatgatattaccgattaattggtaataatttggacaggaggaaaggcataatggttgcttgtttgtgtattcatggttttactggttcgccgtccgaggtgaagccgctcgctgactatttgcgagagcatacagattgggatgttttagcacccacattacctggccatgatcacctgcgccacttaaaaaatgtgacgtataaagattggattgtttttgtagatagcattttaagtcaaatgttaaaagaagacgatgaagtatatattattggtttttctatgggcggtttgctcgcaggatggcttgctaggcattatccggaagtgaaaaagctggtacttctaagcacagctgtaaatgcgatggaatggccacaaattatcgaaaattccaagcaagtaattaccgaagcaaaagaagtcacgcttaaaaacagcccgatgttcaaacgctatcaaaagaaagtaactgaaaccccgtggacatccacgcttcaatttaaaaaaatggtcgctcttgcaaaaccagtatttgaacatattgaaattccaacttttattgcacaaggcagtgccgatcctattgttcctgctgaaaaaagtgtcaattttttaatggaaagtattccaggaccgaaagaattatttattctagaaggttcaaaacatgtgatttgtcaggatgaacaagcagataaattatttgcagctgttttaacatttttacaaaaagatgtagctgtactaaatgcaaattaaaaaaaccgattcagctctcagttgctgaatcggtttttttgttttcgccaacagaatctcgggctattaaattagtcgcaagtgccagatgaacaaagccttcatctggttttcttacgcgattatacataagttccactgctttttcgcccataaacgaaagattggtacacattgtcgtaagtgggggattgctaagtaccgtaaattcggtgttatcaaaacaaataatcgataagtctttcggaatattatatccttttgattgcaaataagtatttaaaataaatccaagacctgaattaacgcaaaaccaagcagttggaagttcatctagctcgtctaacgtccggtatagtgtcgtttgttcttctttaattcgtgtaatggcatatttttcattaaaaggaatctgatgatactgcaatgcttttttgtatccttcaaagcgttcctcataacttggagaaaaagtagtatcaccaagaaaaccgattttttgatgtttattttcgattaaaaattcgactgccgtgaaagcaccgtctttattttggctaataacggcatcggcttttaaatgtggatcgtgatgatcaattagtaccactggcataccaagttcaatcactttcttactgtaagctgtattaatatgcgatagcaagaaaatccctgtccagttttccgttgttagttgctcaggaagttgattcttttctgcctcctcatcagtcactggaaaaataattaattccgcttggtgagcaatgatgctttgtttcatattatcaataatttcgccaaaaaaactacgttgtgataaggcgaatgaagttgctaaaagtgcgaatttttctttcacgacttctcgtgcgatttcttttttatatttataacctaattcatcagccattttaaaaacagccaatttagtttgctcgctgaccccgtttttattacctaaagcttgtgaaactgaatttttcgttatatttagcctgtcagcaatatcttgcattgtaactttcttcatgcttccccctccgttttcctctgtttattctattatagaagttaattcacaaaatagcaaaaattttataattaaaaagtaatgttaaaagtaatttttatgatttttgatagtaaatgcttaaaacgtttataataaaagaatttataaaagtaattattgacattacaaaaatgtaatgtgataatgtaatcgtaatcaagcgcttacaattacaaaaagtggaattaggaggattattgatatgaagattagaaaaattgctattgcggctcttagtgttgcggttgctggctcattactaactgcttgtggcggtggaggaaacaaaagtggagacgataacggtaaaacaaaagtaacgttttgggcagctccaaatccaactcaagtaaaatattgggatgaaatggcaaaagcatatgaaaaagaaaacccagatgtaacggttgaagtttcccaaatgaaagaaagcccatcatcagaagcgacaattcaatcagctatcgcctctaaaacggcaccaactatgtctgaaaatatcaatcgtagtttcgctgcacaattagcagatagtaaagctattgtacctttgaacgatgtaaaaggtctcgatgatgttgtaaaagaaagaaaaatgagcgaaacaatggattcttggaaattctctgatggcaatcaatatgtgctacctgtatactccaatccaattctttttgcttggcgtttagatacattaaaagaacttggctatgatgctccaccaaaaacatatagtgaagcacttgaagttggtaaaaaattaaaagcgaaatatccagataaagtactttgggctaaaggtgatttatctgacccaacagcatggatgcgctggtttgatttcttcccactgtatgatgcagcttcaaaaggaaatgcatttgttgaagatggcaaattagttgcagacgataaagctggaacagaactgttaaccttcatgtccgaattgcaaaaaaataaattactccttgcaagtaaagcaacagatccatttgaaacaggaacaagtatcatggcagacaacggcccgtggactttccctaactgggatgaaaaattcccagaacttaaatataacgaaaactacgcaataactgcaccacttgtaccagacagcatggcaaatgagaaaaatattgctacttatgctgattcaaaaggggttgtaatgtacgctcaagcaacagataaagaaaaagaagcggcaatggacttcttgaaattcgtttataacgacgataaaaatgatttgaaattccttgaaactactaatttaattccagcacgtgacgatgcaactgaaaatgaagctttcacagcattctttaaagaaaatccagaattagaagtatatgcagcaaatgtgccgtatagcattccagcgatggatgatgcgaaatacaatgatattcaacaagttcttggagaagaagcttggaatccaattgtacgcggggagaaaaaacctgataaagcttggtctgacatgaagaaagcggaggacggggtgcttcaaaaatgaagcggcgaaataacaaattgggctggtcatttaccagcccgtatctcatattcacagcggtatttttcttagtaccgctaatttggtcaatttgttgtcggtgaccgattggaacatgatgagtccggaaatcaattttgttggtttggaaaattttattaaagcttttactagtccggcagttcgagcagccttttttgtcacttataaatttttaattgtgtttgttccgatggcgttaattatttcgatgattgtcgcagtacttgtaaacggactaccgaagtttaaaggactatatttagtggcgtttttcctaccatacttgtcctcaggtgttgttacttcactaattgtgcaaggtttactttcgtataacagtgctctaaatgtgtttttacgtgggcattttggttgggatattgattggcttgggacgccgatgtcggcacttgtcattatttcgctaatgattgcatggaaaatgtctggttattatgcgcttattttaatttctggactcgctagtattaaccatgaaatttatgaagcagcagcaatggacggctctggtcgctttagaaccttttggaaagttaccgttccgatgctctatccagctttatttaccgtgattgttttagcggtaggtgttagttttgggattttcaccgaagtataccaactaactggcggtggcccaaattttgcaacgaacacatggcaaatggagattttcaaccaagcattcgttaacttgaattctggttatgcttcagcgatttctcttatggctgctactgtaacgttcgcatcaattggagttattaagaaaatgcttgagaaatggggtcaaagaaatggttggacataatagtaaagcgggaaaaattgttcgctatatactgacaacattgctcatgttagttatgatttatccgtttatttatctcgtattaaattcatttgcagcttgggatcaagtagataaaaagctcattccgactgaatttaccactcgttcttgggattggctgtttgggaattcagtggttgcggcgcctgctccgtggattcacgcctttattaataccattattgtttccacgattgcgacagggttaatgttactttttggcttaatggtcggctatgcactcgcaaaagttgattttaagggtaaaaaaattgttaataatgcgattttattccaaatgtttttcccggcgattattttgctgattccgcaatttttaatgattacggactttgggttacttgatacgtacgctggaatgattattccgaccatgcttagtttatgggccgtatttatgtataccaacttttttaaagcgattccagatactttaattgaagcagcaaaattggatggtgcgagtgatttgaaaattctatttcgggttgtacttccgatgtccaaatcaatcactacagttatctttttattcctgttcacagacagatggacgaatttactttgggatatgcttgtaacgaagagtgatggaacggtaacgctgaatgtactaatttcgcaaatgttcggaccgtatgcaacttatccaggtccaatgtatgcagcttctgtactactcacattgccactaattattctatttttattcttctcaaagaaattccaagaaggaatgcaatttactttgaaataaaaggagcgactgaacttggaattttggcgaggtagtgttttttatgaaatttatatgaaatcatttcaagatagtaatggtgatggtttaggtgattttaaaggattgactagtagattagattatttggtagatttaggggttgatggcatttggctcactccattttatccttcaccacaagtggataatggctacgatgtttcggattactgtgatataaatccagattacggtaatatggctgattttcgagaatttatgaaagcagcagacgcgcgaggcataaaagtgattattgacttagttttaaatcattcttcgacggagcacgcgtggtttaaggagtcgcggagtagcaaaacaaatcctaaacgagattattatatttggcgtgaaaaaccaaataattgggagtcgttttttggtggctcagcttgggagcttgataaacttactggtgaatattattatcacagttttgcaaaggaacaagctgatcttaactgggcgaatccggctgttcgcgctgaaatcgagcaagttttagcattttggttaaatgaaggcgtggcaggattcaggttagacgtgattaataatttaacgctagtacttgagttcccagataatccagttgtagataatgaaatggagcatgtttatgatcgaaatcaacaaggactcgaacaagctttagagcagattgctgctttttgtcgcaaagagcgagaggtatttttagtaggtgaaattagttctgataaattgccagaaattgcgaaatatagttcgaaaacaatgcttgatgtgacctttaattttaattttggaagtgtcgaactgcttgatgcgcaatcggtatttactactttaaatgaaatggaaacggcattacaagaagggcaatggccaacgcttttctttggtagccacgatatgagtcgatttacaacacgactttcaaacggaaacttgtccaaaacgaaactgttagcgtttttaatgttaactgctaaagggataccgtttatttattatggtgaggaagtggggatgccagatttaaccttttcctccgtggaagaaatgcgtgatattcaaggaactgcagcttattatcaagcgttacaagctggttcagatgaacaaagtgcacttgagctcgcgataaataaaacgcgcgataaagcacgcggcccgatggtatttccagatgggaagccatttacgaccggtcaaccctggattaaaatggctagtttaaatgaggaagatgcattatcaatgtggcatttttaccaagctttactcgcttttcgaaaaggtcatgattttaaagaaaaagaatacgcgtcattaacgttagatggtgaaacacttagctatcagcgcggggaattcttatttttactgcattttggtgagacagaggtgacatatccacttcaagagaaatcagagcttgtttttggagatgcggaaatgttagaagctgacgttaagatgggagcgtatgctggtattgcgctcagagtggaggattaatatgaaatcaattgaaacattattgcaagtttatcgagaaacaaagactgcttctcacacccgtcttgagttaattggtgcttttgacaaggatgtctataacattactgcaccttttacttggtttggaaaagaatatattgctgggcgagtggaagcacgggatagtgagtttgcagaagtgcgcttttttgaaaatacggcaaaggatacgtatcaattagttgaaaatacgactatcctagccctgcaagatccatttgtaacgtttgtacaaggagaacttattatcggtggcgtggaagtttttcctaaagaatcggacagggcaatgttagattggcgcactaatttatatcgcgcaacttcgcttaccgactttgagcaaatctttacaggtccaattggaatgaaagatttacgagtgaaagagctaacagacggccggattttagtactaacaagaccacaaggcgaaaaaggcggtcgcgggaaaattggcgcaatcgtcattaattcactagcggatttaacaatcgaacaaattgaaaaagcgccccttttaaaacgaaatttttcaggtgatgaatggggcggcggcaatgagattcatttgctcgaagatggtcgaattggcgttcttggtcatattgcttgttttgatgaagctggtgatcgtcattattacgcgtgctctttttgtttaaatgaagattttacacaaatcgaacaagaaaaaattattgcagaacgtgctgattttgctccaagtgagccgaaaagacctgatttagcagatgttgtatttagcggcggtttaatcagaaattcagacggtactgctgaactttatgcagggattggcgattctgatgcacaaaaattaaccattcctgatccatttaaaaataactaatagtaggagttttgaatagaaatgaacatttatcgttatgaagaaaatccattaattacacctttagacgtgaaaccaatccatgaaggttttgaagtgattggcgctttcaacggcggtgtggccgagtataatggcgaagtgcttttacttcttcgtgtggcagaaaaaccagttagtgaagacccagaaatagttcttgcaccagtttataatgcgaaaaacaaagaattagaattacaatctttccgtttagatgatgaaaattatgattttgaagatccgcgaatgattcgcagtaaagcaaaactagaaggattttcttatttaacttctctttcttatattcgaatcgctcgcagtaaagatggtcatcattttaccttagatgaaaagccgtttttatacccatttaatgaatatcagacatttgggattgaagatgctcgcgtgacacaaattggagatacttatcatgtgaatttcagtgcggtatctgagttcggtgtagcagatgcattagttacaacaaaagactttgaaaatttggagtatcaaggcaatatttttgctcctgaaaataaagatgtacttattttcccagaaaaaattaacgggaaatattatgcactgcatcgcccaagtttaaaaagtatcggtaacttagatatttggattgcttcttcaccggatttgcgtagttttggagatcatcgtcatttacttggtatccgtcctggtgaatatgacagtggtcgcgttggtggcggttgtgtgccaatcaaaacagaagaaggctggttgattttatatcacggtgcaactgaagagaatcgttacgtgatgggcgcggcattgcttgatttaaatgacccaacaattgtactgaaaagaacgaaaaccccgattttagaaccagtagctgattatgaaaaaaatggtttctttggcgatgttgtttttgcttgtggagccattcaagaaggcgacacgttacacatgtattacggggtagcggatacttccatggcaggttgcgatatgaaaatcagtgaaattttacatcagttagaagtggaagctaaatgacttggcaaaactatttgaatgcttggaaaaatgccgatttatctgatgagtggcgcagtgaattaaaacgagtggaacatgaacaggagcgttttgaaggatacttaacatttggaacaggcggaatgcgtggcaaaatggggcttggctcgaatcgcattaacctttttacaatcagacgggtggcaagtggattaggcgagtatgtggcagcaaatggaggcaaagagaagggcgtcgcaattttttacgattctagaaataattcagacgtttttgcagctgaaacagcaaaagtattatcagcactgggcattcgagtttatttatcagatacgattcgcccaacaccagcactttctttttgcgttagagaaacgaaatcctttgccggagtagtgattaccgcgagccataatccttctatttataatggatttaaagtgtatgatgaaaatggatgccaaatcacattaggtgcggcacaggaaattaccagctatttaaataaaataacggatatttttcgtataccagttcgagaattaccaaatttgctcgttactaccattggaaaagaaatggacgacgcctatttacaggctttaacaaaagtaatttctcgtccggaattggttgctgattatggaaatgaattagggatttgctatacaccacttcacggagctggtaaagaactagttatgcgaggcttagcggaaaatggcttttcaaatacgctacttgttcaagaacaaagtgagccagacggagatttcccaacggttgtttcacctaatccagaagaagaaaatagttttgaattagccaaactgcaagcgcaaaaaatgcaagcggatataattttggcaactgatcccgatgctgacagactcggagtagcagttttaaccaatcaaaacgagtatcaaattttaacaggaaatcagcttggtgctttgttattagactatattttgtcggcgaaagagtttgtaacgaaagaggatacgatgattaatacgattgtcaccggagatttaggtggcaaaatagcaagtcgatttggtattcttcatgtccaaacgctcacaggtttcaaatttattggtgaaaaaatagccgaaatggaagggacgcaagctaattttatttttggctacgaggagagttacggttacttaatagcgccttttgtacgcgataaagatgcggtacaagcagcattacttacagcagaaatggctcttttctataaaaaagaaggaactaccctgcttggaaaactaacttctttatatgaacaatttggctatcataaagaatatttgcacactattaccctcgaaaacaacgatggcgctgcaaaaatgaatcaaatgatagacactttacgaaaagaaccccattttttaccagaaatagtagctgttgaagattttctcactagcgagcgaacaaatcttctcacaaaagaaataacaaacatcgagctacctcaagaaaatgtattaaaattttacttaaaagacaaatcatggttcgctgtccgaccttctgggactgaaccaaaatgtaaaatctatttccaaaccattgctgaaacagaagaaaacgcagaaaaagcaatgaatgacttaaaagaacgcgtattagctgtatgggactaataaaaagctggaaatcgttttcggatgatttccagcttttttaaaattaaaaataactaaaaacagctgataaacgtacatttaaaacgaaataactttttttattcgataatagcatggaaagataaggttttgacattgaaaagaaattgttattgtgttatgatgttagatggaagtttattaggtttatatttagcctagtgattaatgagggcttttttatttgatgcgttagaactgctataatggcagagaaattttctgatgccgtgaatcattttgcttggtgcgcccaggcttttctattgcagaaaaatgaaaatgaaagatagcagttttcataaaaacaactgcaaatgaacagacaaacaatcgtaataagcgtattgtgatgaattataaaagtagctctcctaccaaactttaaacaggtaaaggagaaatgacattgacaaaattttcggagttcggactggacgaaaaaattgtaaaatcagtaaatcggatggggtttgaagaagcaacgccaatccaagaaaaaacaattccactaggactagcaggtaaagacttaatcggacaagcacaaacaggtactggtaaaacagccgcttttggtcttccaatgatccacaaaatcgaccaaaagagcaacaacgtacaagctttaattattgctccaacgcgtgaacttgcaatccaagtttcagaagagctttataaacttagctatgacaaacatgtacgtgtgctagcggtttacggtggtagtgatattagccgtcaaatccgttcacttaagaaaaacccacaaatcgtagttggtacgccaggacgtattttggatcatattaaccgtcgcacactcaaactagaccacgtggaaacacttgtactagatgaagcagacgaaatgctaaacatgggcttcattgatgatattgaaactatcttaaaagaagtaccagcagaacgtcaaacattactattttctgcaacaatgcctgatccgattcgccgtattggtgaacgtttcatgcacagcccagaacttattcgtattaaagcgaaagaaatgactgcactattaatcgaacaattcttcgtaaaagtgcacgaaaaagaaaaatttgacgtattatctcgtttattagacgttcaagcaccagaactagcaattgtttttggtcgtacgaaacgtcgtgtagacgaactatctcgcgcgcttgatatgcgtggttacgtggctgaaggtatccacggtgacttaacgcaagcaaaacgtatgagcgtactacgcaaatttaaagaaggaaaaattgatgttctagttgcaacagacgtagcagcacgtggacttgatatttccggcgtaacacatgtatataactatgatattccacaagatccagaaagctatgttcaccgtatcggtcgtactggtcgtgctggtaaagaaggtatggcgattactttcgtacaacctcgtgaaatgggttatctacgtattgttgaagaaactacgaaaaaacgtatgcaaccacttcaagctcctacttgggacgaagcatttgcaggccaattacgcgtagcaactgaaaaaattcaagaagcaattacagaagaaaacttagctgactataaaacgtttgctaacgaacttcttgaaaaatacgatgcaactgacatcgcagcagcaatgcttaaaatgttagcgaaagagccagacaaaactcctgtccatattactgaagagcgtccattaccatcccgtggtggcggtggctacaaaggtaaaaatggtaaaggcggtaaaggtggcggctatcgcggcggaagcggtaaaggcggaagctaccgcgatcgtaacaacagcggcaaaggtcgtcgtagcggcggcggaagcggttctggcggtggcggaaatcgtgatcgtcgtggtggcggagaacaacgcagcggcggcaacaaaggcaactactcacaaaaatctaaataagattattagacaaatagttaccatatagatagactggagataaagaagtttttacctttatctccagtctatttttttataaatactaatgttagggaacgggtgtgtggcgctcgtcatgaagataaacaaaattatcgaatatattgtagtagcaatcatcgttctagtgtggacttacttcattgtcattaaagaaattcttcctaaaaatataggatttatttcattagtaattctatcaatagttctttattttataggtaaaaggttgaatgggaaacatagcagataaaaaacggctatactctaagtagccgttttttttatgtgcaataattcatttacattaacttccaaatatgagaaaatagcatgttggcaaaattgccacacgtggttcattcataccatcccacgtaaaaaaactaggaggaaaaataatgaaaatgaaaattttgacggtgaatgcaattatcgccgcactgtatgtagtgctcgggatgattgtcgcaccaattgggtttatggcattacaatttagaataccagaaatctttaaccacctaatcgtctttaataaaaaatacttttggggtattatcgtaggtgtttttattacgaatttattcttttctggattagggtggattgatttagtttttggcgtagcacaatcggctatttcccttttactaatgattggaatttctaaatacgttaaaggaattattccgcggatgattattaatacgattcttttctcgctaacgatggcaattatcgcttgggagttagtaattgtttttgacttaccgttcctaattacttgggcaacaacagccgcaagtgagtttattgtaatgggtgtcgggattccgctaatgtatctattaaataaacgtttaaatttccgaaaaatgattgattaaatgagagagtctaagggaacttaggctctttttatttttgtaaaaagcgggctgcctcctgtatcaattcaactaattggtcattcgtatagtctttattcgattgttgaatttctgctgctaaacttaaaatcatcctagcaaaacaattaggcataaatttactatctgaaaaggaaacttcttttaacaaactaattcgaagtatttctccagacactacatcaataaaaatattttctgcccggctccaaaaaatcacttgaaataaaagcgggtttttttgaatagttcggaggattaagcgttggatattttcttttgttaaaataatttggtcgaattccaaagagaagtactgcatggttcgcaaaatctggacttcaatcacttgaataatctccttatgatgacgataaaaagtggctcgtgatactcgcgcttgttcgcataaatcttttatagatattgattcaaatgttctatcttccacataaaacctctccaaaacagtatatagtttggtttgtgttttttgtgtacgtaaatcaacattcaacggttgatgcacttttacgtagttattcataaaactctcctttttatgatacataattgttattagtgtatcgaaatgtggctattttagcaacttaaaaaggggtattgtttacttaaggaggaatgaacatgaaaattataacaatagaagaacattttgaatccgaagtcattacgaatgaaatcaacaaagtcactggaaatttagtaagtggacaggttagtccggaaatgtttcaatatatgcaaaaggaacttccttcagcaatggaaatgcaagatacagaaaaacgtttagcatttatggatcaacatggtattgatatgcaagtactctcttatgggaatagttctccgcaaaacttaggtccaaaaatttcggtagctctgtgtaagcgagcaaatgatgaactagcgaaggtgattcaacaaaatcctacccgatttgctggttttgctgtcttaccagtaggctcaccagaagatgctgctattgaattaaaaagagccgtagaagaacttggtttcaaaggtgcacttgtaaaagggcagtttgaaaataaatattttgataatagcttttattatccgattttcgaaatggcggaaaaactagatgtaccgatttcgtttcatccatcgtttatcccagaacctattacagaacaatattttgccagtgatgcttggtctgatgtggtgaccggggtattttcatctgctggttttggctggcatatggatgttggtattcaagtcgtgcggatgattctttcaggtatatttgataaattaccgaatttaaaaatcattacagggcatttaggggaaatggtgccaatgtttttaaacagaatggacgatacactcggccactggacaacgttagaacggaaaatctctgactactaccggacaaatgtgtatgtgacaccaagcggtttattgtataaaaacgaatggaaatttttattaaatgaattagatgaaaatcatcttatttatgcgctagattatccttttgtaaaaacagaaaatgctgggactttcctagatacgcttgatttaacggatgaagtaaaagcaaaaatcgctcacgaaaatgctgaaaaattattacatttataaaaggtggaattcaaaaatgactttatcaaaagaacaaatcaaagcaacaaaaagtgagtttgcagagaatttgacgcttgcgaatttaacgattgccgaagtagcgaaagaactaaatacaagtgaagtaaaaatagaacggattttgaatttaaagcagcgttctttaaatgatggttggatattgcgaaattacttacttagaaaggtagcggaagtagggaagacaccagttccatttacagcgctcagtggggattatcatgggtattggtttttagatggagaagaaattgattctggggtgttaagtgaaggagcttgttaaataatgcatttttaaagaaaaaaattcatttggagaaggtatgtttgcatcaattgaagaataagaaataagtataaaaagttagaaggtacaggtattaatgtactttctaactttttttagtttaaataatgactactattaatagcaaatatattttcgcagagaaacactagtgttaccataatactatagtgattattgaataataaaatcaaattaatctaggatttcctcaacgtaaatctgggaaatattctttttcaaattgtaatagaatagcttctttatcgatagtaaggagaatatttttcgccttagttattaagctataatcattagtgttaacaccttgtaaataatatgcgctagctaataaatcaaagcggttaatttctttagcaataataatagcagcgtttaaactacttgttgtaatggtagaattatgttgcataaaaatagtggcagtattgataagcagagctaattttagcggatttaaagatttatctaaagcattatatttatcaatcattgttaataatcgggggacaaatttttcgattacatccagcgggaaataaaatagaatattacacacgaggcgtatctcaatcagtgagaaattatcaattttttctaatcgcttccagattggcttaacaagcttttgtgctttttcaacttcattgtttgttaaaagaagtgatgcctttaacacgattctaatatcttctaataaattgtctttaaaatgattatctaaataattatcgcatctatttataattttcaatattagttctgtttgtgtattagaaacgagtttgaaaaagtctgcaataatatcttctcgagtgtttaatttataatcatttttaatataccgaagttcatctatggttacatctaatttaatgacgatattctctattgtagtgatggttggtataatattgttattttcgattttcgagatagtagtgcgagcaagaatgttattagatacatacgattgagaaagtgatttattttttctgatttgacgaatagcagctccatatgtttttataatagctctcctccaatgtagtaaaataattataatgttttttgggggtgaatatagtgaacataaaactgaaattatgtattttcattgtaacatagtgaatatacaaataatagaatttgtgaaaggggtatcaaattatgatgcaaatgattaattggttttttggttcatcaaattatttaagatagttttagtcaatttaaataatactaagaaaggaaactaatttagccagaagatagaaatatttagttcgctttgatgcgagaataatattttgattaatctgaaaataaagaattcatgtaaggtggtgattaaaatataagttagtattagaaagaagtatatgaactttatgcaatatggcgctgaagtatatattgttgaagattatataaacaagtggggtgcttgtttggtttatacttttaaaatttaggaggaaattaaatgatgaaaaaaattgtaattgcgattgctataatctttggtgtactaggagcaagtggcgctacagagcaaagtgtagaagccgcttcaacatataatgcgacaggaatgtataacggattgctcaaggcggagttaagcttaaattatggatcatggtcttcagcagctaggtataccggaaccaagccgtataatcttcctagaatagctatccaaactcgaattcaaagaaaagatggtgtagtaaggacatattgggaagaaacaagtaataattatgtgaaatatgatggtggatctaatacagttggtccaaatggaaataattatgctcgtgcatatggatattattatggtggtggtgaaactcgagtagccactagatggatgtaatacattaactttaacaagcaccccaaatataggaggaacttcaatgtctgtattaatgtgttgtgaaaatgtatctaaaacttattcaggaaatttacagcctacattagttaatattaatttaacaattaaaaaaaataatttatattttataaaaggaccatctggaagtggaaaaacaacattacttaatatactgagtcttatagatgcacactcttctggaataatgaagttcaataattttgatattagttctatgaatacaaaagcaaaaaaccaaatacttttaaatgacataggaatgatttttcagaaatacaatctattatcaccgttaaatgtgattgagaatatcatgatatccagactatatgcagatttttctaaaaaagattgtattataagtaaagcaaagcaagtgataaagttattacatttagaaggtttagaggaacgaaaaatcaatcaactatctggtggacaacaacaacgtgtggcaatagctcgagttttaatgcaagagccagaactcttgctagccgatgaaccgacagcaaatgttgacaaggaaacagaagcaatcataatggatatttttagtcagtatcgagaaaagggagcgttaataatagtttctcataatgatagttatgctgatattgtggatgcatcctacgagttaaataaaggtaggatatcgagctatgaataataacaaattcgttttttggaatttttggaaaaattataaaaaaactagtaagcaatggttgtcaacgggagttgttactttttgcgggcttttactaataaacgtgactattttaattgtttttattggaaatacatatattaatgtaaattttactgaaaataattctctaaaatggatagaggttcagagtgatgggccttcgattccattaagacaaatatcaagaaatagagataatacgattacactattaccaaagtatgaaccctttatgagtggtgtaacgttcgaaaattatgatgaaaaaggaaatgttaaaatgtctatggatgttaatagtatttttgttccttatgaatctcttgaattttttggcataaacataaaagatattgataaaatacagtgggatgagggaaaagtaattttagtttccccaattgatgcaaaaagtaatgggctgttagatggacagaaattgtctgttccgtttgataaaacagcattcaataatgaatttgatttaagtgatactgaattagaagattatatagctaaaataaatgaaaataaaattgaggtaacagttaaaattcgagaaattacaactttgcctcaatatgaaaattattctttacttcctattcaattattagtcaatcaacacagtaaggttaattctataagtgaagacgaatttatttcgaatgctaaattaacagatgggttttacatcatagtaaagaaattcgaagatgtagataaaattgctaatgaatacaaagcaagaggttattctcttaaatatgcattagagtcgtttcaaaatctatccgaaatattatccaatgtaaagttagtaagtaattattttataatactagtgtcaattataattagtataacttttattaataattgctctcaaatattatatcatcgaaaacatgaaataggattacaacaagcgctaggaattagtaaaaggagcttgatttggagtactctaatagaattcgtttttcaaagtattatagtaatgattatcattcttccaacgattatttttgaatggtttgttgttaaaagtatgttaactaataacatagtggagattaatggtttagaaacagtacttgttgtttggggaataaattggattattatattagcaatttctttaataggagctacgttcccattaatgggaacgtttaaattaaaaattgtaaatctattgaattccataaactagtttggagggaaaatatgaaaaaatattattgtatgtatttgattgttttagtattgttatctggctgtacaacaactccagtaaaggaaaatacgagtaatcaatcaatcagtaatataaaagtagaaaatataaaagacattattccaatcagcaaagaaatagtcaaggatcaaaaaattaaagtaaagtcctatattcttaatgcccaaactggagagcgtattaatacagatattttatttgatgaagttccgaatcttttccaaatgcatggatacgatatttactcttcagcatatcaatattataaagatcgtcttgttattggctgtcaatctggcggagggaaaagttatgtttataaaatatctgacgacgggcagttgactgtagacacagtcaactataatatactttattatgatgaaaataaaagattatatatagcacaaacagatgaaggatatgtaacattaaatgaaaaatatgcagtgaatgaagaatttccagtacttaaagatagcaatattactactaaagaccagaggtttatcttgcaagcctatggtgttaatgaaatttactatttaggaagatatggtgaaaagacttaccaattaatgaaatataattcaaatgaaaagaagttagttaaagtttatgatttggtagaagaattaaaacaacagggcattgattttgaggaaggatcagaaattaatccaaaaatgactctgtataaagaaggtcaaaaatcatatatttctatctcagtagatcgaatatggaatggaaaagatgactttaaagaaattaataaaaatatcctaataaatattactaataatgtagccatatttgataatgcttttgaggaggatgattctgcatatcctgaactagatttttcaagaaatgtaatgcaaagttctgataaaatatctattttcaaattaaatgaaggaaaaataataagagtgaatgactacaatgcagaagatataattaatgatggagataatcatattaactatatctatcgtatggatgataaggaaattataatgaatgtgccatcaggagttgttaaatataatattgctgaagataaaagtgaacaactatatgtagataggcttgaagaatgattctattatattttagtcttaagattaaattgtgtttgtgactgactatcctcaaaatcactagtaactttagagttctaattctaaggttgctagtgattttttgcctaatctcgtttcaacaaaacaatatcctcattcttcgtcagcaataaatccacatgattctcgccccataagcaaagtttgttcaaaatttccgacaacgattcgccgtattcactcaatgaatactcgacttttggcgggatttgctcatatactttacgaataataaccccggatttttccagctcgcgcaattgttgtgtgagcattttttgtgtgatgttggggatgagtcgttttaattcgccagttcgtttttttccttcgcgtaaatggcaaaggatgactggcttccacttaccgcctataacttcaagtgtagcttcgacaccaatattatatactttggtcataattatcctcctataggcactttttagtatctatatgacttttaagtaccttcttgttattttgtacggtatataagatactgtataacagaacgaaacaatttgcaattttttagggggaaataacgtggatatgaaaaaagtaaatcctaatttgacacttttggcgctggcgattagtgcgtttgggattggttcaacagaatttattagtgtagggcttcttccactgatttcttctagtatgggtgtgtcgattagttcagcgggattaactgtatcgatttatgcgctaggtgtgatggtgggggcgccggttttaacaacaatgacgtcgaaaatgaatcgtaaaaatctactattattagtaatgttagtatttctgatagggaatcttgtctcggcatttgctgtaagttttggaatgctccttaccgggcgggtagtggcggcatttgcgcatggggtgtttatgtcgattgcttcggttattgcggcagatgtcgttcatccgagcaaacgagctagtgcgattgcggtgatgtttacagggctgaccgtggcgactgtgactggggtgccacttggaacctttatcgggcaactatttggctggcggatgtcgtttctgtttattgttgtgataggcgtgattgccattattgccaacttctttttagttccaaaaaatttatctaatgcaagtagtatttcatttaaatcgattgggcaattattagttaataaaaaaatcgtgatggtattactcatgacggcgtttggttacgggggcacatttgttgtttatacgtatttatcgccaatgtttagcaatatgggttattcgacaagtatgatagttattttactgattatttatggtgtgatggttgcgattgggaatacgattggtgggcattttgcgaatgagcgcccagctaaagcacttttcgtgatgtttagtttgcaagggattacgttattattgcttcaatttacgtcgaccaatgctattttaggtttaattactattatgctaatgggatttttcgcgtttatgaatgtgtctggattgcagctttatgtggtgcaattagcagaacggtatttgccagaaacggtgagcatggcttctgcgcttaatatttctgcgtttaatattggaatcgcgctcggagcatttattggtggattagtaacggaatatattggtttaagttatacaccgattgtcggatttttgatggttttcatcgcaattattttaactttctatatgaaaaaagataaatagttcaaataataggccttttacagtgaatgtagaaggctttttttgtgctttcggtaggtctgacctattccggcaaggtttttttccagttatagtaaaatggatagtttttttgtcccgacaggtctgacaaaaatagctatatagcttattgtaagccctatcatgaaaatgataaattgaatttagaaagaggagtgatacctgatgaaactaaatcagcagtgtattcaaattttagattttcttatggagcaggaagattttaaaaatattggttatatttctaacgcgcttggttgttcggagcgcagtgttcgttatagtttggaaaaaatcgatatttttctccatgagcaaacgttgccagctcttatcagacatacgaggaaaggggtgctacttccagaaaagaacatcataaatccggtggtgagtaagttcaaacagcaaatcacgccgaaaaaatatcgttacagccaagaagaagtacagcaatttttactattaaagcttcttttaagtgaagaagtgcttccggttacatattttgaagaagttctttttatttcaagatcttctgtgctaaatcatctacgcgcaattgaaggggaactttttttaaataacttggatttgtcccaccaaccgcgtcatggatttctagtgactggtaatttaattacgaaaacatccctttttgcgaggagtttcttgcgttttattaacatccgagaattttatcagtttttagattcagaaaatagcttatctaaaaaaggagagttatttttttataacctttttgagatggaagttttgcaggaagtgaatcgtgaggcgcattcggttgaagagaatatgacgcgtgcgatggatgagcaactttatttaaccttaattgctattttactaaaacaacatgaaacgaaagtagattttaagtttacagcggattttgcggtgacagatgagctagataaagcgctagaaacgattattggctcgctcaagcagtaccaatatgggagtgaagatgaagctatcattgaagcttttgtgagaggtatttgcgaaaaaatgggcgaaatttatcaagtggattttgtgcatggagatacggatttttttacacaaatgaaggcgcatattaagttaatgattcggcgcgttcgagcaggggttattattgaaaatccgatttttaatgaatttatgcgtgataatcgcgaaatttttatgcgggtgaaggaaagtttggaagcattaaagccggtgttgccgatttctgttagttctcaagaaatttcctttttagcgatttactttgcatctgaggtacagcgaaataaacaaaccgttgaaatgaaaccaaacttattgattatttgtccagaaggggtcgcagtgtcaaatatgattgcgattcagttaaaacgaatgtttgaatttgagtcggttcagacgattggtcttagaaaatttaagcgtgatatgatgaaagattttgactttgttattagtacagtggatttaccagatatgcaagatgctaaagtgcttagaattaatagctatttgcaaaaagaagatatggaattactacaaaagcatttacgaatgaagttggttaaaagtgataagcagataattaacaaatttagtaagattttagcgattatagcggaaaatacgcaaattaataatttaagtaagttagaattcgacttattggaagcgcttatatctgatgagggagaggcgccaaggaaaattatcccgccatttcaatttacagaagaggccatcattatggaagaaaattgtccaacttggcgaaaagcaattaaactcggaacaaaatgtatggagaagcttggggtaattgagcctagttatcatgaaaaaatcatccataatttaaaagtttatgggccgtatatggttgttgcgccaggtgttgcgattgcgcacgctggagcaagtgatggtgttttgatggatggtattggggtgacgataattgaggacgggattatgttttttgatagatacgaaaagccggttcatgtcattttcaccttggccttaaaaacaaaagaggcacatttaatcgttgaacaattaatgaaattagcgctgaatgaagaaaaaatgcaaaaaattaaaatggctagctcaaaacgtgatatttatcattacgttaagtcagctatctttgaatgagagagggtttcataatggacatagaaaaaatatcgttttcactaatatcgctagcgggggattcattttctaaattaattgaagcattacaagccgcaaaagaatcgaacacagaactagtagatcagcttttgaaagaggcggatgatttaatgattgaagcgcacaaagtacaaacagaaatgcttattcaagaaacgagaggcgaacaagccagtttttctgttttactcgtacatgcgcaagataccttaatgaatactattttagcatcaacgttaattcgcgaaatgattgaaatgcatcaagaaatgaaagcattaaaaaaagaggaggaaaagtaaatggaaataaatcaattacatgtacttctagtgtgtaatctaggtgcatcaaccggagtaatggtaacaaaaatgaaagaaattgctcaaaatagcgaaaaactaaagaatacagacgtgaaaatcgaggcacatcctgctggagaattacgtgagcatattgaagacttcgatgttattttagtcgggccacaaattaaacaccaactaaaacatttaagtgaaatcgcagctgaatataataaaccaatccaagtcatcgatacgaaagattacggcacagttaacggagcaaacattttaaaagacgcgattatccttaaaatgaacaaataaaaaaagtggaggggaacaacatgtcgagtaaaaacaaacaatcttttatgaaccgttttatcgcttttatggagaagtattttgagccagtcgcagctagaattgaaaaacaacgccatatttcctcaataaaaaatgggatgattgctttgatctcggttttaattattggatcattttcgctgattatttcagcaatcggaaatatgtttccagcgggttctgttgtgaaagaattctttgttcaaaacgcagcagcacttaacttaccgtttcaatttacgtttggattactatcgatttatgctgccataactatttcctacagccatgcaaaacaaatgaaagtacccgtgttacatagtgtgatggccgctgttatggtaacactcatcctcaatacgaaaatggttgacggggttctaaatacagaatttctagattcaagaggactctttatcgcaatatttgcagcacttatttctgttgaacttatcggtttgtttattagaaaaaatattacgattcaaattaaaggattaccagcggggattgcgactacttttgaagcgattattccactcgtagtactgctattcagtgctgttggacttagtattctaatgcaaagtgtgacgagcgggcaaattattccagaagctttcacgacgatgctagctccggcgattaatagcattgatacaccttatgcagtgttccttatctgtttccttgaaatgctattttggtttatcggtctaaatggttatgcgattttgattggttttgtgcttccatttatgacacaatatttaggagcgaacgcagctgcttatgcggcaggagaaccaattccgtacgtatttgcgccaaacttctgggattacttcatgggattctcaggttctggtattacaggagcattagttattctggctttatttagtaaatcaagagaattaaaagcagtcggaaaagtgtctgtcgttccagcgatttttacgatttccgagccagtggtatttggacttccaatctgttttaacccatatttatttatcccattcgtacttggaacacctattttagcagtaggccagtggtttgtgttccactttggttgggttcgtccgccgattgcaaatgtaggcgggacaccgattccactcgcacagtatttagcgaccatggactggcgcgcgattattttaatcatcttcgttctcgcagtagcagtttgtatgtattatccattctttaaaatgtatgaaaagagcttaatcaaagaagaaacagtggtatcagaacgtcaagcggcgcacgatgcactggacttagatttctaatacaggaaggttgatttaaaaaatgaaattaattattaatgaaaatgaacaactcgtcgcggaaacggtaagtcaaagaatcatcgaattggtaaaggcgaaaccagcaagcttaatttgtattgctggtggggatacgccgttacttacgatagaagctctgataaaagctagtcaagctggtgaagtagatttcagtcaaacgcaatttgttggtttggatgagtgggttggcttagggcgcgaaaccaaaggcagttgtatccaaacgttgtatgatgcgttttttgaccgtttagaaaatgtttcaggtgatcaaatttgcttttttgacgggaaagcgaaggatttagctgccgaatgtgctcgggtagatgcctttattgatgagcgaggcgggatggattttattttattagggattggacttaacgggcatattggctttaatgaaccttttgtgccggtggatgtgaactgccatgtggtagagctcgatgaagtaacgaaacgtgtaatgagcaaatatttcgatacagacttaccgttaacacacggaatttcccttggaatgaagcaaattttagcggcgaaagaaatttacttagtagctacaggagcgaaaaaagtcgacatcgttaaacaagtaattgaaaaagcgccaacagttgcgattcctgcgacgctcgtaaaagaagcaaatacaacccttgtaattgataaagtagcggctagtggggtgaaggcataatggaaaaaattattgttcaaggaaggaaaaatggcaaacaaatcgagatagcttgttcgaatttagtcatgggagcaggagattttttacgcgctgataatatggattttgctggtccgatactagatcaatattttgaaatgggcggaaatatatttgataccgcgcgccattatcgtcatagcgaaaaagcaatcggcacgtggatgaaagctcgtggtaaccgcgatagtgtaattatccaaacaaaaggcggacatccggtacgagaagcaagcgatgtgccacgtgttacggcagaagcaatccatgaagatatttccgtcagtttagacacgctacaaacagatcatgtcgaattatttgcacttcaccgtgataatccagaagtagaagtgggtgagatcatggaagcaatgcatcaagaagtggaagagggccgggtatatgctattggactatctaattgggaattgccgcggattatcgaagcaaacgaatatgcagtaagccatggtttaaccccactaagtttcaatagccctaattttagtttggcaaaagtgaatcgaccacgctgggaaaattgtgtttcagcaaacgaaacgatgattcactggcataaaaaaacgggcttgccgctattttcttggtcgtcacaagctggcgggtttttctccggtcgattttctaaagaagatagaagtgatacggaaatggtagaagtttattatagtgaagcaaactgggaacgattcagtcgcgccaaacaactcgctaaacaaaagggctgtacaccaattcaaatttcgctcgcgtatgttctaacacaatctttcccaacagccgcagttatcggaccggaaaatgctgctgaacttaagtcgtctgttttggcagccgaaattacattaacgcaagcagaagttgattggcttgatttaaaggcataaggaaaggcggagagaaaatggatattcaagcgaaaatagcagtccaactatattcagtacgcaaagaaatggaacgcgatttagaaggtacgctccagaaaattcacgaaatcggctttcgttatgtgcaacttgatggtatgcgaggcaatgtccggcagaggttttacgcttacttcaaaaatatgagttgaaagttatcgggatgcacattaaacacgaccgctttatgaatgatttagacggtattattgaagaagcttattacttcggttgtaaaacagtttttgataaatatattgaagaggaagaccaaacaactgcgggttacattgcaacaaaagaagcactcatagaagcagcaggaaagttacacgcactcggttttcgcatcggtcttcacaatccggaatacgattttaatgaatgcatcaatggccgccgagtgatggattttatcacagatccagttaatggaatttgcatttacgcagaaccagatacgtactggattaaagcagccggacatgatgaaacggaatttattaaacgatacagtggacgggcgccaattgttcatatgaaagactttataagtggttttgagctagaagatatggataataacctcgttgaaatgggcgagggcgaagtaaatttccgcgctatcatcgagtggggcgaaactaatggagtggaatattattgtatcgagcaagatagatcgaaacgaaatatgttcgaaactttagaagcaagttacaactatttattagaattatagtaaaaacgccagagagttttctctggcgttttcttatgtgaaagtagtagcaacgtttacaacgagtaaggtttgggaatgtacatgtagatgttttaagggggaatgaaataaatgaaaaaaaagtggctaattttcgcaatcatttttttaattgcaagtggatttttgagcccaaaagcagaggctgcaacagattacggtagcagcttttttactaatgtagctttgcaaaatcaaaacggggatccagttactaattttaaagaaaatagcaaagtgcgggtagcgtatgattttgttattacgcaacctgttgtaagtggagagacaatgacattaacgattccggatcagctaaaattaatcaatttcggtggttttccagtgaatgatgcatcaggaaatactattgcgaatgcgacaattgatccagcgacaggaacgattaccttaacttttacacattacgtcaatacacatacaaacttaagtggtagcttgttttataatgccacttttaacagcaagaatatccaaacagaccaagtgaatccaatccagtttccagtaaataacaccacgcaaaccattaatacttatataagcaaagtaacaacaggtggcggtactggctcacctactatcgtctttaaacaagggcgaatggatgataaggacacgagtattattcattggactgttacactaaacaatgcacttacaccaattgataatgcgatttacaccgatacacttggaactggccaaaatcttcttggaaatgcaacaatcaaataccgcgacgcaaataaaaaagttctatccaccaacgtccaacctattgcgctcgatagtaatcgtaattttgaattaacaatcggtacactgaacaatcaatcagtcgtcattacttacgatactaaaatcaccacgaaacaaaaaagttatacaaataaagccactttatcaggtgacaatttagatgcagtttcaagaaatgcaaccgttaatgattacggaagcggcggacaagggacaggaacaccgccaccaacaccgccagttaaagaagaaccaccatttatcccagcagataaacaaccaattgaaaaaatcgttgaaacagactttggaccaattgaagttgtcaaagattccgaacaagatggtaaaatcaaagtcatttataaagtgaaaagtggcgatactttaccaggcgttgctaaaaaattcgatgtgactgttgcagaaatcaaagactggaaccatttaagctcggataatttacaaacgggacaaaaactacaattaactatcgaaaaaacactactatcaaaaattaccgtcccaactccgcaaaaagtgactagtacaacgagagtggatggggcagtaaacgcatctggcactttgccacatacaggtgacgaaagcccactaattccatttttggctggagtaagtttggttgcaatcggtttaaattttggacgtaaaaactaaaaaaaggaagcgctgaatttctcgagcgcttccttttatattatagaaggtgacctttttttcgatgtgtcacggtttggttttttgatttatcatgaaacgatttggaatttttgtttggcttatcgggaagattgatagttattgttttactttcggttgttccatcagccatttttgcgataatagtcactaaattatttccgggctccaagttttctaatgtaaattggtgattttcagtatttccggcaatttgttgggtctgattatttgttttaatcgaaattgttgcagcggtatctgtttgaaacattaattccgcgctatttttcgtcgtttcgatataagggttttgaatggaataagttaggaacatttccattaattcgcctgttgttgcagttgtataggtgactcccgttgattcttttttcgcatgggcaatttctggaagccagtttaaagttagcgacaaaagcgcaactattaatagaacgtaaccttttttcttcatcattctcacctcttctttttccattataaaaaagaaatatgaacaaattatgaataaaatatgatagttttaaaaaatcgctaccaatttggatggttttaacgtaagataaaaagaaaaaaggagtagagcaatggaacttgaaaatttagaaaagaaattaccgaagaaaattaaaactgtatggcggcaaacagagggaattgctgtttttgtttttcttgtttgttcggtggccgcggcaattattttatattatgctggagcctcggtttggtggagtgctattggatttggtttcactcttttatatgccgcttttatttacttattcattattccgtttcgttttgcgaggtggagctatcaaattaaacctgatgaaatggaaattcagcacggtattatttttagaagtcgtgtattaattccaatgattcgcatccaacatgtggaaacggagcaaggcccactacttagaagacaaaaattagtttccttatcaattacaacagctgcaaggacgcataagattgaagcggtaaacgcatccgagtcagatgaacttagacatcatatccttgagcttgtgaaggtggcgaaagaagatgtttgaagaaagacgcctccatccaattgctctaattaaagaaattatcacaaacgtaaggcgcaatattgttcctatcgtcgtcggtttgttttctgtttttcgcgcaattaatagcaacggttacttaccgaactgggctgtatatcttattattgtcatcgttatattgctcgttttaacccccgcggttttaaaatacattacatataaatacacactggaagaccaagggattcgtattaaatacggtttgattttccggaaaaatacttacataccttatgaacgcattcaaaccgtccaaaagaaacaatggtttttctttattccatttaacgtctgccaaattttaattgaaacagcaggtggtaatggtaaagcggaggccgacttagttgctgttcctgtgagcgtggtcgatgaattgaaagatttacgtgacgggaaaaaagcagccaaacaagatgaagtgaaagaaaccgaagagccagaagtagaagtgcttgagacagaagaagctccagaaaaaacggtgatgttacaaacaaaacaactcatattaatggccgtaacatcaggtggagttttcggaacgctcctaatcgtcctcgcattcatgcaacaattccgtgaagtcattccgacagattggatggaagctcaagcagaagaattatggaaaatgggaataattgtacttattgtcttaatcgttttgattctcctagtattatggggcatctcgattgttacgacccttttcaaatatttccagttcaaactaatgaaataccccaattccctagtcgtggaaaaaggattattagaacgaaaccatacaactatatcacttgcccggattcaaggaattaccattattgaatcaccactacgacaaatgcttggactagttgctgtcaaggtaattacagccggcaactcaggtgatgaaaaacaatcaggtgacattttactcttgccaattatgaaaaaagagttagccttaaaaacgttaaaagaaatgctacccgattatttatttgaaatagaagaaatggaacgtgctccaaaagcaagtttgcgcagatttttgcagatttacctcatttggacagtcattccggctattatagcaagtatattattcttcccacttggcttaattagtattattttaccaattttagcgggaataaaagcgatagcaagttaccgggcgactggggttttcatggataaacacacactactcgtacagtcacgaccaattttctctaagttaacccatattatccgtaaagaacgaatccaaggtttaagcttacgacaaagcatttggatggaaaaaggggattcccgccatttaaacgtctggcttaaatctggcagtacgagcgcggaggcatatgtgcgctatttaaatcaagaccaagcaataagcgtatacaactggtacagcccatcaaaaacgattaattaataaatagaacattcaattcctaaaaaatctatcgaggtaaacgcataggtttttggaagcgaatgttctattattttttttcaattaggtggaaatctggtaaaatagaaagaataaacgacacaagagatagagaggattggttaagtagtgaaacacatagtgattatcggaggcggcttatcggggcttgcagcagcttatgaactacaaaaaacacatccgaattatacgtgggaattagttgaaaaagacgagaaattaggcgggaaatttgaaacagtaaaacgggacggatttttaattgaaaaaggcccagattcctttttagctagaaagcctgctggagtgggcttagtgaaggacttaggactcgaagataaattaattgcaaatgcgacaggacggtcttacatttaccatcaaaaagcgcttcatccaattccagaaggttctgtgatgggaattccaactgatagagaagcacttctagctagcacacttgtctctgaaataggcaaagcacgcgcactccaagaaccgacaatcgaaccaaataaccaagaaacagatcagccacttggcgaattctttgaagcacgtttcggcaaggaattagtgaaaacaatcattgaacctcttttatcaggaatttacgcgggtgatatatacaaaatgagtttgcgtgctacatttccgcaatttgaacaaaccgtcagaaagtatggaaatctaatggacgggttgaaggaaagtactatgcagacaactggcacaaaaggaaccattggcgcctttcgaacgttagaaggaggcttagaccgtttaccaaaagcaattgccgacgccctgccagctgaaaacttgcatacagcgaaacaagcaacacaaatcacgaaaaaaaatacttcttatgaaatttcttttgctgatggagataaaaaagaagcagatggcgttattattgcagctacacatgatgccctgattcatttgttagcagaaacgaccacagcaccttttgcagaacaaccactaacgacacttgcaaccgtttcattagcttacgacgaaaaagatgtacctattttgccagatggaacaggttatttagttgctcgaaccgcactgtataaaacaactgcttgtacttgggtgcaaaaaaaatggcctcacatggtaccaaaagataaaatgttattacgtggctttgttggtaaagctggtgaatcttggttagagcaagcaagcgatgaagcaatcgtcactgctgtactaacagattatgcggaaataatggatttacatgccgccccacttttttatgaagtaagtcgaatgaaatcagctatgccgcagtatttagtagatcaccaagatcgtcttaaacaattgaaaaaaaacatccagacagactatccaggtgtttattttgcagggatgagttacgaaggtgtaggaattcctgactgtatagctggagcacaaactgcggttactgaattagcagatttcttggaagaggtgtaacatgattaaaggaattggactcgatatgatcgatttagaccgtgtaaaacaagcggtcgaaaagaaccctcgctttatcgaacgaattttaacagaaaaagaaactaaacaatatgaaaaatacgaaggtagccgtaaaattgagtttttagcaggacgtttcgcagcaaaagaagcgtatgcgaaagctaatggaactggatttggtaaacatttaagttttactgatgtagaaattttacaagttgaagatgggcgaccgcacgtaacgatgccgataaaacaaggtgaaactgtttttgtgagtatcacccatacagccagatcagccgcagctcaagtgataattgaacaatagaaaggaaagtgaacgatagtggtaacaggctggcaccgtccgacatggattgaaattgaccgcgcagcaattcgcgaaaatataaaaaatgaacaaaataaactaccagataaggtggcactttgggccgtagtaaaagcaaatgcatacggtcacggaattattgaaacagcaaaaatagcgaaagaagccggagcaaaaggtttttgtgtcgctattttagatgaagctcttgcattaagagaagctgggtttcgaaatgaatttattctcgtcttaggggcaactagaaaagaagacgccaaccttgctgctaaaaataatatctcagttactgtttttagagaagattggttggacgatttaactttagaggcgccactccggattcatttaaaagtagatagtggcatgggacgccttggtattcgtagtagagaagaagcacagcgaatcgaaacaacaatagcgatagatcatcaaatgattttagaaggtatttatacgcattttgcgacagccgatcaattagaaacaagttattttgaacaacaattagcaaaattccaagcaattttaagtagtttaacaacacgcccaacattcgttcatacagcaaattcagcagcttcattgctacaaccgcaaattgatttcgatgctattcgctttgggatttcgatgtatggtttaacaccttccacggaaattaaaaatagtttgccctttgaacttaaacctgcacttgcactttatacggaaatggttcatgtgaaagaactagcgccaggtgacagtgttagctacggcgcaacttatacagcaaccgaaaaagaatgggttgcgacattaccaattggttatgcagatggccttattcgccattatagtggctttcatgttttagtagaaggcgagcgggcaccaattatcggaaggatttgtatggatcaaaccatcataaaacttcctcgtgaatttcaaactggtacaaaagtaacgataatcggttcagatcatggaaataaggtaacagcagatgatgcagcagaatatttaggcacaattaattatgaagttacttgtttgttaacggagcgcataccaaggaaatacatcaattagaaggtaatattcgtgctttttttaagagaagcgtttataatctaacatatgaaactttatagctatatataggacttaagggagttcctaagctgaaactgtaacattcttaacaataaaatgcgaaataactcttttcttcatggcgtgataatggtacgatatagttgttacttacaggtacgaggctttgggggtgtgacacgtgttagagaaagaaaaacggatgataatatccgtagaactgacacaggaaatggtacaagaactcgacgtagttgtagaaaaagaaaaaatggggcggagtgaagttataatggaagcaacgcaacaatttttacaggagaaaagagctcgtgaattaagagacgagatggaacgcggctatgcagaaatggcgacgattaatttcgctatcgcgtgcgagtgtactcatgtcgaagcagaggcagaagacaggaatattagtattttaggaggttaatggctgatggtgaagcgtggtgacgtttactacgcggacctttcccccgtggtcggaagcgagcaagggggaataaggcctgttctcatcattcaaaatgatattggtaatagattcagtccaactgtgatcgtggcagcaataactgcaaaaattcaaaaagcgaagttgccaacacatgtggaagctactcgtaaagacggctttgaaagagattctgtcattctattagaacaaattagaacgatagataaacaacgcctgacagataagattacacatttggacgaggaactaatggccaaggtaaatcaggcacttgaagtcagtctaggagtagtagaattctaaacaatcctaaagaaataacatacaatgatgaatgcaggcaaagggtctgacgtaaaaaaagataattaatacataagaaaataattaactagtctggctaagcaaaaagggcatcagaaacctacaaacaacgcgtaatcaacctattcgctaaatttgtttctaatgtctttttttaaagaatagttaatcaaaccgcataataatagagaaaattttgttaacaatggagaaaggttggaaaataactgatgtataaagattttgcaaacttcatccgtacaaataaaaaagacttactaaataattggatgaatgaaatggagaaacaatcagatccgcttattaacgacatcgctaaagaaccgatgtacgaagaaacaagcattgaatttgttgatttgattgtctcgaatattactgaaaatggctctaagtttaatgaaaaacttgatgattttgcagagaaagtggtccacctaggttggccgattcattttgtcaccactggcctacgagttttcgggcttttagtatatacagcgatgagagatgaagatttattcttaaaaagagaagaaaaaccagaagatgatgcctattatcgctttgaaacatggctttcctccatgtataacaaagtggtcactgcctacgcggatacgtgggaaaagacagtttctatccaaaaaagtgctttacaggaattatccgcaccacttttaccaatatttgaaaaaatttctgtaatgccgctaattggaacgattgacacagaaagagctaagttaatcatagaaaacttactaataggcgttgtaaaaaatcggtcagaagtggttttgattgatattacgggagttcctgttgttgatacaatggttgcgcaccatatcattcaagcatcagaagcagttagacttgtcggctgtcaggcaatgcttgtaggtattagaccagaaatcgcgcaaactatcgttaacctaggaattgaattagatcagattatcacgaccaacacaatgaaaaaaggcatggagcgtgcgctagccttgacgaacagagagatagtagaaaaagaggggtgaatactgtggggataccaatcttaaagttaggtgaatgtttattaatttctatccagagtgaattagatgatcatactgcggtagagttccaggaagatttacttgcaaaaatccatgaaacgtcggccagaggagtagtcattgatataacttcgatcgattttattgattcatttattgcaaagattcttggagatgtagtaagtatgtctaaattgatgggtgcaaaagtggttgtaactgggatacagccagcagttgcgattacactaattgaactcggaattacgtttagtggagtgctttcagcgatggatcttgaaagtggtctcgaaaaacttaaacaggaattgggggaatgaacatgacattccaatcctgtgtaaagataattaatgaatgggacattgtggctgcacgacaattaggtagaaaaatatccaaagaaattggctttggaacggttgaccaagcaagaattacaacagccatcagtgaactagcaagaaacattttcctttatgctggaagaggagagatttgcatcgaaaaagtaagcgaatccggtaagcaaggaatgattattgtggccaaagataaaggcccaggaattgtagatattagaaaagtaatgcaagatggttatactacatctggcggtcttggagcaggtctcccgggagttaaacgcttaatggacagttttgatattgaatccagcattgaaggcgacacaagaggaacggtaattacaacaacgaaatgggttcggtaaggagagctaggaaaaaatggaaaaagcttttgaaggaaaataccgtgatattcttattcaatatttagaacatcaagatgaagaaattctttatacttgcgagaaattatccagagaagctatggaagagcgagtttcatcagaagaaattgtccatttacatcgctcagttcttgaattatacggaaaagagttgccagattttgtacgattatcatttgatgttttactcgaaataatggtaggttacggcttagcttatatggaacatctgagtctaagaaccgaacaaaaagcgttacgtagcgaaattgctcaagcagaagatatgcaaaaaaccttaatgaaaacagatgtgccagaacatgattcgcttgattttggcgttataagtgtcgcagcaagacaaatgagtggcgactattatagctttacagaagaaggcgataagcaaattggtgtcgcactcgctgacgttattggtaaaggaatcccggctgcatttagtatctcgatgataaaatatgctctagcagggatgactggtgacgaccgaaaaccatccatcgtcctagaaacactgaaccaagtagcggaagaaaacattaatgataatatgtttatcacgatgttttacgggctttatcatgaagatacgcatttgtttgaatatggttctgctggacatgaactaggtttatattaccaacataaagaaaacagcttttctgatttatatgccaaaggtttacctctgggtgttgataaaaatgctgtttatcgtcaatttgataagaaaattgaagttggagacgctatttttattatgtcagatggtgttactgaaactagaacagcaaatggatttatcgaacgagaagagttaacagaaattatagcagcgcatatttcattatcagctgaaaaaatggtacatgcaatttatgatcaattagttaaaatgcaaaactttgaattgcatgatgactttacacttatttgtattaaacgaactaaataagtccaaagtagagacgtacctcattctttaaagagcatttactggtgagtaaacgtatttaaagagtggaacgtttttattttttaatgttttaattttatttgttagggtaaaatcgacagtatacttaaattagatggggtgaagtgatgaatattagtatagaaataaaagaacgtgatactgaccacatagacatatttgttgctggggagatcgatgcttatacagcgccaaaggtaaaagaagcacttgaagtatatcaagtaaaagagggtattgtacttagaattgatttaacagaagtaagttatatggatagcaccggtttaggcgtatttgtaggggctttcaaaagcttacgacaacgccaaagtgaacttgtcttgtttggtttaagcgaccgacttttccgattgtttgaaatcacaggattgtcagatatcattgaaatcaaaaatgtagagggtgaaatgaatggcaacaatgcatgacaaaattacattacaacttcctgccaaacctgaatatgttagtttaggtagactttcattatcaggaattgcaagtcgcgcaggattttcttatgaagcaattgaagatttgaaaatagctgtaagtgaagccatcactaattccgtaaaacatgcatttaaaggtgaagaagatggtgaaattactgtagaataccatatctatgaagacaaattagaagttcgtgtttctgataatggaacaagcttcgacctagaaactcgtaaacaagaaattggcccttatgaagtgggtgaagatgcggagatgatgcgcatcggagggctaggtttatttttaattgaaacattaatggatgatgtgaaactttattacgatgaaggggtttctgtcgtaatgaccaaatatattaatgaaaagcaggtggaggagaatgccaaaagtatctcaacctgataaagaagcaaaagaaaaagtgtatatttggattgccgcttaccaagaagacggtgacgaagatgcccaatataatttagtcattcattataaaaacttagtagaatcaattgcccgcaaatattcccaaggtaaatcttttcacgaagatttagttcaagttggaaatattggtttgcttggtgctattagacgttatgatgctacttttgggaaaagctttgaagcatttgctgtgccgacaattgttggcgaaattaaacgttttttacgtgataaaacatggagcgttcatgtaccacgtcgaattaaagaattaggtccgaaaattaaaaatgccgtggaagagctaacaagagaactacaaagctcgccgcaaattagcgatattgcagattttatcggtgtcacggaagaagaagttttagaagcaatggaaatgggaaaaagttaccaagcactttctgtagatcattcgattgaagcagattcggatggaagtaccattacgttacttgatgttgttggtggtacggatgatggatttgaacgtgtgaatcaacgtatgcttttagagaaagttctccctgttttagatgagcgagaacagaaaatattgcaatatacattcattgaaaatcgtagtcaaaaagaaactggtgaactactcgatatatcacaaatgcatgtgtctagaatccaacgtcaagctattaaaaaacttcgagaggcgttgcagaatgaggaagtggagtaaatgaacaaggcggttgaatcaaataatttatttgtatttcaacgttctaaagcattacaacaatactgcggggatgtttattttacccatgaagacaaaaatggttttttgtatgttctttctgatggactcggaagtgggcttgaggcgaatagagccgccaaagcgaccgttgaagccataaaggaagatattcatgcggatattactgatatgcttgaaaaagctaaccaggccgtttctggacttcgtggtgctgcgatagcaattattaaaggtgactacttaacgaaaacactttactatactggtatgggtaatatccgattttatatgattggcatagaagataagcttatttttccgctttctggttctggatttttatccggaagaaaacagaagtaccggatgcaatcttttaaatacaaaccaggcagtaagtttttgatgcattcagatgggcttgttctttctcgtgttcgaaaaagtctcgaatcaccactttgtgtagtgaaaataggacatttaatcgagcgaaatatacttgatattccaacagatgatgtaactttcatgattggaaaatttccagaataacgcaaacaccttttaaacgagcaatggtttaaaaggtgtttttttaaatcgggtgtgagaacttagtctatttatggtatattagaatagagcgctagtttttatacttcatcatgtgataaaaatcacttagtaagcgtgaagcgatattgctttgcgttttttcgcgcggattaaaatataaataagagagaaggagcaaattgaagaaagttttatcgaatagtgtaaaaggttatacgtgggcgagatttagaaaagacttgcttgcggggattatcgtgggcatcattgctttaccactggggatgtcatttgcgattgcttcaggagtaaagcctgaatacgggatttattcaagttttgttgctggtattattgtttccatttttggtggttctagatttcaaatagcggggccgactggggcgtttattcctgtattacttggaatcgtcttaacttatggttatcaggatttacttgtagctgggatgatggctggggttttactttgtttaatggggattttcaaacttggaacgttaattaaatttattccgcgcccggtaactatcggttttacagcgggaattgccgtaacgatttttatgggacaagtggggaatttccttggattaactggaatggaaaaacatgaatcatttatagcaaatatgaaagagatctggctacacttagattcatggaatttctatagcgtgttaatttcctgtatttgtatgtttgtattatttgtttttccaaaaattttaccacgaattccagcgccactcattggtcttgtgattacgaccgggattgccatgctgtttttcaaagatgcgcttccaacaattggatcggcatacggagaaatcccgagtacttttccaccattccaatttcctgatatgacatttgctaatatgagtaaattgattgggccggcttttgttattgcaatgctcggtgggattgaatcgcttctttcggcagtggtagcagatgggatgacgaatacaaaacataatagtaaccgtgaattgattggacaaggtatcgcaaacattgtgacgccaatgtttggtggtattccagcaactggagcaattgcaagaacagcgaccaatattaataatggtgccactagtcgtgtttcaggagttattcatgggattttcgtattgcttactttacttgtccttgcaccagtagctattaatattccgattgcagcaatggcgccgattttgatgttagttgcttggaatatgagtgaacgaaaaacatttcaacatattatcaaattaaaatcaggcgatactctagtgcttgttattacttttttattaacagttttcgcaagtttaacagtagccgttgaagtgggattattgcttgcggtcgtgctcttcgctaaacaaatgggcagctcgatgcaaattgaagaaattgaaccagaaggcgccgaaatagctcctcatttacatgataaaattagcatatttacgattcgcgggccgcttttctttggtgcagcacaaatttttcaacaaaatattattaaagcaatccatgtgaaaccagaatttcttattttgcgaatgggaaaagtgccaattatcgatgctacggcagaaggttatttccatcaaattgaaaaagaattttcgaagcaaggtgggcaaatcttgattacgggcctaacagacaaagcgaaagaaagtctgaaaggtagcggactttatgaccgaattggggaagaacacttctttttacacacagaagacgcggtccattatgcggaaaatgctttaagtgagcttagcagatagcttttgtcagttgaaacgtaattatgttacacttaatagataatgaaataattggaggctatcaagtatggaacaaatgcaagaaaaaataatgaaattagtccaaaaatcgctaacttataaaccagcgcaaattaatgccgtaattaaactaatggaagaaggcaacactgttccatttatcgcacgttaccgtaaagaaatgactggtagcctagatgaagttgaaattcgcgatattgaagaaacgtttgaatacgttactaaattagaaaatcgtaaagaagaaattattcgcttaatagatgaacaaggaaaattaacagatgaactaaaagctgcaatcataaaagcagaaaagcatcaagcattagaagacttataccgcccttataaacaaaagaaacgcactaaagcaaccattgccaaagaaaaaggcttagaacctctggccgattggttaatgagctttccaagtaatgcaaatccacttgaagaagctgccaaatacatctctgaagaaaaagaagtgacatcagcagaagacgctttactaggcgcacatgaaataattgccgaacaaatcagtgatgaacctactttccgtgaatggattcgtaacttcactagaaaattcggtatgattgaatcacgagcaaaaaacgcagaagctgatgaaaaaggcgtttacgaaatgtactacgaatttaatgaaatgattggaaaagttgctagtcaccggatacttgcttttaatcgtggtgaaaaagaagatattttacgcgtacaagtccaagtagacacaacaaaaatcttccaatatctttttgaaaaagtaatccaaaaccgtaattctgcaacacgaacctacgtagaagaagcgattttagatgcctataaacgatttatcggtccagcaattgaacgtgaaattcgcggtgaactgactgataaagcagaagaacaagcaatccatattttctccgagaacttgcgcaaactgctattacaaccacctttaaaaggaaaaatcatccttggtgttgaccccgcttttagaacaggttgtaaattttctgtattagatcaaacggggaaagtgctagaaatcggtgttgtttatccacatactgctaaggcgcgacgtccagaagcaaaacaaaagatagctgagattttatccacctatcaagtagaagttatcgcgattggtaacggaacagcttctcgtgaaacagagcaatttatcgtagaagttattcgcgaatcaaaatcaaatgcttattattgtattgttaatgaagcaggcgcaagtgtttattctgcaagtgaaacagctcgtgaagaattcccggattatcaagtagaagaacgtagcgcagtttctatcggacgccgcttacaagatccattagcagaacttgtaaaaattgatccaaaatcagtaggagtaggacaatatcaacacgatgttgcccaaaaacgcttgaatgaaacgctaacttttgtcgttgaaacagccgttaaccaagtaggcgtcaacgtaaatacagcatccgcatcacttttacaatatgttgccggtttaaacaaaacagttgcaaataacatccgtaaatatcgcgaagaaaacggttctttcacttctcgtaaagagttgaaaaaagttcctcgtctcggcgcgaaatcatatgaacaaagtatcggtttcttacgtattttagagggcgaaaatccacttgataaaacagctattcaccctgagagctataaagcagcagagcaaattgtaaaagcagctggttttggcttgaatgatattggtagcgaggatttaaaagcagcattacaagctcttagtatcccagaagaagcagaaaaactaggcattggtaaagaaacgatgcgcgacattattgataacttaattgccccaggccgcgaccttcgtgatgaactaccagctccactattaaaacaagatgttatttcgatggaagatttaaaacaagggatggagttacaaggaactgttcgtaacgttgttgactttggcgcttttgttgatattggcgtgaaacaagacggacttgtgcacatttcaaaactaagtaattcctttgttaaaaacccgatggatgtcgtttcagtaggagacgttgtaacagtttgggttgatgaagtagacacgaagaaaaatcgaattgctttaacaatgcgtaatccagatggaagtgtcaaataatgaatcaaacagaattgcagcagcacatggaagaagtgtcgctgcaatttttccaaaaagaattccgtcaccaagctgtttttaacacgcgtttacgaacaaccggcggaagatatttactcaaaagccacaatatcgaaatgaaccctaagtacttagaaaactttggcttagagtactttttcggcattatgaaacatgaattatgtcattatcaccttcatttagagaaaaaaggctaccaacatcgcgacaaggattttcgtgaattattaaaaaaagtagacgccccaaggttttgtgctgcgattccgcgtgaaattacaatgcatgaatatacatgtaaaagttgcgggaagtcatttttaagacaacgtagatttaatgtaaaccgttatcgctgtggcagttgcggcggaagattaaagcaaactggttcaaaaaaagtttatacagaatccccctaaaaagccttgcatttttgcttaattctgcgtatactaatggaagtcagataattcaacagtagctccgttgatagcgtaattggctgttaaccgagtgggcgcaggaacaagaatcctgcctgttgcgtttggggaagtactcaagtggctgaagaggtgcccctgctaagggtataggtcgctcacgcggcgcgagggttcaaatccctccttctccgtaattaagaaaggttaccttataaatgttaaggtaaccttttttgcgcgctaaaattggcatttgagaagagagttgctataataagaaaaacgtttcagaaaggaatggactatggataataagctagaatttacaacgattgatgaatatattacccaagcgccaccagaaacaaaagaagtgttgcaaaaaataagagagacaattcaagctgctgccccagaagcaactgagaaaatcagctatcaaatgccaactttttattttgaaggaaatctagtgcattttgcagtcgcgaaaaatcattacgggttttatccagcgcctagtggcatttcggcctttgagaagcaattaggaaagtataagtattcaaaaggtgcggttcaatttcctatcaaagaagaagttccttatgaattaattaaagaaatgacacttttccgattagcagaaaataaacaaaaagcagcagaaaagctagcaaagaaaaagaaaaaataagtttgaggctttcatcaatatgatggaagcttttttgtttggtcttttattttaaaaagactagacatttaaaaataaatgagtataataataaatagaaaacgttttcttgtagaaaaaaatacgtttgggggaagaaaagtgaataaatttatggagttgcttggggataaattaatgcctcttgctgcaaagttaggggagaatcgttacttaacgactttacgagatgcttttatgttagcgtttccactgacaatgtttggttctattgctgtagttttgatgaatctgccattttggagtgatgaaacgaaagctactttacaactttatttaggaaatgcccaaaatgcgacgatgagtattatgacggtttttgtcgtttttggtattggttattcgttatcgaagtattataaagtagaagctatatatggtggtgctgttgcgctcgctagtttcttgattttaacgccatttttctttaatagtgccaatggggaattagttactggagcactttctttagacagacttggtgcaaaaggtatgtttattgggatgattactggttttattgccggagaattatatcgtttcttcgtgcaacgtgattggacgattaaaatgcctgatggggtgcctccagcagttgctaaatcatttgctgcattaataccagcagttttgacattaagtatctttttagtaattaatattattgttcaattcttcttcaataccaacttacatgatgtcgtgtacacggttattcaaaaaccgcttgttggtttaggatcgggaattataccaactttgattgcacttttctttgtccaagtattgtggttcttcggtttacatggtcaaattattgtaaactcggtaatggacccaatttggaatacgttaatgcttgaaaatctggatgcctataaagctgggtctccgttaccacatattattacaaaaccattcatggaagtatttactgtcggcatgggtggatctgggatgacacttgctgtagtaatcgcgctcgcttttctaatgaagagcaaacaaagcaaggaaatcggtcgtttagcgctcggacctggtatttttaatgtaaacgaaccggtattattcgggatgccaatcgtattaaatgcaacaattttaattccgtggatacttgcaccattagttgtcactacacttaattactttgtgatggctgctgggattgtaccagctccaactggggtatctgtaccttggacagtgccaattatcatcaatggaattttagcaacaaactcatggctcggtggggcacttcaagtggtggatttcttcatcgtgttaatcatctggtatccattccttaaacttgttgaccgtacgaatatagcaagagattccgaagcagctatcaaataagttatgttttccttttcgatatgctataatttgattggaaatggctagacatttttaattcaaacgaaggagcgatcgacttggttaagtatgaactgattgccgcagaaatccgtgaaaaaataaacaacggtacttatccaccagaatccattcttcctgatcaagtgagcttatctagagcttatgattgtagcagaatgacaataaaaaaagcctttgacgtacttgcgcttgaaggacttgtttacagacaacgtggtgcaggaacttttgtgatgaaaaatgccttagctaataaacaagatgcgagtttgcgagattatgacggtctaacaaaaatgatgggagacaatcgaatccgaagtaaaatcattgcattcgatattgctttcccagatgaaaaaacgcaagaacaactcttgattaaagcagaccaaccagtgtataaattgattcgtttgcgcctgttagatggtgagccgtatgtattagagcatacaaccatgccagcagatttagttccaggtttaacgagagagattttgcatcattctatttatgcatacttacaagacacactagggctcgttttaagtggtgcatttcgaaaaattaatgccgataagccatctgaatatgaccaagaatatttagcgtgcggagaacatgatccagttttagaagtggagcaagtagtgtatttaaaagacggtagaccagtcgaatattcccgttcaagacatcgctatgatacgagaagtttcattatggttgatcaccgagaaaagtaaaataaagtcagcgtgcctttttataagcatagctgactttattttatactagcaaaaatgcataaaaaacatgagatgaaaaatttgtaaataaaattagaaaaagccgttgacagtgactgagattatgttataataaaaaagctggtgtaagagaaatgaattcaattgaatatatattcatttttcgttttttatctggcccgttggtcaagcggttaagacaccgccctttcacggcggtaacacgggttcgaatcccgtacgggtcacttttttattcattttctatacatatggttccgtggtgtaggggttaacatgcctgcctgtcacgcaggagatcgcgggttcaaatcccgtcgggaccgctcaaaaagaatccaagtttaacttggattctttttttcgtatcggaaattggacatggctttttatttgagctataatcttattattcatataagaattgtaagaattaaattggaggaattaatcatggatttagtgaaaaatgggaaagtattagaacttgtacatccaaatggaaactggacattaattaaagaagaaggtttttctccagttcaaataacagtggctgcggttgcggcttgtagcggatatgtatatcaaacattacttgagaaaaaacgaattgagataaatgatttaagcattcataccgattatgagcaagatcaagaaagtgccgtgcatgttttaacgaaaattaacgttactttcacagttgatttagtggataaaagtaacgaagtgaaagccgaaaaagccgtgcatttagtgaaagatgcctgtccggttgcgaaaagtttagacccttcgattgaaattaacgagattgttgtttttaaataaaagattaaaagaccgggctccattgctcggtctatttttttacattgagtttggcttgattacttgtagggaaggctatatactgaaaccaaactatacaaacgaggtgctggaatatggcagaaaagacaatagtagaaaaattacaactgactaaatataaagaagcagtcattctaaatcaagcagatggagcggattattttcgaaatttagcgaattacgatgaaaaactagcaaataagcaatatgacttaattttcgattttgttgaaacgctagaagaattggtgtcttttacgaaagaagtcattgctactaaaaaactttccacgaatggttatttatttttcgcctatccgaaaaaaggcaataaaaaaattcgctacatatgtacaccgcgatgaactcatgccggcgcttaaaaccgatgaggaaggttacgtcgacggtagcaccctcaaattcacgcgaatggttgcgcttgatgaaacatacacggttgttggtctaaaagaagcagcaaaactaaaagcgaagggcgtaaagaagaataatccttccgcagatgaatatgccgattatgtaccacttgtcgcagagtttttagcagataaaggtgatttacaagctttttacaataatttagcgacaggataccagcgtgtttgggcgcgttatatttattctgccaaacaaccagccacacaagaaaaaagacgtgtagaaatggtcgatattttgagccaaggatacaaaacaaaagatctttaccgccaaggaaaaaagtaaccagataattttatttggttatttttgcgtttgaaactgcttctttatgtaaaagtgtggaaccgtgatagaatagaggaggaataaggcgaaggaaaatcttgttgcactggaaaaggggacatgcaggatggcgaattatattaacaaagaaaggcgccaaattgattttgatccatttgaattacggataattgccgtaccagaagtagtagcggttcaatttaagccgcgctcagaacatactttacttattcgtattgcggatgttggcgcaacgtatcagccactcaaacacgaagcactttttgaagctattttgcccgttcattttaacgatattaacgaagaagacgattactggggattaagtgacaaagagcaggccgagatgaagctgtttaatgaggttcatcgtgacttgatttatgattttgtggatgaacatccagatttcacgcaaatcgtagtccattgtcatgctggagtcagtcgaagtagcgccgttgctatgggtattgctgaacatttaggagataccgacacctatgaaaaacttcaagtgattaaacgttacttaccaaatccgcgggttctcgcgattatgcggggcgaagcgtatttataaaaacgaaaacgaagaaatgttaggagagattttgtatggagaagcattatgattatattgcgattggtggcggtagtggcgggattgcttctattaaccgcgcggcaatgcacggggcaaagtgtgcattaattgaaccaaaatttttaggtggtacttgtgtaaatgttggctgcgttcctaaaaaagtaatgtggtatggcgcacaaatcaaagaagcaatggatttatacgcagatgcttatggttaccaagtagattcaagctttaacttccaaaaattagtagaaaaccgggaagcttacattgaacgaatccgaggttcctacaaaaatggacttgataacaataaagttgaatggatcaaaggttacgccgaatttgtcgatgaaaaaacgttacgagtgaatggtgaattagtaacagcggatcatattttaattgcgacgggcggcgaaccagcacttccttccatccctggcgcagaatatggcattacttcagacggcttttttgcgttaaaagagcttcctaaaaaagtggcggttgttggcgcgggttatatcgctgttgaattagcgggtgtattacagcaatttggatcagatacgcatctttttgtacgtaaacatgctcctctccgtaattttgacccgattttaacagatacattgaccgagcttatcgagcaatctgacatgactttgcataaacatgctgttcctcaaaaagtggaaaaaaattcggacggtagtttaactatctttttagaagatggtcgtacggaaacagtagatactttaatctgggcaatcggccgtaaaccggttatcaaaggtcttcaaatcgaaaaagcgggcgttgaacttgtggatagcgggcatattgcggtagataaattccaaaatactaatgtagacgggatttatgcagttggcgatgtaacgggacattacgaattgactccagttgcgattgctgctggtcgtcgtctttcagaacgccttttcaataataaaaaagatgctcatttaacctatgaaaatattccaactgttgtctttagccatccagctattggtacagttggcttaacagaaccagaagctattgaaaaatatggcaaagaaaatattaaagtatatacgtctagctttacgtcgatgtatacagctattacagaccaccgcgagccttgccggatgaaattgatttgtgaagggaagacagaacgcgtaatcggcctgcacggtattggttacggagtggatgaaatgattcaaggattcgccgttgctattaacatgggagcaacaaaagctgattttgataatacagttgctatccacccaacaggatctgaagaatttgttacaatgaaatagaaaacaacgatggaggaggaagtacgtaatgggaaaaaaattatcactttattttgtaagacatggtcaaacatatttaaacaaaaatctacgtatgcagggctgggctgatacgccgcttacaccagaaggaattgaagttgtaaaagaaagtggtcgcggacttgccaaaacggaattcgtcgcagcctattcaagtgacttacaccgtacaatcgcaacagcaggacacttactaaaagaaaataaacatgcattcggcttaactcttgaaccactaagcgaatttcgggaaacattcttcggttcctatgaaggtgaaaaaggcgatgtagcttggaacgaaattgctcatcatatgggttacgcaaatcaagacgaattatttaaaaacgcagatgttcgagaaacgatgaatggcacgaaagccgctgacccaactggtgatgcggaagattttatgacattctggactcgggtagaacaaggtttcttacatgtcattaaccggcaccgtgaaacaggcgggaacgttcttattgtcgctcacggaaataccattcgcaacattgtccacgaactagaaccatccatggacgaatcggtcattctagacaatgcgagtgttactgttttagcttatgaaaatggtttattcaaattagaacgtttaaacgatacttctcattttaaaaaagcatagaaaaaacgagctttaggaactagtttcccaaagctcgtttttttattctgtcggcggattagacccaggtggattattatcaattgccagctggcctcgccttaatttaattaaccgattcacattgacgataattgtttttactaccgcgtaaagtggaacacctaagatcattccaaaaattcctgctaaattacctgcaacaatcaagatgatgataatagtgagcgggtgaattgataatgatttacccataatatatggagaaagtaagttagagtcaatttgttgaacgatagtaacgacaacaattacgagtaaagcctgaactggagaagtgaatagcgccacgataaccgcgggagctgctccaaggaatggtccaagataaggaataatgttcgttgcacctgcaataaatccaaacagaagcgcatatggttgaccaataattaagtaaccaataaaagtaaacaaaccaacaaacatacaatcaatcgcttgagaactaatataagtagaaattgttttgttcatttctttaataatttgtttcgcttcagtacgaatgcctgctgggaaaaatttgccagaagactcaacgaatttatgaccatctttaaacatataaaagacgataaatggaactgttacaagaatcataacaaaaccagaaacaaacgagataatcgcgccaaaactagatgctaccccatcaactaccacagacataattttcggtaaggaaatgttgagtttcgaaagttcttgtttcatatcaatatcttttaatgcagaattatttgagagactttgtagccatttttcaaaatcttgccagtaacctggtattgcttttgcaagttcggctacttggtcagcaagtgttggaccgagttgcattacagctagaacaacaagcgcgataaacgcgataaaaatcaaaataacacttaaaagtcgcggaacttttctcttttctaaaaataaaactagcggattgaataaatagaataaaaatcctgctactagaataggcataaataaagtggaaacgattataccgattggtgaaaatatgtacttcatctgcaacagaataaataaaactgccacaactgctaaaatttcaatagtccaaaaaaacaatttactatccctaaaacgtgaaaatttcaaatgatccccttctttctataaaccttattgttaaattttatagtaccattaactgctttaaatagccactgaatttatgatgttgacttaaaaatatatgtgttatacaatatgtataacagttggagaagaggtgtttgtatgttactcgcgattgacttacaatcagacgagccgatttatacacaaatatgtaatcaaattattgaaggcatggcaaaacgggaacttttaccgggagataaacttccttccgtgcgaagtcttggtgcggatattggtattaattttcataccgtaaataaagcataccaaatcttaaagcaagaaggatttattcaaatacaccgccaaaaaggagtagttatacatccagatggcgtggcaaaagcagatcaactatttttcactaagctgcaaacaaaactaagaccattaattgcagaatcgattgtgcgtagcgttagtgaggaagagtggctagaaattagtaaagctatttttgacgaaataaaagggcggggagtggagtagttatggaaatcatcatttatatttttgtgagtattgctattatttcactgcaagcaattacgccatttgtaatacgtaaatccgaatgtttcggggtaaatgtgggcgaacgcgctaatcgaaatgcagaactaacccaacttaaaaaacaatatgttggtcaagtgattttatggactgtattggttgctatcattggaattgcattaattcaaggttttcattggagtgaaaacattcaagcgggaatctttatcatatccatgttcggtcaattaattgtttctttcattatttactatcgttttcatcacacaacattacagtggaaaagagaaaaaatcgagtctggtgaaatttcaaccaattcgattatcatggtagatactagttttcatcgcaggaaaatggttatttcgtatacttggtttgtagtaccattacttatttttattatcacactggccattacagcagtgttctatccgtttgcaccagaagaattcccagttcattttgatatgaatggagttgtgactgacaccgttcaaaaatcggtgagagctgctttacttttaccaatgctacaattagggatgattgctttatttatatttattaatttcgttattgcgagaagcaaacaaacggtggaaaatgaaaacccggcagattcattaaaacggaatatgctgtttagacaaatttctagtaaagcaatgttgattatgtgcgttattctggttattgattttctcgtaatgcaagcagttattttactttcactctcgcctgaaattatgatgattaccatgagtatttctatcatcttaatattacttggaacagtactccttgctgtaaaagtaggacaaggtggaagtagattaaaatttgctaacgaaccagataatgtgaataaaccaattcgtgatgatgatgcgttttggaaagctggagtaatctattttaacaggaatgatcctgctttatttgttgaaaaacgttttggcattggctggacgatcaacactgcccgccctgttgcatggctcacttttgtttttattattgcagcgatagttttcattagtatcttgttttaagtaaagtttagtagggtatttatcatgtgttatgcggataaaaaattaaaatcatctatgaatcttctgccgtaatattctttttaaaaggagtgttaatcatggcgattagacaaggacgattagaagaatgggaaggtttcacggggattgggcttgttcacgaaggattaaaaacagaagcatttcataccggaattaaaacagcttttaaagaaatgctcaaacttgcgcaagaattagatgatttttcagaactaaaagaggtctatggtatttccgtccataatatagaagatggtataacgcattacgctgtcatcccagttgagcaaaagtacgctcatttaaaagaaccacttgaatggattgaagttccagcacatacttattttgtagcggaacatatagcagagaccgatatactagaaagttacgaggaaatagctcgagcaatacaacaaaaagagtacaagccgtatattactgcaaacaatcctgtttttgatccattaccatttaaattagaaatatatgcaaaaaatggtgaagaaagtgcggatattgaaattaggatacccgttgtaaaagaactccatacgtaaaacgcgagcccgggacttttgtgccgggcttttttatactagcaagctgtttttgattatgctataataagaacgcaattttgtgattattttaacaagaaggaagggattcatgtgggatattatagcccgcaggaagtaacagagattacgattgaaaaagggacgcaaaaagcaaattcgagtacattaacgctcgttttactaggctttttgggtggcgcctttatttctcttggttacttattatacatacgcgcagtaggaacaatgcctcacgaatggggcagttttgcaacgcttattggtgcgagcctttttccagttgggcttgtgtgcattttactcggtggaggagaattaatcactggcaacatgatggcggtagcgattgcttggtatgacaaaaagatttccttccaacaattacttagaaactgggcgattgtgtccgtcatgaacttagtcggcgcctttttcgtcgcatacttcttcgggcatttcgttggcttaacagaaggagattttttacccaaaacacttgcaacagctggagcaaaaattaacgatcctttctgggttgctttcgtttcaggtatcgggtgtaactggtttgttggaattgctgtgtggctttgttacgcggctaaagactttgctggaaaaatcctcggtatttggttccccgtcatggcttttgtagctatcggatttcagcacgttgtcgccaatatgtttattatcccagccgcaattttcgctggatactattcatgggcagattttatttggaacgtcatcccagtatacctcggaaacgtagtcggcggagcagtttttgtcagccttttctatttccttgcatataagaaaaacgcaccgaaaaaagtaaaagaagaaatacatcaaccaattgaagaaaattaattataaaaagctagttgcacccgttgcagctagttttttttgaaaaaaattaaagttttttagaaagtcgctcgtgcccatcatgctgggatagagcaagttttcttataagccattttctgggtttaagaagaaaatcctgattaaatttttcgatttgtggaaaacactattataagcaacgatagattcggacagaaaaatttactaaggagtggtatttttgagtattaaagaaacaagcttaccaaaagttcaaaccaaattatttattaatggaaaatggatagatggcgataataaagaaacaaaagatattgtaaatccagcaaacggcgaagtcatcgcgaaaattgctcaagcaggacctaaagaaacaaaacaagcgattaaagctgcaaaagatgcttttcctgattgggcgaaaatggaactagctgaccgcgttaaactcttgcataatattgctgatttaatggaagaacgagcagatactttagcaaaaattatgaccttagaacaaggtaaaccattaaaagaatcaaaaggagaagttttaaccggcgcggaaaacttccgattcgcagctgaagaagcaagaagactatacggtgaaacaatcccagctccaaacaaccacgcgtttattgttaaaaaacaaccaattggcgtagtagcagcaattactccgtggaatttcccgggtggaatggtgacacgaaaactcgcaccagcgctagctacaggtaataccatcgtgttaaaaccatctggagataccccgctttcggctttagctatctttgaaatttttgaagaagctggcttaccaaaaggtgttgctaatattgtcatgggaagctcgaaagaaatcggtgaaactttaacagatagtgatgatgtccgcaaattaacgtttacaggttcgacaaaagtcggtcaaacactatttaaacaatctgctgacaccttgaagaaaatctcgcttgagcttggggggcacgcaccatttatcgtgtttgcggatgctaaccttgaagctgcagtagatgatttaatcacagcaaaattccgtaacaatggtcaagtatgtgtatcaccaaaccgcatctttgtagcaaaagaaatcaaagaaaaattcactaaaacattagtcgctaaagtagaaaaactaaaagtcggtaacggtttagacgacgtaaatgttggtccgcttattcgcgaagatgccatcgacaaaatcgacaaacaacttaaaaacgcgacagataaaggcgccaaagtcctaactggtggcgaacgtttaactggctctgactacgacaaaggtaatttctataaaccaactgttttagataacgtcactcgtgaaatggacatcttttatgaagaaacattcggccccgtaattccgcttatcgtttttgaaaatgaagatgaagcaattgaaatggcgaatgatagcgaattcggtctagcatcttatttctatacaaaagatttagcacgcgttgaaaaagtcggtgcagctctagaatatggtatggttggtgcaaacgaaatcgctatatccaatccagaaactccatttggtggtgtaaaacattcaggatttggccgcgaaaatggtcattacggaatggaagaatacatccaagtgaaattcattaacttaaaatatcgtgattaaatcaaacgagaatggaactccttcgcatcaagcgaaggggttcttttttgcgtactttcctaccagtaggaaaaaagtatatttgtaagcggattcagtcgtttatataataaaagtaagttaaggaaagggaggatacaaatgaaaaacattttactcatttgtgggtcaggagcttcaagtggatttatggcagcagcaattagaaaagccgcaaaaaaacgcggagaaaaagtaaccgtgaaagcagctagtgagtctcaaattgatgaaagaataaacgaaatcgactatttactcatcggaccacatttagcttatatgttagacgatttaaagcaaaaagtagctgataaagatgttttagtatcagtcattccacaagcaacatacggcacacttaatggcgaaaaagcacttgatctcattttaaatatggagggataaaacgatgaacaacaaagtgatggattttatgacaaataaatttgctccaaaagtaaataaagttgttaaaaatccttgggtatcagcaattcaagatgcaattatgtctgcgcttccactcgtttttgtcggttctttagtaaccatcgtttcacttcttaaaaatttatttccaggtatgccagatttttcgatgataagtaatttttcgtttgggatgttcggtttagttgtagcatttttaatcccgtattatctgatggagaaaaaaagggaatagcagtcaaaaattaatttccggagctactggacttgtattatttttaatgttactatttccgactatttcagcagatggagacgcggttttcattttatctagatttggggcaactggaatgttcttgtcgattacaacgggactatttgttggttgtgtaatgaattttgcggcgaaacgttcgctcttcagtgaagatacgccaatcccggatttcgttgtcggttggtttaacagtttactaccaattacttttattttaatcgttggttggttaattacagttcaatttaatattgatttctttgaagttattgtggctgtgtttagcccactcgcatcgattgtacaatcttatccgggctttgtgctttcggttttcattcccgcttttctttatacattcgggatttctggatgggtaatgatgccagcgatttatccagtttatatggcaggactcgcagaaaactcacaagccgtagcaaatggcgcaagtgcatcaaatatcgcaacacaagaaacagtgtacgctttaatttcaatcggcggggtgggtacaaccttatcactttcgattatgatgctgattttaagtaaatctttacagctaaaagcaatcggaaaagcagttattgttccgtcaatttttaacatcaacgaaccattattcttcggagcaccaattgccttcaatccatacttaatgattccaacgtggattaatgctttcttagttccaagcatcgcctatttcgttatgtcgatgaacttagtgagtatccccgcgcaatcattcttgctatggtacatgccttacccagtaacatcttatctcgcaacacaagacttccgcgcggttattgcttgtctagcgattatcgtcatcacatggctcgtctatctgccattctttaaagcatacgataactctttattaaaacaagaaaaattagatgcagtagaagcagagaaagaaatggtaacaaattgattggaggaactaaaatgtcagagcaagactatgttgaagaaacagatagtttaaatgaactatccatgaatattttaatccatgcaggaaacgcaagaaatgatttagtaaaaggtctcaatcacttagaagaattagaatttaacgaagccgaggaattaatcgcctctgccaaaaaagaaattgtcattgcgcatagtctgcaaacagatacattacaactagaagcttcaggcaaccaaatccgctattcaactctattctgtcatgcccaagatactctaatgacagcaaaaagtgaaatactaatcggcgaacatatgctacgtttattcaaaaaaatgaccgaacttacgaaaaaataggaggtacaagtatgtttgaaaattatcagtttccaaaagacttcttatggggtggagctatcgcagccaaccaagcagaaggtgcatttaaagtagatggaaaaggaattagtttagcagatttacacaaatatcataaaggtaaaacaaacgatgaaattagcgaagaacaacataaaggcgtaagtttagctgatattaaagcaagtatagaagataaagtaaactattatccgaaacgccacggtattgatttttaccatacttatccagaagatttagctcttcttgctgaaatgggttttaaaacatttcgaacttcgattgactggacgcgaattttcccaactggagaagaagaggaaccaaatgaagcaggtttaaaatattacgatcaattaatcgacaaaataatcgaacttggtatggaaccaattattaccattttgcattatgaaacaccagtagagattgtcttaaaccatggtggatggcataatcggaaagtcatcgatctgtttgaaaaatacggcaaaaccgtccttgatcgttacagtaaaaaagtgaaatattggattgttattaaccaaattaatctaatccaatttgaaccattcaactccactgccattccatatgatgctgtcgatgattatttatcagcaacgtatcaagcagttcataatcaatttgttgctagtgcgaaaatttatgaatacggcaaagcgctgaatccagatttaatgattggtacgatgctggcagattgcacagcctacccatactcatgtgacccagacgatattgtgcttgcaatgaaacgtaatcggatggaatatttcttcgcagacgtgcagttccaaggagaatatccacaatatgcacttaattatcttgctgaaaataatattacaattgaaatcacagaagaagacaaagctattttacaaaaaaacacgatggattatctagcactttcttattattattcgcaaatggtcgattccaagaaaaatgatttagatcccgcttcgattaccccaaatccgcacttaaaagcaaatccgtggggctgggctgtggatccgaaagggctatataatgctctgtcacaatactgggatagataccataaaccaatcattattgcagaaaacggcttcggaatgtacgacgaattagacaatggcgaaatccatgatgattaccgcattgattatttatctgcccatttaaaagaaatgaaacgcgcgatgtatgacggggtagaagtgatcgcatattgtgcatggggcccaattgacatcgttagttgttcttccgcgcaaatggaaaaaagatacggtttcatctacgttgatttagacaacgaagggaacggcacaggcaaaagaattaaaaaagacagcttttcatggtataaaaaagtaatagagtctaatggggaagatctagaagtttaatgtaacagaagcgccagttgtggtagttgatagctaaaacaactggctttcgatatatagggggtaacaggaatggatactcaaaaagaaatactagcttatttgtataaacaagaagacaagtgggttacctcaaatgagttagcagatttttgcaagtgtacaacaagaaccattcgcaataatatctacaaaataaatgaagcaacgccaaatttaattaattcaaccaaacaagggtatcaaattaaccgagcgattcacttcgattttcaagcagaaagcgacgtttcagaacggaaatccaaattattactagaattaattaaaaactccaccaaaggcgttgatttatttgatctcgcagatattttatttatttcagaagtcactttaaaaaaagatattcaacaattaaaaaacgaactaaaagaagcaaacgtacagattgtcattgataaaaatcaaattaaacttgtcggaaaagagcgcgccaaaagaaagtatatgatttctttattatatgaagaaggcggctaccgtgaaagcatcaaaggccacatccaagaaatgctagaaatagtttcgattgataaactccaaagtatcgtaaaagaagttctagcagaagaagctattacaactaatcaatattcgatgatgaatattgtgttgcattacgccatcagtatcgtccgcatccaacaaggcaatacgctcatcgaaacgcaaaaaacgcttattagaaaacactctaaagaatatgaaatctcaaaaaaaatagccggaatcctctcagaagaataccaaatacatttttcagaagcagaaacaaaacaacttggccttctgtatgttgggcttcaaaacgagcaagcagccaatgccaaccaagctgaattagaacaatttgtcgataaaaaaatcattgaagcacttaaaatagtactcaccaacgtggaagaaatgtatctcattgatcttcaaaacgagcagctttttattaaacttgccatccatgtacaaagcttatattaccgttcgcgttacaaagcttatacaagaaatttaagtttacttgatattaaaacctcttatccagtaacctttgacatcgcagtttacatttcctctttactacaagaaaaactagcaattgactttaacgaagacgaaatatcttttatcgcgctacatatcggttcttttttagaaagcgaaaatcgtgattatatcaaactagaaatcggtattcttgttgacgactaccatgatttaaaaaccaatatgctaaaaaaactacgcaccttatttgaaaacgatgcaacaatagaagtcattgagaatgagagatgcgatgaacactacgatattattttaacgacaaaccgagataccgctctcgaaaaagcaggttcgatttttattcacccattactcacagcgaaagacattaaaaaaattacaagcagaatccataccaagaaaaaaatgcttgaaaacaacctacttggacaacaaattgaccgctatatcgtcccgtcactctattctaatcaaatcgacccctcagaactcacccctcaaaaaataagagaacaaatggtgtctaaaatggaaaaggcggcttttgtaaaaccagattttaaagaaaaagttgaaaaaagagaacaaatggcaccaaccagtttcccgtcaggcattgcgataccccattcaatcaaaaacgatgccattcgcagtggtgtttcgatgatgacgctccaagaaccgatttattggaacgacgtcaaagtaaaaatgattgccctcgtcgccatcagcaaaaaagacgccaatgaatttaacgatttctttgaaaaatttgtggaaattgtttctgaaccaatcaacgccaaacgcttatcgatgacagaaagtttcacagagtttatccaaaaactaaaaatgatggtggaagaaagtgaataattggtcacaaattaagccgtgtaatttaagctgcacggcttttttagcttgaaggatttactaaattgagctataatgtaaacatcaaacgaaaaggagtgttatcttaagccaatgaaattctaatcctgtattatatgaaaaaatgaagaaagctatccaattcttgggtagaaactattttttcggacgggattcgtatgttcatttcgcatgataactctagctatagccttttttggcgtagtttcgcggattcctctctgaaaatattcaggaggttattttttatgtcaataatcgaaataaaccaattaaaaatagaaataggggacagaactttagtagaaatccctcacctgttagtagataaaaaagcaagaatcggcatcatcggtcaaaacggcttaggaaaaacaacgctcatggaagtaatcgctggcgttaaagaagccacatcaggaaacattacttcatacggaaaactcgcttatatcaaacaacttcacactgataaaagcacacaaagcggcggggaaaaaacaagaaaagcaattcaacatgctatgcgccaaaatccaagcatacttttagcagacgaaccgacgagcaacctagatgtcgaaagcgtcaaacatttagaacggcagtggagcgattttcacggtgccctaatgattatttcccatgatcgcgcctttttagatgcactttgcacagaaatatgggaaattaaaaatcaagaaatccacgtctacaaaggaaactatcacgcttatttagaacaaaaaaaactacaagaaaaccaagcagaacttgcctacaaagaatttaaaaacaaaaagaaacaacttcaagcatcacaaaactatcacgaaattgaagcaggacgaattgtaaaaccagggaaacgactaaataacaaagaagcaagcgcctttaaagctggaaaaggcacacaacaaaagaaacaacatagtacaattaaagcgctagaaaaacggattgaacggcttggcaatgtcgaaaaaccacgcactacaaagccaattaaaatcgtcacacccgataatcgactaataaaaaaaggcagtacgatattaagcgcaaaagaagcaaccttcgaaattgcaggaaaaacactgtttgaagcaaaagcattctcgattaaagcaggagataaagtagcgcttatcggtgaaaatgctagcggtaaaaccacttttttaagagaaattatccaagaaaatccaactattacttgtaacaatcaagctaaaatcgcttattttgatcaagaattaaaagggttagatttagcgaagacgctcatagaaaacatcacagataggagcgttcaaacacaacaagtaaacagagatgtgcttggaagtatgcattttaaagaaagtgatttgcataaagaagtcgggatgctttctggtggagaacgagtgaaattacttcttagtatgcttcttgttagtgatgcgaacttcctgatactcgatgaaccgaccaactatttggacatctatgcaatggaagctctggaaatgctcataaaacaatttaccggaacagtgttatttgtttctcatgatagaacgtttgtaaatcaagttgcagaagaattactcgtgattgaaaacaaccaaatgactttccacagaatgaccttctcagaatacgaagaaagtaaagccccaagtcgtgtaacagaagaggataaattgattttagaaatgcgaatgtcagaaattgctgcgaaacttatgcaaccgaatttaaaaccagcagaaaaggcaattctcgaacaagattatcaagaaattatcacaaaaagacaacaatttagttagattgttgtctttttattcgtgcaaaataaaaaatatagtcatttatcttttacttgatttcttcaaaagataggcttagaatcaaatagttattaaaaagagtaaagaaagaaggaatcctatgtttagtcacttgccggattcattcctacaaatgaataccatttttatttctattttgatagaggcgctgccgtttgtattaattggcgtatttattgctggttttattcaaatgttcatttctgaaaaatttattgctcgcgttattccaaaaaataaattcctagcagtcattgttggctcgctaattggtgtatttttcccatcctgtgaatgtggcattgtgccgatcgttcgtaatctacttgcaaaaggggtaccgcttcatgctggaattgccttcatgctcacagctccaattattaaccccgttgtcttattttccacctatgttgcatttggaagcacttgggaagttccgcttttacgtgttgccgggagccttgtagtagcactcgttgtcgggaatattatcgcttatttttataaaggaactggtttgaaagaaaggtttttaaaatatgaagctgccagtgaaaaagttgctgtcccagctggaaacttagcccttgcaggaggtccaagtggagacgtaacaacaacgaaatttcaagttctagcaacagaaggagctcaggctgaaccagagcacgaccatgcgcaccatcatcacggtgaagagcacacacatgaaaaaatgtcttttagtcaaaaagtttggcataccgtacagcatgcagttgacgaattcttttctgtcggcaagtatctagtttttggtgctttaattgccgcagcgatgcaaacatatattaaaacttcgacacttgtatccattggacatggcccgattttatctattttattaatgatggttctagcatttgttttatcattatgttctgaagcagatgcatttattggcgcttcattccgtagtgtattttccacgcaatcaatcgttgcatttttagtgtttggcccgatgctcgatattaaaaatttaatgatgatgttaggagcatttaaagcaaaatttgtcttattaattgttacaagtgtaacgattgtcgtctttttatacgccttggttatttaacagaaagcaggtgaacacatgtttcgagtttttattttatttggatttggcttttatttgatgcagctacatatttctggtgacatcagtaaatatattaatatgaaatacgcttatttatctttttcagcaatgattgccgcatttttacttgcaattattcagcttattatggtttttcgtgatgaagatattggcgcaaaaacagagcatatggggcatacccatgacggtgaaaatactattttgaaaaaaatcatggtttacggtttactttcttacgcattaattgcgggatttttatttccagtcgcaacacttgattcaaccatcgtttccgcgaaaggctttcattttccgaaaaataatgctgcgggcgatgacccttatgcccaaaaccagtttttaagacctgatacaagtggttattttggcgaaacagattatgaaaaaatgatggcgaaagaaaaagccgaaatcatcgatcaaaatccaatcaaagtaaccgatagcaactatttaatgacaatggaaattctctataactatcctggtgagtttactggtaaagaaatcgaatttaccggttttgtctataacgatgaagtgacaaaagataataatttattcttatttcgatttggaattattcattgtgtagcggactctggcgtatttggcatgcttgtccaaatgcccgaaaagaccaattttaaaaacgacacctggcttacagtaaaaggaacaatcactcaagagtactattcaccttttaaaatgaatatcccgtctgtacaagtagatagctataaagaagtagcaaaaccaaaatcagtttatgtctatcgtaaatattaaatcgctacttgcggatttatgcggcttgagttatccttaaataaagctgtttacgttttcacgaatgaataaaaggatggaacattgaatgaatgattacaaccactactttcatttcccacgagaagaatggcgcaagctggaagtgagtaaggaccaaattttaactgcagaggaactggaagaaatacgtggtttaaatgaccgaatttctttacaagacatctctgaaatctatttaccacttataaaactaattgcaatccaataccatgaagcaatttttattcatggtgaaaaaatggaatacttaaagaaaaaagaatcacgtgcccctttcatcattgccttagcaggtagtgtggcagtagggaaaagtacaaccgcgcgtgtttttaaattaatgctagatcgttggttttctaaaacaaggcaagtcgagcttgtaacaacagacggatttctctatcctaataaggttttagaagaacggggtatcatggataaaaaaggtttccccgaaagctacgaccgcgaccgctttgctaagtttctaaccgacttaaaagcaaataaagaagatgttgaagtaccactttattcgcatttcacctacgatgttttagacgaaactcgcatgatgcataatccggatattgttattattgaagggattaatgtccttcaagctgaccaacatgagagcctatatccgagtgatttctttgatttctccgtgtatatggatgctaatgaagcagatattaagaactggtatttagaacgtttcttcatgcttcgcgaaacagctttccaagacgaaagctcgtatttccacccatatacgaaaatcagtaaaaaagaagcagaaacatttgcgttaggtgtttgggatacaatcaatggcgtcaatttaaaagaaaacatcgagaaaacaaagtaccgagcggatttagttcttcataaaggaacagatcaccttatttcagatatttatttacgaaaataaccgagtgcagatagaaggaaacttcttgatgcgttcggtttttcctttacatttaaaaaaatccgagtacaatggaaagtgagtaatcactcatttttaaaaaggagggaaactaatggcagaaatagcaattgatgtttcgaatttagatgtaaaaatcggcaagaaaccaattttatcagatatgtctctcgaaatagagaagggcgaaatattcggcttaatcggtccgtctggcgctggtaaaacaactcttgttaaaacaatcatcggtatggaaaaagcaacaagtggccaaaccaaagtattaggaaatgtaatgccgaacttgccggtaattagcaaaatcggttatatggctcaatcagatgcactgtatactgatttaacagccaaagagaacctagatttttttgcttcactttattctattaagggcgctgctaaaaaagaccgaatcaactatgcgacgaacctggttaatttacaaaccgatttaacaaaaaaagtgaataatttttcaggtggaatgaaacgcaggttgtctctcgctatttctgtccttgcagatcctgatgttttaatattagatgagccaacagtcggaattgatccagaactaagaaaaaccatttgggaagaactggacgatcttaaagcaaacggcaaatgtatccttgtgacgacgcacgtgatggatgaagccgaaaaatgcgatagacttgcaatgataagaaatggaaaaataatcgccatagggaccccacaagagctctcaagtaaaacttcatctggcaaactagaagatgcctttttagagtttggagggaaggactaatgcgaattttagctatcgttaaacggatcgtcaaccaattcaggcgtgataaacggacgcttgctttaatgtttcttgcgccacttttacttattacattactaacttacttatttgaaggcgatacagtgaagccagttgtcggagtgaacggactttcgagttccatggtaaaagaactaaaagaaaatgatttaacaattaagacttacccagacaacacgaacgcaactgcgaaaattaaagacgctgatcttgacgcgttttttcaacaagatggcgagaaaatcaaagtgacatacgaaaatagtgaaccaagcttaagtaaagaaatcggtttaaaactacaaaaagcattgatggccgagcaacaagttcaagtaaagaaacaagccaaaacaacaggagaagctcttgccaaagctggaattgatccaaactcgcttcccgcacttacaaacagccctgaaaagctaaccatttcaaccgattacgtttatggcgataaagatactagcttttttgatacaattagcccgattttcattggctttttcgtatttttcttcgtctttctaattgccggcatttccttcttaagagaacgaacaacaggtacgcttgaacgactcatggcaaccccaattaaacgtatcgaactagaactagggtatttgataggctttggcatatttgccttactacagtctatcttagtcgcagttttctccatccaagtgcttggtatgatgcaaaacggatccttattttatgttttactcattacgctaacactcggaatggtgtcactcgcactaggtatcttactttcaacgtttgctaataatgaatttcaaatcgtgcaatttatccccatcgttattgtgccccaagtgttattctgtgggattttcccgctcgatggcatggcagattggctcgtatggattgcacatattatgccgctatactacggagcaaatgcactaacatccattatggtaaaaggagaaggatttgcctcatttgcaaatgatttttatattttactaggatttgtaatcatcttcgtcgtactaaatatttttgcattaaaaaaataccggaaagtttaattagaaaggaagaataaaagtggatgcagaaggagatatcttgcgtcaaatgcttgatttgacggaaaaagaaactaaaatgagcgataaacaacgccgaattgtagcagcttccattgaactgtttgcggaaaaaggctatgctggaacatcgacaaatgaaatagcaaaaaaagcgggcgtagctgaaggaaccattttcagacattataaaacaaaaaaagatttattgatggcaatcacgatgccaacattgattgggggagttatcccatttttagctcaaagctttgttcaagaagtttttgaaagtgagtatccagatttccagtcgtttattcgcgaaattattgttaaccgttttgaatttgcgaaagagaatggtaaagtcatcaaaatatactttatggaattattttatcatgatgaacttagagcgcagttttctcaaatttttatgacgcatgtaaaagggcagtttgaccaaatgattgatttttataaggcacgtggagaaattgtcgacatgccaaatagcacgattatgagggcgcttattacaaatatagtcggctttatgttgacaaggtttgttgtgatgccagatgctaactggaacgacgcaaaagaaatagatgatacagtttcttatattatgagaggcttaggtaaataaaaaagagtccagcattagctggactctttttttatttagtagaagaatcagttgatttcttcttattatagttgtatttacttggatctacttttttgaagccatcaggagcatagaatcgtaataaatctccttgtaacacagaatcagaaagctctaattctttggataccttctcttttgtttctttcatttcttttgtttctgtcgcaattggttcacccgtttgttggttatacatgttaccaccaatcatagagtaagttggtgttatataatcaccatttctaaatggaaccagttgtttatgatcttttgaaagtaagtcagtaccaaattgcaagtattctttgttatccacaccaagtaagtgaagcagggtaggtagtaagtcaacttgaccaccatattgttcttggactccaccttcaacacctggaacatgaatcattaaaggtacacgttgcgcttgggcattttcgaaagtgttatagtctttgccaagaatttttgtcattgcttcttcgtggttatcggaaataccataatggtcaccatacataataattacagagttatcgtaaagaccagttttcttcaagtaatcaacaaagctcttcacagattcgtctaaataacgagctgtttggaagtacgtatctaccgaagaatcaccagttgtcgctggagcaatcgaagcatccttctcatcaattggataagggaagtgattggttagcgtgatgaatttcgtatagaatggctgtttcaaggatgaaagatatttttcagattcttggaagaaaggtttatcttttagaccatagttagaaacatccgcgtcattcatatcatagtaactagcatcaaagaaattatcgtaaccaaattgtttataaatttcatcacgattccagaagctcttatagttaccgtggaagacagcactagtatatccttgttgacctaaaatagctgatgctgattcataagtgttttgtccttttgtagtaaaggcagaaccttgaggcaagccataaagcgagttctcaagtaacatttcggagtcagctgttttaccttgacctgtttggtggaagaagtttgtaaagctcagtgtatttttatctttaaagaaagagttaatatacggcgttacttcttctccgttaagtttataattcactaagaattgttggaaactttctaaatgaatataaataacgtttttgccttttgctttaccgaaatattccggatttggcgcggcgtattttgatttagtgtagttaagtacttccgtaacatcactactatcagcaagtgcacgctgtgtagatgactcagtacttttcactgcatcatagatttggtagttagtcataccaagatattttacaatataatttctatcaaaagttcttgttaaaagttgtggacgatcgatttcagcaagtcctaagttagcaaagaacatcgcgataccaagcgttaaaacaccaacaacttttctagcacggattcgagcagttttatcaggttttacaaagcggaaagcaagtagtgcaattaaaataataatatccgcgaagtaaataatatcgtgccagctgagtaacgctgtgatactactacccatgtcgcccatgttttgcatttgttttgcgtttagattcggaagcgtaatgaaatcactaaagaatcgataatagacaatatttgcgtaaagaataaagctcattaaaaagtcaatgacaacgatccagataaatgaacgacgtcctttagcaaaaagtgcgagacctaagaagaaaacagccccactcaatggatttatgaacagcaaaatttgctgcataaggttctcaataccaagtttaaattcaagttgatatgcaatatacgtttttagccaataaagaatgacggctagaacaaaaaacccataatttttgcttaaaaacgtttggatttttattttccaatccttcatgaaacacctctcctacacactatttactcgttttaattgttgtttttgaaatgaaaaaaagaagctgtaatatgtaaaaaaacaatttcatacagcacccactttaacataattctaacacaagattaataaaaggcaagttataacacatacgtctgaagtaggatttattaacaaataggcttatttaactagtcaaaaaagaaccattttggatagaattctgctagaataaaaagtgaaataggaggtataaaatgaacgctaaaatcactccaactttttttgaaaatagaaccactattgaattagctagagatataatagggatgagactcgtgcatgaaataggtaattatactctttctggttacattgttgaaacggaagcctatctcggggcaacagatatggcagcccatagttttaaaaacttacgaaccaaacggactgaagtaatgttcggcactccaggaacgatttatacgtatcaaatgcaccagcaagtattattaaactttattacgatgcgagaaggcattccggaagctgttttaattagagcattagaaccaacgaaagagtccatcgaacaaatggaacaaaatcgttttttgaaaactggctttgaattaacaaacggcccgggtaaattaacgcaagctttaggattaagtatgcaagattatgggaaaactctttttgatagcaatatttggttagaaagggcaaaagtgccacatataatagaagcaactaatcgaattggtgttccaaataaaggtatcgcgacccattatcctctaaggttcacagctaaaggaagcccgtatatttcagcgcaacgtaaaagacaaatttcagcctatatttgggaataactttaaaaatttgtcacaggtgcaaaaatacttcaataaggcggctgatttcctttgcttcatcagagtagctactatataataaaatagttacaaggaggaataatatgttaaagaaaacaatcgcaatcgttattttaatcatcggtttactattaattttttccccattcattaaaaacggcattgtaaaatatatgagtggccatgaaacaatcgatcaatacaatgcatccgatttaaagaaaaacaatgacaaagacgctacatttgattttgaaagtgtacaacttccatctatgacctctgtcatcaaaggtgcagcagactatgacaaagatgccgttattggctcgatagctgttccttctgtagacgttaacttactagtatttaaaggaaccaacactgctaatttacttgcaggagcaacaaccatgcgttctgaccaagtaatgggtaaaggcaactatccattagcggggcaccatatgcgtaatgaatcaatgctatttggcccaattatgaaggtaaaagaaggcgacaagatttacctgactgacctcgtaaatttatatgaatatacagttactgaaacaaaaacaattgatgaaacagaagtaagcgtgatagataatacgaaagacgctagaatcacattaatcacatgtgacaagccaacggaaacgacgaaacgatttgttgcagttggtgagctagataaaacagaaaaactaacaaaagaactagagaataaatatttccctagtaaataagtaaaattttaaaaaggcagcggattttcttagctgtctttttttctggataatttctccttttattataaatgttgtatcatataaatgaggtttattttgagaaaggaagtgcagtaatgaaactaaccgtttttggacattggggcggatatccggtagcgaacgaaggcacatcgagttatttgctagaagaagctggatttaagttattaattgatgtgggggcaagtgccgtttccatcatgcaaaacttcattgatcctgatgacattgatgccgcaataatttctcattaccatccagatcatgtagcagacgtagggattttgcagcacattcgtttgttgtcgcaaaaaaaggaaaaaccacctgtcttacctatttacgggcataaagaagatgaacgtggctattcttatttagaaatggcgaatgtaacaaaagcagtggagtataaagcagatgacacacttgaaatcggaccgtttaaagtaaccttcttaaaaacagtccatccagtaccttgttatgcgatgcgaattgaagcagctggaaaaatctttgtatacaccgcggatagcgcttatcaagatagttttattccttttgcagaaaacgcagatttactcgtaacagatacgaactttttccatgacttagctgggaaaacaaaagttcatatggcaagtaccgaagtcgcaaaaattgctaaagaagcaaatgtgaaatcgttactccttagccatttgccagaagttggtgatttagaagtattgaaacaagaagcagcagctatttacaccggagaaattgcactcgcatcaaaaggatttacgaaaacattttaatatagaagaaaaggggttaggggtatgtattttatagataataataatgaaaaagatccgcggattaatttagcagttgaggaatttattttaaccgaattgaagttagatgaaccggttttacttttctacattaataagccatcgataattattggtcggaatcaaaatacggtagaagaaatcgatacagaatacgtcgagaaaaatgatgtaattgttgtgcgtagactttcaggtggtggcgctgtttatcatgatgaaggtaacttgaattttagttttattacagatgacgacggtgaatcgttccataattttgcgaagtttacacaaccgattgtggaagctcttaaacgtttaggcgtaaatgcggaattaaaaggacgtaatgatttattaatcgatggttttaaagtatcaggaaatgcgcaatttgcaacgaaggggaaaatgttctcgcacggtactttaatgtatgatttgaacttagataatgtcgctgcatcactaaaaccacgtaaagataaaattgaatcaaaaggaattaagtccgttcgtagtcgagttgcgaatatttctgattttatggatcaagaaatgactaccgaagaattccgcgatttattattgctttacatttttaacgtggataaagtagaagatgtgaaagaatacaaattaaccgctgcagattgggaaaaaatccatgaaatttctgctaagcgttatggcaattgggactggaactacggaaaatctccaaaattcgatttaacacggacaaaacgttttccagttggagcagtcgatgttcgcttaaacgtacaaaaaggagttatcacagaaattaagattttcggtgacttctttggggtaaaaaatgtggcggatattgaggagaaattagtcaacacaacttataaacgtgaagcattggccgaagctttagcagatatagaagtaaaagaatactttggtaacattacaaaagatgaatttttagatttactttattaaaaaaagaaagcacgcattccgcgtgctttcttttttatttaaggttttttcctgacatccaatgttccagccgttttccgacaaaccataaaataacgacagaaacagctaaaatagccagtttaagtggttggtgaattaagtctacgaaatcataaccaatatagctaatcgcaaagactttgattaatttcccacctacaagcgctaagataaattggtaaacttttattttagagagacctgcaacgatatttacagcagaagatggtgtaaaaggcattacaagtaaaatgaaaatcggactaaaaccatgtctatcaatccattccattactcgtttaatttgtttatgtccggaaataaatcgcaaaaatcgagtctgcccaaattttcgagctaacaagaaaacacataaactacctgcaattgcagctgtaacggatattaaaaagccgccaaacagtccgtatgcattaacgttaactacaacaaaaacaataaatggtaaaaaaggtaaaaacgcttcaataaaaggtaagaaaaaagctaaaagtggacctaaatttcgatactcacttagccagtacattaaattatcataagaaaagaaattcatcatatcctgccaaaatgtcataagcaagcctccagtagtctttaaaaacatactttattttctcacataaaaatgataaagcgctaataaaacagcttgaatatagttaaaatcctagtaaatctaccaggattttaattatttattatttttacaaagaaattccagaaaaagtcttgtcaaaactaacatagaatggtattatataaaagttgttaaaacactaagaactacttactgtgcgggtgtagtttagtggtaaaactacagccttccaagctgttgtcgtgggttcgattcccatcacccgctttatattttttataaatcctgttatcaacgcagtgtttcgacctttctaagcgaagcattgcgtttattttattgcctgaaaataaggaaagggggaatgatgatagtgaagccagaatcaaattacgcagcgctaaaagaagagctaattgcttatgcacatgaaattggaattcaaaaaattggttttacgacagcagacccttttttatttttaaaggaacggttactagaagctgaagcgttagatctttttacagggtttgagcatccggttattgatgagcgtgtttatccagagcttattttcaaagaaccccagtcgattattgctattgcgcttgcttacccatctaaattaaaagaagcgcctaccagcaaaaaagaagcaagacgtggcgtttttgctagagcttcgtggggcatcgattatcataccgttttacgagaaaaattagctttactggaacaatttttaagtgaacgtttgcctgatgtacgaatgaaatctatggtagatactggtgaattatcggatgtggctgtggcagaacgagctggcattggttggcgcgggaaaaacacgctgcttataacgccagaattcggctcttgggtttatttaggggaaatgataaccaatattccttttgaaccagatacgcctgctagcgacttgtgtggcagctgcaaccaatgtgtaaaagcttgtccaacaggttccttgttaggtgaagggaaaatgaatccgaaaatatgtttaagctacctcacccaaacaaaagactttctagatgaaaaatatcgcgaagtattgcataatcgtttgtatggctgtgatacttgtcaggtagtttgtccatataatcgcggtcatgattttcattttcatgaggaaatggagccggacccggaacttgttcgtcccgagttaaagccactgctacatatttcaaatcgcgctttcaaagagcagtttggcgatatggctggttcatggcgcgggaaaaagccaatccaacgaaatgcgataattattttagctcgttataaagataaaaccgcagtaccagacttaattgattgcttggaaaatgatccgaggccagtcattcgcggaaccgctggatgggccttacgtaaaatcggcggggaacaagctgaagaagctgtccaaaaagcgctccaaaacgaacaagatgaacaagtactccaagaattaacagcaataccaaattaatagaaaccaggtgaaaagaaatgccaaaccatatcgtactatatcaaccagaaatccctgcaaacacaggaaatatctcaagaacatgtgctggaacagatacttatttacatttaattcgtccacttggtttttccacagatgataaaatgttaaaacgcgccggactggactactgggataatgtgaaactttcctattacgattccctagatgagtttttcgaaaaaaatgctggtggagaattctactatattactaaattcggacgccatgtttatagtgacgttgattatagtgatccaaataaaaattatttctttgtttttggaaaagaaactactggtttgcctgatgaacttttacaagcaaatgaggaaaattgtttacgaattccaatgactgatcatattcgatctttaaatttatctaacaccgcagcagttttagcatatgaagcgttacgtcaacagagttttggcgcgcttttacaagaaccaaattacgatcggaaaatctttaaagactaagggggagttagggtgaatcaggcgatagatgccattttaggtcattattcagtacggaactttgaagataaagctttaacagaagaagaattagctttacttattaaaagtgcgcaggccgcatctacatctagttttgttcaagcatactctataatcggaataacagataaaaaaattcgagaacaaatttctgctattgcgggaaatcaaccatatactgtacaaacagggcaattatttatctttgttgctgatctagcgagacaccaagccatcctagaagaacatcaagtagacacagccgcactagaaacttcagaaaaatggcttgtttccattattgatgccgcacttgccgcgcaaaatatggctgttgccgcagaatcgttaggatttggtatttgctttatcggaggaattcgtaatgacgtagggcaaattgccgaaattcttgatttgccaccatatacgatgccgttatttggtttaacaataggccacccgattaaaggcaaagaaaaagccaaacctagattaccgcaagatttggtttatcacgaaaatacttatcaaaaaatgaatccagcaactttagcagaatacgatgaacaaataaaaacttactacgatgaacgaacagcaggaaaacgagtagaaggctggtccgagcagattgcacgcgggcttggaagaaaaagccggttagacttaaaagattttttacaaaagcaacatttaaatcaaaaataaaaagagtggtttggcgcattatcgtaatgcgccaaaccactcttttttcagttatttacgtttattcctagccatttgaattaagttccaaataacgagtattaacactactactagcaagatattaattaatccgcccgctacatggaaaataattccaagtaaccaaactgctaataaaacaactataattccccaaataattcctaacatataaaaaacctctttctaatcttttgattgtactcttatatattcccgagtgacaagcctctaaacatgttagggataaaaaaggctatttttttgtaataaaagctaaaagggctttgactccttccgttaccattcgctctgtttcatcaaaatcaccagtgtaataaggatcaggaatttcttcctcttccttgcctgaaacaaaggacatcagtgaacgaagagttacgtctttgtttttattaagagcatttaaatcagctatattattttgatccatcccaataatataatcagcttgttcaaaatcggcatccgttactttccgagcacgcattgcttcataattaataccgtgctttttcaaaacttctcttgtaccacggtgcggtggttttcctaagttccatgttcccgttgccgcagaatcaatttctatttcatccgttaaccctgcattagcaacttcttttcgaaaaagtccttctgccattggagaacggcaaatatttcctaaacatacaaatactacttttaccaattgaattcctccttattcccactctttatataattcagtagtagcactttgatctattccatcacagtccttaagcatcgcgaaaatcttttccacaagttcaggaacaagttttctccggaaatagagcaattgattttcaaaggattgatagacgactatattataggggatttcgttcttttgaagtaaacgaatgagtgtttctaaataccactttttatctggataatcctctaataactctagtaattgcttggtttttttgacattacttgaagcaagaatttggtctagtttttttactggaaattgttccgcgaaatctactgggaaggggctgaaatatagtgcctccaaaaactcagccatgttttctgcaacaactaaggtctgtagcgtttcaaaatcaacatatataatgctaggcagagacttattatcagcataagaaaaaccgatatagcgcgattcatctcggtgaaaataaacttgttttcctgcaagatcgacatcattttgttccggaatgtccgttaataattcatttaaactagctaaataataaatttccgcgacatcaagtccgtaagacgttggctcgttcgttggaaaatggttttttcgaatcaatccaccattttgcttcaaaagcagctctttatattcagctggtaagaataaacctagttccgtttcttttgcagaaatctcttgctcagttgcagcgttattcccgtttctaacccaaatcgtcatcatcttcaactccttcctgtattatcctaaaaaatactaaatagcgcaaataaaagaacataactagaaaaactagctatgttccaaatgttacttcaaacgatcttgataataactattttcatttcgtgcatcaaattttgcggttaaagtttcggctatttccaccaagtctgtttctgtttcacgatccaaaagaggataagcagcttgtaaaaataataatcgatctagtccgctttctgatttaagaacgatttctttattcgtatcaatgacttctctagccttttcagtttggtttgtaagcactagatacttaagcaaatggctaagtggtggaattaatgaactttctttctccacaagagggtagcctttatcaaaacattcttgcgccattttttcatcaccaagttctaaatacgctaaagccatatttccataagttaaatgaggaacttctgcgcagctctgtttccctttaataattggagcagcagctttcttcgctttttcaaaatctttgataaaacagtaataatgaactttatcatttgtttcgcaagcagggcagtcatttaaataatctgctttggtgttattccatttttcaaagagttcttctgccttgtctttttcgcccattcgaatggcagcaagggtacaaactttatagtaagggcgcaaggaataattttgctgttcgaattttactttcatatcattcaaaagcccatctatttgcgctttggatacttcatcaaaagttgggacatgttcgctaatccatttatatttccaaagtagatcgtaagcgtcaatatatgccgcatcatcttcccatttttttactaaccaactaaaggcttgtaattgtttttttggaaatccggcagttaagcaagtatcaatcagcatatcgcgtgcctcaataccattttctacatcgttatacatatctgcgcttgcaattgcacgctcaagaattttcactttttcagcattgtcgtccataccccaagcttcttcaatatcattcaaataatccatttttttcctcctatagcatttctaagattcgtaacatattttgattcattaagtccatttctttccgtttgagtggataatgtcctaacagtaaagcctgaatataaagaacattaacaatcaccgataactcattaatagatttaccagacgtgaaaagttttttataagctcattatctaaatttaaatacaaatgggcaagtggagcaggggcttgttcttgctgaatactctctaaaatatcactgaaaacagaactcgtttcttctaaagagcgttccagttctctgcttgcctgtgtagcggcagaatgaataaaaataatagggagcgttttaggttcaaaatgcttaattgttatatcggcatcaaattccgccatcattttattcatttcagctaagattggttgataagttatttcttcttcagcagacattggtaacaatttgttagtgatttcttctggttgaattaaaataaactcggcttcatctaccaaatgatttaacattgttaaaattggtgtatcgtaggagtaaccgccattaatcaatgtcataccactagagcgagcaatatcagttatctgtctaaaatcgtctactgaaaaagtatagtagattgtcgtcgtttctttcattatatctgctaatttttcttcaccattcaaagttttaaacggcagataagaataaattaattttaaaaatggcgcatcttcactagctaatgctttaaaaccaagataatgcgtcgataataattttgttagtgcgctctcgggtaacgtttcaattcctttttttagcgccacacctagctccttagatacgatttcaaggcgctcatttttataaaaagattcccgtgaagcgactggctgaagctcatctgtccaaagtatacattcagcaaaaaaagcccagttaggaagaacgttattcgcttcgctcgtcacatacatattgtttaaaaataccgtttgtttgcgcaccgcattcatttgcaccgtataaggaatcataaaagcgattccaaaagtacgaccagattcattttcaattaagaaataatcttgaaagcgagtgccgagtaaatgttccccgtagcgaagaatttgctccctcggaagactgaacagtatttctttatcagcaaactgcttggtccacgagttaatctcttgttcataaccatctgcttctattaaaatggcgctttctaaagaagagccgtatttttttaatgtattaatcaagtattccgttttttcgcattcagggtgttcatccatatgaggacgcaaccgtaaataaacttgagtaccaggttcgcgtttttcggttttaattttacggacagaataagtaccatcagcttttccatgccattcagtcgtttctccgtttttttgtgaggtagaaatcattacaatctcatcgctaacaataaaacaagaaagtaaaccgatcccaaagcgaccaataaaatcattggtatcttgaccatcaaagtttttttcacctttagatgaattagcaatagttgcaaggaaggcatggacttcatcttccgttaaaccaatcccattatcctctaaaattaaagttttgttgtttttttcaccagataatgaaacatggatttttccatttaaagtaggctctattttcttcctagctctaattgcatctgtagcattctgtaataattctcgaatataaacatctttttcgtcataaagatgattagagagaatgtcaatcataccagccaagttcacctgaaagcggtgagaataattttccattgtctatcctcctagttgtgtaaatatcatttttattctatcataaaagaagagataaatattggaaaaacattaatagatgtttaaaaaatcatatcagtggtaaatactttgtgatggtttccacactggacattgtagtggaaatagattatacttattattaagtgataatcattacaaaataggaggaagataattatgaaaacaatcaactcagtagacacaaaggaatttttgaatcatcaagtagcgaatttaaacgtattcacagtaaaaattcatcaaattcattggtatatgagaggccacaacttcttcactttacatgaaaaaatggatgatttatatagcgaattcggtgaacaaatggatgaagtagcagaacgtttacttgccattggtggaagcccattctcgactttaaaagagtttttagaaaatgcgagtgtagaagaagctccttatacaaaacctaaaactatggatcaattaatggaagacttagttggtacattagaattacttagagacgaatataaacaaggcattgagctaactgacaaagaaggcgacgatgtaacaaacgatatgctaattgcatttaaagctagcattgacaaacatatctggatgttcaaagcattccttggaaaagctccattagaataagatgcaatcaaaactgtgtgggatttatttctcacacagtttttttacctcgaatctgttatagtacaatatccttattttaaggttgttttaatacatagtggtttgaattttattagaaagaggtatactaactgcataacaaaaagcagaaaaagtgaaattcgatgtaaaatctgctattcttgagtaataatcaatacgtacaaaaaatggaaacgaggagtgaaaagtatgaatatcgaggtaacggaccaagcaaataaatggtttcatgatgaatttgatgtagctgatggtaatggaattcgactttttgccaaatatggtggttctaatagttccttgcatcctggtttctctatcggtttagctgccgaaaaaccgcaagaagcagcagtcgctgaaaagaaagaagacttaactttctttattgaagatcatgattattggtatttcaaagaccacgactggaaaattgactatgaaccaaaaacggaagaagtatccttttcctttaaagaaaaagtgaaatgaatacaacataaattgccgcgtgtaaatcgattttgatttcatgcggtttttgttttaaaagctttactgttctctattcctttgctattctactaagagagcaggaggagaaagatgacaaagaaattagtaatttgtattagtttaatcgcgatatttttaagcggttgtagtttttcagaaccatccactaaaccatctaacatcacagaaaaaaccttaaatggtgcaagctttactttttttgatgttggtcaaggggacagcacacttattcaagcagaagacggtacgactattttgattgatactggtcgacaagatgatgaccggattttaacttatttaaaagaagcaaatataaaaaagctagatttgctattactgacacatccacatgccgaccatattggtaatgccgacaaagtcattgctacatataaaccgaaagaaatttggatggatggcttaactttttcaagcagtatttatgagaaggtaattgatgcagcactggcctcaaatgcgaaatataaagaaccaagacgcggtgataaagcgacttttggtccatttgatatagaagtcctaagcccagataaacttcaaaacgacgccaataatgactccattgcagtcaaaatgacatacaaagatatttctgccattttcactggtgatgcggaaaaagggcgggaacgagaaatggcagatagtggcgccaatttagaagcagatattttagacttaggacaccatggttcatccacttctaatcaaccatttttcttagataaagtgaaacctcaagtggctgtatactccgctgaaatggccaacagttatggacatccccatgtagaagtattggaatggttaaaagaacgagatattaaaacttacgggacagatgtgaatggaacaattacaatcgaaactgacggcgaaaaaattcatgtccaaaccgaaaaagaaggcacccctaagcccggtagcagctataacaaagaaaataatacacaaaaaacagaagatgccacatcagaagaattgcctgaaagtattaatctgaattcagcatctagtgaagaattacaactattaccacttattggcccagcgctggcagaaaaaatcattgccgagcgcccgtatcagtccatagatgaattgaaaaaaattaacggcattggtgatggaattgtgcgccaaattaaagaacaaggccttgccgtaacaaagtaggtgaatagggtgaaaaaagcaatattagatcgtatagaggatggaaaagccgtttttctaatcgaaccgaaccatacagaatggttagtaaatcaagaagaacttgattcctctataaaagaaggggatgtcgtcactatttcagaaacaaatgaaataatgaaacacccccaagaaactgatgaaatgaaaaaacgtattgcggaaaagctagaaagactaagaggaaaaaactgagaaaaacttttttaaactctcatgaaattttcatctttctttcagcacattcttttttaggaaagttattatatgtataagctaacaacaagcaaaacattttcatttctttccctttttagaatgaaaatcccaaactcccttttagctagtgcggtttactccctttttccgcgctagttttttcatgcgcaaaaatcactttttctgtggaaagagaaatttattgcgtccagcatctaggccgcaatatagcataattagggtaatgccgatcagaacatataacgttggttgccaactgccaagagcatcatggagtgtaccaaataatattggaccggaagcagcaaacaaataacctattgattgcgccattccagataaatccgccgattcggtagcgcttgttgttcgcaaattaaagaacatcatcgaaagactaaatgacatccccgaaccaatcccatataaaataatcgcagtagctaaaataaatagattaccagaagcgaacataatcccaaaaatcccaatcataaataataaaacagaaatcccaacgagcaactgctgatttttcattcgcccagctataataggaataataaatgtaatcggcataacagcaaactgcattagtgagagcataagaccgctagaagtacttgataatccttgatctgctaaaatgttcggtaaccaagcaatcgaaatataaaaaatcgcggactgtgaacccatatataatgaaattttccaagcaagaggggacttccacaccgaagtagtaactaaatgtgtggcaattttttctgagctgcgttggttatatcttaactgtggtagccagataactaacgctaaaacacccagcattgcccaaaaaaccatgcttccatgccagctgaatttattattcatcgcaatcggcaccgtcaaaccagcagcaagtgccgcacataaattcattgaaatcgaatataccccagtcattaatcctaatttaaaaggaaactccttcttaatcaaactaggtaaaatgacatttcccactgcaatagcaagtccaatcataaatgtcccagcaaataaatagaattcgcctccaaaaggtcgaagtaaactaccaataacaagagttaaaagtgcgataaaaataagtacttctatccctagtgaacgacttaatttcgaaacaaaaggggataaaccagcaaaagcaagtagtggtatcgtcgttagtaatcctgccatcgtgtttgttaaatgtaaatctgattgaatcattccaagtaaaggtccaactgacgtaattggtgcacgcaagtttgctgcaattaaaataatgccgacaataagcatcacccgacttgaacgcgtcaggatttttttatttgttaaatctgaattcatttgttatctccattcttagcagcaatttgtttgaagagcgtgatatactcagttacttcatgtgctgctccttctttatctcgtttttcgatcgctgatacaagagttgcatggccattatgcttattaacagctggattcatttctgttgtactcgtaatcgaaaactgtatttcctctaaaatatttacatacatatctaacaataaatcattgtgcgctgcctttacaattgttagatgaagagctgaatcggcttttacaaaggcagttacatcattatctttattagctaaatagcaaagttgcttatatttttttagcatttttaaatcttcatccgtgcgccgttcgcaagctaaaataactgcttctcggtctagcgcatgcctcatttctagaatttcttgaacagaggattctcgcacgcgtttttgcataatagcatgaagttcactattattgcgtacaaaagttccgtctccttgctttgtttcaagtaaaccaatatgggccagcgcacggattgcttcacgtaacgtatttcgactgatgccaaactgagtcattaaatcagcttctttaggaattcgttcgccgattttccaagcgccactagtaatttcagcttttatctgatcatagacttgctcagctaaagatttccgctcaattttttctaccacaaaaaaactcccctttctaaaggtaggatgattggttctattctacagaagaaaaatttttttgtaaaccctatttaactaatttatgataaaatgaagaaagaaaagggctggtgaggaaatgaattggttggagaagctaaaagaaaatgacacggcaagacgggtgctagtgtttgttcttctagggattgtattatatttacttagaagcatgatagatttaatattactaacatttatttttgcatttttagttacgcgattagaaaatgtaattttaaaaagaatacgaataccacgaaaattaatcgttatcgttttatattgtttagtagcaatgtttttatatgttgctattgttcatttcttaccaattttaattgaccaaatatcgcaacttgtagactctcttgtaaaaatttataataacccgagtgataataagattgtgcagtggattgtcggatttttgaaggaatcgaatattcaaaaatacctccaaactggtgttgactttattattgcttcactttctggaatcggttcggttggattatcgtttttcttagctttaatccttagtttgtttttctctttagaaaaagaacgggtaacttcttttacagggcaatttttaacaagtaaagtaggctttatttttaaagaagcagcgttttttgggaaaaaatttgttgcgactttcggggtggtgttagaggcacaattgatgattgcgcttgttaatacaatcattacaacgatagcactatatttaatgaatttcccacaacttcttagtctatccataatggtgtttgtattagggttaattcccgtggctggtgtaattatctcatgtgttccacttgttcttattgcatactctgttggtggttttcaagatgtcgtttatattttaattacggtagttatcgttcatgcgattgaaacatatattttaaatccgaaactaatgtcttccaaaacgaatttacctgtattttatacctttatcattttaattttttcagaaactttctttggcgtatggggcttaattgttggtatcccagtatttgtattcttactggatattctagacgtacgaaattctgaagatattcaaaaaagaactatatttggacgtaagaaaaaagtagattaagcttaatgcttaatctactttttcagttccccataaaaaattagctactttggcatctacatctgtattttcatgtagtttactgtgagctgctttttttccagtaaagattttttcttcgtaacttttagcttgtccttcaaaaataaatttaccagagagagcgcttgcgaccgatacactaccatcgcttttggttccgtctagcatatcaccggcaatatttaatacttgtaaattagtagggattttttgtttgtttttcataaattcactataacgatcagaggactgttttggtccttcatccgttaaatcgtaggcagttacaccattatcaccaacaactagcccattaagtggtgcgccaattaaaactagattttcaagaactggataggctttatcactaccaactttctcaatataactcgttaggctaactccgcccattgaatgaccaaccgcatctactttttcaatatgataattattttttaactctttcatcacattttgtatccactgagtttgattaaccatcgaacttttattatcctcaaaaatgacttggatagttggattatgactaaatttatcgtaacttcctgttgtgctcacacttccatcagcagcaacagtcataacaagtgattctgttacgataccatcatcagcaaggcgattaatcatgcctttaaatgaattagctgtccctgaatagccatgaacaaaaagcgttggtacagcaatttctgaaactggatttttagcttttttggaagatttttgtgcagtagcgttagtaggttctttagcagcttttttagtaggttcaaactgaaggaaaattatcccaaagcctgtaattatgatggctaagatgataatcgtgagtataacttttttcattcgaaacatcctttaacttttatttctgcccccataaaaattgaccgacatacttatcaacgacagtggattcatgcatgctactatgggttgctttggggcctttaataacgtgagtaatgactttctgatgtgcaaataacttttgaccatataagacgctatttaatttgacttcgccatcactgtttgagccgtcttctaagtcgccaccgataatcataatttccgtattatcaggtaatactttggccattttttgagcaaacttggcatgaacattattggcatttttaatgtccacttgctgatctccatttacatattcttctgggtaaaaaggtactgcgagaaaaacaattttatttacttgtggataagatttgtttttttcataagatgctaaataggaaacccaagcaccgccacccattgagtgaccaattgcattgaattttttgatgtcataatttttttgtaaataggacattattttttttgtccacatcgattgctgagggagggttgctcggttatcttcaaaaacaatattaattaacggatttttttcatttttactataagtaccagtagtagaaatgcttccgtctggacttacatttactgttaatgactctgtgccccaattatatttttggtcgaagcgtcgtatcattccatgaagtgagcgatcagttcctcggtaaccatgtataaatatagttggaatagcatcattagctgcttttggatatgtcgtgttgatcgtaagtaaaataaaaattgctccaactaaacaccctaaaggtaagacaatcgagaagaacacacgctttagcattattttacgcccctttaaatttcgttatgaacaaattatacatttttttaaagcaaaacgcacgactagtcttctttttctaatatttaaatagtttattctcactaagacatatagtatactggaaaaataagcgaagaaacggaggcatattttcatgattaaacgaactggtgagatagttctcgctattattggacttatttttagtgtacttatgcaagcagctattgctgtcattggtctattacttgtaaatggctcaaaaggaaaagaaggcttaacaacttattacaataactactaccaaactgttaccgaatgggaaattcctaaagatgagataccggacccggatcgtatctttgattttgtacatacattatcttggactgcactttctggcgggataatcactttaattgttggagcagcaggcatttactatattatgaagaataaaaacccaatacttgctggatttttatttttagcagccggtattgtgtcacttttatccactgcacttattggtttcattcccgctttacttttcgttattgcggcaatgctatgttttattcgtaaacccaaaagcactttttctggattctaatatcaaaacgagtttgcatcatgcaaactcgtttttgttttatctcgctttttttagggaataaaatagtggatttcaagaggaggttgatagtgtgaaaaataaagtaggaattattgctggagctgttgcgggtgtagtagcttgtgctgcaatttatgtggtgaaaaagcaacagccacccacgccttttgatgaagtaaatgatattagaacacgctatgcggacaaagaaatctcagaaacagagctagaggaaaacaatatgatttctgaaggcggagtttcatctcttcaatatgaagaaaaaataaaatagccaaaaagcagtttgtatcttgtgttacacgagaagcaagctgttttttgttcgttaaacatttcttaatatgttatcctgtagttagataataggactcaagttgtaggtgaatttccttctacagtgggttcttatacttgatacatagcgttatgataggtacagtaataaaagaaaaatatttcagctacacttggaaataaggaggtagacagatgagagcgattttgattggcgtattaatagttttactcttagcaatgatacttatcgtcttatggccagcaattatggcaactattggcgcagtgctcggcttttggtcacttaagaaactactcgaagcaaggtctgtaggtgaaaaaatcgtttatggtgtattaatcggcgtaggtgccttaatcattctagctaacttaaaaggaatactggttgttgcaatcattggagcaatcatttactttctaactagaaataaaaataaacctagaaaaaatgatgatgtattcgactacccatacaataaataattggaggagaaaaaaatggcaaacctttttgaaaaaatgaaacaatggaataaagaagtaagtgaaaaaatcgaaaaacgtgaagaaaaacgtcgtaattcggtaagttactatatggataaaacaaaacaagaaatgaaagacgcagaacgcatggtagaaaaacaacgcgaactgaaatctcttttctataaagaatataaagaaatggaagtttatgtagaaaaacgccgtcatcaagctgaaattgcaaaagaagctggcgaaactaaattagctgattttgcattagaagaagtagctcaatacgaagaacaattaaaagcaactaaatctcattatgatcaagcttctgaacaacttgaaaaattagaactacgcatgcacgaaatgcgcttaaaatggaaaaatcttaaaacacaacatctagctgaaatggctgaaaaaaatgcgacagaaacttccgaaaaaatggacaaagttatccatgatatgagctggggtagcgtaagtgattatcatgaagctcaaaaacaacgcgacttagctgaagaagctgaaaagaaagctgatatgagcaaagaactttcccaatcttttgatgatctaatggatgaactagaaaagaaaaccaagaaaagcaaagagattattaaagacaaagcccaaaatttcacaacaatggtagatgaaattattgaacgcgaaaaacaaaatttcaagaaaccagaaaaagcttctatggaagatcagttaaatgaacttgaaaaagaggctgctaaagaacaaccaaaagaagaaaaagaagtgctcattccagaattagagaaaaaagaagaagaaaacgaaacagataaataaaagtaacgagcgtagaataatcattctgcgctttttttataacgaaatgctacgggccttttaaatgctcgtggcttttttggttactttacttttttttcgggtaaataggaaaagataagttgcattttaatggatacatgctataataattggtatagaccgatttaacgaggaggcaatacgtaatgactaataaagtaattactaacgctacaatttatactggtaaaggtgttctagaaaatgcttttgtacgatttgataaacagattttagaagttggctcaatgactgactttcaagcggaaaaagcagaagaagtaatcgatgcaaaaggacaaaagttagttcctggtttcattgatgtccattctcatggtggttatagttttgacgcaatggatgcagatcctgaagcacttaaaaaacaagtgaatggtatgttaaacgaaggtatcactacttacttcccaacaacaatgactcaatcacatgaaaatattgaaaaagctttaaaagttattaatgaagtcgctcaaactgaacctgtaattggcgggattcatcttgaaggtccatttgtatctaaagtcttcaaaggagcgcaaccagaagaatacattcaagcacctgacttggaacttttcaagaagtggtttgatatttctggtggcttaattcaattagttacctacgcgccagaacacgatacttcagctgattttgaaaacttgtgttttgaacttggagttgttccaagtattggtcactccaacgatgtgcgcgaacacttaaaaacaagtaaagcgacacatgcgacacatttatataatgcctgtcaccgtatgacgcaccgtgaaccaggtgttccaggccacgttttactcgaaaaaggtattaatgcagaattaattgttgatggtattcacgttcaccctgatatggtgaaattagcataccaaatgaaaggcccagaacatttatgcattattactgactcgatgcgagcaaaaggtatgccagaaggaaaatccgaacttggcggccaaacagttatcgtgaaagataaacaagctcgtttagaagatggaacattagccggaagtgtactcacttacgacgacggtttccgcaatatgattaaatttactggatgcacggtggaagaagcagttcttatgtcttctggtaaccaagcacgcgaatttaatttaacacaaaaaggtgcaatccaagctggtaaggatgcagatttcaacttactagatgaagatttaaacattacagcaacatattcattcggaaaaaaacattcttgagaggaagatattattatgcaacttatcacaacagaaaataaattagcaggttctaaaaaagcactagaaattattgaaaaaggcattacatcaggtgaagtaaatacacttggtctagcaacaggaagcactccagaaacactttacgctgagcttgtaaaaagcgacgttgacacaaaaaatgtaacaacaactaacctagatgaatatgtaggtcttgcagcagacgacccaaacagttatcattactatatgaatgacttattattctctaaaaaagcatttaaagaaagtttcttaccaaacggggaagcgactgacgctgaagcagaatgcgcacgttatgaaggaattttatctgagcatccaatcgatattcaagtgcttggaattggaacaaacggccacatcggttttaatgaaccaggaacttcttttgattcattaacacataaagttgttttaacagattccactcgtgaagctaacaaacgcttttttgaaagagaagaagatgttccaacacatgcttattctatgggaattaaatcaatcatgaatgcgaagaaaattatcctacttgcttttggtgaaaacaaagcacaagcaatcaaagaaactattaaaggacctgtagatgtgaattgtcctgcttctgttcttcaaaatcatccagatgttactgtgattcttgacaacgaggcggcgtcacttctataagaagagggcggggaaatgatcgataaacaatcaggaataccgatttacattcagattcaaagtgaaattaaaaagaaaatggaagatggtgtctggaaagttggcacttctattccagctgaacgtcaacttgctgaaatgtttcacgttagtcgaatgacagtaagacaagccattcaaggactagtcgatgataatattttgcaaagacgcgttggcgctgggacttttattgcggaaaagaaattaaccgaacgactagaagctgtcacaagttttacgaatttgatgttgcaagaagggaaagttccttcaacgcgtatcgtatcgtatggcattcgtccggcaagtacgcaagaacaagaagcgttacaactaccagaaaacagcaatgtaatgaaaattgaacggattcgttacggcgaccgtgtaccaattctttatgaagttgccgccattccagaaaaaattgcttcactgcttacaaaggaagacattatggattccctttataaagcgattgaattaaaacttggtcaaaaaatcggagaagcagaacaaacgatggaagcttctttagtatcagaaaaaattgcgccatatcttgatgtgaaactcggatcaccggttatgaaacttcggcagattacaactttagaagatggtcgaccatttgaatttacacgttctcaatatgtaggtagtagatttcaatttgtagctaggattaaacaataaatagaaagcttgaggcatgctccgtgcgcttcaagctttttttattaaaaatgttcggataatgattttcgttgtctttttgataataaaaaagtataatgagatgagtaaaaaatttgcggggaggactaaccatgagctggatgataatttttatatgttttggtgcgtccgtgttacttacaccgctaattcgaaagatagctctttattttgatattactgataaacccgatcagcgacgcattaatgtgaagccgattcctagtttaggtggcttagcgatttttattagttttgccattggtttatttttacttccaattgaaaacgaattcttatgggctttattgattgctgcatttgtaatggtcataactggcctgttagatgatattatggaatttaaggcaagatataaattaattggtcaaattaccgctgcttttattatagtattttggggcgatattagtattgattttataaacttaccttttggtggagaaattcattttggcattttgagtattccgctcacgattatttggattgtagcaattacgaatgcgattaatctcattgatgggcttgacggactggcagcgggtgtttccactattgctttactgacaattttaggaatggcatttattatgggggatgcgcttgttattatgattgctagcgttttaattgctgggactcttggcttcttaccatataatttcaatcctgctaaaatatttatgggtgatacaggagcgcttttcttaggtttcattattgcggtactttctattatgggcttcaagaacgtcacttttatctctttaattgtaccaattttaattttaggagtaccaatttctgatacagtttttgctattgtgcgccgtatggttacgaaacaacctattgctatggcagataaatcgcacttgcatcattgtttactccggttaggttttacgcatcgacaaacagtgatattaatttacgcgattgcagcattattttccttatttgcattcattttcacgatgtcgaccttgtggggttcgatgatattaattggagtacttttaattttaatcgaagtgctaattgaaacgcttggattagtaggaagcacttatcgaccattattaaacttatttaagattacgaaagaagacaaaatagattagagattagctactttagttagtctctttttttatgccaaaattcttattgagtaacaagtcttcttgtgatacatttatcaagtaacgtttttagtagaaatgaggagaaaaacatggaaatcatagcgacagcagattcaattagtcaagctgaacaattgcttcgcgcgggggtagacagattatatataggtaacagccaatttggcttaagattacctcattccttttctgtcgaagaattacgtgaaatagttcatttagcgcatcaagaaaagaaaaaagtaaccgtagctgtaaattcgttaatgcacaacgaacatatggaagagctaccaacatttttagaccaacttgctgaaatggaagtagatgcagttgcatgcggcgacccaggagcgattatgcttcttggcgaaatggctcgaccgataccttttatttacgatgcccaaacatttgtcactagcgcagaacaaatctcattttgggaaaaacaaggagcagtcggagcggtacttgcaagagaacttactgaagacgaaataaaagcaattgctaaaagtcttactattccagtagaagtactggtttatggcccaacatgcatccatcaatcaaaacgcaaactagttactaattaccaacgaattgttgaaatggaagatgatacctcgaaggaacgtggactttatttacgcgaacctaatgatgaaactagccaattaccaatctatgaggacgaatctggaacgcacatttttgcttcagaagatgtttcactggtaccatacttagctgatttatatgaagcaggcttgaacacttggaaactggacggggttcttgcagattcggataattttgtacaaattgccactctatttgtcgaggcaaaagaagccgttattaatggacaatttgttgcggaatattttgtgaataaattaacggaactacaacctaaaacaagaaaactagatgcaggattttatttgaaaaatccggatgatgtgaagtagggggaatagcataatgagtaaagtattaaaaaaaccagaagtgctagctccggctggtaacttagaaaaattaaaaattgccattcgttacggagcggatgctgtatatattggtggccaggcgtttgggctccggtcacgagcagggaattttagttttgatgaaatgaaagaaggtatcgcatttgcgcatgagagaaatgcaaaagtgtatgtagctgccaatatggttgcgcacgcaggggatacagaaggtgctggtgaatttttccggacactccgggatattggcattgatgcagtcatcgtttctgatcctgcactaattagcatttgttttcaggatgcgccaggcttaccagtccatttatcaacacaagcatctgcaaccaattataaaacgctagaattttggaaaaaacaaggattagaacgcgtggtgcttgccagagaagtaagtatgcaagaaatccaagagatcggcgaaaaaacggatgtcgaaatggaagcatttattcatggtgcgatgtgtatttcttattccggtcgttgtactctatccaatcatatggcgaaccgtgatgcgaatcgaggaggttgtgcgcaaagttgtcgctggaaatatgatttatttgagatagataatggcgtttctaaaaatttagttgatacagacgaagaaccgttttcgatgagtgcggtagatttatctatgattaaatatattccagatatggttgatgctggcgtagatagcttaaaaatcgaaggaagaatgaaatcgattcattatgtctcaacggtagcaagtgtgtatcgccgtgcggtagatgcatactgcgcggaccctgagaattacgaatttgatccagcctgggaagaagaattatggaaagttgcacagcgagagttatcaacaggctttttctataaagaaccaaccgaggacgagcaattattcgggaaaactcggaaaatacctcaatatgctttcgccgctcaagtacttgaatacgacgcagaaacaaaaattgctaccttacaacaacgaaataattttggtgtcggggaagaaattgagttttatggaccgggagatactggttttaaacaagttgtcgaagttctttggaatgaagacggggaagaaattgaccgtgctccaaatgcgatgatgacgataaaaatgccggtagatagacctgttaagccattttactttatgcgaaagaaaaaatagaatctcatgctgcagtaggattgtcgtgtactccccaagtaaggtataatgggattagtacatatgaaggaggagattaattatgataggatggattattgctatcgctgttgttgtaattctagtattgatttatttcggtctatacaacagccttgtaaaataccgtaaccgtgttgacgaaacttgggcgcaaattgacgtacaattaaaacgtcgctttgacttgattcctaatttagttgaaacagttaaagggtatgcaacacatgaaaaagaaacactaacacaagtaattgaagctcgtaacaaaatgatggaagttcctgctgacaaccgtcaagggcaaatcgaagcagataatatgctaagtggggcgcttaaatctatttttgcattaggtgaagcttatccagacttaaaagcaaatacttccttcatcgaattacaacatgaactaactactacggaaaacaaagtggcgtattctcgccaactttataacacaaccgtaatgacttataacacaaaagtacaatcagtaccaacaaacatcgtagcaaaactgcataactttaaagaacgcgatatgctttcgattccagaagtagagcgtgttgcaccaaaagtagagttttaagccatgaaggagagcgaaaattatgctatttgaacaaattgcagcaaataagcgaaaaactgtttttatcattcttggcttttttattttcgttcttatggttggggctgctataggtataattgtttggaataactatctaaatggactcatacttgcggcggctattggtgcggtttatattttgataatggttatgagcagttcgtcggttgtcatggcgatgaatcatgcgaaagaagtcacctcaaaagagcaagcaccagttttatgggatactgttgaaagcatggcgatggttgctggtatcccaatgccaaaagtttatattgttgaagatccaagtccgaatgcatttgcaaccggtatttctcctgaaaaaggcgccgtagctgtcactagaggattgttaaataaattagaacgatatgagttagagggcgttattgcgcatgagatttctcatattcgtaactatgatattcgcttgtcgactattgcgattgccttagtcgcggttattgctatcctaagtgatttagctatgcgtttgattttctggggtagcttaacaggcggaagaaatagccgcaaaagtgacaataataatggcggcggggcacagataattatctatgtagtagcactaatttttgttattttagctccgattattgctacggcgattcagttcgctttatctagaaatagggagtatttggctgatgcaagtgcagtagaattaactcggaatccagatgggcttatccaagcattacaaaaaattagcggtgatacgaaaaaaatggaagaagttagcgcttctagcgagtccatttacttttcgtcgccattgaagtctaaaaaagataaaccaggtcttttcgattcccatccgccgattagttcgcgaattgagcggttggaaaatatgtaataaaaaagtagcagccgagattaggctgctactttttttattataagctaccgatatatttccagtgaggcttgccatctggagcatcgattaattctactttttgttgaaggcgccatttcttcatttggcggtcaatttgttgttcagaaaccccgtaaaaggctgccatggaagcagaagaagtaacttttactttagctaaatattcttccatttgtgggcgctcttctggttctgggaaatcatttaaaagctcggataaaacatgtacgtagacctcataacgatgtaggccacttaattttaacccagcgtcttctatatttttattgaagaaaactactgttggattttcgcgtatttccatttcttgtgctactttttggtcgccaatataggcgcgcttagcagcagtagatgctaaatcttttttgaattcagtaagatctagaccggtggaaatagcgatttcatagagtacttcttcactagcgatgtctttattctcaagaaaataagcttcttgaatcttacgcaggaatgtaataccttgtttttttccttggagttcagcggctttgactgcaagacaagaaatataggaaaggtgcgcccctatttgttgttcttttaagcttaggttactatttccagcgcgtttttgtttacatacaaatgtctgcaaattattatgcaacacatagcgcaatttaaaatagttcccgtactccatttgtaaccggagcatgttcgcttcaatattccaacagtcatcacaagcaggatcaaaaaatagataaatttcgatgggcttggaattagctactgactgataatataaattttggttaatcatttgctatcacctgattttcaaattctaaataccttcaagcagatattcatttcaatgtaccagtgtgaaaagaaataattcactgctaagtaaaagctgatacaaaatttggttttgtaacttacatatctattttatcagcgtaatgtaaatttaacaaataattgtcattggcttaatatatttattcgttattttttaagaatttgtgtcatttcgctataaattagtacgtttttcgttagttagtcattatttttatacacatgattataaaaacgagctactttgttttctgctggatgattcgttatttgatattctttgagtagtttatcaaaaatttcttttcctttatcgtaatcagaaacttcatattctaaatcaaaatctgaaatagaaccatagaaatttttgtcgaatacgagtagtccttttttataatctttttcggcacggattgttttaagcgaaccaaagacttgcaaatcttcatgattaataccgatttcttttaaagtatcgcgcactggaccaactggaatatttgctccgtctgtaatggctgttgcttgatctgcggctaaaatttgagttgtttccattaaaccgcgagcctcaggagtttttagtgttaattggtactgtgtttctaacttacgaatccgaagagcagagttacgttcttttaagccgaaatctgccgtatctaaataaaaattagtttgttcaaaaaaatcatcttctttaattcgaaaatcctctataagtcgatcatattcctcttttgtcaaaagattgcggaattctatttctagttcttttaccatgaaaattcatctcctcttaatgaaataacgcatctaaatcttgtgcataaaattgaatcgcttttttgtaacttaaaatatctttgtcattagttgtatttgttagtaacagaagtgcttcttgtaaggcttctttttccttaccttgattatacttagccatgatgaaaaaagtacgtaaagcattattttctgggaactcttctatcgctttttggaaaagaaggacggctttttcgggagaacctgttatgcggtaggtgctaccaaggccaatatatgcttcttttttatctgtatcaggaagaccaagctccagtgctttctcataaaaagggatagcggcatcttctttaccgagcgcatcgtgtgcccatgctgcaaaataatttagttccgcattttctggggcgttttttaattctgcaagagcttttagtcgagcagtttcgtaatcgccattttgaagtaaagtaagaatcatttccatcatccttttcattgtatcgttagcgcttcagttttattttaacatgtgattgaaaaaaaggttacttttagcaaggtggattaatcacttttgtgttaaaatataactgatgttgcataaatttaatcatgaatatacttgaggtgagcgatttgaatcattgggaagactttttagcgccttataaacaggcagtagaagaacttaaaattaaacttaaaggaatgcgttcacaatttgagcttgaaaataatcattcgccaattgaatttgttacaggacgagtgaagccagttgcgagcatattagacaaagctaatcaaaaacatatcgcacttgaccatttagtggaagaaatgcaagatattgcgggactgcgaatgatgtgtcaatttgtagatgatattgaggttgtcgttcgtcttttaaggcaacgcaatgattttcggattgtggaagagcgcgattatattacaaataagaaacccagtggataccgttcgtatcacgtcgttattgaatacccagtggaaacaattcaaggtgagaagaagattttagctgaaatccaaattaggacattagcaatgaatttttgggcgactattgagcattcggtaaactataaataccaaggcgaatttccagaagcgattaataagcgactaaaacgcgctgccgaggcggcttttcaattagatgaggaaatgtcgcaaattcgtgaagaaatacaagaagcgcaagtctatttttctcaaaacaaagatgtatcaaaggataaaaaagcggtgcatcaagtaatgccaaagaaaaataagtaattaagcgtaggaataggggcgaatagaaataatgaaatatatgattacttcaaaaggggacgagaagtcagatttgctgcgattgaatatgatcgctggttttggggaatatgacatggaatatgatgagatagaacctgaaatcgttatttctattggcggagatggaacttttttgtctgcgtttcatcaatatgaagagcgcttagatgaaattgcttttatcggaattcatactggtcatcttggcttttatgctgattggcgcccagctgaagcagataaattagttaagttattagcaaaaggagaatatcaaaaagtttcttatccactgcttaaaactacagtaaaatacggcattggcaaaaaagaagctgagtatttagcgctaaatgagtcaaccgtaaaaagttcaggtggaccttttgttgtggatgtagttattaatgatctccattttgaacgattccgcggagatggtttatgtatgtcaacaccaagcggaacgactgcatataataaatcactcgggggagcgctaatgcatccgtccattgaagcaatgcaattaactgaaatggcgtcgattaataatcgagtttaccggacaattggtagtccactcgtttttccgaagcatcatgtagttagtttgcaaccggtaaatgacaaggattttcaaatttctgtggatcatttaagtattttgcatcgtgatgttcaggaaattcgttatgaagtatcagcgaaaaaagttcattttgcgagattcagatcatttccattttggcgtcgagtacacgattcatttattgaagattaagctagcaggaggaagcatgtgtttttagaatggcaagtaaaaaatgaagaagatgggttgttgcttagaacttttctgaaaagcaagcacatatctaaacaattattaaccgcagtaaaatttggcgcggatggtaaaattgaagttaataacgaagaacaaaatgttttatatcatgttaaaactgacgataaagttcgacttacctttccaacagaacaacaaaatgatcgattattggcagaacatacagatttagaagtagtttttgaagatgactttttattaattattaataaaccggccggaatggcttcaattccgtctcaatatcatccgaccggttcagtagcaaattttgtaaaaggacactacgaaaatcaagggcttacaagtgctatccatatcgtaacaaggcttgaccgagaaacatcaggattaatgttaatcgccaaaaatagatacgcacacgccaggctcagtagttttttacaacaaggactactcaaaagacgataccaagctttcacttcaggtaccctggaagaagaagcaggatctattgaagcaccaataggacgtaaagatgtaagtataatggagcgttttgttactccagaaggaaaatatgcgaaaacaaactacgaagttctcatgcgttataacgggtttgatcatttagcgatccagcttgagacagggcgaacacatcaaattcgggtgcatttttcttatatcggtcatccgcttattggcgatgacatgtacggcggggatcaggaactacttaaaagacaagcacttcactcttgtcatctacatttagtccacccagtcacagaagaatatatggcgtttgatttgcctttaccagaagatatggaacagataattcaaaaatcgaagtaataagtgttttaaaaagttatttggtcatgtaaaatggaagaagcgaacaaatcgcatcaaaattaggaggaaagaacatgaatttatcattagagggaaaaacatatgttgtaatgggagtagctaataaacgcagtattgcttgggcgattgctcgttcattaaatgaagcaggagcaaaactagtatttacatatgcggatgatcgtgcgaaaaaaagcattactgaactagtaccttcattaaacgaaataaatcaagatccacttattttagcatgtgatgtaacaagtgaggacgctattacagcgacatttgaaacaattaaagataaagcaggcaaacttagtggtttagcacattgtattgcttttgctaataaagattacttaactggtgactatttagaagtagatcgtaaaagcttcttacaagcgcatgaaatcagtgcttattcgtttacagcggtggcgcgtgcgttaaaacacttagatatgttaactgaagatgctagcttgcttactttaacttatcttggcggtgagcgtgttgtagaaaactacaatatcatgggtgttgctaaagcttctcttgatgctagcgtgagataccttgcaatggacctaggagctatcggagtgcgtgtgaatgctatttctgctggaccaattagaacagtctcagcacgtggcgttagcggcttctctgactcgatttcacttgtagaagaaagagcaccattaaaacgtgcaacacaagcagaagaagtaggagatacagcttattacttattcagtaacttatcacgaggcgtaacaggtgaagtaattcatgtggatagcggttatcatattattggattctaacaataaaaaaaatccaggagtagtttaaatactacttctggattttttttggtccattatctggatgacttttaatataataatcatctactgttggtgtatagtttgtttgaaccggtgctttgacaaaatcagcaaggacttggtcgatttttacccaaccgcgccagcttaaatgaataggatcttctaaaaagaaagaatcattttgatattgttctagagagtaataacggaagccttgactctcgatttgttgttttgttttagcatagtaaccatctaagccttgtttgttcataccaatgtagtcaatccatttaccgttgataggaggattgatgaaaataacatcagcgccagcttttttgaatgcgtccattagaagttgtaaatcaccaaattctggagattcatcgtaacgcaaatctttacggctgtcttttagcttaccttcaattggtttgatttttttctggtaatatttttctttcacttggaaaggattgtcaccgatacttttctcaccagtttcttttgctaggtcatctagttgtttataatctaatttttctgggagatcttttagacctttttctatacgatcttgtttagaacctgaaactgttttcgattctaaatcgtctttacgttctaaaattttcagttcgacattaccagcaagttttacaagttttggatcatgaggttttttaggaccttttgcgacgatgttttcaagtaatttctttaaagtagagtcgctttgaaccacttggaatgataataatcttttagctgcatatctgcgttcaggtgtgtttttcgcgtcttcaagtgcaaatttataagcatgaagaggggagaagttagcaccaaacgatggatcagaaacgcctttaggttggaaccattgtggagataaaactacagccacttttttgcctcttaagtcatcaccaagtgcatttacatcaagaaaatggcttaatgattgtgtacccggtcgacctaataggaatggtgtataaccttgatcatatttttttgagactacgctaggatgaaatgggtcgacacgagaaagctctgaagaaccataaattggtaaatagtttccttcttttaaagcttctttctggatgtctaagccttggatgacgtattcgttcatagacgtagcgctcttttctacagtctccgaagacacataagaaaataagctgctaggtccaaatagaacgaaaaggaaaaccgcgaatgcgaccagtaaaggcccaaatgtcatccacagcttttttttcattattttagcgcctcaagttgtgtaataatcatttcaggagtagcccattcgtcgcggtcaaattctgaaacgggtacagtaatatctagtcttgattcaatttcaattaaaagttgaacagttgccattgagtctagtaaaccttcatcaaataatttgatatttgtattttgtactacttcatcagtttctgtaatttcttctaagatttctaatacattttcacgaaaagccatttaaattaccacctttagttagttttaaaaattaattttatctaaaatacctgagaaaatcaggaatccgaaacaaacaaattggaatgtaatgataacgccgattacataagttattttgttttttggatagaacttgtgctttttgttaaagcgttcgattaggtcgaaaccaacaattaaagtggcttgataaagaccataaacgatgtaataccagtgaagtccgtgccatacacccataatgaaaaagttaacaaaatatgcgatataggcgatggtgaacttactcttgaaccatttcttttttgtaagccataagacaaaacgcataaatacataatcacggaaccagaaggaaagagtcatatgccagcgattccagaattctttaatgtttcgtgctgcaaaaggcttattgaagttcattggtgtttgaacgccgagtagataactcactccgactgcgaaggcactgtagccagcaaagtcaaagaataagtacatactgtatgcgtacatataaccaatcaaacttgttgttgtatcaacattgtgtgtaatcgcgatgtctagtggaacaacaaaatgtttgtttactaagtatgcgataatgaatttatagagaaaaccaaggaagataaggaaaattcctcgattcagtaaagcaacataagcttctttactaggcggattatcaacgtcttttttaaagcgacggaaccggtcaatcggtcctgatgaaatagttgggaaaaatagtaagaaattaacaaaatcccatgcgttgtactgtttaattaagttatcgcgtatttcaataatcatttgtgtcgctttaaaagttaagtacgaaatccctaggaaaccaaccattgttacttggtctcctaaaattggaactactttagagattacaagcgggagaatggagagaatcactgctatgacgaatacgccgccatgattctgttttttctcctgcctgtaatggaagtaaagtcgtacgagtgcaagttgccagaaaacaaagaagataaaagtaactccttggactggatttgcagcgaataaaaagtataaaaatactaatgtgacaaaagcgttatatatcggtaatctttttcctaacaaaccagctactatgataggaatgaaaaacagaagaagtactccaaaataaagtattgtaccgtatggtgtgctcacttgttaacctcgctgttaagtgcttttcgatcaattttgccattcattgtcaacgggaattccgttttataaatccattttcttgggatcatatatgctggcataaattcttttaattcgtttttgattgctgcacttagctggtattctttttcaaaatcgtgggaagacgggatgacctgagcgaccaacatatcaaccttttcatctttcattttaggaataatagcgcagttttggatgtaacttactttttttagattgttttcaatatcttcaagttcgattctgtaaccatgaagcttaatttggaagtcaagacgaccttggaagaagagataaccatcttttataacaccagagtcaccagtatggtaggcttggtaacctttgtaatcaaagaatacttggtctgttttttctggttcgtttaaatatccttttgaaacacttgcaccgattaggatgatttcgcctttttcgccttcaggaagtatttcaccagtttcttgatcgacaatatgaagtcgcatatctggtttaataactccaagtggtaggctcggataagcatcaatcaactcgcgtgttacttttacttgtgtaacagcaacagtagcttcagtcggcccgtatgtgttataaatgactgcatctgggaaacggtcaagtagttcacttgctgttttcttagcaagtacttcaccacagaataagaaacgtgttaaattagggttgttttcttggttgaaattatcatctagtaaacataagtctgcaaatgatggagtagaaacccatacatcaaaattttgagcaggtatttcgcgatataaatctttcatattagcagtgattgttttatctagtggtacaagagttccgcctgaaagtaagcttggatataagtccataaccgacaagtcaaaggaaaatggtgcttggtttaagaagcgcaatccttgtcttaacgagaaatcttgtaaaatccaattgctaaaactaactaaattgttttggctaatttgaacgccttttggatttcctgtgcttcctgatgtgtatataatataataattatcatcatttttaacacattcagcagggtctggcacttcttcaaaatgtttttccaaagcatccatcaattggtcttgtgttagaacgggacaacctgtaattgtaaggttgcttggaagctcttctgtgcaaatgaatagtgcaggatctgctgcttttttgatttgttctatacgttcaactggcatagaaacatctacaggaacataagcacgtcctgatttaatagtacctaaaaacgcaataagcattagtggggacatgtgtccgtacacgataataggtttttctttgtcagagtttaaagtatttagtagaaaagagccgaatgcatccgattgccgtttaagttctttgtaggaaagacgtgttccagcatattcatagcaagggaaatccggtgtcttttctgcccatgcatcaattctttcaatgatactcgttgtcataattgatattcccattttttaacagtcctttctttttttaaaattcattgtaaataaatttggcgccttcagggtttttgaaaccataaaaccatagcaacccaagcaaaacagtcaagtaaaaaatagtcttcattgtaaaaattgttgctggatgatgcaaaaatagttttactttattcataaatccacctctttattatttcagttatgttacaaatattaaaattaaactcttaatacttacttactgtaatacatctgtctttaaatgtctaattacatttttgtaaggttagaaaaataaacttactttgaacttaaaagtaggtggcgtataatgaaaatatcgatatcgcaatgctttaatgctaagttgggaggaaaataaatgattaatcaaaagaaaatcgcaggtgaaaaagcgtgtgaatggattgaagatggaatggttgtcggtcttggaacgggaagtaccgtttattatacgattgaaaaattaggggaaatggtgcaaaaaggcttaaacattactggggtgtctacttctatagaaacagaacaacaagctcggacattagggattccgctaaaatctttaaatgatgtaacgaaaattgatgtcacaattgatggcgctgatgaaattaatcaagcttttcaaggaataaaagggggcggaggagcacttttacgagaaaagatggttgctcaagctagttcaaagaatatttgggttgttggggaagagaagcttgtgacagagcttggaaaatttcctttgccacttgaagtgattccttttggatggaagcaaattaaacgaatgctagaaaatgacggggttgaaactactttacgcaaacagtcgtcaggagaaatatatgaaacaaataacggcaattatattttagatattataaatcagacctttactaatccagaagcctggcatgaaaagttagcgggcattcctggggtacttgagcacggcttatttcttcattatgtagatataattatttgcggcaaagcatcaggagaaatagagataataaaaaaatagttatttcttctattagaaagaaataactatttttattaataagttaatgtttttttcatttctttatgtttaattcctgcatctaagaatacatcagagcacgtttcatagccaagtttttcataaaaggggattgctgttaactgggcgcctaattttagtgttgttaatccacgcgttttagcttccagttcaatagcttccatgattctacgtccactgccggagccacgggctattttttgggtgcaaatgcgttcgactttaccgtaaccatcctttacgcgaaatctgcctgtcgcgagcgctgtgccgtcttcagcgtaatcaacaaacatatccaccgaagccatttcatcaaattcatcccattctaatgcaggatctacattttgttcgacaacgaaaacgtcatttcgaatttttagtgctgcttgtttacctagttcatctgttactttttttaccgtcaagttgttccgtcccttcctatgcgcgcatgctttctaaatcaaacgtatttactggaagcataaattgtaaggattctttaataaatggctgccagtatttccagcgatgatcgccgttaaatacgcggaaataataatcaaacccacgagaggttaaaatttgttctaaagatttgtttggtgatagaaaatcgagtatttcatctccagtagtttcaactgcagtttcttggtcgccaataatatggtagatttttactttggcagggtcagctttttctgctaatgtaaggattgcatcatcgacataaggagaatgtaagataacattaccgaacgtaaacggaaatagtagtgcggcttttaatgaaacagatgcaccaagggagtcacccataagaaatctactcgttggcatttggaaagaagggaagcgttcttcaagataaggaacaagttcgaatgctaagaaccggatgtatgcttcattttgttcaccatctggatgatacttttctcggcgatccatgacagttttgtaaggaataccaatgaaaatggctttttgaatctgctcgtttactgctaattcttccgagtgacgcgcaagtttaccaaactgaaaataatcttttccatcttgtacaataaataaaggatatttgtaaagtggcgaaaaatcaggtggtaagcaaataattaaatcgagttcctctcctagcaatttactgtaaaatttctcatctaacattttatgagctgtcattttcattctctcctttcttgaaatccttccttctaagatgattgttttttgaaaagttactctattttagcatgaattacgttaaaagaaagaacattttgcctatttattagaaaaaattttctttttcataggacttcactgcaataataccgtttattgtgctatactgaaacatacaataattctgatttatcgatagaaagtggggattttgaatgagtaaagatattgactggagtaatttagggtttagttatattaaaacggacaagcgttatatttcacattggaaagacggagcgtgggatgaaggtactttgacggaagataatacacttcatattagtgaaggttctactgcacttcattatggccaacaatgttttgaaggtttgaaagcatatcgttgtaaggatggttccattaacctttttcgtccagatcgtaatgctgctcgtattcaaaaaagttgtgaacgtttattaatgcctcatattccaacagaaaaatttattgatgcttgtatgcaagttgttcgtgcaaatgaagaatttgttccaccttatggtactggagcaactctttatttacgaccgtttgtaattggcgtaggtgataatattggcgttcatgcagctccagagtatattttctctgttttctgttcaccagttggtccttatttcaaaggcggaatggcaccaactaactttatcgtttctgactttgaccgtgccgctccaaatggaacaggtgcagcaaaagtaggcggtaactatgcagcaagtttacttccagggcaaaacgcaaaagatcgtaattttggggattgtatctacttggacccagctactcatacaaaaattgaagaagttggctcggctaatttctttggtattacaaaagacgataaatttattacgccgtattctccttctattttgccaagtatcacgaagtattcattactttatttggcagaacaccgtttaggtttaaaagcagaagaaggcgatgtatttattgataagttagatgaatttaaggaagcaggcgcatgtggaaccgccgcagttatcacaccaattggcggtattcaaacaaaagatgacttccatgtattttacagtgaaacagaagtagggccagtaacaaaacgcctatttgatgaactatgtggaattcaatttggagatgtagaagctccagaaggttggatttataaagtgaaataatgacaaaccgtccgtttatcgggcggtttttttatgcttaaatataggtgttttattttaaaaaaagaatataagttttttgttgacagtatatcaactaagtgttactatatagtggtaataagtgatacagaatacccgtgatactaagtagtgaaataaaataggaaattggaaggaagggtgagttcaaatgaacgaatggatgattgaagctagtgggttaagaaagtctttcaaaaaaaccgaagtcttaaagggcgttgattttggagtaaggcgcggtgagatttttgctttacttggctctaacggtgctgggaaaacaacgactattcaaattttaactacacttttgaaagcagataatggaaaagcgagtgttgctgggttagatgttacgaaagaaccagagaaagtgagagagcatattagtcttacaggacaatttgctgcagtagatggtttactaactggtcgtgagaatattttactcattgcaaaattacgaggagaaaaaaatcctgatcaaacagccaaagatttactagcccgttttggtttagaaaaagcttcagaccgaagagcagacacatattcaggcgggatgatgagacgtcttgatattgcaatgagtttagtgggatctccggatgtgatttttcttgatgaaccgacgacaggtcttgatccagaaggacggattgaggtatggaaaacgattaaagctctttctgatggaggaactactattttactgacgacacagtatttagatgaagcggagcaactcgctgatagaattgcaatccttcacggcggaacgattattgcaaatggtactttagaggaacttaaaaaattgttcccacctgctgaaattgaatatgtcgagaaacaaccgtcactggaagaaattttcttagcaattattaatggtaaggagggagtaaaatgaaagcaattcgcgatacaagaatcttgtttggtcgctcgatgcgtcacattttgcgtagtccagatacaattattacagtagcaattatacccattatgattatgttgatgttcgtctatgtactaggtggagcgattcaaacaggaacagataattatgttgattacttgttaccagggattattttaatggcaattgcaagtgggatagcttatacggcagtacgattatttacagatgtgcaaaaagggctgttccaacgatttcattctatgccaattagtcgttcttctgtattatggggacatgttttaacttctttagtttctaatgcaatttcagttgttttgattattctagttgctttattaattggatttaggtcatctgctgggattttagaatggcttgctgtagctgggatattgctacttttcacgctagctttaacttgggtggctgttattcctggtttgactgcaaaatcggttgacggggcgagcgctttttcttacccactgattttcttgccttttataagttctgctttcgttccaactgatacgatgccaactgcggttcgggtatttgcggaaaatcaaccagtaacttctattgtaaatacaattcgagcattgttatattcagggtccgttggtaatgaaatctggattgcacttgcctggtgtgttggtattacagtcgtagcttatatctttgcagtactaaaatataaaaaaacaatctaacaaaaaaggattggctcaaaggagccaatcctttttttaattttcaccagaaatatgttttttcggtaaaatgaaatggataaaataactaacgatacaacaagcaaacattacccagaataccatgtggagtccgctatataaaatatctctaagcggttcgactagatctggattaacattacctgaagtttgtgggctgattagctgatttaaattactacgatttacttcgctaccagctgctgcacggaattgtgtggttaatacggagttgaaaatagttccaaagacagcgacaccaatcgtttgaccaacagttctaaatagtgtgttggaagcagtagcaataccagtttggaatctcggtacagcatcttggacggttacagttgtagtagtaaaaataatcccaaagccaaatcccataaaggcactatttaaatagaagaagatgtcatttgtagaagctgggaataaagctaaaataagtccacttgcagctgttattaatacgccgattccgactgtatggcgatttcctagtgtcattaaaagctttccgcctataaatgaaccgataatccacgtgacggaaagtggtgcaagcataaatccagcaattgtggctccgtgaccaagcattccttgagcccacattggaatataaacattaataccaattaaaaaggcactaattagaaaaccaattaagtttccaattaaaacaactggatttttaaataaaacaaatggcataatcggatctttggcacgtttttcgacaaaataaaaagcaacaaataataatatcgaaacggcaaaaagaatgactacgagcggttctgtccagttgagggactctccagctcgctgtaatgcaaataataatcctaaaagtgctacggtaaatagtgaggcaccaagataatcaattggtaattttactcgttcgacctcttcacgtaaataaagcaaaataagtaagatagttagaagtccgattggcacattaataaagaaaatccaatgccaagaaaagttggtctactaaaaatccaccaacgagcggcccgaaaacacctgcaataccccaagcagaacccatgaaaccaagtacttttgctcgtttttcaaatgggtagacgtctgcgataatcgtcatagtagatggtaaaatcccgcctgctccaataccttgaatcgcgcgaaaaataattaattgctccatattttgtgcaaatccacaaagtgatgaaccaatgataaaaataattgtcgcaattacaaagatattttttcgtccatacaaatcagacagttttccgtaaataggaaccgtcactgctgatgttagtaaataaacagaaaaaatccagttcattaactctatgccgtccaactgacttacaatcgttggcatcgcagtactcacgatggtaccttcaatagctgccataaatgttgcgacaaatacggcgatggtaacggcttttacttttgtttgttccaaaaaattccctcccttttcgtctaccgaattatagcatataaaaggactgatttggaaaaaaattaatcttaagaaatgcgttaggtgaagataagcgctataatataatagaataaagcgaactaaaggaggaatatttttgagttacgaaccaaatacaacacaaacgatgcaaaaaattaaagagttaacttctatccctagtccgacagggaacacagggcaaatcattgaaaaactagtgagggatttagaagcttctaacatcccatataaattgaacaataaaggcggattaattgtaactctaccaggaaaagatgactccaaacatcgtatgctaacggcacatgttgatacgttaggcgcgatggtaaaagaaatcaaagcagatggaagattactattaactttaattggtggctatcgttttaatgcgattgaaggcgaatattgtacgattgaaactagcgaaggcgatttatatagcggaacaattcttatgcatcaaacctccgttcacgtatataaagacgctggtacggctgaacgcaatgataaaaatatggaagttcgtttagacgtaaaagcgctagatgctgacaaagttcgcgctcttggaatagaagttggtgattttgtttcctttgatccacgcgtccaaattattaatgatgagtatattaaatctcgccatttggatgataaagcaagtgtcgcgattttattacaactcattaaccatattcatgaaaataaattagagctaccacatacaactcatttccttatctctaataatgaagaaattggttatggtggtaattcaaatatcccagctgaaacagtggaatatttagctgtagacatgggagcgcttggtgatggtcaaacttctgatgaatacactgtttctatttgtgctaaagatggcagtggcccttatcatttaggtttgcgtaaacatttagttgaactagctaaaaagaataatattgattataaagtagacatttatccgttttatgcatcagatgcgagtgcggcgattaactctggtaatgacatcgttcatggtttaattggcccgggaattgatgctagccatgcatacgaacgaacacaccgcgattcactctatcatacagaaaaattagtttatgcttatttattttcgaatatattgaaataggaggaattctacatgaatgtccatgatttttctgaaaaagcaatgaatggtaaagaaatagcattaagtgactataaaggcaaagttttactcattgtcaacactgcgagcaaatgtggtttaacacctcaactggaaggtcttgaaaaaatgtataaaaaacttggcggagataactttgaaatccttggtttcccgtgcaatcagtttttacgtcaagatcctggtagtgatgaagagattttagaattttgtcaaatgaattacggcgtgactttccaaatgttctctaaaattaaagtgaaaggcaaagatgctgctccactttataaatatttaactgaacaaactggaggcaaaaaagtggaatggaactttgccaaattcctcattgatgaaaatggcgaagttgttgaacgtttcccatcaaaaatgaaaccggaagattttgaggacaaagtagaagcgcttgttgcagcagtcaaataaatagtaaaactcggtagtgaataatccgctaccgagtttttttgcatcttagggaggttaatttgcaagttacagaaatcaacttgtagtttttagtgtagcgtttataataaaaagaaaaaagggaggcaaccagatgaatttccatgtaaagcaaaataataatttagcgattggcgaagtagacatatattgccacccaaataatctggaagaagtaactaaaatagtgatggggctagaagagcaaaccgagaaaatctctgtcaaaaaagacggagtgacatatttactcgcaaaaagaaagattttatattttgaggctgtagaaagtaaaatttttgtgtatacagaaaaagacgtatatgaaactacttggaagttatacgagttggaagaaaaatttaaagatagttcctttttcaggtgttcgaaatccatgattttaaatatcgaatggattgaaaaaattgcgcctggctttcacggaaaatttgaagctagcctttttaatagagaaaaagtgattatttctaggcaatatgccaaaatcttaaagcaaaaattaaacttgggagggaagggcaaatgagcacaaaattaattcaatttattcaatcagcgtgtattatttttacagctgcaattatcacgatgatttgttcctatatctcaacgggagaatctgaaacagtagctattcgcgacatttttactatgctaggttttagtgttattactacttttgttcagcaattacttttcaataattcgataaaaacgaaatttgctttttatattcgtttaattgtttttttcttttttattagtgcagcaattttaggtcttggttggttgtttgattggtatcattccttaactggctttatgattatttttggatttatttgcgtgacttttcttgtaatgcatctgtttttcagttttagagatgccaaatttagtaatgaaattaaccaaaaactagcagaaatgcgagaaagggagacaaaatgataaaattaacgaatgtagttaaaacgtttggaaaagtagaagcagttaaaggcattaatttagaagtcgaaaaaggttcgttgtttgcattcttgggtgagaacggggcggggaaatcgaccacgcttagcatgatttgcacagaaagcgagccaacatctggagaaatttttattgacgatgaaaaattgacctttaaaaataggaaaaatttcagacaaaagttgggcgttgtttttcaagaaaacgtgttggacgatttacttaccgtgcgtgagaatctgtataatcgtgccagtttatatggaaaaacaaaagcggaaattaccgaacgtttagagcttgtttcttctattatgggaattgaggatatcttaaatcgccgttttgaaaaactatcagggggacaaaaacgccgagctgaaattgctagggctattatgcatgatccagaaattttactactcgatgaaccgactactgggctggatccgaaaactcgagtgagcgtttggaagattattgattatttgcgagaagaattcggcatgacggtgtttttaacgacgcattatttagaagaagcgaaggatgcggatcagctggcagttattcataagggaaatattatcgctcaaggcactcccgctaatattagaagtcgtttttcagtagataaaatcttcttttatgatgcaaatgtggaagaacttcaggtaattattgaaaaagcaaatttaccttataaagtgtcaaaaggaacgatacgtgttgacgtaatagatgaaaatatcggaattttggctattttgaatcaagcagcgggactttatagttcttttgaagtaataaaaggaaatcttgatgatgcatttatctcgatgattaaggaggattcaaatgattagtcgtaatttaaaaatctattttcgtgatagaactgcggtatttatgtcgctactcacgattttaattattatcggactctatgccatttttttaggaaataatatggaagaaatgtttaagcaggcttctggaaaaacgattggaatacaggaattagtgaatacgtgggtaattgcggggattttgtctattacgccggtcactgtttctttagctgttttctcattaaaagtgcacgatgaagagcagagtattgccagaagttttgcaataactccagcttccagatggcgaattgtcgcaagctacatcgttagtggtttagttgcttcatttgttttgtcagttatcactctttttgttggtgaaatgtacatctggttgacaggaggagcatttttaccgcttgaaagttgggttagtttaatcggcattattttaattaatgttctatgttgtagtagcataatgttttttatcgcaagcttagtgaaaaaagcgagcgcctttagttcggtttcgactattgttggaactgttatcggttttattgctggaatttatttgccgattggttcgcttcctgctgcggttcaaacggcgatgaaatgttttcctttcacatacggggcgtctactattcgtgaaatcatgacaaaagagccattgcaacaagttttcgcaggtaatactcaggcgatggatgcgacaaaagaaatgattggtattactatttattggggtgataaaacagtaacgacaggagtaagtttgctgattttaagcgtctttgcagtgctttttggcattttatctgtcgtcttaatgaaacgacaaacaaaataatttttgaataaaaaaacagccgaaattctcctagttatgctatactaatggaatgtgaatgaatctaggaggaaaataacaatgagtcaagatttgcaaaaagaagttgcttcacgcaaaacgtttgcgattatttctcacccggatgctgggaaaacgacgattactgagcaattactattattcggtggcgttatccgttcagctgggactgtaaagggaaagaaatctggcaagtttgcgacaagtgactggatggaaattgaaaaacaacgtggaatctcggtaacgagttctgtgatgcagtttgattataatggttcaagaattaatattttggatacaccgggtcactctgacttcagtgaagatacgtaccgaaccttaatggcggttgatagtgctgtcatggttattgatgctgcgaaaggtatcgaagcccaaacgctaaaactgtttaaagtttgtcggatgcgcggaattccaatttttacttttattaataaaatggaccgtcaaggaaaaatgccactagaactacttgctgaattagaagaagttttgggtattgaatcttatccaatgaactggccaattggtatggggaaagaattagctggtatttatgaccgctatcatcgcgttattgagcaatatcgctcagaagaagatgaacgtttcttaccacttggggaagatggagatttgaaggaagtacacgctattcaaaaatcactttattacgatcaagctttagaagaaatcatgctgttagacgaagcgggaaatgactttagtcgggaacgcattattgcaggcgagcaaacaccagtatttttcggaagtgccttaactaactttggggtagaaactttcttgcgtacatttgttgattttgcaccatctccttcaagccatgaatcgaatgaaggcgtgattgaagctgataatccgaagttctctggctttatttttaaaatccaagcgaacatgaaccctgctcaccgggaccggattgcttttattcgaatttgttcaggcgaatttgaacgcggcatgaacgttacattaacgcgaactgggaaaagtatgaagcttgcgaactcaacgcagtttatggcggatgaccgggaaactgttaatcgtgcggtagctggtgatattatcggtttgtacgacacgggtaattaccaaattggcgatacgataacgaatggcagtaaaaaactcgaatttgaaaaacttcctcagtttacaccagaattatttatgcgtgtttatgcgaaaaatgtaatgaagcaaaaacactttcataaaggcgtagagcaactcgttcaagaaggtgcgattcaattatttaaaacgtggcgcacggaagaatacattattggggctgttggtcagttgcaatttgaagtattcgaacacagaatgcgcggcgaatataattctgaaatccggatggagccaatcggtaaaaaaatcgctcgttgggtgaaagaagaagatgcggatgaaaaactatctaccgctagaagtatgctagtgaaagaccgttttgaccaaccgctattcttattcgaaaacgaattcgcgattaattggtttaatgataaaaatccagatattgagttaacttcattactataatagctacaacctatttgtactttcgcaaataggttgtttttttttgcttgacaattttttgaaacgcgctataattagttagaattctaattaataaggaggaatactcgtgagaagagagaagacgatggatacattaattcgttctattatgattaaatccaagcgaaaaatggacgcaaaagtagctcagtttgggctgacaacacaacaagcaagagttctgggatttttaaatgataatgctgcaaatgaaataatccaaaaagatcttcagcgaatcttccaaacacgtggcgcaagtatcactagcctcattcaaggactcgagaaaaaacaattaatttcacgcaaaccaagccttcgtgatggccgagaaaaagtcgttacgttaacaaaagaaggcaaagatattgtggatgaatttaatgcctcttttccacgagaagatgataaagcgaagaaaatcctttccgctgacgagtataaaacctttattgaactacttagtaaaattgacgatcagacagattaaaaaaatttaactatatagttagagttctaactaatttttagggggaattaaaatgaaacactcagataactattatttaacaaaagcgagcattcctaaagcgattgctcacttatctattccaatgatgcttgggatgtccgttggggtcatttataatattatcaatgcattctttatagggttgttgcatgatacgtcgatgttaacagctgtgacactcggtttaccaatgtttacgattttaatggctattgggaatatgtttggtgttggcggcgggacgtacatttctcgtttactcgggaaagaagacgggattaaggcaaagcaagtatcggcttttgttttatatggaagtttggttttaggtattatatgcgcgattatattaggctttttaattaatccagttactcattttctaggagcagacgcgacaagttttttacacacgaaaaattatacattggcgcttctcatttgtagtccgtttattattgctaactttgctttagaacaagtcgttcgggcggagggagcttctcgtatttctatgaatgggatgcttattggtacgcttgtaaatttagtgtttgatccactgcttattttgtattttaattttaacgttgtaggtgctgcagtttcaattggaattgcaagtacggtttcacttatttattatgcctggtatttggagaaaaaaagtgactatttatccattcggtttaaatggtttaaagcaacgaaagaaatcgttcaaaatgtttttaaaattggcgtttcagaactacttttatcattattcttgattgttactacacttgttttaaatcattattcgatgatttacggggaaggcgttgttgcaggttttggggtggcactacgagtagttcagttaccagaatttatttgtatggggctttatatgggaattattccactcttagcatataactttagtgcgggaaatattgcacggtttgaaaaagcgattaggtttacagctgttagtattggcttgattgtgcttgtgatttctagttttgtatttattttccgtttccaagtgatgcatctatttagtgacagtcaaagtgttatatcacttggggtgcatattatggttgcgatgctgatttcttctctattcagtggttttactggtctctttacgagtacttttcaagcgattgggaaagctattccggctacgattatgtctgtttcacaaggaattatttttatcccagtaattattttgggacaacattattttggcctaatgggcgtgatttggtctttaacaacaacagaaattcttacttgtttaatcggtgtgattctattcacaatccataatattaaaatagccagtagcgcaaaaactaaagacttggcggtttaaaaagtttgtgagaaaaattagttgacgagaacttctaaattatggtattattctctaggtaatcatatatcgttctttgacaaatgtcagaggggagtagcgctgattagcttttaatcaggataaagtcgtcattacatgatagagatatcatcggttttatcacatttaactttaaatgttagcgagacctttgcctttatgggcaggtctcgcttttttgtttcttcaaaataggagatctttgacattttaatagaacaaaggaggaaaagaattagtggatacagcaatgattttagagtacggatgggtattacttgtcctaatcggtcttgaggggattttagcagcggataatgcagtagttatggctgttatggtaaaacatctcccagataaacaacagaaaaaagcgttattttatggattgatgggtgcctttgttttccgttttggcgcattattcttaatttcctttttggcaaacgtttggcaagttcaagcgcttggtgccgcatatttactatatatcgcgattagtcacatttggaaacatgcaaaaggaaaagacggagaaaaagagaagaaggaaaaagctggctctggtttttggatgacagttctaaaagtagagattgcagatattgcgtttgcgattgattccatgcttgcggcagtagcccttgccattacgcttccagaaacaggatggggacacattgggggaattgataccgggcaatttgcgattatgttcttaggtggacttgttggcctaattattatccgttttgcagcaactcaatttgttaaattactaaaaagctatccaagtctcgaaacagccgcatttttaattgttggttgggtaggcgtgaagctagttatttatacattagcacaccctagtcttggcgtaattccacacagcttccctgaatcaacactttggaaattgattttctggggcgtgatgattctgattattctatggggatggttcgtttcctaccgtagtaagaaaaaaacagaaacaactaaataattttaactgaccagaagtgcaaatgtgtacttctggttttacatacaaccagatgctgaaaacacaattttatgatagagtagtagaaggatggtgaatgaggaatggatgtttctatttggggagaatatgcgttagttttccttgttttagttgtacttgaaggaattctttccgcagataatgccgtagttatggcagtaattgttaaaggtttaccgcacgataaacaacgaaaagccttattttatgggttagttggtgcatttgttttccgttttgttgcactatttttaatttcatttttagtaaaaatttgggaaatacaagctatcggcgcggtttatttattgtacttagcaatcaagcatatgtggcgccttaaaaaaggtaagcaagaagaagtcaaagaagcatcagaagccaaatcaacttccttttggggtgtagttgcacgtgtggaattgacagatatagcttttgcactggattccatgttagctgcagcagcacttgttgttactttaccagatttagggaattttgatattgggggaatgaacggtggacaatttatcgtgatgttccttggtggtattgcaggacttgttgtaattcgttttgcagccacacaagttgttaaattattagagcgttaccctacacttgaaacagcagcgtttttaattgtcggttgggtaggtgtgaaaatggcggtcttaacgctagcacatccatctgttgcaattattccagaagattttccggattcagcggtttggaagctgacattctggtcggttatgataattataggtttgggtggttatatcattgcgagaaaaaaagagaagaaaaccaaaagagtttgaatatgatcaagaagtaaaattgcgcagaagattaaaactggtgttagcgcgtatgacacccgttcaagtaattatcgcgtattattttattgcggttacgatttctactatcgtcttaagtttgccgttcactttacaaaaaggggttaaggtgtcgtttattgatactttattcacagcggcgagttctgttagtgttaccgggcttgcgacagtagatgttagccagacgtatagtactgctggaatttgggtcttaatggcgattttccaaattggtggattgggcgttatgatgattagcacgttcttctatttgattttgaagagacggattggactgaaacagcgccaacttattatgacagatacgaatcaatttacgatgagtggaatggttcggatgttgcgcgaaattcttgtcttgatttttggaattgaattagtgggcgcgttgattttagggatttattttatccctctgtatcctaatttttgggaagcgatgttccaaggtttatataactcagtttcgcttgttaccaatgctggtgtggatattactggtaaatcgctaataccattcgcaaatgattattttgtccaatttatttcgatattactaattattgctggtgcgattgggtttccggttttactggaaacaagacgatttttatttgagaaaaatacgctaataccgtttcgtttttcgttgtttgtaaaggtgactacacttacttattttgtacttttgattgtcggcggcttactcatttggttgtttgaatacaatcacttctttagtggcaaaagttgggactttggtttctttaactcgatgttcttatcggcgacatccagaagtgctggactccaaacaatggacagcggggcgctttcagtttctacccttttacttgtgtcgttcttgatgtttatcggagcttcgccaagttctgttggtggtgggatacgaacgactacttttgcgattaccattttatttatttattcggttattcgcggtcggaagcatgtttatatttttgggcgagaattgcatcaagaagatgttcgcaagtcgcttgcagtcacgcttgttgcaggatttctcagtatttctgcgatagtcatactcatgcaaacagaaacggcctcgctcatttcagttatttttgaagtgttctcggcgtttggaacgtcaggtttatcagttggtttgacgcctgatttgtccaccccaggtaaattaattattatcgtcttgatgttcattggacgggttggcatcatgtattcaatgcttagtttaagaaataaaaatcaacccaaaaatgccattcgattaccaaaagaaaaaattattactggctaaaataaaaatcctttctgcaaaacgcggaaaggatttttttggcattaaaaacccctaaccaatttgattaggggataataattaatattttgattttggaattggtcttctgaaaattcccattaaaccagttagtgtaattaagatacctgatacaatccaagcagtaccaataacaaagaataaaacgataccgataactactaagataacaccccaaccacgaggagctgatttaattaagagagaagcaattaatgcaactactgaggcaattaatgtaatccaccctagatttgccaactcatttcctagttcacctggtaaataagtaaatgtctgtatataatctgtgactgaatctccataattaataatccaaaaaccaactacaatcccaatgatggagccaattaatccgataataacttctggctttcttgagcccataataaaacctcctttttctatctatacgtttaataactttcccgctttgttaatcggctaaacacgttatagagcattgaagcacgcagctcaatcactggctgaacaactgtttttaccaatcgactggataataacaccgtcaaaccaaaagtaattccaaataatagtaaaaacgtagacgggctatattgaaagtcagtttggccaccttcacgaaagaacttaataaagaagccatgtaacaaataaacatataacgtatttttaccccatttagtaaaaaataaccttttttgtgggataaaactgaaaaaagcagcgatagagcaaaaactaatcatgtagacgagcgcgcgaatgaaaagaccaagcgacttcacttcgacaaagttagcatatggttttgatcctaaaaaccatttatcgtttagattcggatgcatggtaataaaaatcagtaataatacaacgaaaattcccccaacgatagaagctatatgcgttttaagaaagtaaaaatgttccttttttaaaaagtagcctactaagaagaatgggaagaagacaagggttctagataaacttaaataaccaccaataatatcaaagtatccagcaaccagtcctaataaaagcgcaatactcacagacttccaaggtttgatttttgaaaaaacaagcaacattaaattccagaaaaataaactgagtaaaaaccaaagcgaccattctggatctaaaaatttaatagaaagattctccttatttaaaagaaaataataaaaaatactgtagattagttggaaaaaaacatatggtaaaattaattttttcatcgtcttttttaaatatcctggcttaccaaaacttttagcaaaaaaaccagagattagtataaaggcaggcatatggaaagtgtaaatataaatgtaaaggacacgaaccccagcatattctgtaataaatgtttgaagaaaatgcccgaatacgactaagaaaattaaaataaacttagcattatcgaagtaactttcccgtttgatttcggtttgctccataaaaaacattcctttctattctaagttggaaatatcttgttttattttaccctagaatctgtaacgaatatccaacagttcgataacaaaaggtatcaaatattaataggcgatgacatacgtttgcgcattattaaaagaagtgctatctttagagcaatatcatattcggagggaagtatggaagatgttgaaacaaacaagcgattcgccggtgggtacgttgtttatcataatagaggatgcgcatattacaaagatttcatacgatgagccgactaattgggaaattttagcgggagagaagggcgagatagcaatatatcagcagcttctagaacaattagcaggttattttgaaggagagcgggaagtatttgatttaccaattttcttgcaaggaactccttttcaacagcgtgtttggcaagcacttagtgaaattccatacggggtagttgttagttataaagatatagcaatagctgctgggagtccaaaagcagtgcaagcagtggggcaagctaatcgcgctaatcctattcctatacttattccatgtcataggtgtgtgaaaagtgatggggcgcttggtgggtataacggagcggacattgataagaagcaatatttacttgcattagaaaaaggcttgcgtttaagttaacgcaagccttttttattaaactgttacttgttcagttataacgatatttttatcgtcatttagtgtggcatttaatttcttcgcttctggttgatcaattaaactatcggcaatcgcatcttctaaatgttcttggattgtgcggcgaagtggtctagcaccaaatttaggatcatatccaagctcgattaaatgttctttaacttctttagaaacgtctatagttacgccttcttgtgcgagcattgaatttaagtcaacgagcattaagtcgataatttgtactaaatcatctttttcaagagatttaaattcaataacgctatctagacggtttaaaaattctggtttaaagtatgcgcctagttttgcaaggatatctgagcctttttcaagtttattgtcagttgctgtattaaagccaacagaagcttctgtatcagtcgtaccagcattacttgtcatgataatcactgtatctttaaagcttactgtgcgtccttgagaatcagttagacgtccatcctctagaatttgtaaaaacatatgttgcacatccgggtgtgctttttcaatttcgtctaaaaggatgatgctataaggattacgacgaactttttcagttaattgaccagcttcttcgtgaccaacatagcctgggggagaaccgattaatttagagacgctgtgtttttccatgaattcactcatatctaaacgaatcatcgcttcacttgtaccaaataattcacgagcaagtgtgcgaccaagttctgtttttccgacaccagtaggtccaacgaataagaacgaaccaattggacgatttttagcttttaaaccaacacggctacgacggattgctttggctacttttttcactgcatcatcttgaccgattacttttccggttaagttgctttctaggtttttcattttggattgttcgtcttcttgtaaacgtcctactggaataccagttttttcttcaataatcgcttgaatatcagaagattgaataactggccgttctgaaaaggagttactagttttattttcttcaagtcgagtaatttcgtcccgaactttggctgctttttcgtagtcttccatttggagagcttggtttttttcttcttctaaacgagcaacacgttcactaacggtgttttcatccaatttttcaatagatagattgtattttgaaccaacttcatccattaaatcaatcgctttatctggcaaatgacggtcttgaatgtagcgagagcttaattcaaccgctgcttttaaagcttccggagaataaacaacttcatggaaatcttcatatttggatttcaagccatttaaaatagtaagtgtttcttcgttagaaggttcattcaccgttactggttggaaacgacgctcaagtgcagcatctttttcgatagtacgatattcttttagcgttgttgcaccaatcatttgtaagtcaccgcgagctaaggctggttttaaaatatttcctgcgtccattgaaccttctgcggatccagcgccgacaattgtgtgcacttcatcaataaacaagatcgtgtttttgcgttcttgtaattctttaattaattgtttcattcgttcttcaaactgtccgcggattcctgttccagaaacgagagaagcaacatctagtaagataacttctttgttcattaacttacttggaacttcacctgcgacaattgcatttgcaagtccttcgacaaccgcagttttaccaacacctggttcaccgataaggacaggattgtttttattacgacgattcaagatttcgatgacacgtttaatttctttgtcacgaccaattactggatcgagttgatcgtttttcgccatatctgttaagtttgttccaaattcatctagtaagccgtttccagcgccaccagtttgtgtttgtacttgtgcgtttctttgactttgttgttcacggcttgcttggtttgcagcgccacttagttgacggaaaatatcatcgaacggggaaccgccagcacctggaaattcatttgccccaaagtttgcttgatttctaacttctgcgtaacaagaggcacaaagcggcatttctacacgcttgccgttaatattcatatatagttggattgttgcttgattttgattgcatttttcacagttcatagttaatttcctccttttaaaaatgagaaatgaaaggtcttgactttgactatctttgaccttatgaattaattatatactgacctattttgactttcaagtattttgcttcaaatttttcataaaaaaacattcctataaaaaaggaatgtttctaagttttttaataaattggcaatgccgcgagtaataaaaaggcaaaggtcaaatgcgacagataaaccatgagaaggctcgggcgataagagtacatcacattccatacaagagatgcaacaaaaataccgatgatagcggcaaaattaccactaggcaacatcatgaccatacatagtaaggcggcaaaaatattagagaaccaatgattaaaataatggttcaaacgttttaatacaaatccacgccagaaaatttcttcaccggggataatcgcgacaatcaaaagcaaccatattactaaagagtgggtggaatacttattaaatgcagcttctacagaatgttctagaccacctggcattactttaataataaaggcacctatgtaaaaaataatataaaggacaattccggaaaaaattccaggtaaaatgcctttaacgaacgaaaattccttttttaaatcgtcattaaatatcacaaaactaagtaaaaataacatcccagctccatataaataccaaaaaacacgtgggaactgatatgttaatataacaagtagggcacataaaataagtcccaatacgagtttataatcaatcttgatgctcttcaaatactttacacctcttcttaacaaatacttctcatactactttaaaacaaatgaaatcgtttggcaacaattaaacaaaagataagataaaagttgtgcaatttaataaatcctatataatgaaaaaataggagtggttcatagatgttagaaaaaaactacaaatttttactttgggtatatatattctggtttttaggtagtgtattgctagtttctttacacattattccgccgcgtttaacaacaatccagtcactgtttttagtatttactggagtttttgcagcagttttctttattatgcaatatggcaaatggcttggatctgctattactctacttatttttgttgtcagtacttgtattgaatggatgcaattaagttatacggatgaatatattggctctacgctaggcgggagtttgtatggtattcctattacgatgggattcatttgggtcggaatgattgccgggacacacattatcgcacgtgaaatcacacttaaaatcaatgttgattggattcgtggaggaatttattcttttatcgcagctacgatggtgatgatttttgaagtcttaattgaaccaatcacaatgcagtctaaacaactatatattacgcaaaatggttttacgatcttacagctatctgattttataaattggtggctcttaggcctgattttacatttaatgatttattttattttaagtttaacggatagttgggaacgacttaaatatccagatttaaaatcagaaattgttatcgtttattggattattatcgctttctttgtctttttatcgttttatcttgatttatggacctcgattgctattattattgtttcaaatattatttttacagcttgttatttcttcagccttgaaaaagaaacgaagactacaaagaaatccgagtaatcagctaatcgattactcggatttcttttctttttgcaaaaatttcttggtagcaatttgtgcgttttcaataatgaaagggagggagctactagacatggctccagctccgacaacaaataagttcttaaacttaggtgactttttcgcaggatgtaagaaaccttgttgatgccataaatgttgtaaaccgaatattgccccgtattttacatgatatttttcttcccaatcagttggagtaataatatattcttcttcaatataatcctctaaatcaggaatctctaatctcgcctttaccgtatctaatattaattgacggaatgcaggtgtttgttctttccaatcaatgccactagtagtatttggagcagaaaccataatccgaacgcttgaatgattcattggcgccattgtgttatccgtggctgaaggattagttatatgaatcgctaagtctttagaaaggatttttttatggatggtattattcgcaaattctcggtaattatctggaaaaataatggattgatgtgaaaagggaagcactgttttcaaaccaaggtacaacataaaagcagaagaggagtattctttttctttctcctttactttcgtgttacttgttaacgaataaataaaatccaaattagtaaagtaataatcagcttcaatcgattgtccgttagcaagagttgcactagtaatttcttttccattcgtttcaaaggaggttacttcagaattaaagtagaatttccctttattttccataacgacttgttgcatcgcttcgacaattttattttgcccaccgattggatgaaaagtgccgaaataatactcagaaaaaggaataatactatatgctgctggaatatcccatggtgacattcctaaataacgcatttgtaaggaaaaagcgatacgaagatatttgctattaaaatatctggccaaatcatccattaaagagcgcccaagtgtgagacttggaagtgcgcgtattgtagttggtcgaaagaaatcaaacaaggaactgtagttaaattgattaagcggcgaaatataaagcatttttttcgtattttctctcataaaacgatcaaatccatcttcttcaccaggaaagtaagttttaataactgtttttgtttcagaataatcgctataaagtggaaaagtaatatctttaaaataaagcgtgtgtattggattgatcggtaaaagggagacataatctaaaatattacggttacaatccataaaaagagaagttaacacatgcgtcattgttaaagcggaaggccctacatcaaatgaatatttacccattttatgcagcgcagttctaccaccaatacggtcatttttttcatagatgcttacttgatagccgagttgacttaaaagcataccagtagctaaaccacccggacctgctccaataatggcaattttctttttactttccacattaaaacgctccttttcccgtttttaaacatataaaaaacgcaaaaacataaagcattgttaaacgaaaatgctttacttttgcgcagttagaaataattttttattcttctgtctcttcttcgtcttcttctacagaatgaataatttgataatttttgtgatttaccactgttttttcttcaatacctaaatctttaaaattttccatataagttaagtcgacaataacagaattttcgttgagcttttcaacaattcctgttaagccatccttaaattcaataatgtctccaacatgtgcctttgccattgttatcactccttcaattttcggtgttgcgtttatcttgatgaaaaagaatgtatgcatttttgaaccttccttaaattctgcactaaaaacctattaaaatcaactataagcctttaaaaagtgcattttaaatcaaaaatgcaacaatttagtgacaaaattatagaaaacgctccctttcttccagttgtaaaagaacgaaagaagccgtaatagaaaaaaacattctaaaaaatttttaatcaaatagttgtaacaataggtaaaacatggtactctttttaattgagggatagtcttttttgctgaaaatttttcggcttaaaaggttacaacaaatttctttacaaaggagaatgtaaattatggaacaagcaagttttgtagtaatcgatgaaacaggaattcacgcacgcccagcaactctattggtgcaggctgcaagtaaatacagctctgacgttcaaattgaatacactggcaaaaaagtaaatcttaaatcaatcatgggtgttatgtcccttggtattggtaaaggcgctgacatcactatctatactgaaggtagcgacgaaaaagaagcaattgaaggactaactgaagttcttaagaaagaaggattggctgaataatggctaaagagttgaaaggtatcgcagcatctgatgggattgccattgcgaaagcttatctgctcgttgaacctgatctttcctatgaaaaaactgaagttacggatgttgaaagtgaagtaaaacgttttgaaagcgcgttagaagtttctagaacagaactttcaacgattcgtgaaaaagcagctaaagacttaggcgaagataaggcacaaatttttgacgcgcatcttctagttttaaacgatcctgaattaacaggaccaattgaagaaagcatcaaaaatgctaaaacgaatgcagaaacagctttacaagaaacgacagacatgtttattggtatgtttgaatctatggacaacgaatacatgcgtgaacgtgcagctgatattaaagatgtacgcaaacgtgttctttctcacttactaggtgtgactattccaaatccagctttaattgatgaggaagtagttgttgtcgcagctgatttaacgccttctgataccgcacaacttaaccgtaaatttgttaaaggttttgtgacggatattggtggtcgtacttcgcattctgctattatggcacgctctcttgaaattccagcagtagttggaacaaaagaagtaactgctagcgtagcgaaaaacgatattgttattattgatggtttggaaggtaatgttatcatccacccaacagaagaacaaatcgctcactatgaaaaaattaaatctgattttgctttacaacaagcagaatgggaaaaacttaaaaatgaaaaaacagtttctaaagacggcgttcacgttgagcttgcagcaaacatcggaactccgaatgatttagaaggtgtcatttctaatggcggggaagcagttggactttatcgtacagaattcttgtacatgggtcgcgacaatttcccaacagaagaagaacaattcgaagcgtataaagcagtagtttctggtatggacggaaaatctgtggtagttcgtacattagatattggtggcgataaaacgttaccttatttagaacttccagaagaaatgaacccattcctaggattccgtgcaattcgtctttgttttgcgaatgaagaattattccgtacacaacttcgcgcactacttcgcgcaagtgtatatggtaacttaaaaattatgttcccgatgattgcaacagtaaatgaattccgccaagcgcgcgatattttactagatgaaaaagcgaaactaaaagctgctggaacagaagtatctgattccatcgaacttggaattatgattgaaattcctgctgctgcagttttagctgatcaatttgcaaaagaagttgatttcttctcaatcggaacaaatgacttgattcagtatacaatggctgctgaccgtatgaatgaacgcgtttcttacctttaccaaccatacaatccatctattttacgcttagtaaaaatggtaattgatgcttctcataaagagggcaaatggactggtatgtgtggggaaatggctggagatcaaacggctgtaccacttcttttaggcttaggcttagatgaattttcaatgagtgcttcaagcattcttaaatctcgttcgttaatcaaacgtttagatcaatctgaaatggttaaattagcggaagaagctttaaataaatctacagcagaagaagttgtagaattagttgagaaatatactgcagagtaagctctgatgaagacctagacaaatttctttgtctaggtctttttatattgtgaaaaaagggtgtgcaaagtataattaaaaatacagttagcttaaaaaggaggcaacaagattggttatctattcattagcaggattttttcttctgcttttcattgttttatcttttatagatagacgaagaataagtaacgggattgttttaacacttgcactatttttctctttactttcccttatttacgttactctttcaaacgggaacgaattgtttgtttcaattatgagtacggtgttgattttactgttcttacttattccattttttataattggacttgcaacaacactaattatgaacgggcgtttaatgttaaaacgggaaggacgaaaactcgctaatatgctaccgttatttattggcttagttatcgtcattttatttattttttggttcggtagtattttgaaaaacggcagcccgatacttggaatggttgtagtatttgtaatggcctttgtaggatatttttcgtttttatttttatcatttcttctatcaacgttcctatatcaattcaatttcccaagatataatcaagattttcttattgtgcttggtagtggcttgattgatggggatagggtgccaccgttacttgcgagcagattaaatcgtgctatcgcgttctatgagaaacaatatgacaaaaaagggaaacgcgctactttcatcgtttcgggtggacagggcgcaaatgagacggtctcagaagcaagagcgatgcgtgactatttaattagtaaaggtattgatgaaaacttcattattatggaagacaaatcggttaatacacttcaaaatatgcaattttcaaaagcaaaaatggatgcaattatgccgacatataacagtttattttcgactaataactttcaccttttccgagcaggtttatacgcaagaaaagctggtctgaaaagtcaggggattggtgcaaaaacagcactttattatatgccaaatgccttgattcgtgaatttattgcgattaccgtaatgtataaaaaagttcatttgatactacttggcttagttgtattgttctttgtatttttagcgataattggtattacatttaggtaggaggttttttaggtggaaaaaataggttttgttggtactggcgtgatggggtcaagcatggctaaacatctgcttgaggctggctatgaggtgcatatttatacgcgtacgaaagaaaaagcagaagcacttcttagtcaaggggcgctatgggaatctgatccgggctcactaggagctaaagtggatatcttaatttcaatggttggctatccaaaagatgtggagcaactatacttaggtgaaaatggtttcttagataatttgaaagctggttctgttgcgattgatatgacgacctcttcacctgcattagctaaaaaaattgctgaagcgggccacgaaaaagggataggtgtacttgatgcgccagtttcaggtggtgatattggagcaaaaaatgggacgcttgcgattatggttggtggagccgaagatgtattcttaaaagtgaaaccgatttttgaaattcttggtagcagtgtgatattacaaggagatgctggctctggccaacatacaaaaatggtaaatcaaatcgcaattgcttctaacatgattggtgtgacagaagcgattatttatgcagaaagagcaggacttaatccttcacgcgttcttgattctatttcaggtggagcagcgggtagttggtcacttacaaacttgattccacgcgtactacaagatgatttttcaccaggattctttattaaacattttattaaagacatgggaattgctttatctgaagcaaaacaaatggggttagagcttcccggacttaccttggctgagcaaatgtatcagactttggcagaacaaggtttgagcgaggaaggtacacaggcgctcattaaatattatcggtaaataagaaacacccgctaaattagttagcgggtgttttttattttgctaaaaattgagccatccgatctaacgcttctgcaaggttattaacggaagtggcataagaaagtcggaagtaacggtcacctttttctgaaaaagcatttcctggtacgacagctactttggcttcttctgcgagtctaacagcccaatcaaaggagttttcagttatgtcatctgggagttttacaaagaaatagaaagctccatcaggtgggatgactgtaaagcccattttttctaagcgatcttgtgtgaagtttgctcgtgttttatattccgtgcgcatttggaacgcatcgtcttttccgtttgtaatggcttctaaggctgctttttgagaaattgagctggcgcatgtcaccgaatattgatgaattttcagcatttcggtagtgattttttctggggctagtaggaagccgattcgccaaccaatcattgcatgcgatttagataggccattgattacaattgtttgatcacggagcattggtgcaatacttacgtgctcttcatggtacgttaattcactataaatttcatctgcaataacgaaaatacctgtttcttttaaaacttctgctagatctcttagttcttgtttagaaagtgagacaccagttgggttagacggataaggaataataagtgctttcgtttttggtgtaatatgtgctcgtaattgttctggcgttaatttgaaattggattccgttgtatctactttgaccgggcgggctttatttagttttataagtggttcatacccaggataaattggatcaggtaagataacttcatcacctggctctaagatagtttgcagcgcgactgaaatagcctctgtagcacctactgtaacgatgatttctttattactataagttaggtcatatttctcctcaaagtacgaagaagccgcttcgagtagttctggcatacctgcattcggtgtgtaattggtgaaattctcttgaatggcggtgatggctgcttgttttacatgctctggcgttggaaaatcaggttccccaagtgttagacgaatcatatcaggaataccagtaactcttgtattaaatgttctgataccactaacttcaatgtcgcgcaattctggtcgaatggatttggtcatttttgtcacctttctttataagaaaatcccgtgaaaatcaggtgggagtaagcttcataatttcattccattatagcttaaaaagggagaaaagcaaaatatctgaaaatattactaaaaagccttgcacttttatttagaatgctataagatagttttaataatgataatcattttcagttagaaatgattggttgaatgtggaaggggccaccggatatgactaaaccaggtaaatacgaagctctcttttttccaacaaaagacggcttgctaaaaatacatgcttacggctttaatccctgtggttcatggggtgaagtatttgctacaattggcgaccaaacgatttgtgtcaaaggatttaatcgccataaaacaattgttcgagcaacaaaaatgattataagtgctacggcaaaccgaaaaaatgaattttaattatcaaagactgtaaaaaagataaatacttttttatagtctttttttgagataaaataagcatgaaaatagaacaaatcgtgtcattctggttaatttaaaataatttctttttctgaatatttccagaacccttgcgttatacgtgcggtttgcgataaaatttggtagtatagtgaaagaaataagatatggcgaaaaaaccagatatgaggaaatatgtaaaaaagcattgccacgcgcgtattacaattacagcaaggtagccaaattttttgcacgtcagatggtggatttgagaggagagtataagatgtctcagttactgggaattattcaacgtttacatgcaatgcaagaagatgagtcagctgaaacacaagcaagacgttttgaaaaaaatggtacgcctgtgtgcgaagtgaagtttttccaagcttctaactcatttgaagtagaaatctatggcgacaatagcaaatatcaatttgatgatattgatatgactgcaatcgaaatttttgaaacgttacaagaaaacgaataacaaggtaaacaatcagtcaatctggttatttacttagaagccgtgaatatttattcacggttttttttatgtaaaaattcactttcaagcactaaatgaaagaaatcagactaaatagtatggtagaataggagatggaaaagtttcgttttattttttttaaagttgaaaggaacttcgcagagcttgaaaatacaaggaagaggaagattctaaatgatctctaatagatttggacaatttattgacaatgaactagctgattcaatgatttccgctgaaaaagtagctcacgtgcaactgggtaataatctcgaacatgcgctacttgtattaacgaaatgcggttattctgttattccagtactagactttgaatttaaactccatggattaattagcgcagcaatgataacagatgccattctcggactcgaacggattgaatttgaacgactagaagatttaaaagtggaagatgttatgcaaacggatttcccggtgattaaagattttaataataacgagcgaattgtacgcttacttgttgatcatccttttgtttgtgttgtagatgaagaccaccattttgaaggaattgtgacaagacgcgttgttttaaaacaagtcaatcgttatattcatttacaggtggaggaaaatagatgattgtaacggaatatgaacttcttgtttgtttggcagaagaactaaatatgcgtaaaagtgcggagaaattatttttaagtcagcctgcgttgtcccagcgtctgcaaacgattgaaagcagatggaatacaaaaattttcattcgaacgcaaaaaggtttgcttctaacacctgaaggagaagccattgtccgtcatgcatccagtgtgattgagcgcgagcataccattcaagaaaaactagaagcaatggaaggcgtcgttcgcgggacactgcgcattgcttgtgcgagcgttgtggctcaaatgtggttgccacgtgtattaaaggcatttgcaagtgcttatcctaatgtccagatttcccttgttactggttggagcagtgaagtaactcagcaattagcggctggtaatgtccatataggtattgtacgcggaaactcgacatggaaaagtgttcaaaaacccttatttaacgataaactcgttttagttgatacagaaatcactaaaattgaagaagttttccagacaaatcgtccgtttatccaattccgtagtgattcgaattactatcaagtgattcaagattactggcaaagaaatttcgggaaaatgccgcgccaagctatgttgatggatcaaatggaaacctctagacaaatggctttaaacggtattggttttgccattttgccagaagtgacgatgttaggctatacggacaaaatcaataaaataccactaagagaaaaagatggctcgattttaagccgagaaaccaacttattgacctatgaacagtctcttggtctaccacaagtgaaggcgtttttagaaataacagataaattccttgaacaagttaaatagctatggcaaaatagaaagcagaacatatcggaaggagacaaaaattcatggaacaaatggatgcgcaccaaattatttcttttattcaaaatagcaagaaagcaacaccagtaaaggtttacctaaaaggggacctagaaaaaatcgattttcctagtgatgtaaaaacatttatcactggaaatgcgggaactatttttggagaatgggcagttgttgagccactattagaagcaaataaagcgaatattgaagattacgttatcgaaaatgatcgtcgtaactctgctattcctttgttagatatgaaaaatattaacgctcgtattgagcctggcgcagttattcgcgaccaagttacaattggcgataatgctgtaattatgatgggagcaagcattaatatcggttctgttatcggtgatggtactatgattgatatgaatgttgttcttggaggccgcgcaactgttggtaaaaactgccacattggtgctggttctgtccttgcaggcgttgtagaaccaccatccgctcaaccagttattgttgaagacaatgttgtagtgggcgcaaatgttgttgttttagaaggcgtacgtattggagaaggcgcagttgtagcagcgggcgcgattgttactaaagacgtagctcctggaacagttgtagcgggaattcctgcacgtgaacttaaaaaattagatgcgaaaacagcttctaaaacagaaattatgcaagaacttcgccaactttaaaaatcaaagggaactgttccgtctgttggcggagcagtccttttttagaaggagagagcaccatgttaaatgaatttattgccattcgacgtgatttgcaccaaattcctgaaacaggatataaagagctaaaaacccaagcttatttactcgattatattagcaaattaccaaacgagtttttagaaataaagaaatggcgcacaggaattttagttttagtaaaaggtactaatcctggaaaaacaatcggttatcgtacggatattgatgcgctgcctattacggaagagactgggttgccatttgaatcgaaacatgctgggaatatgcatgcttgtggacatgatttacatatgagtatagcgcttggagtattaacgcattttgcaagtaaaccggcaaaagataacttattatttgtgttccaaccagctgaagaagggccaggcggagcaaaaccgattatggaaagtgctgaattttccgagtggcgccccgatacgatttatggtcttcatattgcaccagaatataaagtcggccaaatcgcaattaaaccaggcttactattcgcaaacacttccgaactctttatttcatttaaaggaaaaggcggacatgcggcttatccacatttggcaaatgacatggttgtggcggcaagcgcttttgtcggacaaatgcaaactattattagtcggaacattgacccgatggatagcgcggttataacaatcggacgcattcacggcggagaaatccaaaatgttattgcagaaactgcctttttggatggaacgattaggacgctttctccagaaacaatggaaatcgtttggactcgtttaaaacaattagcaaaaggatgggaagaagcctaccaatgtgaagtagaattccatcctggatccgattactatcaagtggacaatgatccagttgaaacagaagaattcatccactttttggaagaacaatatccagaaagctatgtgccagctcgttcagcgatgactggagaagattttggttactttttatctgaaattaaagggtttatgttttggttaggcgtggattccgagtacagtttgcatcacgcgaaacttagtccaaaagaagaagctattccatttgcaatagatgtattagtgaactttttggaaagcaaataaaaaagacatcaattcgttctcaaaaggagcgaattggcgtctttttaattattatttggtccgaatgtgctaacaaaattaagtggtaattcaatttcgttttctgcgagtgcttcgcgaatatctttgagtaagtcacgttgaacagaatactgctcgccgttcactgctttaccaactacgcggataatcatatttgttgcgtcaatgttttgcacgcctaagacaacagggggctcaacgatatttttattttcttttgcagcaacgtcacaaacctcaccaataattttaattgctttttccggatcttcatgtggactaatttgaatgtccaccatcacacgcatattaccgcgcgaatgattactaacgaccataatttgtctgttaggaatgaaatgaagcgtgccatcaaaatcacgtacctgtgttgttctaaggccaagtgcttctactgttccattaactagtccaatggtaatcgtatcaccaacatcaagttgacgttcaagtagaataaaaaatccagtcacaacgtcactaacaagcccttgagcaccaaaggcaatggccaaactcgccaccccagcacttgcaataatcgctgtaacatccataaagttctgtaataataaaatcgcaaaagtgaagaataaaacatagccgtaaaaattagaaattaagctttctaacgtatccgcgcgcccaacagaaactgcttgttgttgccgatatttgcggaagaaactacggataattttattaccaaccacgcggaaaataaaataaagagcaattaaaatggcaatttttattccaactgaaataatatgattccaaaattggtcccagtcaatagaactgaaccactttttgagtaaattcatcttctggtccacatcctttgaaagttctccatccatttcatctcccccttcctaatgaaatgtccttttctattctaacaaaaatttcacaaaaatgctgttataagaaataatttttcactgaaaaagattcgttttcaacaaaaaaagttaattttattaaaaaaaatttaaaaaagcgctagccattcttgtagtaagatggaggcgctttctaaaatgtgtgaaatagcgcaaatcaaactgtatgatgtgaaactaatgtgaaacttgtgtacaatgataaatgttattgctttttttaaaagtgatatgggccgaatttttgcctagtaaataattcaatttaaaaaagaaaggggattttattttgagcaagattaaagtggaagaactaacgaagatttttggaaaaaaggcttctaaagcatcttctttactttctcaagggaaatcgaaaacagagattttgaaagaaacaggggcgactattggtgttaataaagcatcttttagcgtagaagaaggagaaattttcgttataatggggctttctggtagtgggaagtcaactttggtacgacttttaaaccgtctaattgagcctacgagcggaaaaatttggctggacggaaaagaactctctagtttaaataaaaaagaacttttggaagttagaagaaaaagcatgagtatggtcttccaaaattttggtttatttccaaatagaacgattaaccgtaatgttgaatacgggcttgaaattcaaggaatgaacaaagaagaacgtgagaaaaatgcagcagaatcgcttgcacttgttggtttagctggttacggcgaacaatatccttcccaactttctggtgggatgcagcaacgtgtagggctagcgagagcacttgctaacaatccagatattttattaatggatgaggctttctcagcacttgacccacttaacagaaaagacatgcaagatcaactactagatttacaagataaaatgaagaaaacaatcatctttattacccatgatttggatgaggcgcttcgtattggcgaccacattatgattatgcgtgatggttctgttgttcaaactggttccccggaagaaattctggcacatccagcaaatgaatacgtagaaaaattcattgaagatgtagaccgttccaaagtttatacagcgagcaacgtaatgatacgcccagaaatcgttaattttgaaaaagacggccctcgtgtcgctttaaaacggatgcgtgaagctggaacatctagtgtatttgttgttaagcgtaaccgtgagttagttggtattgtccatgcagcggaagtttctaaactagttaaagaaaatattacttcgcttgaaactgctttacacagtgatgtaccgacaactggtccggatacgccacttgcagaaatcatggatactatctcgacaacaacgattccaatcgctgtaaccgaagatggaaaattaaaaggaattattattcgcggatctgttctggccgcactttctggaaacgaggtgaacgttaatgcctaatattccaacgattccattagctagttggattgataaattagttgatggcttaacgcaatttgaaggattttttaatgtaattacaaatatcattggcggaattgttgatgcattccaatgggtattcgacttagttccaccatggttatttattattttactagtatttgggactttctgggttaaccgcaaaggaaaaaaatggggattaattatttttgaagttgtcggtttactattaatttggaacttagatttctggcgtgatatgactcaaacgctgactcttgttcttacgagtagtttaattgcacttgttataggtgttccacttggtatttggatggcgaaaagcggtatcgttgaaagcatctttaaaccggtgcttgactttatgcaaacaatgcctgcctttgtatatttaattccagccgtagcatttttcggaattgggatggttccaggggtagttgcttctgttattttcgcaatgcctccaactgttcgtatgactaacctaggtattcgccaagtttcgactgagcttgttgaagcagcagattcatttggttcaacaccttggcaaaaactttggaaagtacagctaccaatggcgaaatcgaccatgatggctgggattaaccaaagtatcatgttagcactttccatggttgtaattgcttcgatgattggtgcaatgggacttggaacacgtgtttactttgcagtaggacgtaatgacgctggtggcggatttgtagctgggattgcgattgttatcgtagcaattatcctagaccgtctaacacaagctttcaataaaaaagcgaaatcagaataaggaggagagtagattgctaaaaaaattaatcaccaccgcagttttggctatgcttattttcactttagcagcctgcgggacaacccttgctccttatgacgcgaaaaaagatttaggcgaacaaatcaattatacaatcacaggaattgatgctggagcaggaattatgcttgcaacacaaaatgcgattaaagattatcatttagatgatgacaattggcagttacaaacaagttcgactgcggctatgactagtacactacaaaaagcgatgaaagataagcgcccgattgttgtgactggttggacacctcactggatgtttacaaaattcgacttgaaatttttagatgatcctaaaaatgtttttggaaacgctgaaaatatccacacaattgtccgcaaaggtttgaaagaagaaaaaccttctgcctacaaagtgctagataatttcttctggactgctgaagatatgtctgaagtaatgctagaagttaatgacggagtagatccagaagaagctgctaaaaagtggattaaaaacaatccagaaaaagtagcaaaatggaccgatggcgtggaaaaagtagatggcgatgaaatcaagcttacttatgtagcttgggattcagaaattgcctccacgaatgttgttgcagaagctttgaaacaagttggctataaaccaaccattcaagcaatggaaattcaaccaatgtgggcgtctgtcgccacagatgcagcagatggaatggtcgctgcatggctaccaaacacttccggaatctactacaaagattacaaaggaaagtttgaagatttaggaccgaacttaaaaggtgcgaaaatcggcttagcagttccaaaatacatgacaaacattaactccattgaagatttaaaaataagtaaataaactttggaaaaggcatgaagaagttcaagctatacttgatactttctccgtgccttttcttcactaaaaaggtaaaataatagttaattgatgaatttgctaggaggaagatggatgtttaaaaaattcttgaaaaaaagtaaaaatgaaaccgtatttgctcatgtgactggacaactgattgcgttagaagatgttccagatccagtttttaatcaaaagatgatgggcgaaggtattgcaattaaaccagaaagcggcacaatcgtagcgccagttgatgggaaaattattcaacttgcagaaacgaaacatgcttttggtattcgcacggatatggggcaggaaattctcgtgcatatcggtttagaaacggtatcattaaacggagaaggttttaacgtgttagtaaacgttggcgataaagtaaaagtaggcgatccaatcgttgaagcggactttgattttatcaagaaaaatgccgcaagcacagtggtaccaatggttgtaactaatagttcagaaggcaaatacgattttgaattcgctggaactccaaatacggttgctgggaaaacagaagtatttactacaaatttaatataataagcacaaaatccatgagaagccaattttcttttcatggattttttagtattcatttgcgtgttaaaagggtagaatgaaggtaattagtattaaaaaggagcgaaaataaatgttagaagtgatagttcaaaacccaagagatgcgtacttagcagaaaaatatggcgcaaatagaatggaagtagtttccgctataagtgaaggtggcctaacgcctagctacggtgctattaaagaaatcgttcgtgcttcaaaacttccggcgatgatgatgattcgccctcatagtttttcgtttgtatacgatgagcctgctagaattgtgatggaacgagatattgaacttgcaaaagaagttggggtcaaaggtatcgtttatggtggaataacggaagacggaaacatcgatcaagagcttctagaaaaagtgattgagtggaaaggtgacttagaccttactttccatcgtgcgctagaagcaacaaaagatattgaagcaagctaccaagttttacgtacatacggccaagacattaatcaattattaacttcaggtggaacagctagtgcacttgattctttgccacgccttaaacggtggataaatgacagtaaagaaaatccaagttcatttaaaattctagttggaagtggcgttaaacctgaaaatattgctatctttcaagaaacactaaatcatacagattatcacgtcggaagtgcagctagagaaacgaatgatttcgcaaaagacattttaaaagaaaagatcaatattttaaagcagcatattaaccaagattgattctacgtagcaggtagccttacgagtctagatacgctataatgaaacaagactattcttaaaataaaggtggaaaaaaatgaataactatattggcaaaagccaagtaatgacagtaaaggaaattaaagaaacaggttggctcctagagaaagatgaagtgactgtttttttatctaaatcgaatacacatgaaacagaacttgctgttggagatgaagtaacagcatttatttttgttgactacgaccgagaaatccgcgcaacaacaattattccaaaaattcaagttggacattacggctggggcacagtaaccgaagtacgcaaacatttaggtgtatttgtggatattggtattgaaaaagatgtcgttgtatcattagatgatttgcctgcactaccacatttatggccgaaaaaagaagaccgagtgatgattgcacttcgagtagacgaagaaaatcgcgtgtggggagttctcgctgaagaagaacaattccgcgctattgcggttcgtgcagatcaagacctttttaatcaaaatgtagaaggaaccatttatcgattacttaaagttggctcctttgtctttacagatgatttccatattggctttattcatgaaagtgaacggactgcagaaccgagaatgggagaacgtgtaaaagcccgtgttattgcagtgaaaccagatggctcacttaatttatcattacgtggtagagcccatgaagtattaaatgacgatgcggaaatgatattaacttacttacgaagtgttggcggggaaatgccatttggagataaatcagatccagatgcaatccgtgctaaattcggaattagtaaggcacaatttaaacgcgcaattggtacacttttaaaagcaagacggattacacaagaaaatggagtaattactaagttaacagaagaggcatccgactaaagtagtagagattgttccaactagcgcggtttgtttccactagcaaatcatcgctataataaacacagctgtacaaagtagcgaaaaatcgagaaataactttgtctaaagaatggcttaaggaggtgtgtcagcttgaaaaaaatggaaagctcggttgtttttatatttttaattgcgattattgttggcgttggtcttgagatgttattccagtgggaattactcattttatttgcactcggaatattcttcatttttacatcaaggaaagcaagtgccacgaaaaagagcgcaaaaaactcactatttattggtatcgtatttatcattattgcagtgctgttaacaactacttttaaagttggacttgttgttgcaggtatttatgcgattattcattatataagccggaagcgggcaccccaattattaatgcttaaaacgagagagccagacagtaaaattgatcgcacgggtaaatttattcgtaatcagtggtttggtaatcagcggatattagatgtcgtgtacgaatgggatgacatcaatattcaaacaggaataggcgatacgattcttgatttaggaaatacggtgcttccgactggcgaaagtattattatgattcgcagtgtatccgggaaaattcgtatcctcgttccatttgatattggcatttgtattgaacactccgcgattttcggaaatatccaatatgataaagaaagcacctctatccaaaataatagcatcaaggtctactcagataattacgaaagttccgcacgaaaagtgaaaatcatgacttctgtaatcttcggagatttagaggtgatcaggttatgagtttttcgaaactaatgatggtagtttgctcaggattactccttgttgcaacagccattggaacggtaggatactattttttcagtgaaggttcttggtataaaatcttaattgaacaaaaaatattttacattccttttatcgtctttgttccgctgacagctatttcgataggtttaattattggcggcttacttggctattttgttaagcaaaagtttgagtcgattgacttttcgattcggctgctaggacaaggcgatttagaaaaaaagattactagtgaagaagatgaaacttttttagaagtacagcaagtctataagcaaatcgaccgtttgcgtgataagatgaaagcacaaacgattctgactcaaaagctagcaagtgatcgcgctgaatcaagtggtcaaacgaaagaagctattttgtcagaagagcgtcaccggattgcgcgtgagttacatgattctgtgagtcaacaattattcgcagcgatgatgctattatctgccttaaatgagcaaagcgaaaaaagtgcaactcccgccatgcaaaagcaactaaaaatggtagaatctattgtcaatgaatcccaatctgagatgcgtgcactattacttcatttgcgaccaacgcagctcgaaggaaagtcattaaaaacgggtatagaacaattattaaaagaattaacaaccaaattacccatcgaagtcgaatggcaaattgaagatattaatttgcaaaaaggtattgaagatcatttattccggatagtgcaagaattactatcgaatactttgcgtcactctaaagcaaaattattagaagtacggttagtgacgatggataatttagccgtaatgaaagtagttgatgacggcgtaggattcgatatggataatgttcgtcaaggttcttacggtttacaaaatatgcgtgaacgagtcgctgaatttggtggtaccattaaaataattagctttaaaggacgaggaactagcgtagaaataaaaatcccacttgttgcgaaaaaggacgtggaaaacgaatgataaaagttttactagtagatgatcatgaaatggtacgtataggcgtgtcagcttatctttctgttcaagatgacatggaagtagtcggcgaggcagaaaacggccgagaaggcgctgatatggctttagagttgcgtccagatattatcttaatggatttagttatggatgagatggatggcattgaagcaacgaaagaaattatgaagaattggaaagaagcaaaaattattatcgtcaccagttttattgacgatgaaaaagtatatccggcactcgaagctggagcgagcagttatatgttaaaaacctcgacagcgagtgaaattgccgatgcgattcgagctacatacggcggtgactctgtccttgaaccagaagtaactggtaaaatgatgcaaagactaaccgctaaaccagaaaaaaacctacatgatgatttaacgaatcgcgaaaatgaaatcttacttcttattgcagaaggtaaatcgaatcaagaaatcgcggatgaactattcattactttaaaaacagtaaaaacacatgtaagtaatattttatccaaattagatgtacaagaccgcacacaagctgcaatctatgcatttaaacatgatttagtagaaaaaaagtaacagggaggtaagctacacatgaaagagggatttgcagtcatcggtcttgggcgctttggcggaagtatttgtcgttcacttgtcgaacaaggaatggaagtgcttgccatcgattctgatgaagaacgggtaaatgaatatatgtcgattgctactcatgcagttatcgccaattcaaccgatgaaaacgcgcttcgtcaattaggtattcgaaatttcgagcatgttattgtcgcaattggtgaagatattcagtcgagtattttaacgacgctgattttaaaagaaatgggcgtaaaatatgttactgcaaaagcaacaaatgataagcatgctaaattactagataaaatcggagctgaccgagttgtccatccagagcgggatatgggacgacgaattgcgcattatatcgtatcgaaaaacatgcttgattatctagaactttctgatgaatatagcttagtggagatttcggtttctgatccgcgtttcctcggcaaaagccttgttgacttagattttcgtaactcatttggcgttaacatcgtcggcataaaaaaagacaaacaaatgattattactcctgaagcaaatgatgtacttcatgaaggagatattttaatcgttattggttcagatgacgacattgagcgattacaagaaaaaattcaataaacataaaacctatgcaatatatgaagatgtgcaacaatatctattatatgcctaggtttttttattgtttacttgctatctaatcatttattttctattatagttacagagcttaagtaaacgtgatagaagagaggggaactgatgaaaaaatttttgctagataaaattggggcgcgaggattaattcaaatgttgcaagcatttatttatgcaagtatttgtgttattgttcatactgttatttttcctgatttggctggagttttacctattgttgttttaatagggattatttccatgcaacctacatatgggattactcgaaaagtcattcctcaaattgcgatagcttttacgttagcgtgcgcattcgttattatcagtacttacttttttccaatcaatgtatatatttattattttgtaatgttaattgttattttaatagtgaattttacgatgccgcaaaaatacatggtgatgacgctagcaattggaacagcactttattttcttgggacagaagacttaccaatgccgctttacgtaatggtgatagtagcactcgttgatgtatttgtattttttattttagtaagactcgttgtaaggtacgtccatttgccgcttgaaaaaactgtccagacgatcatgaagcaattaatgggactatttgataaagaaatggaaagcgtttttaaaaataacgggaaatttgtatcgaaaccactgtatagtatttttgtacaatcgcaaatgtttattaaagaatatggcactagtaaaaatatgaatccgcgtcatgtggaaatttatcaagcgttactgccgaattatttacagctcttttttcatatgcaaacgcttgaggatattggtagggtaggtttgtcggaagaagcaaaaaaagcgctagccacaataaatgtcgaagtttcaactgagattaatgccaaagaaacaaacccagttgcttcttttcacgtgaaaaaattcgttgaaaactttctagctattaaaaaaggaatggctgaattagctgaaggaggggacaagaaatgaaaaaaatttcaatgaaagagcgacttgctctagacccccgtgttgctaaagtcttaattagtattacaatagctattttgcttttcccggtaatgggcgattggattgtttatccgacatatgtctttaatgccatttatatcactgctcaaatgacaaaaggggcaacatataaatctagtattgaacgtattgttgggacgatagttggtgggttacttgcagcatttgtatatcttttagtaccaaaccatcactatattatgattccaattggcgcggcgcttgctgttgcgctgagctatcttttcactaaaaaattcacgatggttattgttgttattacggtgatggtattagttggtaaaggagacggggagccgattgtctttttaagagatcgcttatttgatacgatgatcgggctagcgattggttttcttgtttatgccctttatccacggaaaaaagctaaaaaattaaatcaagttttcatctctaaggaaaaagatctactggcaaacattaaagcgatagagattaattctgatgatgctaaagcgctcgcaccgaagattaaaggcttatggaagcaattaattgaactacgaaaaacgcgagaacaaattattactgatagtagttttgttggagatgtaaattcagaagaaccaatgctccaatttaccattttagttgaacgggcgattaacaatattgaaatcctttatcatgtgactttagataaagaggtagaacctgattatgaaattgtctttgattatcatcaacaagcgtgcaaaaaggtgattaatgaaatggaaaccttgattacgaagcatcaataaaaaagatgactgaagcttaatgggcctcagtcatcttttatttttattcagttatatctaaactcttcttaaacatgttaattacacgttctaagtcggtttcatctggtgcaaaataatataaatcgaatccgtatgactcactataaatcatttctccttcacctttaagctcttgcgaatcaacgtttttaagaacggaagaataattggtagccatagaagtaatatctgtaagcgtcatattagtttggaaattatctccaacagctttcattatgctttcgaaattggatacgcctgatgaacttataactttattcgcgataccgataataacgtcgcgttgtctatcttgacgaccaaagtcaccgcgaggatcttcgtgacgaatacggacatattgtaaagcgtccgtcccatttaaagtaatatttccttttacaaatttgctatttacttctgttaaatcaatgtcgttataaactgtaataccaccaactgcgtcaacaaggtctttaaagccttccatattgatagaaataaaataatctaccggaacacctggcattagtttttcaactgctgaaacggttcctgaagggcctccgttcgaataggaagcattgatttttccaatatcgccatttccataatctacttttgtatcacgagggatgctgaccatttcgacagcgttttgttgtttattggctgttgcaaggataattgtatctgctcgaccattcgtttcaccggggcgagcatcagaacccataagtaatacggaaaaaggttttttcttttctaaatcacttgttgttttattacttgtttctaaagggacatttatttttgtaaaagtattttgaacggtgatgtaatacttcgctgccaaacctgtaatggagaaaaagagaattcctaaaagtgtaacgctagcaattttcataactttagtaaaagtggacggttttttttgcttcgtttctgtcctagtttctgtcataaaattttcctcgtctttcttatttagtttgtttaaacataccatcgtctttctgagaaatcaacaaaaaacgataaatgattttgaaaccatttatcgtctttaaaactatacttccatgattataggtaaaatcattggacgtcgttttgttttttcgtacaagaaaggttgcaaagtatctgtaatttcgttcttgatttcagaccattgcgttgttttttgctccattactttatttaagtgacgtgttagaagaccttgagcttctccgattaaattaccggattcacgcatataaataaatccgcgagagatgatgtcaggaccagccatgacacgtgagtttttcatatcaattgaaacgacgacaataacaagtccttcttcagaaagaatgcgacggtcgcgcaggacgatattaccaatatccccaattccgctaccatcaatatagacgctagcagcatggattttaccagcaacatgagctgtctcacttgttaacgcaaggacatcaccgtttgccataatgaaactattttcttctggtacgccacactcttcggcagattcagcatgaattttttgcattctgaattcaccgtgaattggcataaagaatttaggtttcataagacgtagcataagtttttgctcttgttgaccaccgtgaccagaagtatggatattatttactttaccatggataacttctgcaccagcttgataaagtaagttaattgtacggttaacacttgtcgtattaccaggaataggggaagacgagaagactaccgtatcacctggttgaatttggatttgacggtgagtaccattagcaattcttgaaagagcagccattggttcaccttgacttcctgtacaaaggatcgtcacatttcctgctggtgttttattaagttgatgcacatcaataaatgtatcttttggagcttgaatataacctaattgcttaccgatttccatagctgattccatactacgaccgaaaacagcgattttacggccagtttcgatagaggattcaactacttgttgtaaacggtaaatattggatgcgaaggtagcgaagataattcgtccttcaacgtcgcggaaaatgtttttaatactttcaccaacaacgcgttcactcattgtgaaatttggtacctcagcgtttgtactatctgatagtaaacaaaggacgccttctttaccaatttcagccatttttgtcaggttagctggttcaccaactggtgtgaaatcaaatttgaagtcaccagtgtgaacaatattacctgatggagttttgacaacaataccatacgtatcaggaatactatgtgttgtacggaagaatgagatgctagtttttctgaatttaaaaacgtcatcttcttcatattcataaattttagtttgacgaagcaaaccatgttcttctaatttgttgcgaataagagcactcgcaagcttcccagcataaattgggatattaagatcgcgaagtaagtaaggaacgccaccgatgtgatcttcatgaccatgggtgataaaaagtcctttaatcttatctttattttttactagataactgtagtcaggaataacatagtcaatcccaagaagttcgtcttctgggaacttgattcctgcatcaattaaaataatttcgtcttgaaattgtacgccatatgtgtttttaccgatttcgcctagtccaccgagggcgaaaacagctgtctcattattttttacaaatttcatataggcttatttttcccagagcgcgaagtctgggttttccttttcgtaagctaagtgcgcgtcactaattttttcgacaaattcgatgtggaaaggctcatcttttaaaagttggcgtacttttacttcgctttccgcttctacgtataaagattgtgttttttcacgtacgggtgtttctgtaagtgtttcttgataaaatactttaaaaatcatgtttttctctccttaaattttaagtttagtttttaaaaatagattctctggtcgaaaatctaataattattcagtaataattggcttgctttcagttgtggacttagtagcaagcggatatgggtgcacgagatactaacaattaggcataaaaaagacaaagaaaaattaccacagactaatgtataaaaatagctgtgcacgtataacaattttcttatccgttataattgcatacctttattttgggaatttgaaacaaatttccgagtaaaagatgtaattataaactttttttcacgttccattgttgttctataaatgttcatccgatctatatccttctttctaatataccataaatccagataattgctactagaaagtataattaattttgccaaagcccgacagtttgtgattttttggtcgctttctgctataatttaagctaagtgattttaaaatggatagaggattgaggcgtttaattgatgagtaaaattgtatttttcgatgtagatggtacgcttgtaggtgaaacaaaagaaattccagcttcagcaaaacaagcgattgctaaattgaaagaaaatggcgtttatgtcgctattgcaacggggcgcggcccatttatgttagatgaaataagaaaagaactagatattaattcctacatttgttataacggacaatatgttatttttgaagggaaagaaatctacgctaaaccattaccaaccgagtcattagaacgactaattacggtggcatcggagcatgagcatccaattgttttttcaggaaaagattccatgcgtgcgaatttaccagatcatgaccgaattacgattggaatgaattctattaaaagggattaccctaaagtagatgctaattattacaaaggtcgagatatttatcagtgcttactgttttgtgatgagtcgtatgatgcttattaccgcaaagaatttaaacaatatggtttcttacgttggcatgatgtttcagtagatgtttgtccagcagacggttccaaggcggaaggtattaagcagatgatcaaaaaacttggcttttcgatggaagatacttatgcatttggcgacggacttaatgacatcgcgatgctacaagctgttggaaccggtgttgcaatgggaaatggtcgcgacgaagtgaaagcagttgcggattatgttactgaccatgtggatgaagatggcgtttataaagcgcttcagcatctaaaactaatttaaatcaaaagcgaggccactatttcagtgtagcctcgctttttgttgttatttggtcctgttcccatttctgtttaatgaatttaagttgcgcgacgataataatactaataatcacaagtaagtaccaactcgttatttttgagacatgcactggccgccaagcaacaagctgatcaggatacgcccaagcaccgtaaaaactagcaatattttccgcgagatagataaaaaatgcaatacataaaaatgaaaaagataaaggcattttgagctgagtagcgctaactttaaaataaacatatgtttttcggaatagtaggagaactaaaataatcaaaatccaccgaaaatccataataaaatggtgcgtgaaaaaattcgcgtaaatcgctatgcaaagactacttactaaccaaatatttggccaattggtcatgttaagatcaaacctcttccaggcctgacaaatataacttgccacgcttgaatacataaatccgctatacagtggtacgccgaagagtttcattaaaccgggttctggataactccaagatcccatatgtactttataaatttcaagccccagaccaatcaagtgaaaaatcatgataactttaagttcatcccaagtttctaacccaaactttatcaggaaaatttgtgtcacgaggcaaatgattaaaagtaagtcatagcgcgcaataaaaggaatttcaattagttttgtaagggcgagtgaaatgaaaataatgcccggaaaaagacaacaaagtgcttgtttccaagtaaatacccacagtaagcgaaaaaatttcataaaaaaacctctctcatgcttttctctagtttaccaaacataactaaagaaaagcataagaaaaggttaaaaaagttcattttggcggttgatattcgtaaatggtgcttcattttcaaattctaacggcttagtttgtagtttttcaagtaagccgcgaacacgatgttgttctttttgcaataaattatgtaagatttcacgcgagtagggaatgttcaaaaccaaatagtgattttcctctgctgtttttgcaaagtgatttggaaatgcagctaatcgactaatttcgctggaagttaaaaaaggcatatcgacaggaagtatcaggtagttagcttcggggtaagcatttttttgaaccatgacagcgtaaattccaccaagcggcccgaaatctttatatgctggttggtcgggaataatttgaatagctgagtcctcatgaaaaagcgcaattagtttttgataattttcttgatttgcggatacgaaaaccatttcgcaaaatggcttcaacttattaacagtgagctccacccatgttttcccagtcgcctcattctggaaaagggcttttgacttgccaaaacggctagacttcccaccagctaatacaatacccacattaacttttgcgtttttcaagtcgaccatctctcataactaaaatttcttccgtcatcatttctgcttccgaggcataatgcgttacaaaaataactggtatatggaaatctttggccatctgaccaactaatttcatacaaattaaacgtgtttcttcatctagcccattgaaaggttcatcaagtaacagtaatttcggctcagtaatcatcgctcgtgccatcgcaacccgttgtttctcaccgccagaaagtttttgaacagaagaatatagtaggtgcgaaatttgcagataatcactcatttttcttacttgctgctggatttctgcctgttcttttttcttcttttttttcacttttaagccaaacgcgatattttcataaacattcatatttggaaataaagctagattttggaataagtaaccgacttttcgttcagttactggaaggtgtaaggaaatattcgaatcatcccacggtgtcccatcaaactcgataatcccgccgtcgatgctctttaatccactcacacattggaataacgttgattttccagaaccacttgcacccatcatcgcagttactggtttttcaaacgtataatcaatatttaaatcatgaaaaggaagttttttatgaaattgtaatctcagcataattacatccccctcgttaaattactttggcgtacggtcaaaacatgaatgacgagtaacgcaaatacgccgataatgacgttaattagtccaaggtaaatcgcagtacgcatgtcgccttgttgaaccataaaatagatgcttgaagctattgtatcggtttttccttctatgtatccggccaccatcaaacttgcgccaaattcacccatcgcccggcaaaaactaagcaaaactcctgctaaaattggttgccagcagttcggtaaaataatttttgtgaaaatctgttttttattcgctgaaagagtctctgctgcccatacaagttcgtgatcaatcgataaaaatgctgatttaagcccttgatacataattggtaaaataataatcgtcgtcgcaacgatagcaccactaagggaaaagataaaactaaaatcaaatgtatcccaaagcacaccaccaataaaatcattgcggccaagcacattcagtaatactaaaccgaccacagttggcggtaaaacaagcggaagtaaaattaaaatttccacaagtaactgaaaacgtgattttcgaccagcaaaataataactcagtggtaacatcgtcataaatgcgagaaacgtagaaattgtggcaacaagtagtgtatgccaaacagatgtaaacataaaactcctcctgaataaccctctagtacttctattattatcgttctctctggtataaaatgtcaaacttaagtacaatgtaactaaataaaaaagggggatgaacgatgaaaaaaatagcgatacttataagctgcttattagtactacttgtaggtgcatgcgcgaatacttcagagaaagcaaaaacaacaacaactatacatatttcagcagcagcaagcttaaaagatacgatggatgacgtaaaaccacttttcgaaaaagcatatccatctattaaattatcttttgactttggtggttctgggcaaattcgtgaacgcgtggaaagtggtgcgccaattgatggtgtccttttagcaagtaaaaaagatgcagatacattaagtaatcaaaaattagccgaaaacacgaaagaatttgccgggaatgaccttgtgttaattgaaccgaaaaatgctgatcagaaggaaggattaagtttagaacaattactggataatgccgataaaattgccattggagatccggaatctgtcccagcaggcgcttatgccaagcaaactcttggaaatttaaatctttataatacagaaaaagcaaaactcgttcttgcgacagatgttcgccaagttttatcatatgtcgaagcgggaaatgcagatgcaggcttcgtttaccaaacggatgcgattttaagtaaaaaagtacaagtgaaagcgaaaattgatgcaaaacttcatgacccaattgcctactatagcgcacaagtaactgattcagagaaaaaagaacctaccacaacattcctcgactttatgaataaatcagaagcacaaaaaatacttgaaaaatacggatttaaagcagcggattaattagaagtcgctttactttttaaaacgggaaaactcctgtatattggtactaaagaaaacgcatacatgatttatagaagggaagtgcgcccagatgattgaaaaaagaaacaccataagaatggagcaagcgagagaagtattatgtaaccaaataacgcatcttccagtcgaacgaaaaaacgtcacggaagcgttaaatcaagttttacaagaaccgatttttgcaccgtttcccgcgccgtattttagacgttctggttatgatgggtttgcaattacagaagaagatgacggtaattatccgattactttacatgtcgtagcagaggttccttgtggtaaaacatatgataaaccactaaaacccggcgaaacagtgaggatcatgacaggagcaaaagtacctgataacgcctcaaaaattattatgctcgaacaatcaagagaagctgaaaataaaaatgatattgttcttataaatacgcaaaaatctagtaatattacggaaatcggtgccgaatttgcgaaaggtgatttgctcttagaccgcggtcacactctaaatgcaggctcgataagtttactatcatcattcggtatttcggaagtccaagtaattagaaagccaaaagttgctattttatctacaggaagtgaacttgtacctgctggaaattcgctcccagatggcaaattttataatagtaatcaaccactacttgaaaatcttctaacagtgcaccatgcagaaatctgcgcggctgaacaactaccagataactatgaagatacaaaagcccgtttacttgagctgacgaaaattgcggacttaattgtcactactggtggcgtttctgttggagattatgattttatggcggatattgcaaaacaagaggcagaattactttttaataaaatccaaatgagacctggtagtccgacaactggaatgtggttgaataagacacttattatcgcgctttcgggtaaccctggtgcatgtttcacaggtttttatttattagtagaacccgtactcgcaacctttatgggaaaagataatacggcaactactaaagtccgagcaaaaatggcgagtgattacacgaagaataatggctttgaccgatttttacgaggaacctatcatctatcagaagaaggagagtatttggttgaattggtaggaagtgatatgtcgagtgcgctaggaaaccttcatttaacaacctgtttatttaaaattccaggcggtaaggttggaaaatatcaaggagaagaggtcgaagcatggctactatcctccaaataatcggttttaaaaatagcggaaaaacaaccttgcttaatgcgctaattcgggctagccgcaaagaaaattatacggtttctgccattaaacacgatgcgcatgacttttctgttgatcacgctggaacagattcgtattcttttcaagaaagtggcgcggaagctgttgtgattgcgaattctagacaatatgctgtcatggaacaaactggcattgatttaaaaaccgccattcaaaaactaccggattcagatattgttcttatagaaggctataaagaaggaccttttccaaaaatcattttaattcgagaaaaagcagaaatcgagattttaaaaaatagtaaggccgttcataaaatcgctacgcacaatccagctttaaaagaagaggcaatttttatcggagaagaagaagctttaaacgcgtttgctgaaacgttaatcaaggagtttttacaatgaaatatgtagctttacaacacgaaaaaattgaaatcggaccactttctgaaaaactaatcaataaaaatcacggcggaattaatctgtttgtcggcacaattcgcgaatggactggcgatattcaaacagaagaaattcgctacactgcttatgaagcaatggcgttaaaagagttaaataaattagccacagaagtagaaactaagtggggtgcagatgtagtcatcgtccaccgattaggacttttagaaataactgatatagcagtgtttatcggcgtatcaacaccacaccgggctgcttgttatgaaggatccagatatattattgaacgtttaaaagaacgagtaccaatatggaaagaagaaaaagatgtcgatcaaataaggtggggtggcatagatgctcacaacggttaagtttttcgcttttttagctgagaaaacaaagcaaacagaagtaaagttaaatttacagcaatgcgaaacagttggtgaagttcgggaagtcattagtagtgaatttcctgaaatcgctgtggatttggcaacgtgtatgttggcagttaatatggaatttcaacacgatcaagatattttgccaaatgaaataacagaaatcgcggtaattccaccagttagcggtggataaggaggatactagatggataaagacgatttaacccattttaatgatgaaaaacgtgcgaaaatggtcgatgtcacgagcaaatcagaaacgaaacgacgtgcaatcgctagagctaccatacatatgaacgaagaaaccttagcgcgtattcatgctggtaaaattgctaaaggagacgttttggctgttgcacaagtggctggcatcatggccgcgaaaaaaacgagcgaacttatcccgatgtgtcatccaatcatgacaaccaaagccgatatttcttttgatgatgatggaaagacggcattaacgatcacatcagaagtagtgactgttggaaaaacaggggtagaaatggaagcactgacagcagttaccattgcagctttaacaatttatgatatgtgtaaagcaatggataaaggaatgcaaatagaaaaaacatatttagtcgaaaaaacaggtggaaaaagcgggacatttaaagcagaagcgtaactattttgtaggataggagttttgttttatgcaattattaaaggataaatttgggcgggtacacgattacattaggatttcagtaacagatcgatgcaatttaaggtgtgtgtattgtatgcccgaagaaggcctgacatttttgcctcatgaaaaagtactatccaaagatgaaattgtcagttttatggagttaatggtgaaatttggcatcaaaaaagttcgcatcacgggtggagaaccattacttagaaccgatattgtggaaattgttcgtggacttggagcaattcctgagatagaagatatttcgattacaacgaatgcgatgtatttggcaaaaaaagcagaggccttgaaagaagccggattaacacgtgttaatattagtttggattccttgcatgcagaccgtttccaagcaattacacgtggaggccgtttgcaaaaagtactcgatggtattcaaaaagcggaagaagttgggctattcccaattaaactaaatgttgttttaatcaaagggcaaaacgacgatgaaataacggatttccttcaatttacaaaagataaagacattaatattcgctttattgaatatatgccgattggtcatgcgggtacgagttggaaagaaaagtacttacctctagatactatttttaaagcgtgtgatgatgctagtttcgaatatgagccagttgattcgattcgcggaaatggtccttctgaaaacttccggattaaaggagcgaaaggaacatttggtgtaatacatccagttagtgcgcatttttgtgatagctgtaaccgattgcgactcacggctgatggctatattaaagcatgtttatactgggatgaggaaatgaatattcgtccatttatacatgaaccagtaaaattaatgcaacttgttcaaaaagcaattgataataaaccagaaaatcatgaaatggcattgaaattacaagatgaagttcaatctaataaaccaacttggcgacgtatgagccaaattggtggataaataaaaccatccggcccgcgagccggatggttttatttttgtcgttccgctattaaatgcggcaattcaggtataattaatttttccgtagcgagtctcgaagcattacttgaccccggtaaggcaaaaatcagcaaaccgctcttcgaaaaacctgcaaaagcacgagataccatcgcgcggctaccaacttcctcgtaactaagcatccgaaaaatttctccaaaaccaggaatttcttgctgaatagttgcgaataaagcttcataagtaacatcgcgcttagcaattccagtaccgccatttgtaattaaacaaaaggaaccgttagctgctaatttgtccatttcctgttttatacgaggggcgtcgtcaggaacaataactcgtgtaatcacttggtgtcccgcagcctctaacaaagattgaatcagtttgccgctcgtatcggtttctaaattccttgtatcactaatcgtcaaaatactacaagttaccttaataaacgttttttgctccataacttcctcccttaattaaaaaatagttggtatattttctttgcttccgctaaattttcagttccatgcagtaaaacacgaccatttttaaaaataacaaattgatatttttcataattaaaacttagtaaagctggattttccgtataaagcattttttgttccgctaatcgttgttttatttcgcggtagttacttttattttggaggtgaaactgtacggtatctcgtccacaaagtgcgatagtttgctcagaaaagggaacttctgaaagtactttttcaggtgagcagcctgtgcagtgagggcgttttttgacagctagtgattggaaattcaactgccaattatctatttgatagtatgtatttgcagtgaaatcagggtttaaaatcatttgtgtaagtaacgaaacttgcattcccgcgaccatcggaatgagcgcgccatcaactccaataatatcgcaacttgcagcatttgtttggggaatatcaccaagcaaacagtgtaaacaagcagaatcaggaggggtaatcggcataagattagcataatttcccgcacaagaagtaaaaatccaaggaatttgatggataaaacaaaattggtttaaaaaatcgcgagtcataaaattatccgtacaatcaagtatgtaatcaattttcttagcaaaaggggttaaacttgtcatattcgcatcgtcaacaatatattccacttcaatctcgctattaattaacaatattgctttctgagctgcatacgcttttgcttgtttctcgagcgcatcttgttccgtataaagtgattgtcgttgtaaattacttaattccacataatcgcggtcaattaaaatcaatttcccaaaacccatgcgcgcacaaatctcagccgcgtaggaaccaattgccccaacaccaacaatcagaatcgttttcgaaagcaatttctcttgaccgatttcacctatatttgcgactcgcatttgtctatcataacgttccaagttttccaccttctttcctatttatcttaccagaaaatcactgcaagaagctatctacgaggttccgatttattcttgtaattccacttcacgaactttataatagaaagaaaattaaaacctagaggtgctaactatgaaaaagaaactagacacaaccaaattttaccctgcttatccagtttttctattaacttacttaaatgaactaggagaagcgcaaatgtcaacgggatcatcatcgtatacacttggagatactttagtcattggtatatctgccgaaagtaacgcgagcaactatttaaaaccgggagagaaattcgccgtgaattttccgaccactaaacagttcgatttaattgaacaaggtggcttttcatccggaaagcgtatcgataaagtaaaagaataccagattgagctaaccaaaagtgaaagcggagcactatacatagattcatgcccgattatttttgaatgtacggtaggtcaaacgattagagatgctgactatcatactgtttttgctaaaattgacacgcgtttaatggaggaaactttaattgatacagctggtaatttcgtacatgatgaactagacttagttcttttttcaggcgatgcttatgaacgtaaatttcgcaagttagatataaaaatagaaaaagttggcggacatttataaaataaaaaccccacaggatatagattcctgcggggttttattcatttcatccaaatacatccacatcaggtggcaagtaagatggattttctttattaatatggtcataaaacataacgccattcaaatgatcaatttcatgttgcacaacaattgctggatagcctttaaaacggagcttaagtggcgtaccattttcatcaaaggcatcaattgtcactcgttcactacgtacaacataaccaggaacttcacggtcaacggaaaggcaaccttctccaccagaaagacaagcttgttgtacagaatggctacgaatttttggattataaagcacataactataaagacgatctttttcatcgtgtacatggatagctaggaaacgttttgttacagctagttgtggagccgcaattccaacaccaccacgcaaaccgtatttttctgctaactcttcatcctgactattaattagaaactcgagcatatcgtgccctaattttttttcttcatctgaaagcgggaaagtcacttctgttgcaacttcgcgaagtgctggatgaccttctcgtacaatatcgtccattgtaagcatgatttgattctctcctgttctttaataacatatccttattttaacaaaagaacgaaaaaaaaggaatgaaatattactttccaagaaaaaaccgtgttttcataggactaaaggcatatttgttaaaaatagcaaagtttaaataacgaacatttataaataaaatagatatattgttcgtataaatgaaacggtaaaaaattttataagtttgtgaattcacaaactaacaatattttataaataaaacttcggaataggtgtgataatgcgagagttgcaatattatataacagtttgcatctgttttatctttttttaatacagaactggaaagcgaatgatttaagttataatgccattgtaagcgataaaataattagagattaacttattgacttcataatcttggtagtgtaaattaagagagaagattagtgtattaataaaattcttgtttttgagtaaaacagaattaacattttaaataaaaggaaagttcctgtttttttatgaaacattgtgaaggaatgaatgttttttcacaaactctcttaaaacccatgttttcaatgaggattttgtggtaataactggagaggctgcgtaattagttgataggaatttagaaaaaagcttccggaatctgcttctttctatagaataacttttctttttactacgctattataattaatacacaatcaggatggcagttttaaaagaatccatttagatgggtaaatgaccggacgagcgttacataaaacgcatacctaactaatgaagaatttgaaactgtacaatgtgaatgacgaaagggtggatacgaaatggcttctaaaacaaagaaggctattatcgacgtaaagaaacaatttgaggctgttcataaacaatttgaattagttcaaattctaaatgaaaaaggagaaatcgtaaatccagatttaatgccggatttaactgatgacgagttagtagaattaatgactcgcatggtttggactcgtgtacttgaccaacgttctatttcacttaaccgtcaaggacgtctagggttctatgctccaactgctggacaagaagcttcccaacttgcaagccactatgcacttgaaaaacatgattatattcttccaggttaccgtgatgtgcctcaacttatctggcacggacttccacttacaaaagcgttccttttctctcgtggacactttgtaggtaaccaattccctgaagatttaaatgtattatcaccacaaatcatcatcggtgcacaaatcgtgcaagctgccggtgttgctctaggtcttaaaaaacgtaaaaaagacgctgttgtaatcacttatacaggtgacggtggttcttcacaaggtgacttctatgaaggaatgaactttgcgggtgcttaccatgctccagcaatcttcgtagtacaaaacaataaattcgcgatttctacacctcgtgaaaaacaatcagctgctgaaacattagctcaaaaagcagttgcagccggaatcccaggcgtacaagtagacggaatggatccacttgcagtatatgctgtaactaaattcgctcgtgaacgtgcagttgctggtgaaggcccaacattaatcgaaacgatgacttaccgttatggtccacatacactttctggtgatgatccaactcgttaccgtacaaaagaacttgacggagaatgggaacttaaagatccaatcgttcgcttccgtactttcttagaaggtaaaggcctttggaacgaagaaaaagaaaatgctgttatcgatcaagctaaagaagaaatcaaagtagcaattaaagaagcagacgctacaccaaaacaaactgtaactgatcttcttaaaaatatgtacgaaacaccaactgctcctatcaaagagcaactggcaatctatgaagcgaaggagtcgaaataatcatggcgcaaaaaacaatgattcaagcgattacagatgcgcttgcagtagaacttgaaaaagacgaaaacgtattagtttttggggaagacgttggtaaaaacggcggcgtattccgtgcaacagaaggattacaagaaaaatttggcgaagatcgtgtattcgatactcctctagcagaatctggtatcggtggtcttgctatcggtcttgcacttgaaggtttccgtccagttccagaaattcaattcttcggtttcgtatttgaagtaatggattccgttgctggtcaaatggctcgtatgcgttaccgtacaggcggaactcgtactgctccaattacaattcgcgcaccttttggtggtggagttcatacaccagaaatgcacgctgataacttagaaggattaatggctcaatctcctggtttaaaagtggtaattccttccactccatacgatgcaaaaggtcttttaatctctgcaattcgtgataacgatcctgttattttcttagagcatatgaaattatatcgttctttccgtgaagaagttccagaaggcgaatacacagtagaaattggtaaagcagctgttcgtcgtgaaggtactgatgtttctatcatcacttacggtgcaatggtacaagaatcaatgaaagcagcagaagctcttgaaaaagatggcgtatctgtagaagttatcgatttacgtacaattagcccaattgatgtggaaacaatcattgcttccgttaagaaaacaaaccgtgctgtagtagttcaagaagcacaaaaacaagcaggtattgcagctaatatcgttgcagaaattaacgaccatgcaatcctttctctagaagcaccagttatgcgtgttgctgctccagatagcgtattcccgttctctcaagcagaaacagtttggttaccaaatcataacgatatcattgaacgagtaaaagaagttattgcattttaattcataatgaccgttttaaaacttatggggagttttagaaggggaaagaaatatttttatactaaggttcagtttatctgaaccttagaaattacaggaggcttaataaaatggcatattcatttaaattaccggatatcggtgaaggtatccatgaaggtgaaatcgttaaatggtttgtacaaccaggcgataagattgaagaagatgaatccctatttgaagtacaaaacgacaaatcagtggaagaaatcacttctccagtttcaggaacaattaaagaaatcaaagttgctgaaggtacagttgctacagttggacaagtactagtaacatttgatggcgtagaaggtcacgaagacgacgccgaagaagaaagcgcagcaccaaaagcagaatccacagaatcaactccagcacccgcacaagctagcggaaaaggaatttttgaattcaaattaccagatattggtgaaggaattcatgaaggcgaaattgttaaatggtttattcaaccgggcgataaagtagaagaagatcagtccatttttgaagtacaaaacgacaaatctgtcgaagaaattacttctccagtagatggaactgttaaagatattttagttagtgaaggtacagtagcgacagttggtcaagtattagtaacatttgaaggcgattttgaaggagaagctagtcatgaatctactccagaatccccagcagaagaagctgaacttacaaacaacgatgcaacttccgctccagctacaggtggaaacggaactccatcatctaaaaaagatcctaatggccttgtaattgcaatgccttctgtacgtaaatatgctcgtgaaaaagacgttaatatcgctgaagtagcaggctctggaaaaaataaccgcgtagttaaagctgatatcgatgctttcctaaacggcgaacaaccagctgcagcaacaactactgctcaaacagaagaaaaagcagcagcaccaaaagcagaaaaagcagcagcaaaacaaccagttgcaagctccgatgcttacccagaaacacgcgaaaaattaacaccaactcgtcgtgcgattgcaaaagcaatggtaaactcaaaacatacagcaccacacgttactttaatggacgaaatcgaagtaactgcacttatggctcaccgcaaacgtttcaaagaagtagctgccgaaaaaggtatcaaacttactttcttaccttatatggtgaaagctcttgttgcaacgcttcgtgacttcccagtgcttaacacaactttagatgatgcgacagaagaacttgtttacaaacattacttcaacgttggtatcgcagcagatacagaccacggtttatacgtgccagtaattaaaaatgctgataaaaaatccgtattccaaatttctgatgaaatcaacgaactagctggaaaagcacgtgatggtaaattaacagctgacgaaatgcgccacggttccgcaactatttctaatatcggttctgccggcggacaatggttcactccagtaattaattacccagaagttgctatcctaggtgttggtcgtattgctcaaaaacctatcgtaaaagatggcgaaattgtagcagcaccagtactagcgctttccttgagctttgaccaccgtgtaattgacggcgcgactgctcaaaaagcaatgaacaatattaaacgtttattaaacgacccagaattattactaatggaggtgtaacaaaatggtagtaggcgattttccagaagaaagagacaccatagtcatcggtgcaggcccaggtgggtatgtagccgcaatccgagctgcacaactcggacaaaaagttaccattattgaaaaagaatattacggtggtgtgtgcttaaacgttggatgtattccttctaaagcacttatcacaatcggtcaccgttttaaagaagctggacactctgataacatgggtattacagcggacaacgtgaacttagatttcacaaaagcacaagaatggaaaggcggcgtagttaacaagcttacatcaggtgttaaaggccttcttaagaaaaataaagttgaaatgttagaaggagaagcgttcttcgtggatgatcattccctgcgtgtgatccaccctgactccgctcaaacttatacattcaataacgttatcattgcaacaggatctcgtccaatcgaaatcccaggtttcaaatatggtaaacgtgtattaagctcgactggtgcacttgcattaactgaagttccgaaaaaattagtcgtaattggcggcggatatatcggaacagaactaggtggagcattcgctaaccttggtacagaactaactatccttgaaggcggtccagaaatcttaccaacatacgaaaaagacatggtttccctagttaaacgtaatctgaaaagcaaaaacgttgaaatggttactaaagcacttgcaaaatctgctgaagaaactgaaaacggcgttaaagtaacttatgaagctaacggtgaaacaaaaactatcgaagctgattatgttttagtaacagtaggtcgtcgtccaaatacagacgaaatcggtttagaacaagctggcgttaaagtaacagaacgcggtttagtagaagttgacaaacaaggtcgctctaacgtttctaacattttcgccattggtgacatcgttcctggtgttcctctagctcacaaagctagctatgaagcaaaaatcgctgctgaagcaattgctggcgaaaaagcagaaaacgattatacagcacttccagctgttgttttcagtgacccagaacttgcaacagttggtttaacagaaaaagaagcaaaagaaaaaggctttgatgtaaaagctgctaaattcccattcggcggtaacggtcgtgcgctttctttagatgcacctgaaggatttgttcgtctagttactcgtaaagaagatggcctagttatcggtgcacaagttgccggaatgaacgcttctgatattatttcagaaatcggcttagcaatcgaatcaggtattacagctgaagacatcgcgcttactatccacgctcatccatcccttggagagcttacaatggaagcagctgaacttgctttaggtcgtccaattcacatgtaatcaacttaaagcggaagtatcctttacgggtatttccgctttttatctatataaataagtgcgtgatttcacaaaaactcttttagttcattttttgaaatatttaaagtatccgttttagaaaaaaaggagtataatgtaacaagtgaacgtaacaagtcaaatctaattgaatcaggtgaaaaaatggagaaacaaacagcaacttggaagaaagctctattttggtttgcgtatgtagtagcaggaatttgttttttattaacgattgtggcctttattgtaggatttattcatcacatgcatgatacaggtggatggcgttccgttattcaaattctcgaaaccccaattacgggctttgtaaaaatgactggtggctacatcggtaaaggaatcttagaagtaattattcttattatcgttagctatgtattaccaatcttcttctgttttgcaacgcattatttaaaagtaaaacgacgtgaaatggcttaaaataagattattttgtaaaaagcaaagcgaatgagcattgctttttatttatgcggtcaagttattttatttttgccgtagaagcatgctaaaataacaataagagacttgatgaggaggagacccatatgccatctaagaagaaaaagattgtcgttatcggcagaagtaatctacaaaatctctacattcatacaattcttttaaaaaaactacccgctgagatttacttaatagatgaacaagctaaaacaagtgtgcaagactttgaatatgcgagctactatcattcttcagcaaccgttaacacaggaacctttaatgaatgtcgaagtgcggatctcgtccttttttttcaagaagaaatgtcaaatgagtctttctcaaatgaagataatttagcattaatcaaagaaaaagtgaagaagatgatggcgactggttttcaaggaatagtgttagtggcgactgccgaaagtaatattgttgcttccttaattaaacatttttctggcttaccagcaaatcaaattattacacctggcaccatgctagcaacttcttattttcaagtagaaattgctaaactatttaaaatcagtcctaaaaacgtgcatggctatattattggagagagtactcaggatgtcattcccgtttggagtcgagccttccttggtggcaaaccgattttaagttatttagccgaagaacaaaaaagaatcacatcggatgatttacaaaatttaacaaacatgattacaaaaattcctgattttcctgttgaaactaaagatggctgtagtttccgctttagtactgtaactgtgctcgctgaattaacagaagtcattttacgagatgaagcaagggtgcttacagtaggcgtagaagtgaaggaagcatatggtttagaaagaccagttttcgttagcgtaccagctgttgtgggcgctgagggagtcagagaattactggagttaaatctatccgatgacgaacaaaaagaattaaagcgaattacaacaaaaactaccgagaaattggggttactgcataataagggaggaattagttaatggaatatagttatccactaaatccagactggacaaccgaagaaatgacgattgttgtacaatttttagaagctatcgaacgagcatatgaaaaaggtattgatacacttgaactcaaagaaaaataccgagcatttaaacaagtagtacctgcaaaaggagaagaaaaacggattggcatagactttgaaaaagcaagtggatattcagcctataaagtcatgcaactcgtaaaaaacgcaacaacaagcaaaataaaaatgcaaccataattaagaggaggaaatttttcatggatattagtcaaattaaagcagaagtagtaacaccagaaacaggaatacacgtaggtgaaaagggagctccagttaaagtaatgtcattcattaacctacgttgcccattttgtcgtgagtggaatgaaaaatctaaagacgtcttaactgaatatattcaagcaggaaaaatcgaattaatcattaaaccatttgataaagaaaaagaatctttacaacgcggaaatgtagcgcatcgttacttagattattctaaaccagaagaaacgcgtgaaaccatcaataaaatctatagcacccaagatgaatggggtagcctaagtctttcagaagtagctgattatatggagtctacactaggcctaacagagcaagacaacaaagctgcatctgaaaaaataatcgctgaagcaaacgcagcaaatgttgtttttgtaccgactgtaattgttggtgaacatatttttgatgaacacattagccctgaagagttacgcgacttacttgacggcgaattagctaaataaaaaaacgaatgtattgcctatcaatttaggcgatacattcgttttttattttaaaagaatttcctccgccagaatacaatcgcaagcgctccggcaatcccaaaagcaaaaccaagcgttaatatccaagctaaaggtgtttccataaacggtaatttcacgttcattccataaaaactaaaaaccatcgtcggaatcgtcaaaatgatagtaaaagaagtgagaaatttcatcacgatattcatattgttggagataattgaagcataagcatccatcatcccacttaaaatattcgagtgaacttccgccatttcgattccctgacgattttcaataataacatcttctagtaagtcttgatcttcctcgtacattttaacgatattttgacgcatcattttatcgagtacgactttattcgatttaagggctgttacaaagtaaactaaacttttttcaattcccattaaatcataaagctgtttatttttcatggattcatgtagttctttttcgatttcatctgtttggcggttcaagcgttttaagtgacgcaggaacgtagttgaaatcatatatagaatttgtaaggcaaatcgtgttttcatgtgcgtataaaagcctttaaaaccggtttttaataaatgattgtacaatagaagaatcaatcgtacaaatcgtaataaagtagtcctttgtaataataatccccatcggaatcgtttcaaatgaagcgtaatgaatatcatcttcatcaactactggaaagtcacagacgattaaaacggaatctgaatcatcatcgcgttcaatacgagcactttcatctttatctagtggatcttctaagaactccaaagggatttcatagttatcggcatttttattaatttcttttgaagtaggggcaacgatattaatccaacagttgcgtgtcacttcttctaattcaattaatttgccgttttcatctgatttgaaaatttgatgcatgctttttacctccttttttaacaggtaaatttcacgcggttagagtattgatcccgggaaaaatcacctgtatgaatacttcgatgtggaccagggtcacttgctgtttgctgctcctttttcacgttcctcaactccttcaaaccatagtaattcacaactctaccattatacctagattatagtcatttgtacatcttttattgaagagcagccttataaagcggaataagctcatcaagtaccatttcagcctctttgatgaagtcttttccaggggataaatggttatcgtcaggtagataaatttttccaaccaaaaattcacctttttttacatcacggaaacgtttaagcgttgcgtcaagttgaccgccgtgcaccgggtaagttttctcttccgtatggtctggcgaaatcgcaaatgtatcaggtaattcagcaagtagtttcttttctttcaaaaagcgattggcgatttttgtgctttcttcattttcataaataaaagcgagccagatgaacaaataattatcaaaaagtcctacttgaaaatgagggtgctttttataaccgcgtttatcgtggcaaatcgcaagccatgtgctttcaggtgggttaaccgaacgtctttggtgacgagcaatatgtaaaaacatttcatcgccaagtttggcacttaaataagtagttaattcttccccaactgctttaaatttcggctgaatatcattttgaattccagccatacgtgcgtccagaccaggaatttgcattgttttaaaatctttcttactaaatcctttaaaagtcatctgttttcctcctaattttgcatatagtttcattatacggaagttaagttctaagtgaaagaatcttgttctattcagataattcatttttgtgataaaataaacaaaacgagtctaaaagaggtgttagcatggacagcgaaaaaatagattatttagcaaggttatggattatggaagcagcagcaaaaatcaaacaatcttttaaagaaacattagacattgatataaagtctggccgaaatgatttagtgacaaacatggataaagaaacagaagctttttttgtcaaacaaatcaaagaccattttccaaaccatcgcttatttggagaagaaggtatgtcagatgatgtgaccgatttaaatggaattgtttggattcttgatccaatcgacggcacacttaattttgtggagcaacaacgagattttgccatttcacttgcaatttatcaagatggagtagggcacttggcttatatttatgatgttactcgtgatgaactatacttcgcggaaaaaggaaaaggcgcaacagtaaatggcaaacaaattcctaaaatcgataaagacatggatttgcaagatgcactactaattgccaatctaagtgtgacaagaaaatttccaactatgtgggaagccgtaaaagtctcaagagggctacgacttcacggagcagcttcacttgaatatatggacgttgcaaccgggcgagcaggggcatatctttcggctaatttagctcagtgggatattgctgctggaaaaattatcgtggaagaattagggggaattgtcacccgaattgacggctcaaaaatcaatatgctggaaaaaggaagttccatcgttgcaacaccaaaaattcatcaaaccttattagacaactacctgccttaaagaaagcgctcaacataaaaaaactcattttcagaaaataaaaatagtgctaaatccgcttagctatgctataataggtaagttgatttaaacgagacgatagcgacggaggaaaataaatctattttcctctttcttttggctaatcttcacgataaatgtttggatttttaatttaggaggaaacaagattgaatttaagaaacgatattcgtaatgtagcaattattgcccacgttgaccatggtaaaactacactagtagaccaattactacgccaatcaggtactttccgcgacaatgaaacagttgcagaacgtgcaatggacaacaatgatttagaaagagaacgcggtattacaattttagcgaaaaatacagcaattaagtatgaagatacacgcgtaaacatcatggatacacctggacacgccgattttggtggagaagtagaacgtatcatgaaaatggttgatggtgttcttttagtagtggacgcgtatgaaggtactatgcctcaaacacgttttgtactaaaaaaagcactagaacaaaacctaactccaatcgtagtagtaaacaaaattgaccgtgactttgctcgcccagaagaagttgttgatgaagtactagaattattcatcgaactaggtgcgaacgacgatcaattagaattcccagttgtttatgcttctgcaattaacggaacttcaagctttgaatccgacccagcagaacaaaaagaaacaatgaaaccacttttagacactattattgaacatattccagctccagttgataacagcgacgagccattacaattccaagtttctttacttgattataatgactatgttggtcgtattggtattggccgcgttttccgtggaacaatgcacgtaggacaaacagttgccttaattaaactagacggcacagtaaaacaattccgtgtaacgaaaatgttcggtttcttcggactaaaacgtgacgaaattaaagaagcaaaagcgggtgacttagtagcacttgcaggaatggaagacatcttcgtcggtgaaacagtaacaccatttgaccaccaagaagcacttccacttttacgtattgatgagccaaccttgcaaatgacttttgtaacaaataacagtcctttcgcaggccgtgaaggtaaacacgtaacaagccgtaaaattgaagaacgcttacttgcagaacttcaaacggatgtatctttacgcgttgaaccaacagcttctccagacgcatgggtagtatctggtcgtggtgagcttcacttgtctatcttaattgaaacgatgcgtcgtgaaggttatgagttacaagtttctaaaccagaagtaatcatccgtgaaatcgatggcgtgaaatgtgaaccagtagaagacgttcaaattgatactccagaagaattcatgggttcagttattgaatctatcagccaacgtaaaggcgaaatgaaaaacatgattaacgacggcaatggccaagttcgtttacaattcatggttccagctcgtggattaatcggttatacaactgatttcctttcaatgacacgtggttatggtattatcaaccatacattcgatagctaccaaccaatccaaaaaggtcgcgttggtggacgtagccgtggtgttcttgtatccatggaaacaggtaaatctactacttacggaacaatgcaagtagaagatcgtggtactatttttgtagaaccaggaactgatatttacgaaggtatgatcgttggagaaaacaaccgtgaaggcgatatcgctgtaaacattgtaaaagcaaaacaaatgactaacattcgttctgctaacaaagaccaaaccaacgttatcaaaaaacctcgtcacttatcattagaagaatcattagaattcctaaacgaagatgaatactgtgaagttacaccagaatccatccgtttacgtaaaaaaattctaaacaaaaacgaacgtgaaaaagcagcaaaacgttcaaaaactgctgaataattaatttaaaaataagccaaatagtttttttagagatattagtatcttttaaaaatttatttggctttttttatgcattaataggaggaaaacagggaataaaataatgtctttgtaacactattgtaatatgaatagctatttggtatattataagtaagtagaaaaggtggttattattatgaaaaaacggataattattcttgcagtattagtggtacttcttatcggtggcgttgtaattggagtttatgcaaatggaaacaccgcaaaagataatgaagataaaaaaacaacagcaaaaaaagccacatctacaccaaaagatacaaacaaaacagttgatactgagaaaaaagatacagtaaaagactctgtaacagatgataaaggtgtagtaactaaaggtagctcagatattgaaaaaaatgcaccgacaaaaagcagtggtaattcaacagaatcaaataaaaacactccttcaacaccagcgttttctctatctaccagtggatttaaaacatctaatgtagcatctgtacttggcggaacagtgacaacaacttatttgtccagtagtccgtcatttcaaaaaatctttcaaaatttaaccattgatgttaaccagtacaaagtagaacatgttgttggagcaaacaaatcagtaagtgcgagcaatccagaaagttatttagcaaataaaaatggttacgttattacattagatatttctatcaaaaacacatcttcgaaagataaaatgtataaagccgatcaaattacccttgtaggagcaaatgaatttgtaggaggaagtttagataactttgtaccttctaatttccatcttatcggaagtaaatctgatcccaataacttcgcagccggtaaaacagcgcgtggtctattaactttcacaatgactgaagctgtctataatgatctagcagctgactcgaaactcggtgtaccaaaccctgataaatttgattcaactgtttcagaagcaaaagctggcgacgacgttgttgtttcctttccagtaaaatagaaaaaaaccgcccagttaattgggcggtttttttatttctccgtactttctattaaattctttaactcactattcgacattacaactggtttatggaaattaaaatgaccagaattcacgcgactgatagttttaatagctacacgatgttcacattcaggacataaatacattctaattggtttattacgtaattgctttgttttaaattcacgattgtctagttcgtctacacgctcgcataagatacattttgcattcaatttatcttcacctcacacaagtattatagcacgattatcgaaaaaggcgagtaaaagcggatttttcaaaaaattttagcctattcttgcttgcgtggcttttaatttgtgatatactagacttatctagtattaaattttacttaagggttctcttaagatgaaaataaagcgcttattatagcggatgatagggggttctgtgatggcaaataaaaagatagatcacagagaagaggcaattgagcttttaaaacaagacgcaaaacgaatcttacagttgattaaagttcaaatggataatttaacattaccgcaatgtccagcatatgaagaagttcttgatacacagatgtatggcttatcccgtgaaattaattttgcaacccgcctaggactaattgaaccggaagaaggaaaaaaattaatttccacactggagaaagaattatccgcgctacatgaactttccatgagcaaaaaataatgatttaattgaaaagatgtctgattctttctgacatctttttttgtttggcaggaaaaatgagccaaaagaaggaggcaattcttcttttcatttgaaggctttttcctttataatagaaagaatagaatacaagatgggatagtaacttctcagggattggaagatgccaatgttaaaacgaattttaaaatcatatgattatgcatttattgctgtttttatagtgctttgtttatttggaattataatgatttatagtgcaagctggtctctagctattggtaaagatttacctgctgactactattatgcacgccaagtaaaaaactttataattagttttattttctttgttctttttgcgcttatcccttttaagttttatcaaaacaataaagttcttatgttaattgtatttggctcaatcggtgttttgttactgattttcttagttgggaagacggtgaataatgcgaatagttggctagtagttggaccacgttcacttcaacccggggaatttgcaaaattagctgtcattatttatatgtctgcaatttatgcgaaaaagcaaagttacattgatgactttaaccgcggtgttttgccaccaatattcttccttgcttttgtttgtttcttgattgcgattcaaccggatacaggtactgcgtttattattttccttgttggttgttgtattattattgcttctgggatgagacttcgaacaattatgaaactaattggaattggagtcggggtcattgtcgcccttacactaattttgttcgctttaccagataaagtcagaacggaaatcgtatcaccaacaaaagtagcgcggattacgacctttatgaatccgtttgaatacgcagataaagaaggacatcaactaattaattccttttatgcaataggttcaggtggtgtttctgggcaaggtctcggcgaaagtgttcagaagctaggctatttacctgaagcgcataccgattttattattgctgtagttgcagaagaattaggtgtgtttggcgtaatgttcattattttagcgctgtttttcattatttttaaaacgatttctaccggactcagggcgaaagatccttttgcttcattaatgtgctacgggattgcaagtttgattgctattcaagcatttattaatttaggcggtgcaagtggacttatcccgctaactggggtaacacttccatttatcagttacggtggttcttcattaatggttctttccatgatgcttggaattgtagcaaatatttcgatgtttaataaatatcaccgtttgtatagtgcagatggttctaaaaaagaagttcccaaaaagcaaaaaagacgatagatttcaaaagaaaaagtcatttaattggctttttcttttttcgttttaccgattgtttttggcggtttatagccagtttattcgtgttttcgatattgttttaaatatttagaaagaaaataatttacatctgatggcatttaatactataattgaagttatataccgttttacagcctaaaaaagggagagcttaaaagtatacataatcatttcgtccatttaggcatcgtatcaagtatagaacagatcagtgttggttaggaggaaaaaaatgaatcgaataaaaaaagtattagtagcaaaccgtggagaaattgctatccgcgttatgcgtgcatgtactgaactcaaaatcaaaacagtggctatttattcacaagaagatactggtagttttcaccggtataaatcagatgaagcctatctggttggagcagggaaaaagcctattgatgcgtatctagatatcgaaaacatcattgaaattgctaaagaatctggtgcagacgcgattcatccgggatatggtttcttgtccgaaaacattgaatttgctcgtcgttgtgagcaagaaggcattattttcgttggtcctaaatcaaaacacctagatatgtttggcgacaaaattaaagcaaaagaacaagctttattagctgatattccagtaattccaggcagtgatggtccggtagctggtattaaagaagtagaagaattcggtgaaaagaacggctatcctttaatgattaaagcttcccttggaggcggcggtcgtggtatgcgtgtcgtagaatcaaaagaacatgtgaaagaaagttttgaacgtgcgtcttctgaagcaaaagccgctttcggaaacgatgaagtatacgtagaaaaatgtgttatgaatccaaaacatattgaagtacaaattcttggtgacactcacggtaatatcgttcatttatttgagcgtgattgttctattcaacgccgtcaccaaaaagtagtggaagttgctccgtgtaatgcgattacttctgaacttcgtaaccgtatttgtgatgcagcagttaaattaatgaaaaacgttgattatatcaatgcgggaacagtagaatttttagttgaaggcgataatttttactttattgaagtaaatcctcgtgtgcaagtagagcatacaattactgaaatgattacagggattgatattgttcaatctcaactattcattgcagatggttatgcgcttcacgatcagctagtggctattcctaaacaagaagacatccatattcacggctctgcaattcaaagccgtattactactgaagatccacttaataactttatgccagatactggtcgagtagacacataccgttctacaggtggttttggtgttcgtttagatgctggtaatggtttccaaggaacagtagtaacaccgttttatgattctttacttgtaaaattatgtacttggggcatgacatttgagcaagcaacgcgcaaaatgcgtcggaacttaattgaattccgtatccgcggtgtgaaaacaaacattcctttcttattaaatgttgttcgtcatccggattttgcaagtggtaattataatacaagctttatcgatactacgcctgaactatttaaattcccacatattcgcgaccgtggtacgaaaacgttgcgctatattggtaatgtaacagtaaatggcttcccaggaattaagcaccgtgacaaacctgtatacgcagagccacgtttgcctaaaattccttatggttcgcaaatcgcaccgggaactaaacaaattttggatgcaaaaggaccagaaggcgttgtagactgggtgaaaaaacaagaagaagtgcttttaacagacactacacttcgggatgcgcaccaatctttacttgcgacacgtgttcgctcgaaagacattttccaaatagcagatgcgatggctcatttattaccaaatatgttctcatttgaaatgtggggcggggcaacttttgatgtagcttatcgcttcctaaatgaagatccttgggtgcgcctggaaacacttagaaaacaaattccaaatgtaatgttccaaatgctacttcgcggagccaatgctgttggatacaaaaactatccagacaatgttattcgcgaattcgttaagcaatcagcgcaatccggtgtcgatgtattccgggtgtttgatagcttaaactggatcaaaggtatggaagtgtcaattgatgctgttcgtgaagcagggaaggtcgtagaggctactatctgctatacaggagacattgatgatgacacaagaacgaaatacacgattgactactataaagatatggcgaaagagctcgttgctcaaggtacgcatattttaggaattaaagatatggctggacttttaaaaccacaagcggcttaccgtttaattggtgaattaaaagatacagtagatgttccaatccaccttcatacgcatgacacaagcggtaacggtatttatacgtatgcagcggcagtcagtgcaggtgttgacattgttgacgtagcatcaagtgcgatgagtggagcgacaagccaaccaagtatgactggtctttattacggattagttaatggtaatcgtcaaaccaacctagacgcacaaaactcccaaattattaatcattactgggaagatgttcgtcattattataaagactttgacaacgcacttaactcgcctcaaacagaagtatatatccatgaaatgccaggtggtcaatataccaaccttcaacaacaagcaattgctgttggacttggcgatcgttgggatgaagtaaaagaaatgtacactgttgtaaaccaaatgtttggagacatcgttaaagttacaccatcttctaaagttgttggagacttggctctatttatggttcaaaacgaacttacagaagaagatgtctacgaaaaaggcgatactatcgacttcccagattccgttatcgaattctttatgggcgaaattggccaaccatatggcggtttcccagaaaaacttcaaaaattagtactcaaaggacgcacgccacttgcagatcgtccaggagctcttatggagccagttaactttgcagaggtcaaagctgaactaaaagagaaaatgggctatgaaccatctgaaaaagatgtcatttcctatatcttatatccaaaagtattcctagattatcaagagatgattagtaaatatggtgatgtaacagtccttgatacaccaacattttacaaaggtatgcgcttaggtgaaacgattgaagtagaacttgaaaaaggaaaaattctcctaatcaagcttaattcgatcggtgaaccaattgcggatggaacacgtgtcatttatttcgaactaaatggtcaaccacgtgaaatcaacatccaagatatgaatgttcaatcaacagttattgcccgccgtaaaattgatacaacaaacccagaacatgttggagctacaatgacaggttccgttattcaagttgttgtgaaaaaaggcgactctgtgaaaaaaggtgatccattattaatcacagaagcaatgaaaatggaaacaaccattcaagcgccattcgatggagaagttagcagcatttatgtttctgacggcgacactatcgaatctggtgatctattaattgaagtaaacagaaaataaaaaaacataaacgattaacgggtgggaatataacgctaatttaaagtagcaaactttaaatatcgatattttaaacgtagtaaacagacgttttttcgaatcaatagcgctatatttcgcacccgttttttctgaaaaaggagaacttacatatgaaatggtttaaaggaattgccgtagcattattacttgtgattttaactgcatgcgggaatactgaaacaaaagcgccaacagaaaaaacaaagaaaattgaagtgaaagatgcaacagagcaaaaaatcactttaaaagaagcaccaacaaaaattgtttcattaataccgagtaacactgaaattttatttgcgctcgatttgggagataaagtaaaaggtgtttcggcttacgatgactatcctaaagaagctcaaaaaatcgaaaaagtcacttcaactactgtagacactgaaaaaattatcgcacttaaaccagatttagtacttggtcatgagtctatgcttgccactgaaaaagacgcttatcaattactcaaagatgcaggaattaatgtgtttgtcgtgccagatgcaactaatttaaaagaagtcgaaaattccattgaaacaattggtaaattaactggaaaagagcaaaaagcaaaagacgtaactgcctcgatggagaaacaaaaagccgcagttgaaaagaaagtcaaagagctgaaaacatctccaaaagtgtggattgaaattagcccagacttatatacagcaggcaaaggaacgtttatgaatgaaatgcttgaacttgctggtggtacaaatatcgttaccgaaactggttttattccatacaatgaagaaaaagttgtagaattaaaaccggatattattttatccgtttatccagatgcaaaagcaactattttaaaacgcgctgcatggaaagaccttccagctgttaaaaatgaacagatttttgaaatggatgcgaataaattaagtcgtccaggtccaagattattagaaggtgcagcagatattcaagcagtttttgaaaactaattctttgataatgacagatgaagctttacaaaaaacgacttttaaggtaatttaacatagggtggattttttgctaaagcttattagtaaagtgattcacctaataaagaaagcaatttacacttagaagatcatgcataaacagcaagaatacggcaacttagacgacaaataatacaaacaaggtgtacttggttttaagtggaggagttgcctataagtaaatagtgagctgaatctggtttttaaaaccatattatttttcgggaagaagtgtttttgtgaaacaagttatggaagttattaaagaacaaattaaaaatttaccaatgatatttcgcattgcgcgctatgaagataaggctacatatcaaagtcattatctagggctagcttggcagattttaaacccattaatccaaattgctatttattatttcgtgtttggattcggtatgaatgcaaaatctggttctgatgcaagttatattgaatggatgctggctgggattattccttggttctttattagtgcggttattttacaaggtgcgaatagtatttataataaaataggtatggtttcaaaaatgaatttcccaatgagtattttaccgaatataacgattgtttctaatttaactagctactttacgatgatggtaattttgcttggattacttgccttaaatggaactcctgttacgatttattggggccaatatttgtattattttgtagcaatgattgcttttttatttagtgttacattatttaatgcaactattagtgttttagttagagattattatattatgttgcaatccgttatgcgtgtacttttctatgtaacggggattgtttggaatttagaaactatgttgccacaatggttagttcatttattaaaattaaatccaatatactatgtggttaatggttttagggaaacattcttaatgaatagaggtttttgggaatctccgtcctacacgatgtatttctggttgattacactaacactattatttgttggagcgacactgcacatgaaattccgtgaacgcttcgtggattatttataggaggttagacagatgggtaaaaatattaaaatagcatttaaacatgtgtcgaaagaatatgacctctatcaaaataaatcagacaagattaaaggcttgttcatgccgaaaagtcaaaaaatgcaatccttttgggctttacgagacgtttcttttgatattcatgatggtgaaacagttggtttaatcgggattaatggttccggtaagtcgactatttctagtattatgtcaggtgttatcccgccaacacaaggcgaagtcgttattaacggggaaacttcattaattgccattgcagtagggttaaaaggcccgttgacaggttatgagaacatccgcttaaaattacttatgcatggtatgaaaagttcccaaattaacaaactaatgcctagtattattgaatttgctgatattggcgatttcattaaccaaccaattaaaaactattcgagtggtatgcgttcacgtctaggttttgcaatttccgtgcatactaaccctgatattttggttattgatgaagctttatccgtaggggaccaaactttttatgaaaaatgtgttaataaaataaatgaatttaaagcacgtggaaaaactatcgtctttgtcagtcactcacttggacaagttaaaagtttgtgtgacagaatcatctggatgcatcacggcgaaatacgtgaaatgggcgaggcgaaagaagttgctcaaaaatatgatgaatttgtaaaatggtttaacaaacaaccaaatgactacaagaaaaaatatcaaaaagaacacaaagaacatcaaaaagctccacagaaaaaggtttatcctaatccaaatgctaacaagtatcgattaactctgtttgataaatttcttttaacagctttaattgttttaaccatattatttggaactttagtagcaactggtaaatctttcaaaggtttaattagcgaaacctcaactaaccaagtcgagcaaattgcatatgtagacaacaatgaaataacgatacgctaaaaagaaaaacatctctctattggagggatgtttttttatgaaaaagtaagctgaatttgtctaaaattttaacaaaaatatatttaaaactactttcttttattttgtaatgtatctgtaacttacgatggcttaaagtttggtaaaatataggacagtaaacaaattaaggagtggttggagaataatgataaataaaaagtggatgaaaattgtaatgattccaatgctagttgtcccaatgtacggtttgacaactgtcagtggacaattacagaattcattaactggagaaaattcctttgttaaagacgctcaagctgcaacaacagcatcgcaacaagcgtttatagacaaaatagcacctgctgcccaggcatctcaagaaaaatatcatctgttgtctagtataactttagctcaagcaattttagaatccggttgggggaaaagtggacttgctacacaaggatataatttatttggtattaaaggaaagtacaatggacaatcagttatcatgtcaacctctgaatatgtgaatggtgagtggattaagattgatgctgagttccgtaaatatcctagttggaacgaatctgtaactgatcatacacttttattagtgaatggaacttcttggaataaaaacttatacaaaaaagtagttgatgcaacagactataaagtagctgctaatgagctacaaaaagctggatatgcaacatctccaacttatgctgctagtttaatccgagtaattgaaacttatgatttagcaaaatatgatgttttatacgacaaaattcttactcaaaaatccacttccggtaaagcgactgtaacaagtccaacagggaatggtgtttggactctaccttataaagttaaaggtgtacaatctgttagtccagctagcacatacgctaacaaagatattgatttagtatctgttgctacaactaaaagaggtacgtactatcaatttaaatataatggtaaagtaattggttgggtagatggaaaagcactgaccatatacgatagcgtcaattatgataaagtaaacgttggacgagctaagattacgagcgcacctggcaatggtatttggtctaaaccatacaatgtatatggacgagaatttgtaaccaatgcaactacttatgcccaacaagaaataaaactcttacgtgaagcgcaaaccgcaaaaggaacttattaccagtttagtattaacaataaaacaattggttggattgataaacgtgctttgactatctatccatatgattctgttatttctagcaaagctgttaaccttgatggacaaattactaacccaacaggaaacggtatttggacaaaagcatataaattagaaggcacaacttctgtcgcccaggctactcaatatgctaaccaagatgttaaaattagtgaagttgttgaaactcaacatggtacttattacaatattagtatcggcggaagagcaatcggttggttagataaaaatgcgattactctatatgaccaagctgagtacaataaagctgttacactagacggaactatcaaaaacgtacaaggtaatgctatttggacagaaccttatcggactgctggcacaaaattagtcgctcaagctgaaaaatatgccaacaaagatgttcaaattgtccgtgaggcgaaaacaccaagaggaacttactaccaatttaaatcaggtggaaatgtgattggctggttagatgtaaaagcttttgatatgtatgatgaaataacttcgaacaaagctgtaaatatggaagcagttattgaaaatgtcgagggaaatgctgtttggactgcaccttataagagtgtaggtgtaaaactgattggtccagcaagtaattataaagataaaactgtcaaaataactcgtgaagctcaaacaagtagaggaacatattatgaatttagctctaatggtaaaactgtaggctggttagataagaaagcatttaaaacttatagtactatagaatatgatgaatcttatgtacgtgatgcagttgtaacgaatgttagtggtcatactgtttggacattgccatatcaagtttatggtgtgaaatcagttgggtcagcatcaaactacaacaataaacaagctaaaattacaagacgtgctaaaacagatcgaggcatttattaccaattcagcattgatggtaaaaatgtaggttggttggatgaaagagcttttgatgtctatgatacggtagaatacaataatgtaattaataaaactgcattattgagcaacccaacaggaaacggtatatggtcagcaccttatagagttatcggtgttaagaatgtaggacaagctacctcatatgctaataaaaccgtgcaattagttcgagaagcgaagacaactcgagcaacttactctcaaatgagcgtagatggtaaactaattggttggattgaccaaagagcatttacgaatattagataattgaacgttaaataaaaaaacagagtgattttaatcactctgtttttttcgcttacgatttagttatataaataagctctttcaaaaagtctttgtaataagctgattcaaaatgggaaaacgaatgaccaaatggatagttgaaatcaccaatatatgatttctttgaaaaatcgatgacttttgcttcaggcagtttcgacaagaagtagttgtttattctatcccagaagtaattatttttctcaattgccattttatttttataaactactacttttccattttcatcgtaatatgaggttgtaaagccacctaagtttaaaatcactcgatcagcagggaatgtttctgttaattttgcaataaattgatcagcataacctttccactcattaaagaatgcttcattatcaatatgatctagaattctttcataaggaaggtcattaagtaattgactatcttctataatatatgataaagtgattgccgttttgttatttaaccaaatgactggacgaataacatcaggataaagatcaataaggaaataatcagaattagactcttttaggttaacgaaaaagtctttcttccaatcttcttccacgattgttttctctgctggtttcatatcattgtacttgtccaaattaaaactctcagcaggttcagtcattacactaataatagaagagtgaaactgcgtaaagctacattcgaaaaatgctttataatcaggattgaaaaaaggagatgagttaaaagcattgcgactaaaacaagtgcccataacagcaattttagttatatcttctttaatttttggcgcgggagccgttaagcatgacaaattattgaaatcatttttagttaattgtgctaggaatttcttgttggcaatattaaaaaacttagtattactaaggtcaattgtatttggaactagaataggtaaatcaggcatatctttggaacggaggaaaaaatcccatgtcgcatatgctttgttattagggccagctaagaattcacttttactaatgcgtacagagtgtttccctattcctttttttagtggccaagcttgttccatatgatattcaaatacatctgcttttttatctagtcgttttgctacaacttgtccttcatggaagtttccttctaatttaaattgtaaagttatatcgctacctgattcttttagttgactgacacttactaatccttgaatattctttttgaaatagaaggataatctgcttgagccagtgacataagagcgcagtgtagcaaagtgcggggaagccaattccacttctttcggaatggatggttttctttcggcgtcaatagataggaatgtagttaatccttgctctacttctttaggcgatatttcaatcatggcatctaaaatatttgtattatctactaagaagttagttgctaagtctttaacaggaatcgaaaagctaacgactttatctgtaaccagtcctaagtcaaatgattgttcttgctcatggaataaataaaagctaggtgttggtctacgttttagtagtagctttgctttaaacggtccatctggaagcgaagaattaattttgatagtacctgtcatcaatttttcgcttaatgaaaaactttctaatgaagctaaaagttccactggtctactaataagcgttaatacaccttctggaaaatcaaaatgatattggtaaagtgaattagatggttggaaaggttgattaataataggtccatctgacatcaaatgattatatggataatcgccattcactttaaatttccaagcagtctcattatttgggagagaatactcagcaagttcgtcaatcgaaataactgcagtgaatgaatttttttcttgagtaaaaggaatgtttaacttttgttcagggtgtttatattctcggatttcgttgtaatatgcttgaatgctactgatttttctttctgaaaaaccatgtatcttccatgttttagattctattaactcaatttcctttatataaaatttcatcgctagctccttaaaatttaattatgatactttttattttatcatatttcaataaaattccctacaaaattgataaaagttgaaagttttcagaataattgcagataatgaaaagcctttttttattaagtgaagctaaacactgataaattttgcacagatggttgataaactgctgtaaataagatatgctgtagatactgaattttatacaatagcatatcagtaaggggttgtagtgagagtggaaaaaccatttttaaccgttgtggtgccttgttataatgaagaagaggtattaagcgagagcgtaacacaactaacaaatattataaaaaaattagtgatgaatgattctattagtaacaatagtcaaatcatgtttgttgatgatggaagtaaggatcgaacttgggaacttataaagcaatattctgaatcacatgagcatgtatcacggctaaagttgagtcgtaattatgggcatcaaggtgcattattagcacgattaacagctgcacatgaacattcagactgtgttgaccctatcgacgctgatttacaagatgacgtaaatgcaattattgaatttatggaaaaatatcatgaaggtttcgatgtggtttatggtgtgagagataaacgcgatacagatacttttttcaaaagaaattctgctctaactttttataagattatgagtaagttaggtgttaatatggttcctaatcatgaggactatagattacttagcaaacgcgcattaacagaatttttacgctataaagaagaaaatatgtttattagaggtattgtaccattacttggatttaaatctaccaaagtttattataatagaaatgaacgctttgctggagaatcgaaatatccattaaagaaaatgttattatttgctgttgatggtattacttcttttagtgtggcgccaattcgcttattgctagtgattggttctattactttcttagtaggtgtagttttaggtatttatgcaattgttcaaaaaataatcgggggcgtagttcctggttggacctctttaattgtttctatttggttactcggcggggtacaattaattggtatgggcgttttgggcgaatatattggaaaaattttccgacaagtaaaagaacgtcctcgttttacaattgaagataatgtctttgaaatgaaatgcgagaaaaataaaaacaacgagagtttggtgtaagtaaagtgaagaataagttagtttacacttttaatgctttatttatcctcctatttggctacttgctttgcctaagcattttcaaaccacaaacttttacttttgaacatccttttgtcttaatagttcttagcgctgctgcgttattagttcttattgggattttccagtttagtactagattaaataaaaaaggagatggttttttaaccatctctttagtgattttgatattagcagtccaagtatatctattagtttcgctgcaaatgaattcatatgcggatgcctatgtaattaagggcgagtctttaaaaatgctggcaaatggaggacatgctactggtcaagaatactttatgatgtatccaaataatatctttataaccattatacgatactggttatatgcttttggaggaatgcttggagtttccaatgtattcttacttgaaagtgtatttctatttttatgtatgaatattactatttttgtattgttttggattattcgtaaagaaaatggtagcaaatatgcgaatatttatcttatcattatactattttgtgttccattactaggttacatttggtatttttatactgatactctagtcttgccttttgcttcccttattactttattttattatttatatacgaaaaataataaatggtggtattttattattatcgggttattgtttgccgttgggtatcatattaagccaaatatcataattttattgccagcgatgattattcatcaatgtttcataagaaattggcgtaaggtcttgctaaatacaatggtgttagcgattttctttgtaagtttaaatgctgttttcacgccattatctaatcattatggatttaagaaaaatttggctatagaatttccgcaaacgcactgggtgatgatggggcttggtgagccagcaggtcgttacaatagtgaagacgtggcttttacaaatcaatacaagacaaaagaagagaaacaagaagcgaatatagagaaaataaaagaacgactaaaagagcatgggcccattggacttgcaaaattatataataataaaatgataaacacatggacagatggtacacgcgcttatacgtggtacacgaattctgcattagattatccagcttcatttgattatttctttggagataagcgcttttttacagagttcgctgcccaaatgttccatatcattaatttactgttaatatgtttaggtgcgttacgtttttataaaaaaagagaacttgatatatctttctttataaatatcaccttagttggtgtctggttatttcatttaatctgggaagcaaatcagcgttatatattatttgtaactccattaatgattgtgtcttctatttatggatttaagtttattatagaaagtttatttacagaaaaagtagttttaaaagataagttaaaaaaatctttcttaattacgagtttccttatctttttgttaagtagtgtttttcttgcgtttggtggaaaaatgattgcgactgataaacaagatattaatcattatattgttaagcaaagttatgctcatatagcgttaccagttaataataaacaaactatttcacaagaatttacatctgatagtccttttaactcaattgacatatatgtgatgaaaaaaccggaagctagtagttcatatcgaataaaagttatcaatgaaactaatgacactataatttataatcaagagaaaaaaggtacagattttccaaatgaggcttaccttaaattgagcgttaacgataatcctaaaggaaataataggtatcgcatcgtaatctcagaagtagaaaatagccatccaaatcaacctttagttttaggaacctattttgataatgatttagacctttacccatatggcgatttgtacgttaatgatgacaaaaaagaataccaagacataggcttttttgttacaaatacaacctcaaaaccattaatgccaaaatatgcatatattatgtttgatttatgtatcatgcttgtttttgcaggaacgtattatgtttttaaaagaagacgttaatactatccaatattaggttatgtatataaacatggagaacatctaattaacatgtgacatatattttgaattagggagagtctataaatgagtaaagattcaaataaaataattgaacaaagccgagaaataggaataagcataattatgccactttataatgtggaagaagtaatacttgaaactctcgaaagtattcatgagcaaacttttgatagttatgaagtgttattaattgacgatggttcaacagataaaacaatagaaattgtaaccgaatatataaaagataagccacggtttaaattatacactcaaccaaacggaggaccagcttctgcaaggaaccatggtttacgacttgcaataggtatgtatatttgttttgttgatagtgatgatatactgcctaactattccttacaactaatgtatgatggtgctatttctacaggggcaaaactaattactggagcaaccaaacgttttaattcagagggcgaatggtttataccaatgcatattcaatataatattgctaaaccaggaatgaaaaccttattaaaaaatcctgagttgttttattcaattggaccatgtgcgaaattgtatcaccattcactaattgatggcgtatttttcccagagaatattcgctacggggaagatcaaccgtttgttttacatgctttattgcaagccaaagatatttatacagtagaaaaagttgtttattattatcgtttacgcgatggtgaatcgcaatcattaacgcaatcagtagataaagatccaattcgtattttaaagtctgttttccagatttttgactatggtgaagaagaactgaaaaaaaacaacactgattacgaggttgctttaaaatattatcaacgcgtttctagtgtggagctttggggagcgttacgagcagcaatagaaagcaaaaaaagtgagaaccaaaaaattgcttttacaatgactttagactggttgaaaacaaaatcagatgactttttaaatattatcccttcatttagatacttcttgttatttagtagtattgagcgtgtacgttatataacgaaagacaataaagaaaactatcgtaatttaattggttatttatggagccgacaaggggaagaagctaaaattgcatttagaaaaacttacccaattcccatgaaggctgctctacaaataattgaaaataataattggcgtgatgctcgtaaaatttcatttaaatttattgttcgacgcaagtttaaagctccaattttaattcgtaaaataagtagagggattatttttagaattgctacattaatgccacggaagaagaaccaagtgatattagctacagaacgtagcaccactttggaaggtaatttattagcaatttatgattatatgttttataacaatatgcctcaaaaagtatatgtgtttttacgaaaaaatcggaattggtttgaaatgtttcagctatattatacgctggggcgaacgaaaacaattgttttagatgattattacaataaaatttacggtttgaaatttaacaaaaatacacatgttgtgcagtcatggcatgcaacaggcgcatttaagaaatttggatttagtgcgctggaaggtacagatgcaaatacagaagaatttgaaactcgtgcgcattccccttatactgatgtgcttgtaagctcagaaggaattattccggaatatatggaagcttttagaaaacaagctaatcaaattaaaccaattggtgtacctcgaactgatgtgttttttgatgatgaatatgtgaattatacaaaagaaaaatatatgaaaatgtatccgcaattgcgcgataaaaaaatattgttatatgcacctactttccgtggtggaccgaatgagcgttttaattatagtgtagttcttgatattgcagcgttgaaaaaagaacttggcgatactcatatcttaattttgaaattccatccggttattaaaaacgtttcattcaatgtagaagaagatgatccgtttattttgaatttaacgctaaataatgatattaatgacttaatgttattcagtgatgcgcttattactgattattcttctgtcattttcgaatttagtttgatgaacaaaccgatttatttctttgcctacgatattgatgattatcttgatgaacgtggtttctactttgattataaagcgaccattcctggtgaagtgtttagagatacaccatcgcttattgaagcggttaaaagtggtctatataattacgacgagttggaaatctttaaaaagaaatttgttggtagtttggatgggaattcaacgaaacgttttgttgagacttatattggaaaagcaaatgagaaagtgaaggatatatgagtatagtaatagaacaactcgttgtaaaggaatctagtggtaaatggggaagtcctcatcttttagaacaaataaaaaataatatttctatgtcaaacgctgattttttaattatttgttcaaaacctgaagaaaacatcctttcacaaattcaagactatattgctcgcttccccgaaaacatggttggagcagatattcatttatttagtcaaaatcctgtatttttacaacatcttcgtaaattaccaaatgaagatagttacgaaatgactgacacacttcaattcttagttgaattaacaccaaagccaactagtacgtatttagaacgtgatcctcatatgctcctagaagaaatgggacaataccaattatataatgtatcctttttgaaaaattattttgaggagaggataaacgaaacaactttgattgatatttttcatcaggcaaaaatggtttggaagcacagtgttttagaagaaacaaaaataaacgaggctaaaaatcaagttgcaaataattatagaataacagatatggttgattgctgggaattttatcgaaagttagaaaataactacacaagtttaagactggaacttcttgattttgataagaacttgtttaattatttgattcgtactaaattaggtccaactttccaaaagcaattaatgtctggaaatcttaccgaggcaaccgaggcaattgaggcccttactgtttttctagaagataatgataagcatcttgtaagtgaacttgtttccttaggatatttctatctacaagtaccagtgaaagaatatcctgagtggggtaataataaagcgtttagtaatgcgtatttaaaattcttaaatgtactttttgaaaaaatgcattatcaaacaaagcaatataatttaagattttatcgacgcgctacaaacgctgtctataaagcagttggtttaaattctttaaaaccgattgctaagtgttacaaactttatttttaagttgatgcaaaaagagagctgacaaatgaaaaaatgtcagctctctttttttattttttatcgtttttatgcacttgttgatataaatcatcaattaatgctttgacatcctctttgatttctggatgttttagcgcgaattgcattgtagtttgaataaaaccgaatttatcgccaacgtcaaaacgttcgccttcaaagtcataagcaaatacgcgttgtacttcatttaggctattgattgcgtctgttaattggatttcgccgcctgcaccaggcttttgggtttctaagaagtcaaaaatttgtggtgttagtaggtaacgaccgagaattgctaaatcggatggtgctttggcaggatctggtttctcaacaaaaccttttacattgtataaattcttatcgtattcattaattggatcaataataccgtaacgatatgtttcctcatgtggcacagtttgtacgccaattacagaactatgtgttttttcgtattgattcatcaattgtttggaacaagggattttggattctacaatatcatcacctaacataacgataaatggctcattcccaacaaaaccttttgcttgaaggatggcatcaccaagtccttttggttttgcttgacggataaagtgcaagttaatgttagttgtttgctctacaagatgtaataactctaatttgtttttttcacgcaaattattctcaagttcaggcacggaatcgaaatggtcttcgatagcgcgttttcctttaccagttacgattaagatatcctctatacccgaggcaacagcctcttccactatgtattgaatagttggtttatccacgataggtaaaatttctttaggcattgctttagttgctggtagaaagcgtgttcctaatccagcagctgggattacagctttttttactctcatatttaataatctccttctaatctataattcaagtagactcacctaattatacgctaagcttctttgaatttacaagtttttatcggcaaaggagataaatttcaaaagttttgttaaaatgatattgaaaatagatattcgcttagatagaagctagtttgttagacaagttttgtgttataatataacaggttaatataaaaaacagttaaaggagattagaggatgatatacgctcaaattttagctggaggaaaaggtacgcgaatgggtaacgttagcatgccgaaacaatttctacctctaaatggtaaaccaatcattgttcatacagtagaaaaatttattttaaatacacgatttgataaaattcttatttcttcacctaaagaatggatgaatcatgctgaagataatattaaaaaatatatttctgatgatcgaattgtcgtaattgaaggcggggaagaccgtaatgaaacaattatgaatggaattcgttatgtcgaaaaaacatttggtttaaacgatgaagatattatcgtaacacatgatgctgtgcgcccatttttaacgcaccgaattattgaagaaaacattgatgctgcgattgaaacaggcgctgtagatactgttattgaagcacttgatacaatcgttgaatcaagtaatcatgaatttattacagatattcctgtcagagatcaaatgtatcaagggcaaacaccacaaagtttcaatatgaaaaaagtatataatcattatcaaaacttaagcgcagagaaaaaacaaattttaacagacgcatgtaaaatttgtttgcttgctggcgatcaggtgaagcttgttaaaggcgagatattcaatataaaaattacaactccatatgatttgaaagtagcgaatgcgattattcaggagcggatagccaatgattaatcaagtatatagacttgtgtcagagagacagtttgaagttgccaatgtggacgaatctttagctggtgatgtggtcgttgttagacctactcatttatctatttgtgcggcagaccaacgctactatacagggtctagaggaaaagaaatgctttctaaaaaacttccaatggcgcttattcatgaaggcgttggcgaagtcgtttatgacgcaacaaaagagtttaaacctggaacaaaagttgtcatgattccgaacacaccatttgagaatgatccagtcattgctgagaactatttgcgttcgagtaaatttcgttctagtggttatgatggtttaatgcaagattatgtttttatgcgtcgtgaccgggttgttgcgttacctgatgacatcaatatgaaagtagcggcattttctgagcttatttctgttgctgtacatgcgattttacgttttgaaggaaaaagtaacgctaaccgtgatagctttggcgtatggggtgatggaaacttaggctttatcacttccttattattaaaaaattggtatccagaaagtaaagtttacatttttggaaaaacaccatataaattagacttcttttcttttgtagatggcgcatattcgattgatgatgtgccagctgatttagtcattgatcaagcttttgaatgtgctggaggaatgggtagtcagtatgcagtcagtcagattattgatgtaattaaacctgaaggaactatttcgttactaggagtttctgagtatccgattgaatttaactcacgtatggtactcgaaaaaggacttacagtttacggaagtagtcgtagcggccgggttgactttgaaaaaacagtagaatttctatccacgaacaaacgcggggtagaatatttacaaaacctagttggtgaagtgcatacggtgcattcaattcaagatgtaattgaagcctttgaagctgatttacgtagtccatggggcaaaagcgttatggagtggaagatataataaaacatgggggagtttaggctatacgcttatgaatttgtttgctaaagtatatttaggaagcaaggcagtcgagaggaaattcggcgttcatatgcgagaccttaacttcccagttttatatggagagggaaaaaagaatgaaatttgcgattataattcctttttacaatgcggaaaaaaggttggctttatcgatagatagtataattaagcagacttacagctttttgaagcatgtggaagttctgcttattaatgatgggagcacggaccgtagtagtgcgattgctcatagctatgccgaaaaatatccgagtaatattcgcgtttttgatgtcccgaatggtggtccttctaaggcgagaaatattggaatacataatgtacaagaagacactgactttgtaggatttttagatgcagatgatctgttatcgccaaatatgctttttagtatggtgaacttcctagaaaaatcagctgttaatatgcttgtcccagctttttattatttagatgattttggaaaaaaacaaaaaatttctccacataaattaaatgaccgtttcacaaatggaaatcgagttgtagcgattgaaaaagaaccgcaagcaattcatttttatattggcggtactttttttcgtttcgaaagtttgaagcaatttgtctttgatgaaacgcttaactttgcggaagatcagcttttaattacgaaatttttgcttgaaaatagaagttacggattgattgccgatgctggttactattactatcgtgatttaaagcaaaaaggttctttagtaagttcagcttggaagcaaccggaaagatatacgccatttttacaaaaggtgtaccaaacttatttaacaaactctaaagaaatttttggcgaagtgattccatatgtgcagtatttaatcgcgtaccatgccaagttgtttttttataaagaaaacatttattttaaagaagtattaaatgagcaggaacaagaaatctttgtgcgtgaattacagaaaatattacaagaagttggtccggagatgattgtagctctggatacaccgcttgttgtaaaagaaatgatgctctctattttgcgaaacggctggccagtacagtttaagacggcagaattagaagaagttccgcttgtcacagtaaaagaaaattaccgtcctggaaaagctgtaacagtggaactcttactagaagaggcgcgggaaactttatcagatggcggagaattctttgctagtacatctgtaggtacggcgcaaacaaaagtggtaaaacgaaaaacagcccaaacaatttgggatattgttgttcgtgaagagggtacacttgaaaaagtggtgacacggttaaaaccatatcaattgaaagtccaagtgttttaccaagacaaaaatcaaaaaataacaatgacagatttaaatgtcatcaagagtgtgttaggaaaattaaaaagaaataaagctttaaagcgaaagtttaaacaggggggagtatcctgatgaagtttgtacaaaaaatatattatttcctatttaagctagtaggatttttacctcgaagaaaagaattagtgatgtttgaaagcttttctgggaagcaatatagttgtaatccacgtgctatttttgaatatatggaagagcataatccagaatacgagttgttgtggagtgtaaatccgaagtatgttgatttgtttgaagcgcacggggtaccgtatgttaagcgtttttctgttaattggttgtttaaaatgggcttagctaaattttggatttctaatagtagactgccgcttgagctaccaaaaccgaaaaaaactatttatgtacaaacgtggcacggaacgcctttgaaaaaactaggtgtcgacatcgatgaagtacatatgcctggccaaacaaccgaacaatacaaggctgattttgtgaaagaggcgcagaagtgggattatttaatttcacctaatgcgtattctagtacgattttcagacgtgcatttggtttcactggggaaatgattgagtctggctatccgagaaatgatattttatttagtgcggataaagagttgaaaatcgctaatatcaaaatggccttaaatattccagaagataagaaagttattttatatgcgccaacttggcgtgataatgatttttacgaaatcggaaaatataagtttgatttaaagattgatattgccaaaatgcaagaaaaatttggcgatgaagtcgttctgttagttcggatgcattatctcgtagcagaacattttgatttcacgcagtatggcgattttgtacgagatgcttcaaaacacgaagatattagagatttgtatttagtgagcgatttattaattaccgattattcttccgtattttttgattatgctaatttaaaaagaccaatgttgttctatacgtatgatttggctgaatatcgcgatacacttagaggcttttactttgattttgaacaaaatgccccaggaccacttgttgaaatgaatgatgctttaatggcagaaatagaaatcatgcttgaaaatcctcctcaaattgcagaaagctttttagaacaattctgtacttgggaagacgggcacgcagcagagaaaacagtgaaaaaagtttttgctgaaaaataggcggtgggaatattgaaaaaaatagcaatttatatgtatatgcttgctgttaaaataattggattcttggcgagccttttaccagttcagcaaaaagttgtttttcttataagttttgaagaaaatcccactgcgattattaagcaaatgaaactgtccaatgtcaccccgaaaacaattgtcttctatgatcctagagtagacgtatcaaagttatctttagactttataaaagtaaaaccgaagacactgcaacaatttattccattaatgtttcacctcaatacggcaaaagtagttgtcacagataattattttgtggaattagctggcttgaaattacgaaatggcgtaaattgtatccaagtttggcacgcaaacggtgcgcttaagaaatttggctgggaagataaagcagcgcaaaaaaggtcagatcgggataagaaaagatttcaagaagtatataaacgttttacaaaagtacttgttggttctgatgaaatggcatcaattttcaaaaaatcatttttactagatgaatcgaacatgttgaaacttggtgttccacggactgattatttcttcaaagaagcgcagttacaagaaaattatcagtggtcatacgagcatttacatttaacaaacagaataaaattactatatgcgccgacttttcgggataatgagttgggaatggcaaagttacatttagatattgcggaaatgaaacaagccttaggaaatgaatatcaattgattttaaaattacatccttctattagtaatgatttagagaaactagatgatgattttgtcatttatgtggataaagaaacgccgattgaaacgttactaccagttgtggatattttgattactgattattcttccattccgtttgagtttgctttacttcaaaaaccaatgattttctttacgtatgatttaacggaatataataatgctagaggactttcagatggctttttagaaaccattcccggtccgcatgtttttacaacgactgagctaattgaagtaatacaaaataatacgtttgatttggaaaaagttcggttatttgctgagaaatggaataaatattcggatggattttcaagtgagcgttttgtatcctttttaaaagaacagcttgaaaagtagcactgctaacaagtagagaaatttttgttttcttgatatactactaaagaaagtaggtgggctgatgaagaaagtaattacatatggcacatttgatttaattcactgggggcatattcgtttattagaacgagcaaaagctttaggtgattaccttattgtagccatttcaaccgatgaatttaatcgaatcaaacacaaagaagcataccataactttgaacatcgcaaattaattttagaggcaatcagatatgtcgatgaagtgattccagaaagtaactgggaacaaaaattagaagatgttaaaaatcgtgatattgatatttttgtgatgggtgatgattgggaaggcgaatttgacttcttaaaaccttattgtgaagttgtttatttaccacggacagacggtatttctacttccaagattaaagatgatttaaaatagtcgtagcacaaaacaggcagaccggtaatgttcaattattaggtggtaggcttgttttgtgctattattatgtataaataataacgcaaagaactagttatgataggagcagaagaaatgacaaatttatttcaagatgatagtctaacgctgcatacagacttatatcaactaaatatgatgaaagcgtattttgacgatggacttcatgagcgtagatcggtatttgaagtgtttttccgagacatgccatttgattcaggttttgttgtatttgctggactggaacgaattattaattatatgcaaaatttacgttttacagaaacggatattgcttatttacatgatgaacttgggtttgacggacctttcctcgaatatctacgtaattttaaatttaaaggaaatattcttgctgcaaaagaaggggaattcgtgtttaaaaccgagccaatccttcaagtagaagcaagcttggcagaagcacaattaatcgaaacagctttgcttaatattgtgaatttccaaacgctaatcgctacaaaagctgcgcgaattcgttctgttattgacgacgaaacgtttgctgaattcggaacaagacgcgcgcaagaaatggatgcagctatttggggcacacgagcggcttacatcggcggttgtgattccacaagtaatgttcgagctggaaagattttcggtattcctgtgtctggtacgatggcacatgcgatggttcaagcctaccgcgacgaactagaagcatttagaagttacgcaaaaacgcattttgattcgattttcttagtagatacatacgatacgctaaaatccggcgtaccaaatgcgattaaagtagcgaaagaaatgggcgataaaatcaactttatcggcatccgcctagatagtggcgatatggctttcctatctaaaaaagcgcgccaaatgttggatgaggctggttttacagaagcgaaaatttttgcttcaagtgacttagacgaacatactattttatccttaaaagcgcaaaaagcgaaaattgattcttggggtgtgggtacgaaacttatcacggcctacgatcaaccagcgctgggagcagtttacaaaatggcggcgattgctgatgaaaatgatattttacaagattcgattaaactttctagtaacaccgaaaaagtttcaacacctggtaagaagaaagtttaccggattattacgaatgaagatggtttaaaagcagaaggtgattatattgctttagcggatgaatcacttgaaaatgtcgacaaactaacgatgttccacccagttcatacgtatattatgaagaccgtcgagaatttcactgctcgcgagttacttgtaccgatttttaaagatggggaacttgtttatgacatgccgactttagatgaaattaaagcatataaagaagaaaacttggcgctgctttgggatgagtataaacgaactgttcgtccagagcaatacccagttgatttaagtgtaaaatgttggaaaaacaagatgcgtaatatcgaaaaggtacgtaaaagtgtccaacttcattcaccagttgaactagatatgccgttttaggaggaattataatggaaatcagagaaagaattttagcagatatgcaagtggcagaaacaattgatgcacacgaagaaatccggaaaagtgtcgagtttttaaaagcatatttaaaaaagaatacgttcttaaaaagctttgttctggggatttctgggggacaagattcgactttaactggaaaactagcacagatggcgataagcgaattacgagcggaaacaggtgatgatgagtaccaattcttcgctgtgagcttgccatacggaacacaactagatgaatcggaccgtcaagatgcacttgattttatggcaccagataatcgcttaaccgtgaatattaaagcttcggttgatgcgagtgttgcggcgcttgcggaagcgggagttgaactatctgatttcgctaaaggtaatgaaaaagcgcgcgaacggatgaaagttcaatacgcgattgcagcgatgcacaaaggcgtcgttgttggaaccgatcactccgcggaagcagttactggcttttatacgaaatacggcgacgggggaacggatattaatccactgttccgcttgaataaaagacaaggcaaggcgcttcttaaagagcttggctgcccagaacatttatatttgaaaaaaccgactgcggatttagaagataataagccagcacttcctgatgaagtcgcgcttggtgtaacttatgaccaaattgacgattacttagaaggcaaagaagttccagcagatgctgcggcaaaaattgagaattggtttattaaaaccgaacataaacgccatatggcaattactatatttgacgatttctggaaataggaggctgtttaaatgaaagttggttatggtttattaactgcattttatacacatccaggagaaaaagataatttagttaaaattttgcttgaagcggctgaaggattggatgattacaacacgtgtattcagtatattgtcagcgaatctgaaaccgagccagacacggtgtttgtttctgaaatttgggttgacaaagggcaccataaagcatctcttgataacccagctgtacaagaaacaattaaacgcgccaaacctttaataaaagatataaaacaaatacaagaattagacatactcggtggaaaaggcatatagatgataaaacatgaatgattctaggactctcctggaatcatttttttggagggatgacaaatgcaaacgttgatgattgtttgtgctggcggtgcgacgtcaagcttaatggcacaaaatgtcgtgaaaagcgcgacatcagaaggaatggacgctgttttactatttccagatgacgtaaaatacaaagatagttttctcgagaaatatagcgagcgggatctgattgtcgtgatgggtccagtcggcgcaattacagccgggaaattccgtgattacaaagagcaagtcgatgccgttttagtagcaccacaagtgaaatatatgtacaaaacagtggaggaagtattaggcgaactaaatattccttgcgctaatattgattcactcgatttcggtcggatgcgcggagataagattctcacgcaaggtctagccttaatggatgcgaaaaattccaaataaggtgttgcaactttagaggggaaacgttaaaatgaaagaagatgaaaaggacaagtgatttgtccttttcttatattattgtgaagtaaccgcgattttgcggtttcattttatagataagggtggttttgtttaaaattatgaaagactttaccgagcaagagaaaattatcgttctagattttggtagtcagtacaatcaactaattacgcgccgcattcgtgaattcggtgtgtatagtgaattacatccgcatactattacagttgaagaaatgaaagcactaaatccaacggggattattttttcaggaggacctaacagtgtgtatgacgaagatgccttccgcgcagacgaaagaatctttgacatgggaattccgattttaggaatttgttacggcatgcaattaatgacaacgcacttcggtggcaaagtagaacgtgcgaaagaccgcgaatacgggaaagcggacattcacgttgaaaacccaagccgtttatttgctggactaccaaccgatcaagttgtttggatgagtcatggcgatttagttgtcgaggaaccagctggatttgaagtaacagctactagtaagtcttgcccaattgcaggtattgcggacgaagatcgtttgctttacggcgtgcaattccacccagaagtacgtcactcagcttacggcaacgaattactgaagaattttgcattaaacatttgtggctgtaaaggcgactggacaatggaaaactttagtgaagtagaaatcgctaaaatccaagaaatcgtaggcgacaaaaaagtcttgcttgcactttctggcggcgtagattcctctgttgttggtgtgttaattcataaagcaattggcgaccaattaacatgtattttcgttgaccacggacttcttcgcaaaggggaagctgaccaagtaatggcaacattacaaggcgaattcaacatgaacatcatcaaagtagatgcgaaaaaacgcttcatggacaaacttgctggcgtttccgatccagaacaaaaacgtaaaatcatcggtaacgaattcatttacgtattcgacgacgaagccaacaaactagacggcgtagaattccttgcacaaggaacactttacacagacatcatcgaaagtggtacagcaactgcccaaacaatcaagtctcaccacaacgttggcggcttaccagaagatatgcaatttaaactaatcgaaccattaaatacacttttcaaagatgaagttcgcgcactaggaacagaacttggcatgcctgacgcaatcgtttggcgccaaccattcccaggcccaggcttaggaatccgcgttcttggcgaaattacggaagagaaattagagattgttcgcgattctgattacatcttgcgcgaagaaatcaaaaacgcaggcctagaacgcgaaatctggcaatactttactgctcttccaaatatccgtagcgttggtgttatgggtgatggtagaacgtatgaccatactgtggttgttcgtgcagtgacgagtattgatggtatgacagccgattgggcacgtattccgtgggatgtactggagaaaatttcggtacggattgtgaatgaagtggatcatgtgaatcgtgttgtttatgatattacgagtaagccaccagctacggttgagtgggaataattaaagaaaccgtgaaactattgatatcagagggtttcacggttattttttgttttatgcaaccattttgcaaccaatagttcaaaaattgaccagttatttaattctattgaatgattataataattaagtaggaggtaatctatgtgagaaaaaaattaattgaacagattttaatatcaccttcacctttttctattttcgaagaaaactataatgaattgagaaatactagatttttattatttgataacaactcaaataattttggaaaaaaatttcaaaaaatggaatttaataactttacaatttctccattagcagagtatcacaatacaatggttcttgatcaatatactgtaaaagaatcaagggaattagaagtagttcattgtgtagattttgattcaaacattattagtaacttaagaaaactttttttccatactaattacagtaacgaatacttaataaaattacttttatatgtgaaaaaagaacgtatacagcctaattgttcgccctatttaatagaatgtgccgcaaataattttaatttggataaacaagatatttatgaaagtttattatccttctcactattggaaaatacgaatattgaacaattgataactaaccatctaaataaagaaccctcatcaacagattatttagacacagatgaaagatggcgatctttaattgaactaaaaaaatatgcaactaaagaatatatcccaagatactattatatctattgtttattattgaagatgtattttcttaagttctcttctaaaaaatctgcaaaaaacaaactcattcaattattagatagtattaatacagaactatttagttattgggaaaatgaacttgtaatttgctacttatcattaaaagaagactctaaaactgattcgttttttggttctgtaaagcccaatacaaaagatatgttaataaaaatccaaggaatggcttgggatttatttcatttgcgatgtgctcatgaacatatggcagagcgtaataattattcaaaacgtatttttttacattcatttagctcagaggataaaggattaaactcaattattagattaaatccaataaaaagaattgcattcgatggtaaggatgtttatactcaccatagatataccatatttaatatgtgtcctgaagtagatgtatatacgattctaaatgaatacacacatcatagaaacaaaatgtgcaaagaaacaaattaccaagaactatccaaaaaattagagtttgaactcctacatctatcatcacgatagttcgcatagaaggtaaagctatcttctatgcaatttaattttctattaattaatctactttgaaatcgatactttctcctcatttttaagcttttcaattttttctctaacttacttacatctctaaaataactttcatttatgggcccctcttacgcagtttttatgaattccccatatgttactgaaaaaggtttaagatttattgattcaatgaagccgcttaggatgaacaaaaaaaatcaaatggaacaaaagagagtatttttagagcgagtagaaaataaagatgaggatttaaatatttcaaattatagggttgattcggatgattatttagagatagttaaattggctattgaagaggaattagttttaggcatatgtataaagtatgcttctaataagggaatagtaatacattctaatgctcatttgagttcaaaaggaattgaatatttagataatcctgatttagtggagacagaaagtaaagtaaacgttgctccttctcaagtaattaatatttatggtggagaccaaaggggcgctggttttggaatgaatgccactattaataataattttgataattctcttgaggaacttggtgcttttatttctagactttctgaaaatgagcaaaaagaagcgaatgaaatattagatgcaattaagaatggggatattaagccaggtatgctttctaggttctctactttccttgagagccatcctaatttaggcgcttatactggaaaagctattgtttgggcactaacaaaattataaaattaataatagtatgctaatattaattttgaaaaataaaatgggtagatttgaataatagtagtaaaattaatcattagtgcttaataacacaacattaaaaaagctaataaataaaaggtctcatatttaaattttgagatctttttttatagtttttatcgattcctaaaagaattttctaattgatatatccgtctaagtaaaatctcctattgttactaaatgacagctcgtgtaaatatcattataatagaaccatgatacaaacttcacatacagaaagggaaaacaaccatgacaaaaattcgtattaataaagaaaaaatgaataatcatgctacaaccctaggtgagagtgcgggaaagttagattactatcctttgaaaaatgaaaacatgagttatacgcaaactaattctatccacctttttcgggaatcattacttgaactacttgaaggcatcgaaaatttaggatctgttgcgcaagatgatgctactcgaatcaagcaaatgggggaagcttttgcaaaacaagataaatccatcagccagaagatgaatttggaggtgcgttaagtggataaacgtacccaagaattaggtgaaataaaaaaagagatggagcgagaagatgacgctctatacgctattaaaaataaaattagacatttagaggatgtggaagaagatattcatcaagctagacgtgaaatggatgacatcctttatcatatgaaagaagcttggcgaggagaacacgcagaggatactttttggcaaatagaagacgaggtaaatcattacaaccggaaaactgcttgcatgactaccgatattcaaaccgaactaaataatgagcaaaaaaagcatcaacaaaatctccacgcgctcgaaactaaacaacaggatatcacaaaggagatgcgtttatgactcgaatagatattgctgaagtaaatcatttttcacatgaattaaaaatagccaatcaacaggctaaaacacaaattacggcaatccaaaatgctatcattgcttatttacaagatgattcgctctccggagaagcaattagtgcgtctaaaggatattatgcagcgacttatttaccgctttgtgcttctatcaaacaagcactacatgtcagcgaggaatctttaaggaaatatattaccgactttcacagtcaagtagatagttctccaagtgcaaaaattgatgcagaaggtctgtatgaattagatcagaaaataaatcgtttagaaaataaattagaacacattcaattagaattaagttcgatgacagcagtttctaggcagggcgaaattaatgcgcttcaaacgcaaatatttgccaattataaaaaagaacaacttttagaaaaatttcttgattttgaacgtgctcatagtcatttttttcaagaattaagtgacttagctcgagcaatcaatcgtggtgtgcgtgatattcaggcgaacatttcttttaatagccaaactgggatgtacaaagtagataaattaaatgcttcaaactttgaacgacttgtggatttatacgcttctcaaaaagcaatagatgacaaagtaaaagctatggaagatattggaatgcttccttatattccagaaggaaatcgtgccggatatgttacaactaatggcaaactaaatacggaagcgacgttagatttagttaaccaacagatgatttattggcaaaatgaaaccggtatgcgcgagttgtttggcgttggagctttttatcgagtagtttatggtttggatgcagttactgctgaaaggattggtggcggacaaaggctagtggatggctcaacggtgtttttacaatatgttggagcttttggagtgagtggtttttatgctgagtttgggcaagtacgaaaacttgattatttgcctacctctggcataaagttaaaaacgagtccatgggagaccacgacggttttagggacttttaaagatgatacaaaatatgttcttgaagaattaggtaatatcaaatcaactgattttagtatgaaaaaaaatcgttttaacttattgaatactcctgatgacctatataagacaccgaatcaattttgggcagaatataatcaaccttggttagataaagtaattgcacgaaatgatgatgttattttatctacagaaccaattgaggataatttgtataggattaatagggaaactggattaaaagaattaactggttttggtaaagaatataattatttacttgaacatggttataaatatgattcaaaatcatctaaaatgattaaaaaataggagagtgatcaattggatttttataaagaagttgaaaaaatattcaaaggatatgagcaaaattatcaattgaagctaactaaaatagataataatgaagttgctttcatcggagaaaattatgctttaggtataggatggagcacggatggggtggatttacattatttcaaactagataattcgacactcagtaaatttagtttagataatttattaaacagaaacctaactaaaatcgaacgagaaggaatacttcccagcacaacaatttacgagaaaataattaatgaattaataatctgcgaaagaggattcaataatcattttcaagaattgctacagggtgaaacattaagcggctatggaaataaagaatttgtttcgaatttggagaagagtattattgaacgtgaactattgactcgataataatgcatattaggagaaccgcattatttctatgaatttgattgcataaaatcttaatacaaaaataacaaagttggtggatttaatggagtttaagcacgaagtagaaaatatctttgcggatataattcaagaatatcaatttaacttaattaaagtaaatgaagacgaaatattgttattacaccctaattatgctctaactatatggaaaagtagagaaggtattgatgtttattatctgtttcttcatagcttagaaaaagtgaaaataaccaatttcttattttcaaattatgaaaaagatttgttagccaatataactcctgccaataatttgaccaaccaaatttctaatagcttacttattcatgcgagaggtttaagcaaatatttccctgaattgttatctggtcaaaatgactgggtaaaggagtttaaagagaataagttttataatgagccgagagctattaacaaagacgagtattcagcctatcaaactattataaaaaatatcaatggcaaaaaaattgaaggatttcaaaatgaaatatgaagcagattttataaatagattcaaatcattaatagaagaattccagttaaattataaagttatatctgaagaggagctagcactttttggttctaattttgcgcatgtttttttgattcattttgatgaagtttctttgaattatgtatgccgtgataaagataattcacttgttagttatgatgtatggtcttattttttgcatgtctttgatgataaagatagggagaatttgccaaaatataattctgtgcaggaacgggttgatatttcgtttttaatacttgcaagaggtcttccgcgtcattggagtagtgtgctaaatggagatgacaagtggttggaagattataagcagtatgaattagcccgtgttcctagaaaagtaatgggggacttgaaggattgtttgagtttatatatttaaccaagaaatgttgagaatgtaacagcaaagaggagttcaaccatgaaaatagacggtaactcaaaagaaataatccttaaaaaagtgaatttctactccataataattttaaattaatagaaataaaaataacggatgtcacaacttattaattagaaaagctcataaaatctctttttatttcacaaacaataatgtactatgaaaacatgggagattcaaatacgaaaggagaaaagaaaatcaatcatacacaaaagggtaaaattgatttcactttctttgtgtttatgctttaaaacctttaacaattaaaaaaacatcatgggatttttgtatttaggacaacaacgtataaacaatagtgtaatccagcacaataattttaaaggagcgtaactttatgaacgaatttccagttgtatatgaaccagagtatatgacaatttatttacttgttatcatcggtgtcttttctacaacattggctttatcacttgaaaaatataagttcactttagcgggaaaagcgttgattgggatgtgttttatttctctagctgtgttatttatatatgttttagagttagcatatctttcggatacagctgatttgttatttcatacaatcggtgtttgggaagtagtgcttttcacacatccatatattttcttaatacttgcaatcttgctcggtggggaaaagaaaccgccacatgtgcccaaacctaaaaaataaactatctaagtcggcggaatgggaagatggttttcctctaggattgtgagaacggtataatcagctagctgaatcagtggaaaagtaagcttgattcggtattattcaaaaaggaatttaaagtcgaaaatcgtttgataggttttcggcttttttattattgatgctttgaaaatattaaagcagattaggaggaataatatgaagtcgcagcagacctttatggtagaggttaccttttattctagtgcaagaaaaacggttccggaagcggggtatcggccgcattttgtgatggagttggatgaggatcgggaatatttaggagttgaaatttatgatatagaagtggatacgctggattcggtggggtatgcaatgtgttcttttttatatgaacaagagggcgttggttatagtaagattcagccaaataggtcttttatggttatggagggcgcgagtgttgttgggagagggaagatagtgtcgtttcatttgtaaatgacagttaaattgatttatgcgttttacacagtataattaaactataaacctatcaaacgaaaaatgatgattccctcctatttgaaaaatacatctaaagggggagtctttattaatcttgaccgaagaacttgcgtaaataaaaaataaataggaagttgaaaaaaatgatacttataaataaacgagcggaaaaacaagattaccagacaattttagcgatttgggaaaagtcagttattgtaacgcatgattttttaactgcggaagataggcagttttacaaagaacaaattcctttgtttctagataatgtggaactgttcttatggttcgctggtgaggaggtcattggttttagtgggacgagcgagcgggaactagatatgttgtttctggatccggtagccacgggtaatggttatgggagtcagattctgggttggctaatagaaaataagcggataaacctggtggatgtgaatgaacaaaatgaaaatgccacgagattttatttgaagcatggatttgtggtttcttccagaagtgacttggacggttttgggaagccttatccaattcttcaattgcaactgaaggagagagttaatggagtatgaacagctgttacaaagcgaacttggtgaacttgaaataattcgggaagaactacaaaacaaagaatatcgaggaatgattgtaaaaacggctaaagatggcacaacgattcggacgcgtttggcgaaaaaaacagataaaaaaacagggtactttgttgctttttgggagaaagatgaacttggtaagaattgtccttttgatgagaatgatagcgctgattttttatgtattgttgttattgatggtgatttgaacggtttatttgtttttccaaggcagtgtttaattgaaaagggaattttaactagtgaagttggtattggaaaaatggctgctagattttatccatcgtggtgccaggatttaaataaaacagcggaaaaaacacaagcttggcaacaggtgtattttaaaaattattctataagaaaagaagaccattgatctggtcttctttttattgtttagaaactacttgctcgcagtaatctaggtaagcatcgtctactagaaaatattttggaaccattaagccaacaatattgatgagtagctctgaattagcgatggcaggattaatcatttgatgcgagacatttttaatggttttggtttctaggttttcttttttgatttgtttggtgtaaacatcttttgtttctgctgaatcgacatttttatctttttcagctaagacgaggtagatttttgcttttacttttgaaaggtctagggtggcatcttggttcatgtttttgcggataaagttgtagcgatctggggtcattttttctttaccgccattttttttgtagctttcgtaggttttgttattagaaataagggtgctgtcggtgaggaaattttgttgtgcttgcttaacttctttcgttgttttaccagcgtctttcgcttgccagccagtgttgtattctccttgacgcatccagttgatagcaggggcggcaaggattgagaaagcaatctcattatttgcattcattgcttttgggatcacccaaccggcttgactagcgccccataagccgattttggtggtgctgtctgggtattttattttcatccattcgatcacttggttgacttcgtttgcgcgatcatccatggactgatttagccaattgcctgaggatttaccaacgcctaatttatcccatgaaacagatatatatccttgtttggcaaatcgttccatcagcggtttatagccaccgttttgagttgcttcttgtgccccgtcaccatgaacaaatacgataatgccttttggtttctcgtgttttggggttgtcacgaccgcagaaagttttccaccagtagttgggattgcgactcttgtttcgttcatttcgaaatcgtttccgatgaaaagaatcgctactaatatgacgatgattgcgcttattacaatagttgtttttttccaacgtttcattgtatccactccattttttgccattctttaataccggtgagtactcccatcaatgtgctattttctttttgaatcacttggaagccaatagttctatacagcttgcaagcgccattattgttcttggcaacgtataaagttatctgttcatcatgaaaagtttctaggcaatgagaaattaacgtttttccaatgccttgaccacgaaaatttggcgaaacggttataaagtcaatatatcgttcattttgaacaggtttgtgtgatagaagactgaggaagaaaatcaatttgaggcactgtgaaaatgataaaaattttcttaggttttgatatagcttttgatgagagtcactcttgctcgttacaaacatgcaaccgcaaattagctcatcttgtattgcaattagtaggttttcgccttgttctgtataaatgtaatggcaaaaagcgtatataatgtcacgtgcttctgtttctttgaataacgtttttgtgaactttgatttgaaccctgcgaaaactaaagatgttacttcttcaacgatattttctttttcaaatgaattgatgcttttaatggaaagtgtcataacggcacttccattgtgtaaaccattgcgtctggataggcgagtgaagggtagatgttttcgtataatatcatgcttgttgtagggcgttttaattcttctaaaaacagttggatttgcgtttcaatggttgcttcatctttggcgataaaagatttacaagcatattcgccggctggaaaagtataatcacttcttttttttatgcttttaaggcagattataccagtgtcttgtttggagaaaatgtaaaaaggttcctctaaatccggtagattgtgttttgcggcttgggcgtagttgatagtgttattatcaattatttggttaggaacttttttaaaataacgatcgtctttagctacaaatgtgatttcatttaaacgcatttctttttgcgaatggatgattttttgaatcgttttttgaatttctactaactcttctattttttgttgcaaatcttgttcagcctgctctaacatcggagtcactttttcactaagcaaactttctttgatttcttgaatagaaaagccaatttttctaaaaaggataatttgatataaacggtaaatgtcggcttcttcaaaataataatagccattttcgggatttcgtttaggaactagaataccttcatcgatataatgacggattttatatttagatatttgaaaaagttgcgcgatttcgccagtggaaagggtaagcatctgaaaacctccttatgatttagttttagtataaactatgtggttaccacgcagtcaaataaaaaaacaaatgacaatgagaatcattatcaaacgctgatttttgtgatataataaacaaagatttattaatgggggttagcgatcaaatgggaaaagtagtattgaaaatggctcatactgccaaaaaatcaaagaaagtattaaggtatcttgaaacgaaccttaatgtaactcgggggaagtacaatgattgataagcgtttgtttcaattggttgaaaagaaatctttagtgttattaattctttttcgtgtgcttagtttggggctgatgattggtctttggcttatttttgctcaacaattaacgcattatttagagggccaaagtgtcaattggttatggcttattggaacggttgtagtcgttttagttggcaaagcgatacttaccaaattagccgagaaacaaatttaccaagcatcggcggaactgcgtttatcaatgcggcgtgctgtgatggaaaaagcttttcggttaggcaacaacgaaggacagctaccggcatcaacattaacgcagctcgcagtagatgggatcgaacaattagaaatttattattcacgttttttaccgcaattattttattgtctcatcgcttctttgatgatttttggaagcttagttggatttgcgtggcagccggcgattgtgttattaatttgtatgccgatgattccgattgttattatggcagtgatgaaaattgctaagcggattttgagcggctattggtcggattatacgaatttaggaaccaaatttcatgaaaatttaagtggtttgagtattttgaaggcttatgaccaagataaatataagcaagaggaaattgtttctgatgcggaacgtttccgtaaagctacgatgagtttattatcgatgcagctgaattcgattacgattatggatattatttcgtatagtggggcggcacttggtattggtatgtctttaattatgttcacaaatggcaatataagtatgactggcatgttgatgttcttactactaagcgccgaattctttattccaatgcgtcaacttggatctttattccatgtggcgatgaatggaattagtgcatgtagtaaattgttcgcttatttagagttaaaagagcaagtttatggctcagaagaattagctaaaccgttagaaaaaatggaagttcgtcatttaacatatacatatgaagaaggtaaagctaaagcacttcaagatatatcagctcatttcaataaaggaagtttttcagcacttgttggaaagtctggctcaggaaaaagtacttttgtgcgagtgttattaaaccaattgcctggttatcaaggggaaattatttggaatgatgttccgttagctagtttgagcggggaagctattcgtaaacaagctgtgttagtagataatcatggttatctttatgcaaatagtattcgggaaaatttattaattggtaattcagccgctaatgatagcgatttgtggaatgttttggagcaagttagtttggctgattttgttcggaagttaccggagcaattaagtgagaatttagaagagaacggaagtaatttatctggtggacaaaggcagcggttgttactagcgagagcattgctgcgtcaagctgaagtctttgttttcgatgaaattacgtctggtgtggatttggaaagtgaaaaaattattcttttggtgttgcagaagttagctaaagaaaaaatcgtgctctttatttcgcatcgcttatataatgttttggacgcggatcaggtactcatttttgacgcggggaaattggtggaagtggcgagcccagaacgattgcaacaagaatccaattacttcaaaaattactttttagaagaagaagcgttgctgaaagggggagcatgatatgtcagaatggacgattattggttggttattaaagtttgttaagccgttacgaggaaagatgattttggcaattttacttggtattataagtaatttatcggttatcatgatttctttgatcggtacgtatggcattatcgcggtgattttaaagcaacccctctgaatccgtataaatggctctttgtaatggttgcttgtggtgtggttcgcggtttggcacgatattcggaacaatatttaaatcatgatattgcctttcgtttacttgcgataattcgtgaacgtatttttgcgactttgcgaaaactgggaccagctcgtttatctgggaagaaaagtggcgatttagttgccgcgattacaacggatgtcgaagctttggaagtgtttttcgcgcatacaatctcaccagtttttattgcagttggtacgacgattgtaactgttggctttttggcgacctatgatgttggtttagcgctcatacttttgctaggacaaatcttggttggtgtcgttttgccgatgattagttataaacgaaataaaaaaatcggaactgcttatcaaaaagaattcgttggactcaatcagatggtaatggaaaatattgcaagtttacaagatatattccagtttaaattgggcgaagagcgtttaggaaaactagaagaacaaggtgaaaagctcaataagcagtataaaaaaagaatacgacaaggaagcgagctccaaatatttggtgaatgggtgctaattggtacggcgactttaattttagtgctaggtagtctttggcaattaccgcttgaaacagtattaattggaaccgtgcttagtctgagttcttttggatcggtattggcattaaacgctttaggaacagcgctgttaactacttttgctagtggtaagcgattatatacattaactgaagaaaaacctgttgtattatttaacggtcagcttgaactatcggattttgaaagtgcggagttagataaagtgagttttagtcatgatggaaaacaaccacttttaaacgaaatttcgctagcgcttcctaaggggaaatggctcggcatcggtggggaaagtggcagcgggaaaagtaccttagtaaaactactgatgcgttactgggatccagatggtcagattaaattaaatgataacgcactccctgaaattacagagtcttcgcttcataggctggaaggtgttatggagcaaagtacgtttttatttgaagacacgctcggtaataatattcgtttaggaaaaaaagatgctactttggaagaagttaaagaggctgcccgaaaagctgctatcgatacatggattgagactttgccagaaagttatgacacgatcattggcgggcaatcacgaaatttatcagacggcgaacgccagcggattggcttagctagactatttctccatgatgccccgttattattattagatgaaccaacaagcaatttggattatattaatgaacaagcgattttaaacacgctccgtttagaaattcaagataaaacggtgctggtaatttctcaccgagcaacaacattagacttggcagaagaacaattatttatagaaaatggtgcattgaaacgtgcagtaaaataataaaaacagcttgtatagtttacaagctgttttttatttataaatctactttctctgagctttcgaaaaattcaaccgtgtcaagttctgctcatctgctgtgcaatataaataattcgcgttttacagaaccgctcaaaatattttatcgatttgatgagagataatgtccaaagtaaatggacgctggtttttcatcatatttgacgtactatacaaaaactttcccaatttgctcaaatagaaattctcgtccaaacaaaagaatgaaaatcaagaagagcatgacgataccaaaaataaatactccatatacaagatcaaggggatagcgatgatcatgttcaataatatcttcgcttaatgaagctaatttggcatcaaattggttaattaactcaacgaaattatttcggccgataaaggcacagtcgattttctccattttgttttctgtttgaaagaatagttccatcgtttctggaacttgatacttcaagaacctacgaaaaggttggaagttataacttattcttttcacatttgcaagatgaatcgtttttgttttgttgcgtgtgtgaataataaaagcattctttgtgacctggatccattcttttggcgggagtagaagtttaacaattaaatatcctataaaaaatagagtaataagaccatagtaaaatgattctggtttttctattgacaataaagttaataagccaaacaagaaaataaaagataaagaagttaaagctgttccgattgttttaagtttgtctttgtaatatatcatgatgaacacctgcttgattgaatttatgttgaatttaatgataacattgtaaaatataatcatcaagttcattagtgaacttttaactaccaagtaaacaaggaggaacttcatggaaatcacattacaacaacctacaacagctgactttcctttcattgaatggttgtggggagatttagcaacaacagaagtgctcggcggaccattttcttttccagaagaaacgcgaatggactggctaaaatcaaaatcacaagcgagcaatgcttattttattataaaaaaaggtacagaatctgttggtgaagttagttttcgcgattttgaaaaaggaacagctcatttaaatattaaagtggctgcatgttataggggccagcgaatcgctcaaaaagctttgcaattattcttagattttttccaaactgattgcggcgggatagttttgttggatgaagttagacgggaaaatgaagcaggcattgggtttctcgtgaaagctggtttcgaagttatagaagaaaaagaatggacgatggtgctcaaatggagtgttcaagcagaggggagttttgaatgagtaaacaaagatgtgcatgaggaattataaaaaattagcaggtaagttagatttaaaagtctaacttaccttttttagtagttaaaaaagctgatttcttatattgattcattttttagacacattttaataaagaataaatgggcgtgataagtccagtgaaagcaatattagcaaggccaaatgggaattagcttccaaataaagcgaaggaaaataatttcctgaaataagaaaaattgcctccttattctattgatttgattatataagcggagtattatgttgattgacaatcaaggaggatactatgaaaaaaacgatcaagattacaaccagtttacttttgagctttgcttgtgtatttagtgttggggattttactaagccgcatacagtcgaagctgaaacagtctattcacttacaaatccaaagccgattaatgaaattttttctgatccaaagctcgcgcaagttgtggcggattggttaaagcttccatcagcgactagcgcggttacgcaaagccaattgaatacagttaaatctttgcactttgattcaaaaggtgttcaaagtcttgaaggagtagagtatttaaaaaatctcacgcaagtatttggctatggtaaccaagtgagtgatctaggaccattaagtaatttaacgcaactcgaaatcatccagatgccaagaaaccaaataagtgatttaacacccatttcgaatttgacagcattaatgtcacttgattttgaatttaataatttacaaacgattgaaccgataaaaaatttaacgaacatgttagaactgaatgttagcgcaaatcctatttcggatattagtgccgttaaaaacatgacgcaactggaatttttgactataagagactgtgaggtaagtgatttatcgccagttgaaaatctgtctaatatgctgatgttttgggcagggagaaataatattagtgatattacgccgctcaaaaatatgcccaaactgcttggtttaagtttatttgggaatcaaatcaaggatgtgagtgtggttaaaaatcttactagccttgaagatttcgatttaaaagcgaatcaggtgagcgatattagtagcttagcaacgtcaactacactcgagacattaactcttagtttcaaccaaataattgatatttcgcccctgaaaaatttgaccaatttaactaggttagaacttgagaaccaaacgcgtgtattagatgcggttgaggtagataatccattgattttacccgctccagtaattgatgaaaatggcagcagagtacagccgacaaaagtaagtcatgcgggtatttatgcaaatggcgagattacatgggaagggttgcaaagtaattatattctaaattacgagtataatttacccgtagcaattggttcgttaacaacaacgtattctggtaaaattacccagccactgttggagaagcctgttgatccgattactccggtagacccagtagacccggtagatccagtagacccggtagacccggtagacccggtagacccggtagacccggtagacccggtagacccggtagacccggtagacccggtagacccaatagatccagtaaacccggtagatccaatcactccagtagacccgtcaaatcaagtaaattcaactgatccagtgaagtcagttcttcaagcaactgaaactttaataaaacagacgatatccgttaatccgattgtagctaaagataatagaaatttaccgaaaacaggggatagtggaatgacttctagtttagttggcggtttaattctagctgtttctagtttggtattattgcgtaaacgaaaataaaaaaaggaatttggcttttagtcaaattcctttttatacgatttttgtgccttggtgaaaggtgagtttccacgagccattttcgaaaatccagatgttacttcgcattgtataggagttttcacttagatttttaagtttataatatgataagacctttgtttcatctaaaatttttatatcataattcatgatttctagagcgctatcgccaagtgtttttagcgatttgtaataggaaaagtctttaacaacaccactttgcgtgatttcaatataagattcgcttaaaatatcgataatttcggacatggagtgacggttttcgagcgataaatgtatttggtcaagttttttgaagttttctttcgttaattccattctaagtcctccgttttaaagaaataaaaaggttcacttgattttgtaagtgaacctttttgtgttattttattccgtcacgattttgaatgatttcatttacgatgccgtaatcttttgcttcatttacagaaagccagaagttgcggtctgtatctttggagattttttcgtacgattgacctgttgcttcggcgatgagacgattaattctttcgcgcatccggataatttcttttgcttcgatttcaatttctgtgctttggccttgaacaccgccagctggttgatgaatcatatagcgcgtgttaggtagactataacgattttctttttcagcggctaggtaaatagtaataccagcgcttgcaacccagccagttccaacgattttaacagtaggcttaatgaatttaatcatatcatgaattgtgtcgcctgcttcaacgtgaccaccttggctattaataaaaatggtaatcggatcattgctaatagattcaagtagtaaaagctgcttagaaacgtcctcggctaactcctgattgatttccccgtaaattaacactgtgcgtgtatcaatcaatttttgggtaaggatgtttgtgatattttcattatttttattctctgccatgaaaaaattcctccttaaaaagccttagtttatttgtaatacaggtatcttatcataatggtcgaaaatggtcaaacattttgaatacaaaaagaaaacgctttaggatagcgttctcttcttaattttatacgaatgcgagttgccaagtaatcccgaatttatcagtaacccaagccacttttcgaagcgcttcaacttcttcaggtcccatcataaccgtgccttctttagctagtttttcaaaaagggtatcaaattcatcttctgtgtctgcgaaataaagggttgttgtggcccagctaaagtcaggcgaggcgttgttagtcatgtccataatcataaatgatgctcccttaatttcaaaagtagcattcaacaccttgccaatatcgccgccttgttctggttttgtgaagtaagttaagccgatttttttcgcatctggaaaagtgtctaaataaaaattaaaagcttcctctccattaccattaaaagtgaaaaatgtggagattcgttttgcttgattaaacatttattttacctccttttgaattattttaactatacccgaaaaatgtttcaattatgtgttaaaatggagaaaaatgtacgggggcatgatgatgaaatatccgataatgcttgatattacagggaaaagggttgtcataattggcggcgggaaggtggcgcttcgtaaagtaaaggggctactccataccggagctgatattttaattgtcggattagacgttttgccagagattaaagagcttcaagtgcaggtgaaagaagaagcataccgggccgaacatctagctggtgcttttctgatatttatttgtacgaataacccagaagtaaaccaaatggtactgaaagattgcttgccagaacaactagtgaatgatacgacagaacaaaagaattccgattttttcaatatggcaactgtatcaaaaaatgagttgctagtcggtatttcaacgggcggcggtaatcctggatacgccaagaaagtaaaacgtgaagtcagtcagctagtagaaaatttagaaacagaagaaatcggaaatcgtaataaaaaagataaaacctgctaattttagtaggttttttattctattatattgctctcttttaggttgcaaaattttactatagattttggaatgtaaacgctctatcattgaagtatactgaaaaaatattaagagggtgctgagccaaatgtccattttagaaaagattaaagatgccggagttgttggttgtggtggagcgggctttccgacccatgccaaatttagcggtgaagtggaatacttaattattaacgcagcggaatgtgaaccgctcctaaaaacagatcattttgtcatgagaaaccatgcagtagaaacgattaaagcaattgaaatggttaaaaaccaagtaggtgcagagtttgccgttattgcaacaaaacggtattacacagaagaaattgcggctttacggtcagcaattacagaactaaatgcaagcgtgacaatacatgagatggataatgtctatccaactggcgacgagcaagtgatggtctttgaagtgactggacgcgttgtgccaccaagcggtattccacttatggttggctgtattgtatcgaatgtctcgacaatgtggaacgtctttcatgcaattcaagatgacgcgccagttattcgtaaacagttgacagtaactggagcagttggagagccaaaacttttagatgtaccagttggaacgccatttgaagtatgtttagcagcagctggtggaactaatttagacgagtatttatttttagatggtggaccgatgatggggaaattaaatgatcagtccactattgctgaaaaagttgtaacgaaaacaacttcgggtttgattgtggcagaggatacgggttatctgcacaagctacattaccaaacagtggaacaaatttttaatgaaacaaagtcggcttgtattcagtgttcgctttgttcggatttatgcccgagacaacaattaggtcatgatattcatccgcataaagtcatgcgccattttgcggttgcagaagatataacggatattaaaccagatccgatctgggaagaagcgatgatttgttgcgaatgtggtatttgtgaggtaatcgcttgtccgatggggctttccccgcgccaagtaaacattcatgtgaaaaaagagcttttaaaacaaggtgttcgttatcaaactgataaaaaagaatttacgcctgacccgatgcgcgattataaatcgattgctccaaaaaatattctaattaaaatgggcttacagcaatatgctgatgttcatttagaaacaatgcattatttagatgtggatgaagtttttatcccaacaaaaatgcatattggtgcgccgtctattccagtagtaagtgaaggggacatcgtgaaaaaaggcgatttaattgcgaaaattcctgatactgctcttggggcaaatatccatgcaagtattgacggtcaaattattcgtataaccgaagaacaagttcatattaagagggtgatgtcatgaaaatggatacattaggatttctcgaattaaatagtatttcgaaaggcatcgaggcggttgacacaatgctaaaagcggccaactcagaattgatttatgctaaagcaagctgtcctgggaagtattatatattaattgccggtacagtggattctgtagctcaatcaattgaagcgggaacgaagattggtgcggcaaatatcgttgggaacttagtcattcctcgcgtgtccgaccaagtaatcaaagcaattaacaaaacggaagtgccagatgagatgaatgcagttggtgttatggagtattattcctgttcaggatcaattattgctgcagatgccgcggtaaaagctgcagatgttcagctgatggatattcggttggcgacggggattgctggtaaatctttcgttgttttaactggtgatacagcagcatgtgaagcggccgtggaagcgggacttgcagctgctaaagaggaagcacttttaattaataaagtagttataccaagacctcgtaaagaagttttcgagagtttaatctattaaaaagataacaatatattgtcatagagtttttgagaaaggtacgcactgactgtggttgcgtgccttttgaacaatctgacaaaatagtggcgcttaaatatgataggattattttgagatagtttgtctagatgaggagtgaagaaaatgagttttgatgataataaagaacgcgtaatacaagaatatgtaccgggaaaacaggtgacgctggcgcatttaatcgccaatccgaaccgtgatatttatacaaaattaggattagaagaaggcgcaagtgcgattggaattttaacgattacgccaagtgaggcttcgattattgccagtgacattgcaactaaatcaggtgacgttcgaattggctttattgatcgttttagtgggtctgttgtacttactggtgatgtttcttctgttgaatcagctttacaacaagttgtttattcattacatgagattttggacttttctattccaaaaatcactaggagctgagtcacttgaagaaaatgatggtaatgggttcagttggttgtggtaaaacaacgctgtgccagaaattacatggatatgatattttatataaaaaaacacaagctgtggagtattttcaagaaatgattgataccccaggcgaatttgtacaacatagacaactatacagtgcgctcactgtgacttcggctgatgcatcagtaatcgcgattttacaaagtgtaacggagaagaagcagacgttttcaccgatgtttgccagtatttttgctaaaccggttattgggattgttacaaaagtggatttagcggaatcggacaaagacatcgagcgagcagagcgggaattacgcatggctggcgcgaagcatattttttatatttcttcggtagaggaaactggaatagaagagcttcgggcatatttggaagattaattttaactaaatgggggttattttatgcctcaagtgagggatttatctgtaattgatgtgcctggtggttgtgttttgacgagctgtgatattagcgctgggtttggtgagaaagtgcatgatggcttaagagttgcgcctgaagtgacagcaaggttgaccttgagagttgctctactagaaatgcttgcttcaggtgctgtagttgtggctgtgagtgatgttatcggagcggaaatggagccgaccggtaaacgtgttatcgcaggtctaaaagacgaactttttaaggctgatttaggtcatattgaattaaatggtagtactgaagaaaatatgaacgtaacacaaactagtgtaggcgttcttgtaactggttttgcgactaaagctgcacttaagctcataaatgtgcatgaagctgcggtcttatttgcatttggcgaaccgattgttggagcagaagttttgcagagaatgatggaaatgccagattatcctttggtcaaacagttagtttctgatagtagagtacttgaagttgtgccggttgggtcgaaaggaatggcttatgaggccaatactttagcacggcttaatgattgtgttttcgaagccagtggcgtttttaatgaagcgaccatgaataaaactgctgggccggcttcggttattttagtagcagttaaagcaagtgaagtaaaggcatttgagcagaattttccagctgctaaatgtttaggagagttgaggaattaccatggctgaaatgatgcttgtaactggtggtgctagaagtggtaaaagtaattttgctgaaaaagaagctgccaaatatgatcgtgttttatatgtggcgaccggaattgcatttcaaaatgatacagagtttcaagctaggataaaaaaacatcaagcaacccgtccagaacactgggatacttttgaagcatttaaagggattgctacttacttggagcaacatggaaatcaatatgatgtaataatgcttgattgcgtaacgatgttagtaactaatttatttttttcgttgcttggtgagcgcgagttgacaaatgagattgctgatgaagtagaagcggcgattcaatcggaagttcgtgcaattttaaaagcaggaaagcaatcctctgccaaacttatttttgttacgaacgaaattgggctaggggttgtacctgaaaacaagttaactcgagtatttcgagatattattggtcgtattaatcagcaaattgcaacggaagtagaggaagtttattttgtcgtgagcggcattccgaaaaggtggaagtaatatgaaaacattgattttattaattcaattctttacgcgaattccgctaccgatccaaataaatatggacgagattaacttgaaaaaagggagcgcgcttcttccgcttgttggggttgttataggtgcttggaattggctcgttttttctttagtagcgcttgttatgcctttgccggttgcgattatcgcgggactttttgcagaaattattattacgggcggattccatgttgatgcgcttgcagatacagctgacggattattttcttcgcgtaaaaaagagcggatgctagaaattatgaaagatagtcgtgttggtgccaatggtgtaattgcgatttgcttttattttcttttttatggcgctttatttctttctgttccaaatatacagcagattggctggttgtttttcgttttaccaatcgttgcaaaaggtgtgacaatgctactttttgcgaaaatgagttatgcaggatcgaaagaagggcttggttctatttttctaggtgttccttggtggccgattatgattgcccaagggattgttctcattgttttagcgttgtttttctcttatattgggctaattgcttatgctggcgtgttagtatttacgattatttaccggttatttgtatataagcgaattggtggaatgaacggggatacgcttggtgcaggtgggcaaatgggacaacttgtgtgcctattttgtttagtgttaatttgggggttgatgtaattgcaacttatttttgtcaggcacggcgaaactgactgcaatgcactaaaaaaatattgtggtcaaatggacgtggctttaaatgaaaatggtataagacaaatgaaacgactccaagaaagacttactgattactcatttgacttagtcgttaccagtgatttaatgcgagtaaatcaatctgcagcattgttaagtaacagaaagccaattcgttttcctggatttaatgaaatgaattttggcgattttgaaggatatacataccaagaaattagtactaagtttcctgtcgcctgggatgactattgtagtaactggcaaacagctccgtttccaaatggggaaagttttccggttttttatgagcgagtgatagctacatttaaggctgaatgggaaaactggcagaaactcgatacggtgttatttgtagggcatcttggtgtattacgcgccattgcactttttctacaagatcaaaaaatagcacaattttgggataccgattttaagcaaggttgctattcgctctgggacaataagtctcaaagctttctcatttctaatcaatagtagatttttgttgtttcaggtgaaaacgctttttttgtaaatcgtttgtggtaagatgtaggtagttaaataggtcttatgttggtggaatgtgtttgcatttctgaaagaggaattcggtatgaagccggaactgcccccgcaactgtaaggtggacaagaattgaaaataaccactgtgcgtttttgacgtatgggaaggttcaattgttgaatgaagccaagtcaggatactcgccaaataagacggaagcaactctttttcggggtcctaaaaagcgtatgcgggtagtatagcttatttgctgtgcataaactctcattcgataatggatgaaagtttttttgtttttcaagcagcaaaaaagtcatattctgaaataatcatcgaatatgactttggaaagtacttattttaaggtttcgcggtagccttttggagttacatcaaactcttttcggaagactttgcagaaatagctcgtttgggtgaatcctaagttacgagcaacattatcaatcgaccaacgtggattttttagcatatcttttgcgagcgacattttcttttggtttacataattgataaaattaacattcatttcttttttgaataatttactgaagtaataagagctaaggtagacatgacttgcaacttcatcaagtgtaattggacgattgagatttttttcaatatacttaagtgcttttcgaatttctttattatcttcatgatgtgttggtttattgtgatggaagacgattttttgtttttgttcttcgcggcttttttccatttcagatttcaagtaatactgggagataattgtaagcatttcggcagaagaattgatttttttagagctgaaaacagggacagagcgaaacgcggaaattaggtctttatcgtttttccaatcagtttcttctgtttgaatattaccaacttcactattttcttcacaaataacctgaccgctgagcaaaaatccgcttagttgattttcgacgacgattggaactgaaaaatcggttagtccagcgtgacatcgataaattaaaggttttccggttttagaagcttccaacccgccaaacatatcacatttttggcaaagcgagcgatattttgggttagaacgaatgagttggcaaaaaggagtaaagttacataatcttgaaacttcggtaccgtgtatatctacaacaactgaggctagactagtagcggctgagaactcatccatgactttttcaagaagcatttcattgcttttggtttgtagtaacatagctattcccctttcggcaatacttggcgtgtttctgtcgttcttagtatagcatatttataatgcgcttacattttcttgccatgaagataacaatatattgctaagactaatttcataagagaaagcccaaaccatgctctactggatggctttttgtcgtttatttttttgaaggcgcaaaattgtgttaaaacacgattcgcgtcttctttttttatattgtaagcggcaactatttatatattagattgcatatactgagagagtaaaatacttattttgagaaggaggtacacccatgcaagaagcactaggtttagttgaaactaaagggctagtcagcgccattgaagccgctgacgccatggttaaatcagctaacgtaacattaacagggtacgaaaaaatcggatccgggcttgttactgtgatggttagaggggatgtaggtgcagttaaagcagcaacagacgctggggctgaagcagcaagaaatgtaggtaccgtaatgagtacacatgttattcctcgtccgcatactgatgtggaagaaattttaccagtgagggtgaagtcagatgagtaagcaaaataaactgattgacgaaattctaaaacaggtaatggaaacggtcaatgatgccccggaaaaaatagtagaggatggaggatcacgtcaaatgagtgaaaaagcagttcaattaacagagtttgtaggaacagcgattggagatacaatcggcctagtgattgcgaatgtagacggacaacttttagaagcaatgaagcttgagaagtcttaccgttctataggtattttaggagcccgtactggtgcaggcccacatattatggcagcagatgaagctgtaaaagcaacgaatacagaagtagtaaaaatcgaattaccacgtgatacaaaaggcggtgcaggtcacggttctttaattatctttggtggtgatgatgtttctgatgttaaacgcgcagtggaagttgcactgaatgaattagataaaacttttggagatgtatacggtaacgaagcagggcatattgaactccaatataccgctcgcgcaagccacgcacttaatacagcatttggcgcaccagtaggtaaagcatttggacttatggttggtgcaccggctggaattggcgttgttatggctgatactgcggtgaaatctgccaatgtagatgtggttgcttattcttcaccagcagatggaacaagtttctccaatgaagtgattctttgtatttcaggagattctggcgcagttcgtcaagcagttatttcagcacgtgaaattggtaaaaaattacttggagctttaggggatgaaccgaaaaatgatcgtccatcctacatttagaacggagggtaacgactgatgaaatcaaaacgctttgaagaattagcaaaacgcccggtcaatcaagatggttttgtaaaagaatggattgaagaaggcttaatcgcaatggaaagtccaaatgacccaaaaccaagcattaaaatagaaaatggaaaagtagtcgaaatggacagcaaaaaattagctgattttgacttaattgaccattttatcgctaaatatggcgtcgatttatctcgtgcagaagaagttatgaaaatggattctgttaagcttgcaaacatgctttgcgacccaaatgtaccacgggaaaaaatcgttttacttacaacagcaatgacaccggcaaaaatagttgaagtagtttcacaaatgaacgttgtcgaaatgatgatgtccatgcaaaaaatgcgctcacgtagaacaccgacaacgcaagctcacgtaactaacttacgtgataaccctgttcaaattgcagcagatgcagcagaggcagcaattcgtggttttgacgagcaagaaacaaccgttgctgtagttcgttatgcacctttcaacgcacttagcttattggtaggttcgcaaacaggccgtggtggcgtattaacccaatgttctcttgaagaagcaacagaattagagcttggtatgcgcggtttaacttgttacgctgaaacgatttctgtttatggtacagaacctgtatttacagacggagatgatacgccttggtccaaaggtattttggcaagtgcttatgcgtctcgcggtctaaaaatgcgtttcacatctggaactggttctgaggttcaaatgggttatgcagaaggaaaatcgatgctttatctagaatctcgctgtatcttcattacgaaagcggctggtgttcaaggtttacaaaatggttcgattagttgtatcggaattccgggagccgtaccaagtggtattagagcagttcttgcagagaatttaattgccgttatgttagatctagaagtagcttctggtaacgaccaaactttctctcactcggatattcgccgtacagctcgtttgctgatgcaatttttaccaggaactgattacatttcatctggatatagtgcgactccaaactatgacaatatgtttgcgggttccaattttgatgcagatgattttgatgattacaatattttacaacgtgatttaaaagtagatggtggtttaacgccagtgacggaggaagaagttgtagcggttagaaataaagctgcacgagtaatccaagttgtctttgataaattaggtcttcctgctgtaacggatgaggaagtagaagcagcaacctatgcacgtggaagtaacgatatgccagaacgtaacatggtagaagatattaaagcagcagcagaaatgatggaccgcggcgtaactggtctggatgttgtaaaagcattagctgctggtggatttgacgatgttgccgaaagcgtactaaacatgctgaaacaacgcgtatctggagacttccttcatacatctgccatcattgataaagactggaatgtcattagttccgtcaacgatttaaatgattacgcaggcccaggaactggttatcgcttagaaggcgaacgctgggaaaaattaaaagatattgctgttgcagttgatgcaaacgaattagattaagctacttcccattttttataaaggaggattaagagacatggttgaaattaacgaaaaagtgcttcgcggaattatctcagaagtactagatgaattacagcttaaagaagataaagtttctttccaaaaagaacagccaagtgttgcagtttcagatgaaagctttttaacagaagttggggatgcgaaaccaggaagacaaaaagatgaagttgttattgcggtcgcaccagcttttggtaaatatcaaacgaaaaacattgttggcgttccacataaacagattttacgagaagtgattgcaggcattgaagaagaagggttaaaagcacgcgttgttcgtgtattccgttcttctgatgtagctttcgtcgcagtagaaggcgacaaattaagtggttcaggcatttgtatcggcattcagtcgcgcggtacagcattaatccatcaaaaagatttacaaccactttcgaacctagagttattcccacaagcaccactaatcacactagaaacttaccgggcaattggtaaaaacgctgcgaaatatgcaaaaggtgaatcaccaaatccagtcccaatggtaaatgatcaaatggctcgtccaaaattccaagcaaaagcagctttacttcatatcaaagaaacgaaacatgttgttcaaggtaaaaacgcagtcgaactacaagtaaattaatagtgaggtgagaatgatgaatcaagaagcactagaaaatatggttagaaatattttacaagaagtaaatagtggtgcagtaacaacaaccacttctcaaaaagcaagcggagattcactgactgtacgcgactacccactcggtacgaaacgtccagaacttgtaaaaacagcttcatctaaatctttggatgatattacgctaaaaagtgttctagatggcacaattaaacctgaagatgttcgtgtaacagcagagacgcttaaaatgcaagcgcaagtagcaagagatgcaggacgtgctacactcgcgaacaactttgaacgtgcagcagaattaaccgttgttccagatgagcgtattttagaaatttacaatgcgatgcgtccttaccgttcttcaagagaagaattgcttgcgattgcggatgaattagaaaatgtgtatcaagcaacaatttgttctaattatgttcgtgaagcagcacagctttatcaagagcgtaagaaattaaaaggcgataattaaaattcacctttgctcatgattatgtaggaaatgcggtgaaatgaatgaagtatattgcaggtattgatatcggaaactcgacaactgaagtggcgcttgccatcctcgactcggtaaataatgcggagtttgttgctagcgctattacagacacaactggtatcaaaggaacaaaacaaaatcttcatgggatttttaaagcgttaaaactagctttagaaaaagtaaatgcaacaactgcggatttagctgaaattcgtattaatgaagcgactcccgtgattggtgatgtagcaatggaaacaattactgaaacaattatcacagagtctaccatgattgggcataatcctaaaacaccaggtgggcttggaatgggttcaggaattacagtacatttggatgaagtggcttctaaatcaaaagatactgattatatcgtgattatcccaaaaacggttgactttgaagatgccgcacagcagattaatgattataccgaacttggctatcaaataactgctgcgatccttcaagcagacgacggggtgctcgttcataatcgattaaaccataaaattccgattgtagatgaagttggttttattgataaagttccagttgatatgttagcggctgttgaagtcgcagctcctggtaaagtcattgaaacgatttctaatccgtatggtattgcgacagtcttccgtttgagttctgatgaaacgaagaacatcattcccgtagctcgagcattaattggtaatcgttcagcagttgtgattaaaacaccagaaggcgacgtaaaagctagaacaataccagccggacatattgaacttcaatcaggaactagaacgcagcgtgtaaatgtggcggaaggttccgagaaaatcatgcaagcgattatgtcactgccaaaacttgataatgcaagcggcgaaccgggaacaaatatcggcggcatgctagaaaaagtacgacaaaccatggctggacttactgataaattaccggcagatatttttattcaagatttgctggctgtagatacgtttgttccagtagatgttcaaggtggtctggcgggtgaattttccatggagcaagctgttggaattgcctcaatggtaaaaagtgatcatttacaaatggctgcgattgcctcagaaatcgaacaagagctaaatgtaacggtcaaaattggtggggcagaagctgaggcagcgattctcggggcacttactaccccaggaaccaatacaccacttgctattttagacttaggagcaggttcaacagatgcttcaatcataaatggaaaaggcgaaatcattgctactcatttagctggagcaggtgatatggtaacgatgattatccagtcagaaattggccttgaagatcggtatttagcagaagatataaaaaaatatccacttgctaaagtcgaaagcatttttcatattcgccatgaagatggtacggttcaatttttcgatacgccgctttccccaagtgtttttgcgaaagtagtgattgtaaaaccagatggatttgtaccaattccaggtgacgtttcgattgaaaaaattaaattaattcgtcgttcggctaaagagcgcgtttttgtaacgaatacgatccgtgcattaaaatatgtcagcccaactgggaacattcgtgatattccatttgtcgttattgtcggaggatcagcccttgattttgagattccgcaattaatcacagatgcactttctcattattccttagttgcgggacggggaaatattcgcggacaagaagggccaagaaatgcggttgcaacaggattaattctgtcgggtggtgctaatgtatgattccggttgtaaataaaccagcaatttattttcatgcagaccaaagcgcgaatccagactgtattaaacaagtattatttggaatagaagaagaaggcattccatgtgaattagaaattatgcctttaaaagacgaagtgcaagccgcatttcgagcttcagcgagttcgccacttttggttggaattacgctcaaaaatgatcatttagtgattcattatcgtaatctgccgccagatcagccgctattttcagaatatcgtttttgcgcagcgaccttggaaaaacaacgaaatatgggaatgaatgcggcgcgactcgtcaagggtgtaccttttaaataaggaggtgaaggaatgcatcaagcaattggaattattgaaattaaaggacttgcttcagcgattactgtagcagatacaatggctaaagtagcaaatatccaaatcgtggacacagaaaaagcaaaaggttttggctggattactgtgaaagtggaaggagacgttgctgccgtcaatgccgctcttgaagcaggagaacaaacggcaatagcctcagacagctttgttgcgaaaaaagtcattcctcgaccaggggaagagatttttacagtatttttgccaaaagaagaaatcgtgccagaagaacctgaattaattgttgaaacagaagacgtcgcggaacctgaaacaccggtagaagcgacctgtaatctatgtcatgatccactttgtccacggataaaaggtgatccaagacaagattgtattcattttgaagaagaaaagtaaacctaattttgaggaggaaataataatgaataacgcactaggaatgattgaaactaaaggacttgttggcgcaattgaagcagctgacgcaatggtaaaagcagcaaatgtatcgcttgtaggttatgaaaaaatcggttcaggacttgtaactgttatggttcgcggtgatgttggcgcagtaaaagcagcaacagatgcaggcgcagcagcagctcgtaatgttggagaagtacaatctatccacgttatcccacgtccacacaatgatgtagaaacgttgctaccaaaaggtttataagccgtggaaagagaagaattaaaggcaataattaagaaaatcgtaacagataaatatggtggtgcggagacagagattccaatcggagtctctaaccgccacattcatttaacagaaaaagactataaccaactttttccaaatgaacctattcaagtgaaaaaatggttaaagcaacctggcgaatttgctgctgaacaaactctcaccgtagtttcagaaagaggcgagttaaagcgggttcggattttaggtccgcttcgaaaattttcgcaagtagagctttctaaaacagatgcacggatgttagggatgaagattccaattcgtgtatctggtgatattgaaggaacaccagggatcaaactcgtttctaaacataacgaaatcttcttaccaaaaggagcaattgttgcgaaacgccatatccatttacccgaaagtgtagcaaatgaatacggtgtgaaacaaggtgatgaagtttctgtcctagtaggttcggaaatacgtagtctcgtgttaaaccattgtacgattcgagtgaataatcaatttatcccagaaatgcatattgatacagatgaagcaaacgcggcagatattgctggcgatagctttgcaaaaataatcaagtcgtgacctgataaggaggtgtggaaatggatattttacaaacagctaacgaacggatggaacagcttgcagcactaatgaataaagataccaaacaaaaggtttcagcggatcaaaaagtaaaagttggcgtcgatttagggacttcctcgattgttttcgttgtgttggatgaaaataatgttccgctttttggagcgtttgaatttgctgacgctgttcgcgatgggcttgttgttaattaccgcgagtccgtagaagttgtcaaacgacttaaagatagagcagaaaaaagccttggaataagtttaacgcatgcttctggagctattccacctggtacaatcgggaacaacaaaaaagtggttgctaacgtgatagaaagcgccggaatggaagcactttatacaattgacgaaccaacagccgctgcagcagtactagatttaaaagatggtgcagttgtagatgttggtggtggcacaacaggaattagtgtttttaaagacggtgacgtaatttataccgcagatgaaccaaccggaggaacgcatatgacacttgttctagcaggatattacggtgtctctgtagaagaagctgaagaaaataagcgcgcgcaaaaagattctagcgagcatttttctgtcatgcgtccagtagttgaaaaaatggcagaaatcacccgtgttcatctcgaaaaatctccctcagaaccgctttatattgttggtggtgcttctgcttatagccagttcaaagatacgtttgaaagctatttgaagatgcctgtttttcaacctaattatccgcagtatgtcacgcctcttggtattgccatgagttcagggagcggaaatttatgatagaaaaattagttgaaatcattgttaaacgcttgaaaattcgtgccgcaaataaaacagtcatcgctgttagcaaaatgcctcgcgatccagttgcgatttttatggaaagtgggacagttcggttaacccaagtaaacaaacattttcttgagcggatactaggtggaaaccgagcagaatcacttactatttggcttgaaactgcagcagaatacggggtaacaattgaacttgaactgtatgataacggcgaaccttggctggattataaaatgctcagtcagctagtctatccagtttttacaagcgctggtgagaggctttttcatccaagttctgaagtgatttgttacagtgatagcgcattaatcccaagcggaagtactctttgcaaatttaaaaagcagcttattacaccgcttgcaaatgaatatttaactaaaaataatattgcagtgcgggaaaggcagtgacgttatgtttatggcgaaaattactggaagcgtagtctcgacaaaaaaagaagattcgcttacaggcaagaaattaatgattgtacaaccaattgatgcgaacggagaacatgtgcgctcagaagaagtggcatgtgactctgttggcgctggaatcggggagtatgtgcttgttgctcgtggaaatgcggctaggagcgtatttgcagaaccaaatagtgcgattgattcggcaattatagcaattgtcgatagttttgataagtaaggagtgaataactcgtgagtatttatacaaaaaccggcgataaaggaacgactgcactatttgatggaaatcgtgtgaaaaaatatgatgaccgtgtcgaaacatatggttcgtttgatgagctaaatgccgaaattagtgtagcagaaaagttcgttacctcgcatgaaaacaagactttgcttagaaacgttgagcgccaattgttttacgtttgtgcagagcttgcaacagaagatgaatctgcgcttgctagtaaaattgtcattacagaagatgacattaacgaacttgaaaaagttattgatgcttatactctgaagttgccaaaagttgatagttttgtgcttcctggttcaagtaaagccggcgcgtttcttcatagtgcgcggacgatagccagacgagcggaacgattattagttcgtttttcagaacaaacagcagttagaaatgagctgttgaaattcgtcaatcgtttatctgatttcttgtatattcttgctcgagaagaagactttagacagatgctagataaagcgactaagctaattgttgccaagtacttagagcaaacagaacaaaagcctagtacgacgagcgatttatctttttcattttgtgaaaaactaatgcatcaggtgcaggttgtctcagaagaagtcggcgttccagtcacacttgcaatagttgatgcgcacggaaatgcaagatttaattaccgaatggaacacgctctcttagtaagtgcagaactagcaacgaaaaaagcatattccgccgtagcgatgaaaacaagtacagaaaaattaacagaagcagttcagccaggagccccactttatcaattagaaacactgacaaatggtgacattgttacctttggcggaggcgttccaatttacggaaaagatggagcgattattggtggaatgggaattagtggcggatcagtggaagaagatatccacattgcaaaaaaagcattatcaatgatagagaaggggtaattctgtatggaatcattagaactcgaacaactggtaaaaaaagttctcttagaaaaattagcagaacaaaaagaagtaccaacaaaaacaactacacaaggcgcgaaaagtggcgtttttgatacagttgacgaggctgttcaagcagcagttatagcgcagaattgctataaagaaaaatcacttgaagaacgccgcaatgttgtaaaagcaattcgtgaagcactttatccagaaattgaaacaattgcgacaagagcagttgcagagactggtatgggaaatgtgacagataaaattttgaaaaacacgttagcaatcgaaaaaacgccaggggtagaagatttatatacagaagtagctacaggtgataacggtatgacactatatgaactctctccgtatggcgtaattggtgcagtagcgccgagcacaaacccaacggaaacattgatttgtaattcaatcggtatgctcgcagctggaaatgccgttttttatagccctcatccaggggcaaaaaacatttcactgtggttgattgaaaaactaaacacaattgttcgcgatagttgtggtatagataatctaattgtcaccgtggctaaaccatccatccaagcagctcaagaaatgatgaaccatccaaaagtaccgctacttgttattacaggtggtccgggcgttgttctccaagcgatgcaatcaggtaaaaaagtgattggagcaggagcagggaacccgccttctattgttgacgaaacagctaatatcgaaaaagcggctgctgacatcgtagacggagcatcttttgaccataatattttatgtattgctgaaaaaagtgtggtagctgttgatagcattgctgatttcttgttattccaaatggaaaaaaatggtgcccttcatgttactaatccaagtgatattcaaaaattagaaaaagtagccgttaccgataaaggtgtaactaataaaaaattagtcggaaaaagtgcaactgaaatcttaaaagaagcaggaatagcttgtgattttacaccacgtttaatcattgtggaaacggagaaatctcatccatttgcaacagtagagctattaatgccaatcgttccagttgtaagggtgcctgattttgacgaagcccttgaagtggctattgaactcgaacaaggcttacatcatacagcaacaatgcattcacaaaatatctcgagattaaacaaagctgcaagagatatgcaaacttccatctttgtcaaaaatggtccgtcctttgcgggattaggctttagaggagaaggtagtactactttcactattgcaacgcctactggagaaggaacaactacagcacgtcattttgctagacgccgccgctgtgttttaacagatggtttttcgattcgttaagaggaggcaaagttaatgaatagctttcaaatcaagacaaaagtagcttttggtacgaatagtttacaagttttaaaagaaattaaaaataaaaatgtttggattatttgtgatcgttttttggcggatggagagggacttcaaggtttagttgggcagttagatgcatctaataatgtgcatattttcaccgatgtagttccagatccacccatttcaaaagtagctagtggtgttagtgaagcaggaaaaattcagcctcaagtcatgatcgcttttggcggtggctcagcaattgatacggcaaaaggaatttactacttcgcaaaacgcttagaaaaaattaatattagtacttttatagcgattccaactacaagtggcactggatctgaagtgacagctgctaccgttattactgatccaacgacaaaaattaagtatccacttttcttagatgaacttattccggatatggctattcttgacgcgcaactcgttgtcacagtgccgccagcgattacagcgaatactggaatggatgtattaacacacgcgattgaagcttatgtttctaaagctgcgagtgattatacggacgcattaggtgaaaaaagtgtgcaattaacgctacgctttttaacgagctgttatgacgatggtcgtaatttagctaaccgtgaaaaaatgcataatgcgtcgaccatggcaggtatggcttttaactgtgccaaccttggtttaaatcatagtattgcgcatcaactaggtgcacagttccacgtgccgcacggtctagctaatgcgatattacttgatgcggtcattcgttttaacgccttcaaaaatcgtgatactgaacaaaaatatgctgaactggcgcggatttgcggaatggcttctagatctgattccaatgaaaccgctgtccgtctgcttcgtgaaagaattgtccaaatgatggaacacatgcaaatgccacgaacattgacagatgctggcgtagcaaaagaaaaagtctatgcaaaaatggacgaaattgcaacaaatgcactgaaagacgcttgcttgccaacaagtccgacgacaccgacacatcaagaactaaaagaaattttagaacaaattatttagattttacgttaaaaaggaggataaactatgtcagcatatttggcggaatttattggaacgatggtacttattatgtttggtaatgggcttttagcaggtttaacattaaataaatcattatcacaaggagcaaactgggtagttgttacatttggttggggttttgctgtaatgattggtatttatgtcgctggagcatatagcggagcgcacttaaatccagcagtaactattgcgcttgcagttggaggttcattctcttgggcagctgtagttccgtacattatcgcccaaatcgccggagcatttgtcggagcatcgattattattttacattattatccgcattttaaagccacaccacaagaaattgatacacacggtattttttctactggaccagcgattcgaaatacaccgttcaacttaatcagtgagattattgcaacgtttgccttcatttttggattacttatgatcggcgagaatagttttacaaatggtttaaatccgttaattctcggtttcttagtagttgcaatcggaatgagctttggaccaacgacaggttatgcgattaacccagctcgtgatttaggaccaagacttgcttactttttactaccagtaccaaataaaagtggatcagactggcgttacgcttggattccaattgtcggaccaatcattggcggtctcttagccattggactatttaacattttattataaaaaataggatggagtaaacaagaagtaagttgtttactcctttaaaaatgagaaaggactgagctatatgcacaaaattatggcgataaacgcagggagttcttcactgaaattccaaatttttacgatgccaggagaagaagtcttagttaagggcttaattgaaagaatcggcttaccagatgccatattcaacatgtcctttcaaaatgaaaaaatcaaggaaactcgcgcgataaataatcacggagaagcagtggaaattctactggagcaattgaagacgcatcaagtaattaatgacctaaatgaaattacaggagtgggacatcgggttgcgcacggcggagaagcttttgtttcttcatgtattgtaacggatgatgttgtaaaggggattgaagatgtaacaagtcttgcgccgcttcataatccagccaatatcatcggcattaaaacattccgcgaactattaccaaatgccgtttcggttgcagtgtttgatacggccttccatcaaacgattccagaagaaaactttttatatgcgctcccttatgaactttatgaaaaacatcatattcgaaaatacggttttcatggaacaagccataaatatgtggctggaaaagcagcagaagttctcaagaaacctttagaaaaattaaaaattatttcttgtcatttaggaaatggggcgagtgtttgtgcgattgaagcagggaaatcagtgaatacttccatgggctttacaccaaatgctggcttgatgatgggaacacgttctggtacaattgacgcgacaatcatcccttatttagttgacgaattaggctatagcttggatgaagtgacacatatgatgtctagtgaatctggcgttcttggtgtatccggaatttctagtgattttagagacatcgaaattgctgcgaatgaaggaaattcgcgtgcattattaacacttcggatgtttactggccaaatctgtaattatatcggggcttacgcttctgccatgaatggttgtgatgcattattatttacggctggagttggtgaaaattcaccattaattcgtaaaatggttacagaacagctgagttatcttggtgtaacatgtaatgtgacaaaaaataatgcaggtgatatgataattagcaatgatgacgaagcggtcaaagtatgcattattccaacaaacgaagaactaatgattgctcgagatgtagaaaaatatacaaaacaaacgataagttaaggagcgatttgatgtgaaaataacgacggcaatgcacggtggcaactataacgaactagcaaaacaacatggattaaccaaagaaatgattctggattttagtgcgaatattaatccacttggcgttccagctagtttgaaacaaacgataacagcgaatttggataaactggtggaatatccagaaccagattacttagcgctccgtgcgcgtattgcctcgtttcatcaacttgacttagcaaatgttattccaggaaacggtgctactgagctgattttcggaatcgcaaaagtaaccaaggcgcaaaaagttctcttacttgcgcctacttttgcggaatatgaacgggctttttttgatgcggaaattatttatgcagaattaacgaaagaaactcattttgctgcagcggaaacggtactagaaatgattaaacgcgaaacagatcttgaagcggtttgtttgtgcaacccgaataatccaaccggacaattaatatcgcagcaagaaatgatccaaattgcagaattatgtgaagaacgaaacatatatttaatcattgatgaggcgtttatggattttttagaaggcaacgaaacaatttcgatgattaattatttagggagctttccacatttagcaattatccgggcattcacaaaattttttgcaattccagggctaagacttggttatttgttgaccaaaaatgatttgctagctgaagcattattacaaatgcgtgaaccttggtctatcaatacttttgccgatatggctggtcaagtattactagatgatacagactacatcactcaaacatacaactggatttcagctgaacgagattttttatatcaagagttgtctaagtttagcgaactaaccgtgtatcgcccaagtgtaaactacatatttttccatcttgaaacaccgcttgacttacgaaaagaattattgttaaaagggatttttatacggagttgcgccaattaccgtggactcactgaaaattattaccgagttgcggtgaaagctagatgtgataataccaagcttataagagcgctcgaggtgatttttagtggaaattaaagcaacttgtcccgcttcatgtggcgaacttttgcaaggatttattactggcggcgaaaaattgatttcatacccaatcaactggtattccgaagtaactttatccgataaatcagggcaaaacagccaaggtcatacaaaagcatggctcgcattcgaggtaacttgcgagtattttggcgtgacaaaaaaagaacgtccacctatatcgttactagtaaaatcgactattccggtcgccaaagggatggcaagctctactgctgatattgccgcaacaataggggctacagcaaaatggttaaataaaccgataacagaaaccgaaattgccaaactttgtttacaactagaaccaacagatagcacgatttttaaatcactcacactttttgatcatttaaaagggtccgtgattgaaagttctaactggatgccgaaactgggcgtcgttgtcctagaaccacttactgttttggaaactgcaacatatcggcaagaagaccaccatgaacaattgctggaaaatgaacaacaattagccaaagctgtgcaatttttcaaccaagcggcagcccaaaaatcaatcaacttgcttggaaaagccgccacagttagcgcagcgagcaatcaaatcattttacccaaaccgttttggaatgagttgttagaagtggtgagttgtttaaatctagtagggatcaatgtgtcgcatagtgggacggtcgttggtttactgtatgagttaggtaagatagacccgctagaaattttattcgaattagaacgacgctatgtcaccactttttacagcaggtattactttagggagctcgttcgaggtggggttcaaataatttcataaagcaaattcttcttgcaagcggattaatttatgctataataactttgataaacgaattcgttcatacaaacagttagatactggaagtctggtgaaaatccagcacggtcccgccactgtaaggagttagacactctaagtcaggtcttttatctaattgttttaactggttatactgcttcgaggcaaagcatgtataattcttggttccagtgtagttgtctcactggggcttttttatttgtttttaaaacaaataagcccactgtaaatggtttggtgccgagaagctggacgaagctacgttttatcaagcaccatacgcacaaagatgtgcaccgcttagttttatggtgggcaatgatcttttcaacgacgaaaagagtgatacaaggaacgtatcttcattgcctatttacaaaaaaagatttgacatttccacgcgtttggtttttaataaagtggacaaataaaatattttacggtacaaaggcgtactgtttacttagcaaagaagctttgagttggaagaggaaatttctctactcaaggcttctttttttagttttaaaaaattaggaggtaatctcatgcaaaaagttagttttaaaacagatctttacattggccaaggagcaacagatcgtttactggattttaaagacaaacaaattttcatcgtaacagatccatttatggtgagctcaggaatgattaatgctattacggaaaaaattgataagtcgaatacatatactatttttagcgatattattcctgacccgccaattgaaaacgttgtagctggaattgaagttttaaacgaatgtgatgccaacttgatgatcgctatcggtggtggttccgcgattgatgcggcgaaagcgatgaaattctttggtcaaaaacttggtacggtgcgcgcaatgccattcatcgtaatcccaactacaagtggaactggttctgaagttactagtttttctgtcattacgaataaagaaaaagcaattaaatatccacttattactgatgctattttgccggatgaagcgattttagatgcggatttagtgaaatctgtcccacctgcaatcacagcagacactggtatggatgtactcacacatgcgctagaagcatacgtttccacaaaagcaaatgattattcggacgcaatggctgaaaaagtaatccaattagtattcacatacttggagcgcgcttataaagacggaaatgatttagaagcacgcgaaaaaatgcataatgcttcttgtttagcaggtatggcatttaatattacctcacttggtttaaaccatggtatcgctcacacagccggtgctaagtttaaaattccacatggtcgtatgaatactttacttttgccacatgttattagttataatgctggattaacaagtgattttggtaacaatccagataaccgtgctgcagaacgttatacagcaattgccaaattactaaaaatgccagcttccaatacaagacttggcgttcgtagcttaattaacgcaattaaacaacttcaaaagaaactcaatatgccaacaacattatctgaatgtggcgttagtcgtaccgatttaaacgagcatattgcgcaaatcgcggaaggtgcgctgaatgatggttgtactgcaactaatccaagaacaccgacagaaacagatgttagtgcgattctcgaaaaaatgttggcttaaaagttatttatttcacaactggaaacaaataacctattgacatcgttttcatgctactttataatagaaccgagcacaaagacgtgtggaataataaatatagcagagcaacggggctccctcaaaaatattgcacaatatttttaaggggctctttctattttctgggagaattttttctctagctctttaactctttcgctcaagtatatgcttctatagagtgatttcgtagagctttgttacgaatcaatcaatagcagaagaagaggacgtgacaggaatgaatggaagaattgtaatagccgatgatgaacctattacaagaatggatatccgagacatattggaagaagcgaactacaatgttgtaggggaagcgacagatggttttgaagcaattgaactttgtaaaagccatcaaccagatcttgttattatggacattcaaatgccactcttagacggtttaaaagcagggaaacggattatttctgaaggccttgctggcggtattattttattaaccgcatttagtgatcccaaaaacactgaaaaagcaaaaggattcggagcattaggttatctagtaaaaccacttgatgaaaaaagtttaatcccaacagttgaaatgagtattgccaaagggcgagaaacaagaaaactagagcagcaattagaaaagctcacaaaaaaattagaagaacgaaaagtgattgaaaaagctaaaggtgtgcttatgattgagaacaacatcacagaggaagaagcctacaacatgattcgtaatctgagcatggataaacgttgtccaatgatggaaatcgcagaaacgattgtgatgagcgatgactaagacgattcgagaaatgtgtttacgctatacggacttggcagaatatgatattgatgaattaatacatactgcaaaatcgttaagcgagtcttccatgtatcaagatgtagatgttttcattgatgtttataacaaacttactagtgaagcacttgttattcatcatacgccgccaaaatcaaccaagtcactttataaaaacaatgtagttggagaaactgctcttcggagtaatgaacctggtgtacttagaacacttgaaacaggtatgaactccaacgacttgcttgccaaaacacaagaaaacgtattaattcgtcaaaaagtgtatcctatccgtaacaaacaacgagtcattgccgtacttattctagaaaatgatattagtgcagaaattaaagctcattttgaaatcgacaatgaagaaacagcctatagggatgtttctacaacactttccgcgatgagtaaattaaccgattctattactgatcaactagatgatgcaatcttgatttttgatcgtaacggtattttacaacaaaaaaactgcgctgctgaccagtattatgaacgactcggctacatggaaaatatccaaggaatgcattatgataatttatctctcgaccagatgatgtttgatgcaattatgtatcaaatcgaaacgggaaaacagccagttcaattaaaaaaagaagtggttattgccgggaattactttattatgaagcaaatttttgtgaaagaagaggatgaacaagaatgtcgttttatccttatcttacatgatgtcacggatattaaagtgaaagaagcggaaatcgtttcaaaatcggtggcaattcgcgaaattcatcatcgtgtgaagaataatctacaatcagttgtttcactgctgagaattcaaggcagacgttctacaagcgtggaagcacagaaggttttgaatgagagtgtcagtcgtatccttgcaattgcagctacacatgaacttttatccaagcagatggaagacggcatcaacttatatatggtaattgaagcagtcgcctataatattgaaagatgttgtaacgattgtccgcaagttgcagttagaatggatattgataaacggatttacttggatagtgaccgaaccgtggcactagcacttgttatgaatgaactactacaaaattcatatgatcatgctttccatccaaatgaatcaggcgaaattttactacaaataaaagaagaaaaaaatattattcacgcagaagtaagcgataatggtcatggctttaatgttcggaaagtatccgaaaaaagcctaggactttccattgtcaaaagttacatcaaagataaactgcgcggtaaagtaacaattgaatcaaatgaacatggaactaaaacaatgttcgattttaaatacaattcaatccatgctacaaagaagtagctatgaaaaaagcgatgaagcttaaagccaagtaacgatactgttatttgtctttaagctttttctttttgctagaaaggagtgagggttttgacggaaacgattttaagtgtagggattgaccttggtacgtcgacaacacaactcattttatccgagttagaaattcaaaatatggcatcaagcttcacagtgccgcgcattgtgatttcagataagcgaatcatttttagaagcgagattctttttacaccgattcttgctgataatttaattgatgtagatgcaattcgtgattttgtaacgaaagaatatgcgaatgctgggattaagaaagaagaaatcggcatgggggcagttattattacaggtgaaacggctcgtaaagataatgcgagtaacgttctagatgcgatgagcggttttgcaggagactttgtcgttgctacagctggacctgatttagaaagtattattgctggaaaaggagcaggtgcgcatacttattctaaagaaaatagtacttgtgttgtgaatctggatataggtggcgggacaacaaatttatcgctatttgatcgcggtgagcttattgatacagcatgccttgatattggtggtcggttaatcaaagtggaccgtgaaacaagaaaaatcacctatattgccccaaaaattcaagctttaatagaaaaacgtggttatccaatcacgctaggtgagaaaacctcgccagaaaatttacaaccaattctaggtgaaatggtagagttacttaaaaacagtgtcggtcttggagctccaaatgatttttacgaaacaatcatcacaaataaaggcttaaaattccttgctgaaattgaatgtatttctttttcaggcggtgtggctgattgtatttcaactggtgctttaagtgatccgtttagatacggagatattggtcttttactcggaaagtcaatagctgaatctagcttgatgaccgaaaaaaagtatatcgaatctgtcgaaaccatacgggcaactgtggtaggagccggttcacacacagcagaaattagtggtagtacaatcacttataccgagaaaattttcccagtaaaaaacattcctattttgaaacttgccaaacaagaagaaaatgaaaatatggcagaagtcatcaaggaaaaactcaactggttcaaaatagatgaagatatggaacggattgcacttgcaattgaaggggagaatagccccagtttccagcaagtaacagaatatgcaaaggccatttgcgaggggatgaaagaaccgatttcacttgggcacccactaattatcattacttggcacgacatggcaaaagcgctcggacaaagtattttcgggcatttaccagccggctatccactgatttgtttggatagtgtcaaagtcgataacggtgattatattgatataggaaaaccagttgctgacgggaaagtgctaccagtagtagtaaaaaccttagtctttaactgatccatataaatagctttaattttgagaggaggatttatcgaatgattttaaaaacgaatttattcggccatacataccagttcaaatccatcactgatgtgttggcaaaagcaaacgaagaaaaatcgggcgaccgtttagccggagttgctgctgaatctgcagaagaacgtgtagctgccaaagtggtgctttctaaaatgacgcttggagatttacgtaataatccggttgtcccatatgaaacagatgaggtaacccgtattattcaagaccaagtaaatgaacgtatccatgattccattaaaaactggacagtggaagaattacgggaatggattttagaccataaaacaacagatgctgacattaaacgtgttgcacgcggcctaacatcagaaattattgctgctgttacaaaattaatgtccaacctagatttaatttatggagcgaaaaaaattcgtgttatcgcacatgcgaacacaacaatcggtcttccaggaactttctccgctagactacaaccaaaccatccaactgatgatcctgatggtatccttgcttctttaatggaaggattaacttacggtattggggatgcggtaatcggacttaacccagtagatgattctactgatagcgttgttcgtttacttaataaatttgaagaatttcgtagtaaatgggatgtgccaacacaaacttgtgtactagcgcacgtgaagactcaaatggaagcaatgcgtcgcggcgctccaactggtcttgtattccaatctatcgcaggttctgaaaaaggaaatacagctttcggttttgacggagcaacgattgaagaagctagacaattagctcttcaaagtggtgctgcaactggaccaaacgttatgtattttgaaacaggacaaggttctgaactttcttctgacgctcatttcggcgtagaccaagtaacaatggaagctcgctgttatggttttgcgaagaaatttgatccattcctagtgaatacagtagttggatttatcggacctgagtatttatacgattccaaacaagtaattcgcgccggcctagaagatcacttcatgggtaaattaactggtatctctatgggctgtgacgtatgttacacaaaccatatgaaagccgaccaaaacgacgtagaaaacttatccgtgcttctaactgcagcaggatgtaactttatcatgggtattcctcatggtgatgacgtaatgcttaactaccaaacaactggttaccatgaaacagctactttacgtgaattatttggtctaaaaccgattaaagaatttgatcagtggatggaaaaaatgggattcagcgaaaatggtaaattaactagccgtgctggagatgcatctattttcctaaaataaggaagggaggaactaagcgatgaacgaacaagaattaaaacaaatgattgaaggcattttaacggaaatgtccggtggtaaaacaaccgatacagtagcagctgcgccaactaaatctgtagttgaaacagttgtaacagaaggtagcatcccggatattactgaagttgacattaaaaaacaattactagtaccagaaccagctgaccgcgaaggctatttgaaaatgaaacaaatgaccccagcaagacttggtttatggcgcgctggtccacgttataaaacagaaacaattcttcgtttccgtgcggaccatgctgttgcacaagattccgtgttctcttatgtttcagaggatttagtcaaagaaatgaacttcatcccagtaaatacgaaatgtcatgataaagacgaatacttaactcgtccagacttaggtcgtgaatttgatgatgaaatggtggaagtgattcgtgcgaatactacgaaaaacgcgaaactacaaatcgttgtcggtgacggacttagttctgcagcaattgaagcaaacatcaaagacatattaccttctattaaacaaggtttgaaaatgtataacttagactttgataatattatttttgtaaaacattgtcgtgtgccatccatggatcaaatcggcgaaatcactggcgctgacgttgtgtgcttacttgtaggcgaacgtccaggtcttgtaactgctgaatctatgagtgcttatattgcttataaaccaacagttggtatgccagaagctcgtcgtactgttatttctaacattcatagcggcggaactccaccagttgaagcaggcgcatatattgctgaattaattcacaatatgcttgagaaaaaatgttctggtattgatttaaaataaaattgttagaggaggaaacttcatgaaaaacgataaattacctgcatccgttttaagcgtcaaagttgtatctaatgtagacaatggtttatttaaacaacttgacttaaaaccgcatcaaagaagtctgggtattattacatctgattgtgatgatgttacatacacagcacttgatgaagcaacaaaagcagcagaagtagatgttgtctatgcgaaaagtatgtatgctggtgctggaaatgcatccacaaaactagctggtgaagtaatcggtattattgccggaccaagcccagctgaagtaaaaagtggcctttcagttgcagtagacttcatcgaaaatggcgctagctttgttagtgcaaatgaagatgatagcgtaccttactttgcacattgtgtatcaagaacaggttctttcctttcaaaagaagcaaatgtagcagaaggacaagcgattgcttacttaatcgcaccgccacttgaagctatgtatgctctagatgcagctcttaaagcagcagacgtagcaattggaactttctacggaccaccatccgaaactaacttcggtggagcacttttaacaggtagtcaatctgcatgtaaagctgcttgtgatgcgttcaaaatggcagtagaaaatgtggctgaaaatccacttcaatattaaggtggtgctaaaaaatgccaaatgaagcacttggtttaattgaagtcactggtttccttggtgctgtggttgccgctgatacttgtttaaaagcagcaaatgttgaattaattagatgtgaagtcattaaaggtggcttaacaacagttgaattaacaggcgatgttggtgctgtaaatgcagcagtggaagcaggaaaagcagctacagaaagcttaggttgcctcatttctagtcacgtgatagcaagaatgagtgaagaaacgaaatcactctttgtaaaagctgagcaagaaatagaagaaacaaaagaagttatccaagaagtcgtagaagtaaaaacaactacagatgaaacggaaaagaaacttcgcgaaatgaaagttattgatttaaggaaacttgcttacacattagataatgtgcctatcccaaaaagcaagattaaatatgcgaacaaggataaacttgttcacgcactaaaagatatttatggaaggagtgaaaactagtggcactagaagataaagatttacgctcaatccaagaagttcgtaacctcattgaatcagctaacaaagcacaaaaagaacttgctgcaatgagccaacaacaaattgatacaattgtaaaagcgattgctgatgccggttatgatgcccgcgaaaaactcgcaaaaatggcacatgaagaaactggttttggaatttggcaagacaaagtaattaaaaacgtcttcgcctccaagcacgtctacaattacatcaaagatatgaaaaccattggtatgttaaaagaagataacgaaaagaaagtaatggaggttgcagttccactaggtgtagttgcaggattaattccatcaacaaaccctacatccactgttatttacaaaacactaatttcgattaaagcaggaaatagtatcgtattttctccacatccaaacgcactaaaagcaattcttgaaacagtaagaatcattagtgaagcagcagaaaaagctggttgtccaaaaggcgctatcagctgtatgactgttccaacaatccaaggaacagatcaactgatgaaacacaaagatacagcagttatccttgcaacaggtggttctgctatggtaaaagccgcttattcatctggaactccagcaattggagttggcccaggtaacggcccagcatttatcgaacgcagcgctaacatccctcgcgcagtaaaacatattcttgattctaaaacattcgataacggaacaatttgcgcatctgagcaatcggtcgttgtggaacgtgtgaataaagaagctgtcattgctgaatttagaaaacaaggagcacacttcttatcagatgcagaagctgttcaacttggtaaattcattttacgtccaaatggatccatgaacccagcaatcgtaggtaaaagcgtgcaacatatcgctaaccttgctggtctaactgttccagctgacgcaagagtacttatcgctgaagaaacaaaagttggcgctaaaatcccttattcaagagaaaaattagcaccaatcttggctttctacacagcggaaacttggcaagaagcttgtgaacttagcatggatattctttatcacgaaggagctggacatactttaatcatccactctgaagataaagaaatcatccgcgaattcgcactgaaaaaaccagtttcccgtctcttagttaatacaccaggagcacttggcggaattggcgcaacaacaaatcttgtacctgctttaacacttggttgtggggcagttggaggaagttcatcatctgataatatcggacctgaaaatctattcaacattcgtcgcattgctactggcgttttagagttagaagatattcgtaaagaagaaaaccaagcaacacctgaactttcggttgatgcagacgcactcatccaaagtttagtagaaaaagttttagcagaattaaaataaaaaataaaacactaattggaggaattttaaaatggcaaacgcaaacgcattaggtatgatcgaaacaaaaggtttagtaggagcagtagaagcagcagacgcaatggtgaaagcagctaacgtaacacttatgggtaaagaacaagttggtggcggtctagtaacagttatggttcgcggtgatgttggcgcagttaaagcagcaacagatgcaggcgcagcagcagctgaacgcgttggtgaattattatctgtacacgtaattccacgtccacacagcgaagtagacgcaattctaccaaaaagcgctgaataagaaaaatttctaacataaatcaggaaaaagcgtgagcgtagggcataagggttccatcagactcggaaaatgcctaaaactttcgctttttaccagatttaagcaagacaaagcttcccatcattactaacaccaattgtaaatgggacaaaaggatgtggttctttggctattttgacagaagatgagttacgaaaagcctacttacacaccgatttaaaaacaaagaaaaaattagatataaaaaaaggaacgattattactccatcagctaagagttttttatctgaaaagaaaatcgaccttcattatattgatgaaatttcagaaacaaaagtagtagtggagccagtgaaaaaagaaactgctagagcaaaattccaaacgatttatggtggttcagtagatgaaaagccagaacatatgacgcatttacgcggcaacttgcttgtatttaaagaccatcctcaaatcgctttccgcggaaaattagatacgcttgaagctgaaatcctggaaacccagtgttctgttgctagtgaatttaaagatcttgcggaagatttacaagaaatcctcacctttgtaagaaatattgtacgatcggaagttttaaacgagcaaatcgaaacggttaatttgcttggaatggacgaaaaagaactgcgggaacgtagtcataatccgaaaaaatactaccaaatgacacattttatgcccgattatacgatggggaatgctgttattcggttaaacaaattaagaacgatggttcgtgaaacggaattaactgcttttgcagcatttaaggaagcggattattcggtaaaaagaccagatattattcaagcgcttaacaggttatccagtttgttttggatactaatgttccgcgtaagaactggtgaatataaaaagtaaggaggcttattcatgaataatgagttaataacaagccttattgaagaagtcactcgccgtgcattacttgaaactggcgtagaagtagaagcatccggtcgtcacgtccatttagatcgtgagacagttgatgcactttttggacctgggtatgaacttactcatttccgtgacctatctcaaccaggtcaatatgtttgtaaagaaagaattagcattgttggaccaaaaagcgtgattcataacgtagtaattcttggaccaatccgtaaaaaaacacaagtagaaattagtgctacagacggtaccgcacttggtattaaagcacctgtccgcgaaagtggagacatagccgggacaccaggaattttacttttatctgctaaaaacagtgttcaattaactgaaggacttattgttgcaaaacgccatattcatatgacgccagaagatgcagcaaaacaacaagtaacacaaagtgaaattgttcaagtgaaaattaatggcgacagaccactgatttttgacgatgtggtcgttcgaattagccctgattttgctacatatatgcatattgattacgacgaagccaacgcatgcggctttaaaaagggaattcgaggtcaaataattaagaaaacaaaggcaaaatgagtatggaaatggaagctctaataaaagccgtcaccgaggaagtcatgagacgattacaacttccagataaaaaaatgattatcatggggcaagattcagaacacactctcagacagtgttatcaaaaagaatatcaagtttcgctttatgatcgttctgaacgtacctgtgacattttattattagaagaaatggaaatcgctgaattagctcgaatcagtttgcttgcaccaatgaataaaaaagaacaatttatcacagatcatcttttagaagaacgtcctacttggatcatgaaaagcggaattaaagcaaatgcttataaacgttctgctaaatatggtatcagacagctccttcaagaatatgaagaaaaactcgctcgttttggcgtagaatatatcgataatccggtgaaaaacgtgaaaacgagcaaagtaattagcgaacaagatgtgattaaactcacgaagaacaaaagcgaattcattttgccagagggaagtttcttaacaccacttgcaaaagattatttacaggaaaaccgaattagcattaaagaaagttaggaaggaagagcggcatgcaaattggaaaagttaccgggagtttatgggcgacaagaaaagatgaaaaactgaatggtttaaaactactactagtagagatttgtaccgatgaagtggaagataaaagacattccatagtggcagctgataatgccggagcaggaaacggtgatctcgtgctcgttacaactggtagcgcagcacgagcatctactggggataatacaataccagtggacgcgtgtatcgtcggcattatcgactcggtagaacgttatggctgaacagtccttaggtattcttgaactcaggagcataagtaaaggttacgaaatggccgatgtttttttaaaagctggcaatgtaactttatttacttttcgtccgacatgtcctggtaaatttttgattattttgcaaggtgcttccggtgaacttactagtgcgatgcaagatgcaaaagaagaagcagggaaatttcatgtttcttcttatattttgcatatggcgcacgaagaattacttgcttttctaaacaataaacaccctaaagttgatgttgatgcagtaggaattatcgaaatcagtcaattgggtgctgggctaaacgcggtgaatgaagcgctaaaaaaatcagctattcatttaaaacgaatgacgctcggtgcttcgattggtgggaaatttgtggctgtttttacaggggaagttagtgctattcaagaagggatgcggattctaatcgaaaccgcagaaccaaaaaaggtgatacatcatacggtcattccttctcctgatgaacttttaaaacgctatctatagaatggaggaacacttttgagcattaatgaaattattatttatttaatggtaatctttatgattctaggagccattgacaaaattatcggtaacaaatttggcttaggagcacaatttgaagaaggtattatggcaatgggatcgctaactctagctatggtcggtattattactttagcaccagttttagcgaaaattttaagcccgattgttgtaccaatttatacagcgcttggggctgacccagcaatgtttgctacaactttacttgcgaatgatatgggtggttttgcgctagctcaagaacttgcgctaacgcctgatgctggtctttttgcaggagctattttaggctcaatgatgggaccaacaattgttttcacgattccagtagcacttggaattattaaaaaagaagaccataaatacctagcgactggtgtactatctggtattattacgattccaatcggttgtttaatcggtggtcttgtagctggattttcaccaatcatgattttcaaaaacttagtaccaattcttcttgtagctgtacttattatgttaggtctttggttcaaaccagaaggcatgattaaaggctttacgattttcggaaaaggggtagtaattgttgctactatcggacttgtggctggagctattcaacaacttactggtttaactattattccaggaattgcaccaattggcgaaggtatcgaaatcgttggtggtatcgcactagttctagcaggagctttctgtttagtttttgttattacgaaagtgttcaacaaaccacttatgaaaatgggtaaattacttggtatgaatgaagttgcagcggctggtatggttgcgacacttgcaaatagtatcccaatgttccaaatgctaaaagatatggatgagcgcggtaaaattattaacgttgcttttgcagtatctgcggcctttgttttaggggatcatctaggtttcacagctggggttgcccaagatatgattttcccgatgattgtcggaaaacttgtcggaggagtaactgcagtagctgtagctatctacatggctaaccgaatgatgaagaaaaataaagcaaaagaacaaacggcggtgaaagataatggctgatattagtaaagaattaattgagcagctagtaaaacaagttgtcctagaaaaaatgggtcaaagttccaaacacgttgacccaagtggtattttatccgttaaacttccagaagtaagagtttctgaagaagaccgtttagatactggtaaccctagtgatgttgtttatacaaaagatttagtaacattagaagaaagtaaacgtctaggttttggtctaatggaaatgaaagatacaacatttgattggttcttagattacgatgaagtagattatattattgaaggcagactagatgttgtcatcgatggtagaaatgtttctgcaggaccaggcgaactgattttcattccaaaaggaagccaaattaagttctctgtaactggagaagcgagattcatttatgttacttatccggctgattggcagtcacaataatcataaaaaaacgatttcggcaacatttgctgaaatcgttttttatttaagtgaatcgcgatattctttaggagtcatatcgaactctttcttaaagactttgcaaaaataactagcacgcgaaaatcctaaattctttgcaatcgtgtggacggcccagtcacttttttctagttgttcctttgcatatagcattttttgttcattgacgtaattaataaaattgatattcaattcgtttttaaataatttacttaaataaaaggggcttaaataaacataattggctacttcttctagagtgatggaacgatgaatgttctttttaatgtagcgaatagcttgtttgatttctttatgttcaccactcgttttactggatgtggcagcttcttttttgggttgtttttgtttttcgtgagcggtgtagtagtcacttaaaacatcaagtacttcgactgtttcgagcgaatgaagtagggcagagtgatctggattttttttgttgaagtcttcttgaatttgttgggtaaattgattttctacctgactattcatcaaaggttgaatatttactactttttctttctccaaaaatcttccctccttattttattcttgcactaattataccataaaatcgcttaaaataacgttttatcctgcattttaaacagaacaataaattcttttttataacaaaatattgtcatttttgctttgtgaattagagaaattgagaaaaagttcacactggtggctattttaagtgtatacaatgaaaaaaatacgattttaaaagcttgcactattttgctttctagcctgttagtgcccttgtaccagtgttttaacagggatataatgagatggaaataacgctttcacgagagggtgatcttttcaattgaagattcaaaaattagtattatgtgcgatgttgattgcaatgtgtgtaattggcgcaaacataaaattaatgggttctgttgcatttgacgcagccccagcttttattgggactttgctgcttggtccgatgtacggtgcagtgcttgggattttcggtcatttaacatcagctttacttgcgggatttccgctgacactaccgattcatttgattgttgctggaatgatgggcgtaacgatgattgcttatggatttacgcgccacaagctagctgaaaagaatcaactagttgctattagtgcttctagtgttgtcgcttttgtttttaattgtccgttatcattacttgcgctttatccattaatgcatcaagcggtatttgtgttatttccggttctagctattggttcgatttgcaacatttttgtcgcagaagtcgtttaccaagtattaccagaacgctggaaaagacgaattgccgggtactaaacaactaaataggtgaatatattaatccgggaaagaggtggaaatcctctacaggccctagctactgtaattcggacgaaagccaaacatatgtcactggaagaaattccgggaagactggtgagtaggttgatgataagtcaggagaccgctagtatattcgatatccaaaaacaacttctaagggagcgagttgtctttattaaacagattttcatgataagaaagtttctttgtgctacatagaattcttattgatgttaaatctctaaaagacgccaaagttctgtttggcgtctttttttatggctaaagcgaaaggtgaaaaaagatgaacaaaatcttaattgcagccgcatcaagtggtgcaggaaaaacaaccgtaaccctcggaattatgcaagctttgaaaaaaagaggcttcgcggttcagccatttaaagtaggtccagattatattgatacgaactatcatcaagcaattacaggtgttgcttccattaatttagatagttttctcattgatgatgacgagatgctagcgtccctttttcaaaagcacggcgagtctgctgatatttcggtcattgaaggagtgatgggattatttgatgggcttgggactgatcgcgataatgccagtacttcctttattgccaaatgcacaaagacaccagtcattttagttgtggatggaaaagctatttcgacttcagcagcggcgattgttgacggattcaatcgttttgatccggaacttaaaattgctggcgtcattattaatcgagttgcctcagaaaaccatttttctttaatcaaaggggcgattgagcgttatacggatgtaccagtgttaggttacttgccaaaaaatgcggcagtggcacttccagaacggcatctaggattagtaccacaagaagaaatgactgagctcgaagcaaaatgggagctactttctgacctcattaccacgcatgtggatttagacaaattactcgaaataagcaaatctagtgagaacttatctacttctaaagcgcaaatgaaagtagcagatttttctgggcttcgtgtcgcttatgcgctagatgcagcatttcacttttattatcaagataacttggatctgattcgtttgactggggcagagttaattccatttagcccgcttgaggataacgaggttccggaagcagatttcatctatattggcggcggttttccagaaatttttgccaagcagcttaatgacaacagatctatgcggaagtcaattttggctgcgcacgaaaagggcattccaatttacgccgaatgtggtgggttgatgtaccttggttcgagtttagaaatggaaggaaaacagtatgaaatggtgggagtttttaacggtattagtaagatgacaacaaggctgcggaagtttggctactgtatcgcggaacctttagaagaaacgttaatcggcaaaaaagggatgtcgattcgcgggcatgaatttcatcattctgtttttgaaacgactgaaacagcttgtatgaaactttcaaaaaaacgtgacggtgaaatagttaaagagtggcgtggtggttatcaaaaaggcaatacttttgccagttatctccatatccacttctaccaaaatccggccattttaatgcagatgtttggagctggaaagagatgagcgtactcttttataccatatcgtttattttagatttcatactaggtgacccttacagctggcctcatcctatcaaggtaattggtaactttattcaattattaacgaacgctttgcggaaaatttttcatggtaaatcactgtattttgctggaggcctattattcattcttacagttggaatgacgggaattgtttcgtggctcatcctttatattagtgcaaaaattgctttttggctttatgcggcggtgtttatttacttagggtatacgacacttgcgatgacttgccttgcgaaggaggcgcggaaaattcagcgaacactcgcggatggtgatttagaagcggctagagtacaagttgggatgatagttggtcgggatacagacaagcttacggcagaacaaatcagtaaagccaccattgaaaccgtggcggaaaacacagcagatggcgttatagcaccattattttacttattcattggaggacctgtgctagccttgatgtataaagccgtgaacacacttgattcgatggtcggttataaaaatgaaaaatatcgcgccattggttttgtttccgcaaaaatggatgatttggccaatttcattccagcaaggctatcttggtttttccttgtgattgcgagttttattttgaagtatgatggacgcactgcatggcggatagggcttcgtgaccggaaaaatcatacaagtcccaattgcgcatatccagaaggcgcggtagcaggagcgcttgggataacacttggtggcacccatgaatatttcggcgagacagttgttaaaccaaccatcggcagtggaacaaaagccgttacacaaaaagaaatcagtcaaacaattcacttactatacacagcttccattattgcttttctaatttttatcagtatacatttaatactattttaaaggagtggcacaatgaactacattaaaaatccagccaaaattgaagagaaaagttttgaaatcattcaacaaattattgacgatattcgaccagattatacatttcaaaacaaactagaggaagccattatcaaacgtgcgatacatacgacagcagattttgattacttggatagcctcgtttttcaacaagatgttatccaaaaaattattcatgttcttaaaaataaaggaaccatttttacagatactaatatggcgcttagtggtattaataaacggctgttagatgaacttggctgtagttatcactgttatgtgagtgatccagaaacgatcgaaattgccaaacagcatggcatcacgcgctcaatggccggaattaaacttgcttctttaaaagatggaccgaaaatatttgtcctagggaacgcgccaactgcggtttataaaattatcgaaatgacggaaagcgggcaattacaagcagaggcggtcgttgcagtgcctgtcggatttgtcggggcagctgaatgtaaagaagaaattcttgaaaccgacattccagcaattgtcgctcgtggtagaaaaggcggtagtaaccttgccgcggcaatcattaatgcaatcttgattacgatgtaaagaaggcgacgagcagtggaagattttatttattataatggcaaaaaatatcgtaaaggctatacaactggaacgtgtgcagctgccgcggctaaagcgtgtgtcgaaatgatagaaaaccaagaagaagtaagcgcggttaaagtcacaacaacaggtggaactattcttgaaatccccgttgcctatcaacagttttctgaaaaaaaggcaactgcagctgttcaaaaagatggcggggatgatattgatgccacacacggcatgtggatttttgttgatgtcgaattaacagatagtccggaagttactttagatggaggcgttggaattggtcgcgcaacacaaaagggtatttcggttgaagtgggtgaagcggcaattaatccggcaccaaggaaaaatattttagctacagtacgcgaatcacttggcgaaaatcgtggcgcaaccattttagtatatgctcctgaaggggaagaacgcgcgaaacgaacaatgaatagcaacctcggtattatcggcgggatttccattttaggaacgacaggtattgtcacaccgatgtcggatgaaggctggaaaaaatcattatcaatggagctcgaaatgaaacggaaccaaggacttgaccaaattattcttgttccaggtaattacggcgatgattttgttcaaaatacgcttggttttgcgagtgataacatcgtttccatgagtaatttcgttggttacatgttgaaagaaacccaacgactcgcatttaagaaagtattgatggttgggcattttggcaaattagtgaaggtttcagctggtatttttacgacctatagcaaggatgcggatgcgcgggcagaaatcttggtggctaacttggctttactcggcgcaccattatcacttttacaagaagtagagaagtgtaatacgacagaggctgcaggcgaattaattgaagcagctggttttactcaagtttatgaggtaatcgcacaaaaaatcaaagcaaggtcagaacgcttcttgaaattcactaagccaagtgtggaaattgatgtcgttacattttcaactgaaagaggcttacttgctgcaacgaaagacatagaagtattgcgggaggaatggcgatgattacagtggttggaatcggaccaggagatacgaatttgctaataaacgcagcaagacaagctttatcttcagcagattcagtgtatggatcgaaaagacaattacaagaaatagctgaattaacaactgcaacgtgcctattgttaccgaaaaaattagcagatttaaaaaatattcctcatcaaaataaaaacgtcgtgattttagcatcaggcgatccactgctctacgggattggcaactgggcgatgacgaatttttcagaagatattcatattatcccgggaatcagtgcaatccagatgatgtttcaccaaatcaagctgccgatgaatgattgttttataacgagcagccatggtaaaacaccaaatttcgattttttgctccaacatgaaaaagtcgcaatggtaacagattccattattggaccatacgaaatagctgctgaaatctcaaaacgaaatctaaaaaaaatcatgtttatcggtgaaaatttaagttcaacagaagaacgaattcataagctaagaccagaggaagttgaaaaaaaatacgatatgaatgttgtggtgattgtcgatgaaagatgacgtatttattcgcggaaaagttccgatgacaaaaagcgaagtgagagcaataagtattgatttactcggattagataatacaagtaaaaaactgctagatgttggcgctggaactggaagcgttggacttcaagtagcttataattttccacatatcaaagttactgcaattgaacgaaataaagatgcggtggacttaattaaacaaaaccaagccaaattcggcgtagaaaatgttgcagtcatcgaagcatatgcaccaatcgaattatctcaggaagagaaatttgatgccatttttattggtggtagtggtgggaatttaaccgatattatcgactggtcgttggttcatttgaaactaggcggtcgcttggtacttaattttattttattagaaaatgccttacaagcaatgaaccatttagaaaaattaccagtgagtgaattgacaatgaagcaaattcaagtttcaaattggcataaactcggagctggacattattttgaaccacagaacccaaccgtcattattggctgtaaaaaactagaggagtgaagaaaatggcagaagtacatttcgtcggagcaggaccaggagataaagaattaatcacactaaaaggataccaattattaaaaaacgccgatgttgttatatacgctggctcacttgtaaatccggaattgctagaatactgtaaaccggactgcgaaatccataatagtgccagtatgaatttaatagaaattattgactgtatggaagcgggagtaacagctggaaaagaagttgttcgtctgcaaacaggagacttctctatttacggctcgatccgtgaacaagtggaggaaatgaaaaaacgttcgattccatttacatgtacgccaggtgtaagttcatttcttggcgcggctagcagttttggtgttgaatatacggttcccgaagttagccagagtgtgattattactcgaatggctggaagaacgccggtaccgtcacgtgagtcactcagatcttacgcagcgcaccaaacgtccatggttattttcttatctgttcaaggtatcagaaaagtagtctcagaacttatcaaaggtggctataaaccagaaaccccagcagctgttatttataaagcaacttgggcagaagagaaaaaagtaactggtacgcttcaagacatcgctgaaaaagtgacagaagcaggaattactaaaacggccctaataatggttggtgattttctcggcgaagaattttattattctaaactatatgataaggatttcaaacatgaatacagataaaattgccattatcgcagttactgaacgagggcgcgatttagcaatttcattaacaaaaacattaccaggaacggtctttgtcccagaaaagcaccagaatgaacagactgcagttttaacgcctaattttggtacagcaatgcgtgaaatgttcacgacgcatcaggcattaatttgtattatggcaacaggtattgcggtgcggacgcttgctccagtcattcaagataaactatcggatccggcagtaattgtaatggatgaatatggtcagtttattattagtttactctcaggacatgttggaggagcaaatgagttaacggagcaaattgctgcaattactggtggtgccgcagtaattacaaccgctactgatcgtgcaaatgtggcagcaattgataatatcgccaaagaaatcgacggatatttacccgattttaaagcgacgactaaacgcattaatggcttgctcgctgctggaaaagaagtcagtttgcacgtagatgagccatttgaagtagattcacgaggttttacaaacaaagaaattagtccacaaattttcatttcgaccaaatacaatttaccagatacaaaaatagaaagaattcagctagtaccaaggaagttcgtgcttggtattggatgtcgaaaaggcgtttcagcggaaacaatggaggaagttttcacccatttttgtgaacaagaaaacatacatccgcgcgcttttcgtgaaatccatagcattacattgaaagcagaagaaccagccattttgcaattagcgaaaaagtggaacattcattttattgttcattccgcagaagaattacaaacggtagctgaaaaatatccaacgtcagaatttgttctaaaaaccgtaaaagttggaaatgtcgctttatcatcagcagatattggtagtaatggaaacgtcattacgaaacgatttgccgaaaatggcgtgacattcgcagcaggaaaactaattaaaaataatgaggtggcaaaatgatttatgtaatcggaattggcccaggagataaacgattaatgacaggtgaagcactagaagcaatagcggacgcagatgtaatcgttggctatgtaacatatatcaaactaatcaaagaattaattaaagataaagaagtagtgaaaacggggatgcgccgtgaaatcgatcgctgccaggaagctgtaaatatcgcattaacaggaaaaaaagtagccgtcgtttcaagcggagatgctggtatatacggaatggctggattggttttagaactagccgaaaaaagcaacccagagctagaagttaaagtaatcccaggaattacagctagtataggggcagcagccgttctcggggcgccaattatgcacgatttttgccatattagcttaagtgatttaatgacaccatgggaagtaatcgaaaaacgtttaacacatgctgcgatggccgatttcgttgtctgtttttacaacccgagaagtaaaggtcgcgccaatcatttagccaatgcttttcaaaagatgatggaacacaaatcaccaaagactgtcgttggaattgttaaagatgtcggtcgaaaagaagaacgaaaaatcattacgacaatggaagatattgactatgagttagtggatatgacaacgatggttattgtcggtaacaaagaaacatacgtaaaaaacggcaaaatgattacacctagaggatactctttatgatttttgtgcttggaggaacttctgatagcttgttaattagtgactggctaacggaaacaaaacgaccatttattctttcagtagcaacagattacggtgaaactttagctaagcaacatgcagaaaaagtattttgcggtcgattagccaaagaagcaatgctcgcaaaatggcagttagagcaaatcaagcttgttattgatgccactcatccctttgcaaccatcgtttctgaaacggccatggaagcatgcaaagaagcgggcattccatacatccgctttgagcgaacaagcgaacaaaccgataatacttatttagtagatgatattaacgaagcatgtaaagttgctgcaaaacttggtcaacgaatttttcttacaacaggtagtaaaaatttacctgaatttgtggcagggctgaaacaacaacatattatcgctcgtattttgccagtgtctgatgtgattcgttcagcagaagaacttgggctcgttgccgaccaaataattggcatgaaaggtccgttcactaaagaagccaaccgcacacagctagaaatgacacaagcggacgtattaattactaaagaaagtggaaaacaaggcggatttcaagaaaaactcacggcagcagcagaattaaatattcctgttatcgttattcgccgaaaaaaattaaattatccaatcgaaataaatcatttaaccgaactaccagaaattttaactcaattggaggtctactaatgggaaaagtcatgttaattggcgcaggtcctggtgatgcacaacttctaacagtaaaaggattagccgcacttcaaaaagcggatgttatagtctatgatcgcctcgttgaaccagcgatgctccaagaacgaaaagctagttgtaaactaatttatgtcggaaaagaaccacttcatcatccaatcccgcaagatgaaatcgaacaaattcttgtaagagaagcagcaacaaatgagctagttgttcgtttaaaagcgggtgatccgtacgtatttgggcgcggcggcgaggaaggcgaaacacttcataaagcaggtattccttttgaagtcatcccaggaattacttcagctattggcgggcttgcttatgcgggaattccggtcacgcaccgtgattttgcttctagttttcatgtgattacaggtcacttgaaaaaaaggcgcgatccactagattgggaagcacttgcaagactcgaaggaacccttgtttttctgatgggaatgacaaacttacctaacatttgcgccaatctactagcaaatggacaaaaaccggagacaggcgtggcaattgtacagtgggcatcgcgtggtaagcaattaaccgttacaggaactttgcaaacaatcgaacaaaaagtagcagaatctggtatttcatctcctgcgcttatcgtagttggtgatgtagtgagcttacgtccacagcttaacttttttgaagaaatgccacttttccatacaaaagtattacttccaagagcacgcgcaggtaaaagtatgctcgctgaaaaaattcgcgatttaggcggagaagtaacgatgtatccaaatattcaagtgctggatattctgccaacgaaaacaaaagcagaattatgtgaaactagcgaacttcttttcacttcaaaagaggctgtagagcgctttttcgattatctagcaacacttgagttggatattcgttccctaaaaaatacccatcttaccgctatcggaaaacaaacgaaagaagcatttagtgaaaaaggaatcattccagatagttttattaaaagacggagcacagaactaattttagagcatatagctcgttttcaaaaaaatgctagcaacttaattatcggtagtgttgttgatacagcagaggttagtgctatcttatctgaagtgaaaacaaccgaaatgatgccattgtacgatatgcgtccagtgacagagcgcccatttgacctcgaaagttttgaacaaatatgcttttccagttctcgttcagtccaaaatctactcgatgtactaacaaccgaagaaaaagcgattttacaaacgaaaacgattctctcgataggaagattcacgagcgcaaccttgcagtcatttggcattaatgaatttgaagaagctgagaatgctacaccagagagcttaattgaactaattcaaaaaacaaaattagaaggagtaccacaatgaaaaaagccatattagtcgttagttttggcactagttatccagaaaccagagaaaaaaccattgaagcttgtgaaaaaagagtggcccaagaatttcctgagtacactgtatttcgtgcttttacatccaacaaaattattaaaaaactaaaaacccgtgataacatgcacattaacacaccaagtcaggctttaaaccagctaaaagaactaggttacaaagaagtctttattcaatctctacatattattaatggcggtgaatttgaaaaaattacagctcaagtggaaaaatttaaagcggattttgattcaatcatcattagtcaaccattacttgattcaaaagaagattacgaaaaagccattgaagccattcgccaccaaatgcctcctttgaaagaaaatgaagcattgattctgatgggccacggctccaaacaccatgctttcagcgcatatgcttgcttagaccacatgcttttaaacgaaccgatttatctttgtgccgtagaaagttatcccggccttgatcaagtgattgaacgattaaaacaggcaaagatcaaaaaagcccatttgatgccgttcatgcttgttgcaggagatcatgccacaaatgatatggcttcagatgacgaagattcttggaagagcatattggagcaagctggtattgaaactgagtgccacttgcaagggctaggcgaaaacccacttattcaagctcaatttatcgatcatatcaaagtagcaacagaaagggtgaacacgcgtggctaaattttacggcattggcacaggtccaggtgacagcaagctagttacgatggaagctgctgatagactggggaaattagcgattctctatactccccaatctaaaaaaggtggagaaagtttagcaaaaaaaatcgttaacccatatttaaaaaacacgcttatcatcaaagaacgtcattttccaatgagttacaacaaaacagagaaaatgcaagcttggaaagaaattgctgaagaaatcaaaacagatgttcaaaacggacatgatgttggtttcattacccttggcgatccaatggtctatagcacttatagttatttgctagaacttttaaaaggtgaaattgaaacagttacactcgcagggatttcatcattttcaaatatcgcctctaaattagaactgcctcttgtaatggacgaggatagttttgctgtaatccctgtaacagcaggagctgaaaaaatcgaacaagcgctcacattatttgacactattgtcttaatgaaagcagcaagcaatttaccccttcttacgacattactaaaaaaactgaatttgcttgatgcagctgttgtagtaagtgatgttgccatggcgactgaaaaaatcacttacggcatgggcgagataaatccagaagaaaaaatgtcatattttactacgattatcgtgaaaaaaagaagggagcaatataaatgaaaaaattatggaagtttctaccatttgttttaatcggcgttatttattttactttaacgaacccagaatccgcacatgcaatgcatatcatggagggctttttacccgttaaatgggcagtcttttggctaattgtctttatcccattccttgtacttggtttaattcgtattcgtaaattaatcgctttagataaaaataataaattactgttggcattatgtgcagcctttatctttgttctttctgcacttaaaatcccgtccgttacaggatcttgttctcatccgacaggtgttggacttgcaacggttatgttcggaccgctcgttgtcagtgttcttggcgtgattgtcttacttttccaagcgctacttcttgcacacggcggtattactactcttggtgcaaacgcaatgtcgatggctgttatcggtccaatggttggttttgtcgtctataaactagctcgtaaactaaactgtaataaaagtgtttcgattttcttatgtgcaatgacagctgacctggcaacctacttaaccaccagcgtccagctcggagtcgttttcccagatccagcatcaggcatgatggcttctattctaaaattcatggcaattttctgtgtcactcaagttccaatcgcgattgcagaaggcttactcactgtagttatgtacaatcttattagcaaaaatttaccagaaaaggtggcacaattacgatgaaaaaaatcaatattaatatcattttaattttattagtagttttgttaatggtgagcccgtttttcttcaataaaacaggtgagtacgggggatcagacggagaagctgaagcagaaatcactaaaatcgatccaagctatgaaccgtggtttgaacctctttatgaaccaaaaagtggcgaaattgaaagcttattatttaccctgcaaggttgcatcggaacaggaatcattgcgtatgtcattggtgtaagtcgtggcaagcggaaagctgagaacgatgttaaccattgataaatatgcttatcaaaaccggtggatagctttttcgccatcattaaaagcattattttatgtcgcgattctaatactcgcgctaactggccctgtgctcgtacaagcgatactatttttatgcatggtgccactgacgctttatgttgttaaaatccactttaaacaatatttgaaatggctccttttaccattttcatttctactatttagtttgctttcgattcttatttcaatttcaaaagatccaagtagttttcttgcttcaatctctattggaagtttttatcttggtatttctgatgtgacgataacgacagcaactcaagttttttttcggagtattgcttgcttagcggcaacatactttttcgtcttaaccgttcccgtggtacaattaacgaaagtgatgaagcaaatttttattccaaaagtgcttattgaactaacgattttaatttatcggttcatctttattttcttagaagaagcggcggcgattcgaaaagcgcagagcctacgtttcggttaccacggcataaaaaatagctatcgttcatttggaatgctcgtaaatactttatttaatcgcgtaatgaaaagatataatgaaatggttataacacttgatgtgaagctatatcaaggagaatttcatatctaggaggaagccaatttgcttaaaacagaacatatttcattccaatacgaagatggcaaacaagccttaacggatgtttcaatcgatttagataaaggcaatattattggccttattggtgcgaatggctccgggaaatcgaccctttttatgcagcttttaggcattaataggccaacttcagggacagtttattttgaaggaaaaccacttgcttacaataaaaaagccttatttgcattgcgaaaaaaagtaagtattgttttccaagaccccgaccaacaaattttctattccaatgtacgtgatgacgtggcttttgcacttagaaacctaggtattagtgaaaaggaagtggagtcacgagtaacaaatgtactagaaacagttggtgcgacagaatttcaacataaacctgtccaatacttaagttatggtcaaaaaaaacgtgtcgctattgccggagcgcttgttcttgatacagattggttgctgcttgatgaaccaactgcaggacttgatccgattggtaaaaaaattatgatggaaattatcgaacgtcttgcaaaacaaggaaaaaagattctcatttcaagtcatgacatcgatttgatttatgagatttgcgattatgtctatatgttaaaagacggaacagttttaacaagcggggagacgagcgaggttttcttagagaaaagtcatatcgaacaagcagggttagtacagccgtggctaatcaaattacaccaacaagctggctacccacttttcaaaaaagaagccgattttttcgcacatacggggaaggtgattaattaatggtagagcaaataatgattcaaggtaccgcttccgatgcagggaaaagtgtaatagttgcaggtttatgccgcttatttaaaaataaaggcaagcgagttgtgccttttaaatcgcaaaacatgtcactcaattcttttattaccgcaacaggtgatgaaatgggacgtgcgcaagttttccaagctgaagcagcaggggtttttccagatgttcgaatgaatcccgtgttacttaaaccgaccaatgatcgtcagtcgcaagtaatttttatgggagcgattttagataatatggatgctgtttcttatcacgattttaagcaaacacttatcccaaaaattcaggcagtttatcagagtttagctgatgaaaatgatattattgtattagaaggcgctggaagcccagccgaaatcaatttgaatgaccgagatattgtcaatatgggtatggctaaaatggtcgacgcacctgtcgtgttagttgctgatattgataaaggcggcgtgtttgcttcgatttatggcacgattatgcttttaaaagaagaagaacgtgcgcggcttaaaggagtaatcatcaataaatttcgcggtgatgtagcacttttacaaccaggcattgagatgatagaagagctgacaaacgttcctgtcattggcgttatcccttatgctaacctacaactagaagaagaagatagtgtttcactcagcgggaaaaattacgttctagatagttcggcgttacttgatattgccattatttgcttgcctcgaatttctaattttacagactttcatattctagaaattcaacctgacatcagtgtgcgttatatacgaaatttagctgattttggaaatccagatttagtcattattcctggcagtaaaaatacgctggaagatatggcttttctcgaacaatcaggcctgaaaaaagcgattcaaaactatgccgaaaatgccgggaaagtaattgggatttgcggtggctaccaaatgctcggtaaaagaatgcttgacccaaatcaagtagaaagcgaaaaagtagaaattgcgggacttggcttattagatactgaaacaatctttctcgaccaaaaacgcactacacaaattactggcgtgacattttcttcggaaccagtcgaaggatacgaaatccatatgggccaaactaagcgcggcgagaatactcaaccgttttgtaaaattaaagcagtcaacggtaaccaagaaacacacgaggacggtgccatctccgcgaacaaaaacattatcggcacatacatccacggtattttcgataatgatattttcttaggcaatctattcaatgaactgctaacacaaaaaaacaaatccatttatccacatgaaattatcaaactaaaagaacataaagaaactgaatatgataaactagcggctcttttagaagcaaatattcaaatggatcaactagaaaaaattatgaaaggagaaaaaatatgcgtatctacacaaaaaccggcgataaaggaatgacaagaattatcggggggagcaaagtaagtaaagataatatacgaattaatgcatatggtacactcgacgaactcaattcgcttatcggttacaccattacaactcttggaaatgaacccgaaattcaagctgaacttgagcaaatccaacaacaattattcgatgcaggaggcgacctcgcaacagaagaagggaagcgcgattataaactgacagctgagccagttgcttggctagaagaccgcattgatatttatgccgatgaaccacctgaaattgaaaaattcattttgccaggaggtactcaagcagcttctttacttcatatggctagaacagtggcaaggagagcagaacgagaaattgttggtatgctaaaaatcgcctccactaaccaagaagtattaaaatatgtaaatcgcttatctgattactttttcgctgttgccagagtcgtgaattatcgcgcaggcgaaaccgatattttctacaaaaattccgaattagtttttcgaaataaaaagaaataacaaaaaacctctccagacattccatccggagaggttttctttattaaaagcgttgaattaaaaatacaccaataagcattaataaaacaccaatcattcgataacggttaattggatgaggaataaccccgaaaaaaccaaaatgatcaataataagtgcaataatcatttgcccacaaagtgctaaaactactgtcatagcagagccaagtaatggtaaaagtaaaatgttagaagttacaaataatactccaagtgcgccaccagtgaatacccaccaaggaattcgaccgaccccttttagctgaaaagtcaaacgacgctccacaattaaacaaacaagcgtaagtagcgtggtcccaactaaaaaggaaataaatgatgctacaaaaggagaaccgacagtgagccgaagttggctattaatcgatgtttgaatcggtgaaagtagtccagaaacaagtcccattgccataaatagtaataatgatttggatgatctttttgtcatgatttctcctccttttaaaatcgttgcatcaagtaaatgccgccgaacattaaaataacaccaagcagtcgttcgatgttaatctcatgcatcggaacttgaaataaaccaaagttatcaattacaatagccataatcatttgtccacacaccgtaatcattacaagcaacgcagagccaagtcgtggtaaaagtaaaatattagctgttaagaaaataacgcctaatgttccaccgccaacccatatataccaaggatttgaggcaatcatttctgaagatattggccatgatttttgtgtaaataaacaaacaataagtaaaacagtcgtccctaccataaaagaaacccacgaagctaaaaacggtgatttcgtatatgtactaagtcgtgtattgatggctgtttgaacgggtaataccatccccgccagtagacctgatacaataaataatataatcaaaaatttccctcccttttatcacaatgaaataattataaaataaaagaggggtaaaaagatagtatttaatttaaagtgaggtgtttttatgaaaatccgaataatcggatctgttggaagcggcaaaaccactttagcaaaaaaagtttccaagtggctacaaatagatttttttgaaacagaccgaattgtatggaaaagagaagaaacggaagtgagacgaagcgattcagaaaaaatagccgagttaaatgcaattctccagaaggataactggattatcgaaggcgtgcatttagaagcctggacagaagagagcatttcacaagccgacattattatttaccttgatttacctaaaaaacaaatccgctctcagcttataaaacgccaattcaaacaattactacgaatcgaaaaagcgcactacgtagtccgattcagcatgctaaagaaaatgttttactgggatgatttatttgatcaaaggactaaaccattagtgaacgaaaaaataaatcaacatccagctaaatggttaattattaaagaaaatctagcgtttcatgaaattcaacaaaaaatattgcaaattatatcgagccgtgatatattatgagtatcaaatacatcgaggtgcgatataattatggatgaaaaactacgaaaaacctatcttcccatgactgaaactgccttttacatattactttcgctagttaaaccgaagcacggttacgcgataattgaaaatgttgcccaaatgaccaatgagcggattaaacttggaccaggaactatttacggtagtttatccaaaatgaacaaagacaatttaatccaaatcatccaagaggagagcaaccgaaaaatctatcaaatcacagaaatcggtgccgaggttttgcagttagaaaaaacacgcatagaagaattgtatagaaattcgagggaggtttaatcatggagaaaaaagtcttaaagttttttactgtagataatatggaaaaagaagaagcctatttaaacgatatggctcaaaaaggctggttatttaaagaatataaatcttttaggtaccattttgaaaaaggggaaccgaacaaatatcgctatgccattgattataaagtgaatcaaggcgacgaagcctcgtataaagcactctttgctgatgctggttgggataatgtattctgctatccagtattaaacggtaattggatgtatttccgaaaactacaggccgaagaggcaggaagtgaaacgatattctcagatgaagtatcatatattcatttatatagaagtattcggaaacgctggacgatttttggcatattaatgagtattcttttattgctggatttatttttcctaaacaatgctggaagttatcaagtaattactattttcatttttattctatttattattctcatcggtttgtacggaaagatgtttatccaattaacgaggaaaataaataaatttgcgaacaaaaatctataaaacagaatgtaagataattatgatggcgtcaactaaactattttataatagaagaaactcgcatttttttaaaatcatcccatttaatcctgaacttatatgactaaatgatggcaaatgttacaaaatgaagaacaaatgttatcaaataaaattaaattgaatctataactaactttttgccttatcataaaatgttaaagatttcttaaaagacatttagatggattgcaattgtgttcaaattaacgtattctaaaagcatcaagggattcggagacagaaaggcgtgacgacatctgaagtatagaaaattatccaaaaagaaaaaacaaaaaaggctaattgggatagcagggattttactgctgattattctagtaggtgtcatagcatctgtagtcagacaacaatatttaattatgacagcaccgaaaccggacccagcattccattcaaaagagcagaactttcttaatgaactctctcctcgtgcacaagaaattcaagcagaacacggcattttaacgagtattactttagcacaagctatccttgaatctaactggggtcaaagcgatttagcgcaacaaggtaataatttgtttggtgtaaaaggcaaagctccacaaccgatggtaaacatgacgacaaaagaatttgtagacggaaaatggattgaaatcaaagccaacttccgaaaatacaaagattggaatgaatcattagaagcacacgcagaactctttttaaaaggaacttcctggaataaagataaatataatggcgtgatcaaagccgatgattataaaaaagctgcagaagaattacaaacagcaggctatgcaaccgatccaggttatgcagagaagttaatcaatattatcgaaaaatatgacttagctttatatgatcgtatagatgataagatatactatgatgcaaaatcaactggttatggcaacgtaaaaaaagacgtttctggagcaatttggacaaggccttatggactatctggagcacaaaaagtagaagaaattaactactacaaacgagaagatttgaaacttttacgagaagcaaagacagatagtggcgtttggtatcaaatttccgtgaaaaatgatccaattggttgggtaaaacaagaattaattgataaaaaataagaaataaccgaaaaagagctaaaatgacttgtcttatttataggcaaaaagtccttttgaagctctttttcttttttattttcataacagccatctcccgaaaaggttactatacaatagctaagggccttttgtaacataagtaatgtaaaagtaatgtgtattacaaagaagttttgttagaatgaagtggttgttttaaagaacacacgtttctggttttgataagccagaaagatatttcaaagaaggatgtgcaataaatcattatgttacaactcgcaaagaagcatttggtgacaattggtcttggaattacaattacattatgtgcagtaccaatacactcccaagctgctggtctagaggacggcttaacttccaagcaagagaggtttattaatgaaattgcgccgcatgctcaaaaagtgcaaagagaacatggtattttagcaagtatcactatttcgcaagctatactagaatccaattggggagaaagtatgctagcaaaagatggcaataatttatttggaatcaaaggttcttataatggagcctctattaaattaccaaccaaagaacacaacggtcttgtttgggttggtaccgatgctaatttccgcgcatacccgggttggtatgaatcgatgaatgaccacgcacttttatttgtcaatggcccatcatggaaccctcatttatacgggggcttaatcaaagaatataactttgaaaaagcggctattgcacttggaaaaactggctattcgtctgatccagagtatgcagcaaaattaatcgacctaattaaaaaagcaaatttagataaatatgatacagtttatagcgaacgagtatctgataaagcaattaaagctgctggtgaagtagctataaaagataattcctttatttggtccgcgccaggtggaacaaaaggagcaaatccagtcgaaaaaacaaccaaatattttggacatcaagtttctattaatagagaagttaaagtaacggattccaatatttcgtggtatcacattcatcataatggcgattctatcggttggattgaaagcacctctataaaaaaattctatcaattagaagattatgctccaacgcgcgacgctttacttaaaacagatgatcaaaatcgtttagtaattaatatggatattgatacatcagaactgcacaaacctacaatagctaaggaagaaacaaagggcaaaactgcacttaatctacctttattaaacgttcagtcaattgcttggtaagtaaaacgcaaaaaaagtcgaatagctgtttcggctttttttgcgttttcaaaggaattttagagagaaactgttataatgtaaaaggagtttataaggagggttatttatatggatgaacaattaaagatgttaaaagcactaacggatgcaaaaggtattcccggtaacgaacgtgcggttagaaacgtatttcgtgaatatattgaaccgttagctgatagttttgaaacagacggcttaggtagcgccgttgcgaaaaaagtgggcgcagaagatggaccaaaaatcatgattgctggtcatttagatgaagttggctttatggtgactcaaatcgatgataaaggttttattaaatttcaaacagtgggcggttgggtttcgcaagtaatgcttgcacaaaaagtaacaatcgtgacgcgttctggcgaagaaatcaccggtgttattggctctaaaccaccgcatgtaatgacagcagcagaacgtcaaaaatcttttgatattaaagatatgtttattgacgttggtgcggttgataaagcagaagttgaaagttacggcattcgtcctggtgatatgattgtgccagcatttgattttaccgtaatgaaaaacgagaaattcttacttgcaaaagcttgggataatcgtattggccttgctattgctatcgaagtacttaaaaacttacaaaaagaagcacacccaaatatcgtttacggtgttggaacagtccaagaagaggttggtttacgtggagccaaaacagcagcacatttcgttcaacctgatataggttttgctgttgatgttggtatcgctggggatactcctggtgtaactgacaaagaagcaatgagtaaaatgggggaaggtccacaaatcgttatctatgatgcttccatggtagcacatgctggccttcgtgattttgtaacggacgtagcagacgaactatctatcccttaccaatttgaagcaatcccaatgggcggaacagattcagggtctattcatttaacaggaaacggaatcccgtcgttatccattacaatcgcaactcgctatattcattcccattcgtccatgctacatcgtgatgattttgaaaatgcagtaaaactaattactgaagtagttaaacgtttagataaagaaaaagtaacagaaattcgcctaggttgagtttcgagaaaagaggacaacttttatggaacagattcaatcagtaaaaaacgaccgtgtcaaaacatggaagaaactacaaacgagaaaaggccgcgataaaaccggaacttatttggtggaaggctttcatttagtggaagaagcgttacgtcaagatggtttagtactggagctgcttatttcaagtggtgtttctgttccagaagagtggttaaaaggcgactatgatgtatttgaaattagttccgaaatcagccatctaattagtgacacaatgacagaacaaggtgtatttgctgtcgttgctatttcagagcctgacatgatgctattatatggtaagaaattgttactcgtagatgcagtacaagatccaggtaatgtcggcacgttaattcgaactgctgatgcggctggatatgattgtgtcgttttaggcagaggcagtgcagacctttataatccaaaagttattcgtagcacgcaggggagtcacttccatattcctgtcattcaagcagatttatttgagtgggtggcgaatttagaagaagaaggtgttccagtgattggagcagttttagatgaccaagccaaatcactcaatgatatgccaaagcgtgaaacattagccttaatggttggaaacgaaggaaacggcatatcagaagaattacaagatcgactttccgaaaaagtatatattccaatttacggtgatagtgaatcattaaatgtagctgtagcagccggaattttactttatggtttaagaaaataataaaagtggttgataagtcggaatgaacttatcaaccacttttttaaatctcttcttgtttttccatttttacttcacgaattgcgacgcgttttaaatcagctacgacactatgcatataatcaaacgcagcgccccagtcaatcccagtaaagaagccgttcgaactacctgttgagataatcgttacttctgtttctccgtggaaattattaatgttaacaaataatgccgctcgattagaagaacggaagtaaaatttttcgcaagcaagtgtcgctagttctccaaaatcaaatgttctaatttcggaaaatacaatatttgaccctacttgaccagctttgattatttcgaaggtttctgaaacatctgttttaacaatgtagcgaatagatggcatgagagacgcctccttcattaatctatcttacttatattttaagtcagaaggatactttggtcaattatatttcaacttactaaatataagcaacaaaagatttattagttactttctgatgatagatatggtacaataacgttagaggtgagaattatgactgatgcacatacagtatgtccgaagtttgaatcggcgttccaactattaggtaaacgctggactggacttatcatcaatgtcttactgactggtccaaaaaggtttaaacaagttgccgctgagatcccacaaatgagtgatcgggtgcttgcagaacgtttgaaggaacttgaggaaatggatatttgcttaagacaagtttatccagaaactcctgtacgcattgaatatgaactaaccgaaaaaggtaaagcactccaagaagtaatgcttgaagtccagtgttgggcggataaatgggtggaagtacctaattaaaaagagataatctctccaactaatatggggagattattttttagcttgaatctttcgtagaaccatactataatagaaactatctaaataagtaaagacaatgaaagagccaagtagcatagtgagtctgtatagggagaagtggtcatagactgaaagccactttacaaacgaatttgcgaacatttcacctctggagtcgccccccgagaagcacgttatgtgtgaaggtggtccggttactaagccgttatcgaattttgagtgggaacaaattttgttcttattagggtggtaccgcgagaagtctcgtccctttgtggatagagcttttttattttgtctaaaaagaaggagtgaacggtatgttagagcaattacaaacgctgaaaagtgaagcagaaacgcaaattaacgaagcagcagacttaaaaacattgaacgacttacgggtaaaataccttggtaaaaaaggcccgatgaccgaaatcatgaaacaaatggggaaactttccgcagaagaaagaccaaaaatgggttcacttgctaatgaagtaagaacagccttaacagaagcgatttccagcaaacaagaaattctggaaacagcagcaattaatgaaaaattaaaatcagaaacaatcgatgttactttaccaggcacagcgccaagcatcggaacaaaacatttactaacacaagtaattgaagaaatggaagatatgttcattggtatgggttatgaaatcgcagaaggaccagaagtagaactggattactataacttcgaagcattaaaccttccaaaagatcacccagctcgtgatatgcaagatagcttctatattacagaaaatactttattacgtactcaaacatcacctgtacaagcaagaacgatggaaaaacatgacttctctaagggaccaatcaaagttatctgtccaggtaaggtataccgccgcgacaacgatgatgcaactcactcccaccaatttacgcaaatcgaagggctagttgttggtgaaaacatcacttttgctgatttaaaagggacgctgactgttcttgctaaaactatgtttggtgaagaacgcgaaattcgccttcgtccatcattcttcccattcactgagccgtctgttgaaatggatatttcttgtttcaaatgtggtggtaaaggttgccgcgtttgtaagggaacaggttggattgaaattttaggaagcggtatggtacatccaaacgtactagaaatgtccggtattgattccactcgttacagcggatttgcttttggcttaggacctgaacgtgttgcgatgttgaaatacgcagtggatgatattcgccacttatatacgaatgatttacgctttacgaagcaattccaaagcacagaaacgggggaaatctaatgttagtttcatataattgggtcaaagaatttttccaagacttcccgttaacggcggaagagctaggagaagcaattacaagaaccggaattgaaattgaaggcgtagaagaattaagcgctagtttgaaaaatgtcgtggtaggcgaagtattatcatgtgaacgccatccagatgcagaaaaattgaacaaatgccttgtccaaactgacgaagaagagccagttcaaattatttgcggagctccaaacgttgctgcaggtcaaaaagtaatcgtagccaaagttggtgcaagacttccaggcggacttaaaatcaaacgcgcaaaattacgcggcgaagtttcagaaggaatgatttgctcacttgctgaacttggctttgaaagtaaagttgtaccaaaagcttatgcggacggcatttacgttttaccagagcatgttgaaacaggcgtgagcgcaattactttacttggcttagatgatgcgattctcgatatggcaattacaccaaaccgcgcagatgctttaagcatgaacggcgtagctcatgaagtaggcgcaattatccatcaaaaaccagcgcaaccaaccgagcccgatgtatctgaaaaaggtaaagcggacgattttatttctgtagaagtagaaaatccaacagaaacaccttattatgctattaaaatggttgaaaacatcgaaattaaagaatcacctctatggcttcaaacaaaattaatgaaagcaggcatccgtccacataataacgtagtcgatgtaacaaactacattaatttattatacggacaaccactgcattcgtttgactatgataaaatcggtagtaaaaaaatcgtcgttcgttccgcaaaagaccaagaagaaattaccacacttgatggcgagaaaagaatattacaaacaggacacactgttattactaatggaactgaaccgatagcaattgctggggttatgggcggagagttttctgaagtaactgaaacgacaacaactgtggcactggaaggagctattttcagtagttcatctgttggaaaagcatctcgcgaattatatttacgtacagaagcaagtattcgatatgataaaggttctgatgcttggaaagtagaaaaagcacttgcacacggcggagcacttatcgctgaacttagcggcggaacgcttgttggcggcgtagtagaagtagataatcgtgaaaaagcagtaaataaaatcgaaacaagcttaacacgtattaaccgtattttaggaacggagatttccctttccgaaatagaaacgatttttgatcgcttaggatttgtattagaagttaaagaagacacattaattattgaagtaccgactagacgttgggacattacaattgaagcggatattttggaagaagttgcacgtatttatggttatgatgaaattcctgtcacacttccagcaacgagcacaactggtggattatctgacagccaaaaagctcgtcgtgtaatgcgcgcttatttagaaggagcgggacttaaccaagcattaacgtattccttaacatccaaaaaagatgcgactcgtttagcgttatccgatgaaaaaacagtggcgctttcaatgccaatgagtgaagaacatagccatttaagaacaagtatcgtcccacaattaattcgtagcgcaagttataatatcgctcgtaaaaatatggacgtagcactttatgaaatgggaaccgtgttctacgcaacagaaggtgacaatttaccaatcgaacaagagcatttagctggcttaattactggaaattggcacacagctgattggcaaaaaacaccaaaaccagtagacttctttgttttaaaaggaattgtagaaggtttagtgaacaaacttggaatcgaagccgaactgcactggaagcaaatcgaaaaagaagaactgcatccaggaagaacagcaagcatccaattagaaggaaaagaaatcggttatcttggagcgcttcatccagcagtggaagcaagctacgatttaaaagaaacgtatgtatttgaaattaatgtaaaagcgttacttgatgcaacgaaagaaaaagtagtttatcatccaattccacgctacccagaaatgacacgcgacttggccttacttgtggataaagatactgaccatgctacaatctctcaagtaatcaaagagcacggcgggaatctcttagtcgacattgaactttttgatattttcgaaggagaaagtttaggcgaaaacaaaaaatcactcgcttatacgttaactttccttgatagcgaaagaacacttgtcgaagaagacgtacaaaaagcaactaacaaagtagtagaagcattacaagcaaaactacatgctattatccgctagttaactaaaaagaactgaactatttggaaaacattttcgagtagtttggttctttttttgtacagtggaaatcttgcctgttttaacacttcactaactaaaataacacatgttataatggttaaatatgacaaacaaaagaaggacgaaaaaaatgacctatgtagaaatgaaggacgtatctaaattctatcaaatgggcgaaaatgttgttacagctaatgataaaattaattttggaattaaaaaaggggaatttgtagttattgttggtccttcaggtgctgggaaatctaccgtattaaatatccttggtggaatggacagtgccagtgaagggcgtatcatggtagatggccaggatattgctcaatataacgcaaaacaattaactaaatatcgccgcacggatgtcggattcgttttccaattttacaatttagtgcctaatttaactgccaaagaaaatgtggaattagcagcgcaaatagcgccaaatgcattagatgcagaaaccgttttaacccaagttggcttgagtcatagattagataacttcccggctcagttatctggcggtgagcagcaacgggttgcaattgctcgagcattagctaaagcacccaaattgcttttatgcgatgaaccaactggcgcccttgattatgatacgggtaaatcagtcttaaaattattacaagaaacttgcgaaaagactggtacaacagttattgttatcacccacaatacagcgattacgccaattgcagaccgaataattgaaattaataatgcaaaagttcggagcatcaaagaaaatacggaaccaatgtccattgatgatttagaatggtagaaaggagcaagcattgaaacgttcagctttatggaaagatatctaccgagaaatatggcattcaaaaagccgctttatttcaatttttatgctgataatgttaggtgttgcttttttctccggactaaaagcaactggaccggatatgcttttaacagcagacaattattttaataagtatcaactcgccaatttcaatgtccagtcaacatatggactagatgatacggataaagaagctttagaaggtatttcgggagtcgctcaagtagacttaggatatacagcagatactttaatgaaagaaaacaacatcgttacaaaattatattcaagctctgcaagtgataatttaaataaatataaagtagtaagtggtcgtttgccggaaaaatcaggtgagattgctctggataacaacaaagttattcaagacaacatcaaaatcggcgacaaagtaacttttgttaaaaatgatggaagtgaattaacccatacacttaaaaaatcaacgtataaagtagttggctttgttcgatcaccagcatacatccaaaaatccgaacggggatcaagtactgttgggaaaggaaaaacagacgcttttggtgtgattccagaacaagattttgatttgccagaatacactattgccagtctcacttttaataatctagcggataaagaagcttttagtgatgcttacattcgcacggagaaaaaagataacaaaaaagtggagcaagctttagcaggacaaccagaaaaacgactgaataaaattaaaacgagcgaacaaaaaaaattagatgatgccacagccgaaatcaataaaggaaaagcagaactacaaaaaaatcaagccaaactagatgctgcaaaagcacaattggatgaaggcttttccaagtataatgcagcaaaagctagctatgatgccaaaattaaacaaggtgaatcagaaattgctgctggtgaagcggaactagcgaacgccaaaaaacaattagatgccgcaaaaatgcagattaatcaaggcgaagaagccattttacaagctgaaagagaattagaagaaggcctagctgcatggaatgaggccaataatctcctcaatacagcaaatggatacttaaaaaatgcgcgatcaaccttagaaaatgcattaaaacaaccagatttaactgattttgacatcgaccgagaaagcttaactaatgcattcaacatggcggcttcagaacttgatatttcagctgaagagctcgccgaatacgaagaaaccattaacactttgctcgatgattatgaaaatggagccattagcgatgcacaaatccgggaagctctgaacgctgcacttaaacaagttgctgaaggtgaaaaagcctatcaatcggctcgaacagttttagatgaagaaaaacaaaaaatagagcaaggcgaaaaaacattagctagtaaacaacagcaacttgagcaagcaaaaatagcgtatcaagcgggattagcaaaatatcaagccggtcaagaaaaaatctccctcgctaaaaagcaattggctgatggaaaagagacaggcgccgtagaattacaaaatgcactaaaaaaattaaacaatgggcaagcagaatacaataaaaatctcgcactatttgaaaaagagaaaaaggcagctgaagccaaattagctagcgccgaaaaagacgttaaaattggccaagaaaaactcgatgcacttaaactaccgaaatactatgtccttgatcgtaacgataatccaggttatagcgaatataaagaaaatgccgatcgtttaacttctttatccacggcatttccaatctttttcttcttaatcgcagcacttgtttgtttaacaacaatgactcgaatggtagaagaacaaagaacgcaaattggaacattaaaagcatttggttattcgaacggtagcatcattttgaaatatcttgtttatggttcgattgcaagtattggcggaagtatcgttggaattataatcggtttccaattcttcccaaatattatctttaatgcttataaaacaatgtatgaaatgcctgctgtcgacatcggattttattggagttacagtttattatccatttgtgtagcattattctgtacgactttcaccgcatatgcagcatgtcgggcagaactaagagcgaatgcagctacattaatgcgcccgaaagcaccaaaaatcggcaaacgaattttcttagaacgaattagctttatctggaaacgaatgaattttacgagcaaagtaacagcaagaaatctcttccgctacaaacaacggatgctaatgacagtactcggtgttgctggttgtacagcgctaattcttactggctttggactgcgaaattccattagtgatatagctaaaatgcagtacggtcaaataatgaaatatgacgcagcagtttatcaagatatgagcgctccaccaacagcaaaagaaacgtacgataacctaatggaagattctaatatcaaaagtaaactagcgatgtcgcaaacaaatatagatgcagtcaaatcagggcaatccgcacaagcgagttccatcattgtccctaaaaatttaaacgaattaccagactatatcgtgttgcgtgaccgtgctagtcacacaacagaaaagctaacagatgatggagcaataattagtgaaaaactagctaaattattcgatataaaaccaggcgattcgattactgtaaaaaatgcgaagaatgataagtacaaaatcaaagttagcgctattacagaaaactatgcaatgcactatatttacatgactccaacgtattatcaacaaatatttgacgaaaaacctagttacaatttagatttattaaagcttaaagacacttctgaaaaagtagaaactgagttcgcagaaaaattaacagatagtaaatctattttaacgattactttctcaaacaatataagttcgatgctaacggatactctagatagtttaaatattgtcattgtcgtattaattacttctgcagcactactagcctttgtcgttttatacaaccttacaaatattaacgtatcagagcgtatcagggaactttccactatcaaagtactcggtttttatccaaaagaagtgacaatgtatgtttaccgagagaatatcattttaaccttgatgggcattgtcgctggatttatccttggcttcttcttgcaccgatttattatcacgactgcagaagtcgatcaaatgatgttcagccctgcaattgattggacaagctatctattctccggcattcttacccttgtttttgcatccatcgtcatggttgtgatgcacattaaacttaaacgaattgatatgattgaagcacttaaatccgtagaataaccttgaaaagaacttgctatttaagcaagttcttttcatttgacttcaaaataaataaagcttaaacttggaaatagttaagggggtgaactttatttggaaaagcaaaaagtgaaacaactgataaagagttaccaacaaacttacatattcgcgatgacacatatacatcaggctatttctgaaatttcagctaatacagtagacttatcgattgaacaattttttgtattgcgagaaatagctactggtgatgaaataagtgctacagaactttctgcttgtctaaatgtcaataaaagcgcaattacaccaaagttaaaaaaactagaagaaaaaggctacattagacgagaacgaaacaagcatgataaacgcgccgttgttttaaccatcacagaaaaagggaatagcgtttacgaagagtgtgaaaaacaattagagttactcgtaaatgaatggcttgaaattctaggggaagaagacagcgaacaattttttgagttatttcaaaaaattaacaagtcagttgtcaaaccgaaaaaataaaaggagagatttggcatgaaatggattatgaaactccgctgggccattttagcattttggcttgcagcagcagtcgtactaatgtttatcgcaccacccatggcagatcttgtacgcgaaaaaggcgaattaaagctgcctgatggttatccgtcctcacttgcgacagaaatgcaaaagaaacacaatccggatgacaaaggttcagcatacattgcggtgtacacagctgaccataagttaactggaactgagttaaacaatattaaaaaatcacttgattccattgacaaaaataaagatgaacttcacgtaaccaacgttgtatcaagttttaatcaacccgaattaaaggataaattcttatcaaaagacggtaaaacgatggtagcaagtctaactgtagatgacacagatgcctctgttaaaagcattcgaaacgctttagacaaaaaaatggatgttaaaggcgttgatacttacttaacaggaaataaattaattcaagaggatgttgttcagggttcagaagacggtttacataagacagaaggcatcacagttgtctttattttagtcgtattattccttgtatttagatctgcagtagcgccgttcattccacttttaactgtaggaataagttatctcgttgcacaaagcacggtcgctttcttaattgacatctttaattttcctgtttcgacctatacgcaaatatttatggtgtgtattatgtttgggattgggacggactattgtattctcttaatgagtaggtttaaagaagaaatgggagcagggctagatccacgagaatctgttcatgcaacttatcgtacagcgggtaaaacagttatttatagtggtgtagctgtactcgttgccttcacttcgctttatttcgttcaatttgatttatatcgttccgcagtcgctgttggtgtcggtattgtcgtcttactcgcagcactttatacactcgtaccattctttatgagtacgctcggaacccatttattctggccattaaataaaaatattagccacaaagaaaataaagtgtggggagctgctgggaaattcacatttgcgagaccatggattgctttactcatcgttgcagctatcacattgccgccaattttactgcatacaggaacagaatcatttaactcattagatgaaattagtgacaaatatccttctaaaaaaggatttgaaatcgtttcagatagttttggagcaggacaagtcgcgcctacacaagtttttatcgaaaatgacgataacatgcgtacaacagaatacattgcgcaaatcgaaaaaatttccgatgatttatctcacttaaaaggtattgatatggttatgagcgcgtcacgtccagcaggaaaacgtgtcgatgatatttacattaaaaatcaagctggacaagtaaatgacggcgttggacaagcaactgacggagtaggtgaagtcaaaaaaggcttagattctgctagctcagaacttaaaaaatcagaaccagctcttgataaagcagttgctggagttggcgaccttcaaaaaggtaccgtggcaaccgagcaaggcatcaatcaacttcaagctgcactcgcacaaattcaaattggaattgaaagtggcgcaaccggtgcaggagacttaaaacaaggagtagcagaagccaagtcacaactcgcttcacttcaaaatggagaagcacaaattcaagcaggttatgcagaaattcagaaaaacttgcaaaatgtagcagaacaattaaaaggctttggaaatcccaattcaccagcaattgacacatccaagctcgaagcacagtttaagaaaatcggggaatcgttccaaacattcgcagcagcacatccagaagtaagaaacgatcctaaattccaaaaactagcggctgatatacaaggtctacaaacagctggtaatgaattaaaaacaactgcaggacaacaaatggccgctcttcaagcaaaaatgaaagaactaaatcaaggtattcaacaattagcaaccgcaatgaaccaattaaatgaacagtccaaacaaatttcagacggcctaagcgcatttggcactggacttggtcagattgaaactggactcgatcaattagaaaacggtctaaatcaagccgcagacggtcaaggtcaagtcgtttctaaaatgcctgaaatctctaacgccctatctcaaattgcagcaggacaaggtgcactaaaagaaggttttgccggaattagtggacaaatgggtgaactaacaaatggcttaacttcaggagctgatggattaggcaaagtagaaagtggtctaaacacagcgaacggacttattgatgattggtcgaaagttccttacgcaagttctggaatttacgtaccagatgcgctattaaaaaatgctgatttccaaaaagtactagaccaatacatttcttctgatggaaaactagctacgattaatgttattttgacaaaaaatccatattcgaatggagcaatggattccatagatgacattaatgaacaactcgcagctagtatgaaaggcacaaaactagaaaatgccaaaattggtattggcggaatgactagcgctaactatgatacaagagatatgtcaacagccgattatcatttagtacttgttatcgttctagctagtgtattcgtaacccttgttatcgttttacgttcacttgtaatgccaatttaccttatcgcatcacttgtattaacttactttgcggcacttggatttgcagaaataatctttatgcgaattctcggctatagtggactaacatgggcaaccccattcttcggatttgttgtactcgtcgcactcggtatcgattattcgatattccttatgtcacgatttaatgaatataatgggctttccgttcgtgatagaatgataaaagcgatgaaaaatatgggcggcgttatcttcagcgcagtgatcattctcggtggaacattcgccgcgatgatgccagcaggagttctttccttacttgaaatcgcaacagtagttctgattggcttagtgctctacgccatcgttatcttaccactattcgtaccagttatggttaaactattcggtcgtggtaattggtggccatttatcacaagaaaaggcgatcatcaagaaaacgtaccaccgaaaaaataattaacaaaccgcattcctttaatcgaggagtgcggtttttagtttaatttaaaaagttattttgctaagatgggtatagagatgaataaaggaggaaggaagcaaatgataaaactcgaaaatgactgggatgagttattaaaagatgagtttaaccagccatactatttaaaacttcgccagttcctaaaaaatgaataccaaaccaaaagaatatttcctgatatgtatgatatttttaatgctttaaaacacacggcttataaagatgtaaaagtagttatacttggtcaagatccataccacggaccaggacaagcacacggtctttctttttcagtccaaaaaggtgttcaaattccaccatcgttacaaaatatttatttagaattacataacgatctaaattgtgagattccaaacaatggctatttgataccatgggcggaccaaggagtgctcttgctaaacacagttcttaccgttcgcgccggtcaagctaattcgcaccgtggccaaggttgggaactgctaacaaaccgcattattgaaatgattaaccagaaagaagaacccgttgtctttttactttggggaaacaatgcaaaagagaagttacaactactcacaaatccaaaacacattgctttcacatccgttcatcctagcccactatcagcttcacgcggctttatgggatgcaaacatttttcaaaaacaaatcacttcctagagcaaaatggcatcaaaccaattgattggcaaattccttctatataattaaaaacgcctcgtctttatttgacggggcgttttatcatttttttgcaattttcaaggctttttctgtgttagcaaaatgttgtttagtatatttagctaatgtttctagtccaaatcgttcaataatttctgctgcaacaacgtccacgtgtggtccggcaccttttggaagcgggatgccaacttcttttgacatagcatcaaaggcttgcacaaatttatatcgagcaataatcgaagctgctgccactgaaagatgaagtccttctgctttcgttgcgaaaaatacatcttctcgaataatacttggctcttttgctaaatatcgatagtaagtatttttttcagcaaattgatcaattaaaatcgcttctggttttatgggagcaagtttttttaggacattttcaatagcacggttatgtagtaatgctttcatttggccttggttcatgcctcttttttgaagttcattgtatttaggattagggcaaagtagcacactatgtggaacgattggcatgattttctctgctattcggcaaatttctgggtctttcatggcttttgaatctttcacaccaagctcttttaaaagcggcatcatttcagcgtccacataagctgcacaaactgtaattggaccaaaaaaatcaccagtaccgacttcatctgaaccaataacatttttggcggcaaagttcgctggaagaacgcctttagaaacactcggcgccttcgtttttgcttctggaagagtcgcaacccatttttttgcttcagcttctccgttgactccttggaacattactttacgagatttgtagccagtaatcgaaacaccaggtttttttgccgcaaaaacggctccaggtgggagttttgggcttgaaaagggaagataagtttgtttcattttttcgagtgttgattgatcgactatgataactgtatttgcgataaggcatcatcctttcaaagttctattgtaacatactacgacgaaagactgaatatctgttaaacgggtggttgactcttttctttccagctttttcgtgataagattatgacaagtagcggcctaaatgaatttgggcgaggaggaatttacgtggcaaatgagagaaataaagtagtgacaacaatttatggtagagaatatacgattgttggcgtagaaacagctgaccacttacgaaaagtagctcgtcaagttgatgaaaaaatgcacgaaattggctcccaaaatcatgcgctagatagtggtaggctcgcggtattaacagctgtgaatgcaactcacgattatttaaaactagaacaaaaatatctagagttggaacaagaactggctcgaattaaaggaagagattaatgattttaaatgcgattattttaattttacttgtttgcggctttttcgcaggatttagaacaggcctaatcaaacaacttattttattacttggttatattttggcattttttatctcgtatacgtattacgaagatttagcgccacatttaacttttataccttatccaggtagtgatacttcagatggattatccattattttacaagaattaagaacagaaacagcttattacaatgtacttggctttgcgattattttcattgtggcaatcattgttgtgcatatgctcgcttcccttgttggtggcttgactaaaatcccagtgttgcgtcaaatcaatggattattagcagctgtttttggtgttattaagtcttatttaattatttttattgttttgttcgtcatggcaatttatccggcaaattggtctgaaaacctcattgatagctcgacggttgctcagtggatgcttgaaaatacgccaattttgtccgaacaattttatgactggatgacagatattctgccaaaataaaagaaacattcgataccagatgtatactcttagccaattttggataggatttctctggtattttttaatgaccaagcgagggaggaattaagatggctacgaataaaaaagaaatcattcgtttacttgaggaaatcgccacttatatggaattaaaaggagaaaatagctttaaaatatcggctttccgaaaagccgcgcaagcaattgaactagatagcagaagtctggcggaaattgaagactttactaagattagcggtattggaaaaacgacgggtgagattattcaacgctatttggacagcggcgaatgcccagaactcgtggaactaaaaaaagaagtgccagctggcctcgttccacttttagatgtaccagggcttggtggtaaaaaattatcacgtctttaccatgaattaggcgtagtagataaagatacattacttaaagaagctcggaacggtcacattgaagcattaaaaggtttcggtaaaaagtctgcggaaaaaatggcagaagcagtgcgcgaaatgggcgaacgacctgatagatacccactaaatgatgtgttaccaatcattcaaaaagtagaagattatcttgctagcatagacacaattgcaacctttgctcgagcaggcagtttacgtagattacgagaaacagtcaaagatttggattacgttattgctactgaaaaaccagaagacgttcaaaaagcattactagaatttcctctgattacagatgttattggggcaggggaaaccaaagtatcagctgttctagaagataacattacaatttcagtagattttcgcttagtagaaaagaaagcttttgcaacaactttgcaccattttactggttccaaagatcataatatcaaaatgcgccaattagctaaacaatcgaacgaaaaaatcagtgaatatggtgtggagcaagaagatggaagtatgcgtcactttgaatcagaagaaacgttctttaaacactttcatattccatttttacctccagaagtacggcgcgacggtacagaaattgaacgggtgacaaaagatacgaaattcctcgagttaagtgatattcgcggtgatttacacatgcatacaacttggtcggatggagcttacgcgattcctgagatgattgaagcttgtatcgctaaaggttatgagtacatggtaattaccgatcacggaaaatttttacgagtagccaatggtctggatgagaagagattacttgagcaacaggcagaaattaaaaaagtagctgctaattatccagaaattgacgtttattctggcgttgaaatggatattttagcagatggctctctggactttgatgatgacactttaaaacagttagatttcgttatcgcatcgattcattccagtttccaacaatcagaagaagagattatgaaacgactaaaaacagcctgtgaaaatccatatgtgcgtctgattgctcatccaacaggtagaattgtcgtgaaaagaaaaccatatcatgttaatatgaaagaactaatcaaactagcaaaaaatacaggtactgcgctagaattaaatgctaatccacagcgccttgatttaaatcgggagcatttagaaatggcccatgcagcaggcgtgcctatcgcaattaatacggatgcgcacgatacgaaacatcttgattttatgtcgatcggagtccgtgctgcaacgaaagcttggctagataaatctgcaatcttgaatacaaaatcagccgcagaattcaaacaatttttacagaataaataacttttaaaaagaaggatgactaatggaaaaaaaagtagaagccattttagaatttgataaaataaaaaaacaacttgctgaatttgcttcttcctcactaggggagcaagcgatttatgaacttgctccagctacagattttcaagtcgtacaaaaagcgcaacttgaaacagaagaaggagccaaaattattcgtttgcggggaagcgcgccaattactggtctaacagatgtttttgcacatttgaaacgtctagagattggtggcgatttaaacgggctagaaatctaccaaattggtagtaacttgcgtgtaagccgccaaatgaaaaactttatgaacgatttactagaaattggggtcgaaataccattactcggcgcactttctgatgaacttttagtattaaaagatgtagaagaagatattgccatttcaatagatgaaagcgggaaaatattagatacagcaagtgaagcgcttagctcgattcgtcgtactttgcgacggacagaagaccgcgtgcgtgaaaagctagaatcttatttacgtgatcgcaacgcttcaaaaatgctaagtgatgcggttattacgattcgaaatgatcgctatgttatccccgtgaaacaagaatataaaggacattacggcggcatcgttcatgaccagtctgcatccggtcaaacgctcttcattgagccacaaagcgtggttgatttaaataacgaacgcaaagcccttcaagcgaaagaaaaacaagaaatcgaacgaatcctagctgaaatttctgcttcattagctggctggattaatgagattcatcataatacctttattctgggtcgttttgatttcattctcgcaaaagctcgatttgggaaagctctgaaagccgtaacgccacatttgagcgatactggaatcgttcatttaatagcagccagacacccgcttttagatgcagagaaagttgttgctaacgatatttatttaggcgaagattttagtacgattgttattactggtccaaatacaggtggtaaaacaattacattaaaaacattaggcttactaaccttgatggcgcaatcaggcttacaaatcccagcgcaagaagattcgactatcgctgtttttgaaaacgtatttgctgatattggcgatgaacaatccattgaacaaagcttaagtactttctcatcccatatgacaaacattgtttccattttagaaaaagtaaatcataaatcacttattttatatgatgagctcggggctgggacggatccgcaagaaggagcagcactagccattgccattcttgatgcaagtcacaaaaaaggtgcaagtgttgttgcaacgacacactatcctgaattaaaagcttatggatataaccgagcacatgcaaccaatgcttccgttgaatttaatgttgaaacacttagtccaacgtacaaactactcattggcgtacccggacgaagcaatgcatttgatatttcacgccgccttggtttaagtgaaagtatcatcacagaagcaagaagcctcgttgatactgaaagtgcagacttaaatgacatgatttcaagtctagaagaaaaacgaaatctagcagaaagagaatatgaagaagcgcgcgaactagctcgtggtgccgatgctcttttaaaagatttacaaaaagaaatcacgaattactatcaacaaaaagataaattactcgaacaagcaaacgaaaaagctgctggaatcgtagaaaaagccgaaacagaagccgaagaaattatccacgaactgcgcacaatgcaattaaacggggcagcgggaatcaaagaacatgaactaatcgatgctaaaacaagacttggaaaagctaagccaaaaacaattaacaaagctattccaaaagcaccaaaacaaaaaccacacgttttccaagcaggtgacaatgttcgcgtcctatctcttggccaaaaaggtacacttttaaacaaaattagtgataaagaatggaacgtccaaatcggcatcatcaaaatgaaaatcaaaacgaccgatttagaatatatcgagccagaaaaaccgaaaaaacaacgcattatcacatctgttcatagtagtgactcaccagcaaaaagcgagcttgatctacgcggcgaacgctacgaagacgctattcaaaaagtggataaatacctcgatgaagcattgctcgcaggatacccgcaagtagcaattattcatggtaaaggtactggcgcgcttagaacaggcgtcacggaatatttgaagaatcatcgtatggttaaatccatccgtttcggagccgcagcagaaggcgggaacggcgtaacaatcgttgagttcaagtaaacaactgagcaaaaacatggctccaaataggtctaggtgctatactgtgtgtacaaaagtcataaggagtgaattaaatcatggtaaaagaaattacagatgcaacatttgaacaagaaactagcgaaggcttagtattaacagatttctgggcaacatggtgtggtccttgccgcatggtggctccagttttagaagaaatacaagaagaacgaggcgaagcacttaaaatcgtcaaaatggacgtagatgaaaacccagaaacacctggaagctttggtgttatgagtattccaacacttcttattaaaaaagacggcgaagtagtagaaacaattatcggctaccgtccaaaagaagaactggatgaagtcatcaacaaatacgtttaaaattatgctaaaatgaaagaagcttagaacaaacattctaggcttctttttaaatgtgtaactggagttgataaaatgtcttctgaacatatccaaaataaattagcgcttctgccggaccaacctggttgttatttgatgaaagatagacaaggaacaattatttatgttgggaaagcaaaagtgttgaaaaatcgcgtgcgttcgtatttttcaggtacgcacgatagtaaaacgcaacgtctagtccaagaaattgtggactttgaatatatcgtaacttcatccaacgtagaagcattgctacttgaaattaatttgataaaaaaacatgacccacgcttcaatattcgcttaaaagacgataaaacttatccgttcattaaaattacaaacgaacgacatccgcgactaattattacccgccaagtaaagaaagataaagggaaatatttcggtccgtatccaaatgtctacgctgcaaatgaagtgaaacgcattctagaccgactgtatccacttcgaaaatgtagtacattaccaaataaagtgtgtttgtactatcatctcggacaatgccttgccccgtgtgtatttgacgtggaagcaagtaagtataaagaaatgcaagacgaaattgtggcattcttaaacggtggctataaaaccgttaaaaatgatttaatgaaaaaaatgcaagaagccgcagaaaatatggaattcgaaaaagctggtgaattccgcgaccaaatcaacgccatcgaaacaacaatggaaaaacaaaaaatgacgatgaacgatttcgttgaccgcgatgtcttcggttacgccattgataaaggctggatgtgcgtccaagtattcttcattcgccaaggaaaactcattgagcgcgatgtttcccagtttccattttacaacgatgctgatgaagacttcctcacatttatcggccagttttatcaaaaagcaaaccatatcccacctaaagaaatttatttgccagatgatgttgatagcgaagccgttcaagccgtcgttcccgacacaaaaatcatcgtaccacagcgcggaaataaaaaagaactcgtgaaacttgcttacaaaaatgccaaaatcgctctaaacgagaaatttatgctacttgaacgcaacgaagaacggacagtcggggcagttgaacgacttggtgaagcgatggggattccaacaccatcacgcgtcgaagcatttgataactcgaatattcacggtacagatcccgtttctgcaatggtcacattcctagacggaaaaccaagtaaaaacgattaccgcaaatacaaaatcaaaaccgtggaaggaccggatgattacgcaacgatgcgagaagttatccgccgtcgttactggcgcgtacttaaagaaggcctaccaatgccagatctaatattaattgatggtgggaaaggacaaattgatagcgccaaagacgtcctaacaaacgaactcggcttagatattccagtagccggactcgcaaaagacgataagcatcgtactagccaactattattcggtgatcctttagaaatagttccactcgaaagaaacagccaagaattctatttactgcaacgaatgcaagatgaagtccaccgtttcgctatcacattccaccgccaactacgcagcaaaacagggttccagagcattcttgacggcattcctggcgtaggacctggccgcaagaaaaaactactgaaacattttggctccatgaagaaattaaaagaagcatcagttgaagaaattaaagaagctggcgttccacttaatgtggcagaagaagtgcataaacatataaccgcttttaacgaaaaagccaaaaataccgaacaaaaatagattttaaatatagctaacataccaatgattttttagttattggcatgttagcttttttatttcagcatctatgattttcgctagaagtaaaaacaaaagaaactcacccttcccttcaacacataaatgcgctaaaataaaaccattgataaaaaagcaccaaaaagtcaggaggagcgagattgggactagtagtattaaaatttggcggaacctctgttagcaccgtagataaaatcggaaaaacagcagatcaagccatttacgagaaaaaacaagggaataaagtcattgtcgtcgtttccgcgatgggtaaatcaaccgacaaattagtagcgatggcagaagaaatcagtgaagctccagacaagcgagaaatggatatgttactttcaaccggcgaacaaatcacgattgctttacttgcgatgactttaaaagaaaaaggacatgatgctatttcttatacaggatggcaagcaggaattgaaacagaagcagtacatagtaacgcaagaattgctgatattgatagcgcgcgcattgagtcagcacttgaagctgggcaaattgttattgttgcagggttccaaggtataactacagacggcgaaattactacactcggcaggggtggctctgatacgaccgcagtagcaatcgcatccgctttaaaagcagaaaaatgtgctatttgtacagatgttgtcggcgtattcacaacagatccccgttacgtaaaaaaagcccaaaaactagaacaactaacctatgatgaaatgctagaattagccaatctcggtgctggagttttacatccacgctccgttgaatatgcgaaaaatttccgaattccgcttgaagtaagagcgagtcatgaactagaaccaggtacaatgattgaggaggatttaacaatggaaaataccaaagtagtccgcggaattgcttttgaagatcaaattactcgtgtaaccattcactggaaacaaaaagaagcgatgcgcgtttcaaaagtttttactaaactagcagaaaataacattgatgtagatattatcattcaaggtatcacaggtcttggtcacggcaacttatccttcaccattaaaacaagcgaactattagctactctagctgttttagaagaaagtaaagaactacttcaaatcgaaaaactagaatccgagcaggaactagcgaaagtatccattgttggttctggcatggtaagtaaccctggagtcgctgcaaaaatgtttgaagctttaactgaaaataatatcccaataaaaatgataagcacttcagaaatcaaagtttcgacggttgttcctgcccgtaaaatggtagaagcagcacaagttttacatgaccaatttgaattagataaataaaaataagcttgaattaacgagctacatcccagttaagaggggtgtaggcaagttatttcaagcttatctttttagtaacgttcttcgttatcaatcgtttctttacgatcccatttaacgataatcgtcacttgttttttacgtttatctatttcatcgtaactttctgtatagagcttcttctgtgtttgtaattgctctgcgataaaaccagcttccaatttaaaagttggattttcttgtgtacggaaccgcgaaacaaccatgtcaccttctaaaagtaaacgcaactcatctttcttttcctttaaaatactaagtgtcccaaaagaggcttcttcaaagaattctcttatctcttccatggattcaagtgggaatttacgcgctaagtctttcccagcccagtacataatgtgaggcgcttcatctccaaggatttcaggaattaaataatctcgcagtacatctaatccaaaacttggaacgagtgctttttcctcgtaattattctgttcattttctgtcatttcggatacctcactttcatacaccattataaccaaaatcaccctaaaatggaaagcacaataaataaatttctataaaaaaccttttttctcaaaaaagacttgcgaaaaaagcgaaaaaataagaaaatggaaggtatagataaaaaaatttggaaattaataaagaaattgaggcgagactgtgaaacaagctataggctttatcgattcgggagtaggcggtttgacagtagtgcgtgaagtactaaagcagctaccccatgaacaagtatattatttaggtgataccgcacgttgcccttatggaccacgcgacaaagaagaagtagctcagtttacttgggaaatgaccaattttctcgtagatcgtggcatcaaaatgctcgttattgcatgtaatactgcaacagcggcagcactatatgacattcgtgaaaaactggatattcctgttattggagttattcaacctggctcaagagcagctcttaaagcaacaagaaacaacaaaattggcgtattaggaacgctcggtacagtcgaaagcatggcttacccaacagcgcttaaaggactaaaccgccgagtagaagtagattcactcgcatgtccgaaatttgtatccgtagtagaatctggcgaatataaaagcgccattgcaaaaaaagtcgtagccgagtcactcttaccactgaaaagtaccaagattgatacggtgattttgggttgcacacattacccacttttaaaaccaattatcgaaaactttatgggagatggcgttgcggtcattaactccggcgaagaaactgctagcgaagtcagtgctttactggattaccataatttattagatgcgacagacgacgaaattgaacatcgttttttcaccactggttccacacaaattttcaaagatattgcaaaagactggttaaatatgccagatatgacagtagaacatataaaattaggaaaataagaggtgccactaatgagatttgatggaagagaaaagaatgcattacgagaaatcgaagtaacacctgattacttaatgcacccagaaggttctgttttaatcgcatcaggaaatacaaaagttatctgttctgcaagtgtagaaacaaaagtaccaccatttatgcgcggggaaggtcgtggctggatttctgctgaatattccatgttaccacgggcaacgaatacacgtaatatccgcgaatcttctaaaggaaaagtaactggaagaacaatggaaattcaacgtttaattggacgggctttacgtgccgtggttgacttagacgcacttggtgaacgaacaatttggttagactgtgatgttatccaagcagacggaggaacacgcacagcctctattactggtgcatttattgcaatggtcatggcgattgcaaaactagatgaagaagttccgttcacgaaattcccagtcaaagattttcttgcagctacaagtgttggcgttttagaagaaggtggaacagtacttgaccttaactacgtagaagatagcgcggcacaagtcgatatgaatatcattatgactggtagcggagcctttgtagaactccaaggaacaggcgaagaagctactttttcagaaaccgaacttgctgaactaatcgctctaggtaaaaaaggaataagcgaactaatcgaaatccaaaaagaaacactcggcgacaaaatcacagcgcggattaaaggagaataaaaaatgagtaaaattattattgccaccgcaaataaaggaaaagcaaaagaattcgaaaaaatctttgcgaagtttaatatcgaagttgctacccttgctgattttccagaaattggtgaaattgaagaaacaggcacgacctttgctgaaaatgctgctcttaaagcagaaacggtcgctagcttgctaaatcaaacagttattgctgatgattcaggtttaattgtagacgtgcttaacggggctcctggtgtctattctgcacgctatgctggggtcgctcatgatgatgcaaaaaataatgaaaaactacttaaaaatttagaaggcgtagaaccagcaaaaagaactgctcgtttccactgtacacttgctgtggctacaccctctgagaaaacaagtttttatacaggagaggtagaaggagttatcgcagaacaactatgcggtacaaacggcttcggttatgatccactatttttcttaccagaattcggtcttacaatggcagaaattccagcagagaaaaagaatgaaatcagccaccgagctaatgctattaaacagctagaaaaagatttagcagaagttgtagaaaaagttactaaaaagtgagagaataagtaacagagcactagggggaggaaataaaatgaaattattagtagttagcgacagccactcagaacgtgactgcttaatccatcttaaagaaaaatacgaaaatacagtcgatgccatgattcattgtggggattctgaattagaagctgatgatccagcgattcaaggatttcatactgttcgaggcaactgtgattttggcggaggctttccaaatgattgggtaggggaagtggatggctatcgtatcttaaccacacacggacatctttataacatcaaaatgacacttatgaacttacgctaccgagctcgtgaattaaacgctgatttcgcattttttggtcattctcatgaactaggcgttgatatgctagatgacaccatcattttaaacccaggaagcatttccttaccaagaggtcgcattcgcattaaaacatacgcactcatcgactctacaccagaaggaatcaaagttcgcttcatggatcgtgacgataacgaactaactgacctaacacaagtttttcctttaacaaagcacaactaggtcaaaagacacccaaaaaagaaaaaatgcaataacttaaagaaaaccattgacaaacaagcaatttaaacataaaatggtatttggctgttgaaaaaacagtgccatttgtcctgatagctcagctggatagagcaacggccttctaagccgtcggtcgggggttcgaatccctctcaggacgttaaataaagcaccataaacgttggtaatacaatgtttatggtgctttttgatttgcggaagttcaaataatggtgttcaagcagttgtatctattaagaggggaagacaacattgaatgcctcttagaaataataaatgctactctaatatgtcttttagtaaataatataggtgaagactgataaaaatcatatgaaattcttgtttgattttataagttaattagttaaataaaaaaggggatttcatttaaaaaaacaacatatattttaaatgaatatgtatttttcgagatattcgagaagagtaaagcataaatcgtgtataatgaactatattacgtgttatcttgtgattaattacacaatattgcacctatcgtttaagaaaaagtttaagtaagctcttttttgttgttcatgactagaattggacatttcattatatttttggttatacattatcttattgtattacgatgaaactagactaggaggagggagaaaaacatgaaaaaaggatttttttacgctatttttattctcttagtaataatagcaagtacattatttgctctcaacatcatttccagtgtaggatggatggctagtgttttttgtttagtgatagtcgctataatatttacgaacatgacaaaaaaacggacataacggagggaaaaacggttatactttagagcattagatcgtattagcagatgctcttaaaacgctaaacagtaaaataaaaaatctctaaaacatttgaaaccctttgtaattaaaaggtgaatgttttagagatttttttatcttgcatttcccatttttattccgttgtttttgtggcaaattttattaaaactagttcaagtaattacgaatctcattggaagcgaagaactactttataaaatagtcaaaaattaggacaagcagattattgagatgattgatcctttactttaataataatttttatgtaaactcatcccttattaggtgttctattgtatgacttgagagtagtttttttgagaatttcaagcaataaatttaaatatattagagagtctaaaattagtactaatccctaaaaagatatgaacgatatgtgaacgatgataccaagaaatgaaaaaatctctatactatattcaaattacaagcttgggactgctataattagtacttattgaggcgatatgatgccacatacattaaatacagaataaactcattctttaagataataattacatctaaggagactaatcatgaaaagaaagataagttctatcattgtagtcgggataatgctctttcaatcattaactatgtatccatttatcaccgaagccaaagaaaatgaacaaaaagaagaaataaataaaccctcaaaaataactaagggattaactaattccctaaaatacactaagacaattcttgaaacaggggacacctatgatagtgtatttcctgacagtgctttagctaaagtagttgctaaagaagcaacggggtcagagaatacaactcagctagtaacacaagcagacctgaataaaatcaaatctctcaatggttataataaaggaatcagcgtattaacaggaatcgatttgctagtcaatgtgacaagtataagcttgaataataatcaagtaacagacatttctccaatagatcaattacctaatttagtaagcctatcggtaaaaaacaatcaaattagcagtcttatcttaaatgcgcaaaatcaactcccgaaactaacaaccattgatattgaaaataatcctgatcttaatactatcgatatccaagatcaaccccaattggtagatgtaaagacatccggttatacaggattacgtaagttaacaacggtaattgccaaaaacaatccagaattagtcaatttaggccaatacactatccgaaatgtctactttagccaagtagcaagtttaacgaaagttgaattagtcaatctccctaaggtaagaaaagtaaaccttgagaggaacagtattaatgagctaaaagttactgatttggctattgaagatctgccattagaagaaaatgaattaacagatacagtattcgataacatccaaaatctgcctaatttaaaaacgttagacctgtcaaaaaaccaactagaagaagttgtgttagacaaaacggatgtagaaaatctacccaatttgatgacattagatatacagcaaaatttggctataaaattgataaatgttcaagatcaaccccaattggtagatgtaaagacttccgattataaagaattatctgcgttaacaacagtaattgccaaaaacaatccagaattagtcaatttaggccaatacactatccgaaatgtctactttagccaagtagcaagtttaacgaaagttgaattagtcaatctccctaaggtaagaaaagtaaaccttgagaggaacagtattaatgagctaaaagttactgatttggctattgaagatctgccattagaagaaaatgaattaacagatacagtattcgataacatccaaaatctgcctaatttaaaaacgttagacctgtcaaaaaaccaactagaagaagttgtgttagacaaaacggatgtagaaaatctacccaatttgatgacattagatatacagcaaaatttggctataaaattgataaatgttcaagatcaaccccaattggtagatgtaaagacttccgattataaagaattatctgcgttaacaacagtaattgccaaaaataatccagaattagttaatttaggttatcccattatgcaaaatgtttactttagccaggtggcaagtttaacgaaagttgaacttgctaaccttccaaaagtaagagcagttcgattggaacgtaatagcatcaatcagattgaactaaataatttagtttcagtaaaagacgtgaatctaaatactaacaaaataacaaatgatagcatagagaaatttagaggcatgcctatactagcaactttaaatttaaacaaaaaccaaattaccaatataaatatgcttgatggtttcccacaaatgactactttaaatatcgatttaaactccatcagtgttttaccaagtaaccttaaaacaaaaatgccaaaactatcgagaattagtgcattaaatcaaacagttactttaggtaaagcaattgtagtggatgattccgatttaattattaataatgagattagtaattttgaaaagttaaccgagccaagcccaatatcaaattttggaacttacgcaaatgaaaaaataacttggtcgtctgaaagaataaaaaatttaacagaggtcagctttcagttttctgagctaattaatgtgactggtatagatggaactttttcaggaaaagtaacacaaccatttaaaagatcaactaccccagtaattaatgcagattccgaaattcattatccacaagggacagaaaaaacagaagcagagtttttaaaggatgttcaagcgcaaacaacggatgatttagccattaaaagcgattttgaaacaatggtgaatctcaagaaagtaggaaaatacacagtaacattaaacgtagagaatctggatggaattaaagctactccaaaagaagtgattgtttatattgatgctgtacaaggtgcaaatataactgtgaaatatgaagacgaatcagggaataaacttgcggaaaatagtatactaactggaaatgtcggtgaagaatatagttcaagtgcaaaagaaattttaggttatacactaactgaaatgccatcaaatgcacaaggagaatttagcttagaagaacagactgtgacatatatctattcgaaaaatcccgttccagctaaagacatcacggtacaatataccgatgaggatgggatggaattagcaccaaccgaaacattatcaggtaatgttgatgaaaattatgttacaacagcgaagacttttacaggatacgaattaattgaaacaccgagcaatgcagaaggaaagtttagcgaaaatgcacaaacagtgacctatgtgtatcgcgcgattaaagcagagccaattttagctaaagaagttacggtgaactaccaggacgaattaggagctaaaattagtgaaacggaagtattgactggtgaaattggtgaaacatacacaacagtggctaaaacaatagatggctataccttaattaagagccctactaacgctaacgggatttttaacgagaatcctcaaacggttacctatgtgtatcaattacaaaatagcccaatagcagcaaatatcaccgttaaacacttggatgaaaacaacaacgagctagcaccaagtgaggtactaagcggaaatgtcgatgaagcatatacaactaaaccaaaagaaataaaagactattcgctagtaaaagtaccaactaatgctagcggaaaattcacgacagaagcacaaactgtgatttatcactataaaaagaacagtataccgacatcatcttatattactgtaaaatatgtagatgaaacagggaaagagctggccataagcaaggtattaaacggaaacattaatgattcctacgcaactacagccaaggaaattaaaggctatacgctagtgcaaaagcccgctaatgcaactggtaaatttacggatcagaatcaaactataaaatatgtatatcgtgctaataaagccgaagtaaatccaaatccaaattcagatgtactagggagtaattccaatggagatattcaaccaacgaatgatattaagccaacaaacgatgtccaaccaacaaatgaggctccacaaaccctacctaaaacaggtagtcagccggcaaatttgatctttggattaggaattttactagtacttcttagtacccaatggctacaccgaaataaaagaaaaaaagctaaatctcataactgctgataacgtttcttgaaaaaactctccttatcataaggagagtttttgtttattaaaataattttacctatcaaatagtgaaggcagcgagtcattttatataatcactactaagttaggattaatacgcttccttacaaaaatcttcttacggttagcagtttttttatattacgcttgaatttccaaaaacaggggtattgtacaagtgttctaaaaaaagataattgaaggaggatttttacatgaaaaaaatgctacctgagagtaaagtagaatcaataagaaaagaaggatttttaaatcgagctgtggaggcataccgatttttctatccaaccgtttcgaatgtatcaaattttaaagcattacacgatttaggaattaccgagaatcacgattttattattcaacttacgactcctgacttaaatgtactgacacaaaattcagataccccgtattgtcttggaacagggaacacagagaatggtcctgttgtcatcgaattaccgctgggtgccattgttggtgtggcggatgatattaattttaaatttattacgaatatgggattaacaggggatgaagaaggtaaaggtgccaagtatttatatcttcctcctaattatgacggggatattccagaaggatacatagttcgcaaaccatctagttttaggtttttaatttgtttacgggcgatggtccaccaagcaagtgattatgaaaaagcatttgagttactaaaaacagtaaaattttatccgctaaaagaagcaaaaaataatccaaccagtactttccatgatttttctcatcgtaaagccatttcaacaccttattatgttgaaggaaaattcgattattgggaagtaatcaaatgggcgctggataatgatgaaacagatccagaatattaccaaatgtatggcttactaaaagcaattggactggctccaaataaagaatttaatcctgattcagacacaaaagcattgttaattgaagctgccgaaaaagcagataagatgatgtttgtgaattcctttaatacagatgatcctgcagccattgtttggccagggaaaaattgggaatgggctgtatacggtgagaataatgacttctatgaaaaaacgtatttaaaccttcctgtaagagagcgctggttctatcaagcgacactcgaaacacacatgatgtttatgcataaagtcggatttggttccgtttatatgcttggggtgaaagataaagaaggaaactatctggatgggggtaaaagttatacattaaaagtgccaacaccagtaccaacgagcattttctggtcggtaacggtttatgagatggatactcgttcggaaattgttaccgagcagtttatgcctgcacttaattcaatcaaagatacctttgaagctgatgcagatggcaatacaacgctttactttggaccaaatccaccagaagatgagtcgctaccttggattcaaactgttcctgatgccaattggttcacgtacttccgtatttacggaccaactgaaccagcatttgacaatagctggcaactatatgattttgaagaagttaaataaataaaaagaggcgtaacttttaatagttgcgcctctttttattaatcattaagtcctaatccatctaaaatcgttgcttcatatttctcaatgcgcgaaacacgcgtttttgattgctttggagccgcaaaataaagcaagtacgctttttggcgaccaggagttaacgcttcaaaagctgtttttaaagcaggtaattcctcaaatttcacaagtaactcttctggaataggcgtttccgctcttggtttaagcgctacttctaaaccagctttttcaacttcgattgcattttgaatatatttttttaaaatctctttttgatcaagaatttcttgtaaattagtaaagcggatttgcctagcagcttgcacattttctgtttgttgcactaaaatattgtccggatcacggagtagtgcgcctttcataaataacagggcacagtagtttttaaaaccatgaattaagaaaacgttgctgccattaatagcataacaaggttttccccatttaaattcttcttctagttcaaatgtgatagccatttctcttaatgctttgaattcagcttgccaggtagaaggtttattaaggaacgaatctactttgggatttaattctgtctttgccataaagaatacctcttttctaatcttaaatatgtgctgttttacctcgtacaaatatgcttttttaggacaaaatgacttaaagaaagaacctgaaacttatcccaggttcttttacttttaggataaattaagctgccaaccaataccaaacttatcagtaacttgaccatatttttctgaccaaaatgtttttccgagtggcataataatattgccgccttccgcaagttgatggaattgttttgtcagttttatttcgtccgttgtatcgataacgagtgtgatattgtctccaaatgtaagtggcatagacttcggcacatcggaaaacatgacttttactccatcgagtactaaactagcattcattactaaatcttttagcgaatcttctataggttcttcagcggactcgatttccccatatgtcatcaaatctgtacactttgttccaaaaatttcttcataaaacgcgatagcatctctggattgtgttctaaaattcaagtaaacatttaacgtcatttgaattcctcctcgatttttattcgctatagttctattcattttggtgtatttattatagcagatactgcgtgaaagaggaaaaattaagaagataaatacttgacttggagctactccagggtgataaactaaagagaagatatagattcggaggaatttagatgaaaaagacattatatttaatgcgccacggtcaaactttatttaatcaacgtaaaaaaattcaaggtttttgcgatgccccacttaccgacctcgggattaaacaagcaaaaatcgctgggagttactttaaagaaaataatataacattcgatcaagtttacagttccacctcagagcgcgcatgtgacacgttagagctgattacggacaaaagctatcaacggttgaaaggtttgaaagaatggaattttggtgcttttgaaggcgagagcgaagacctgaacccaccactaccatatggagatttttttgccgagtatgggggagagcgagaagtagatttcagagaccgtttagtaacaacaatggaacgtatcatgagccaagagaaccatgatactgtcctcgctgtttcccacggagcagcctgtgctcaatttgccagatattgggaaaaaacaagcaaaattggcaaagtaacaggactgaaaaattgctgcattctgaagtttgaatatgaaaacggtagatttactttagttaattttattaatcatgattttgagaatgggacgcatatggaaagtgttaaataaacaactcatgaacgttaggttttatacgaaagacaatatagttagaagaggtgcaaattagcatctctttttgtatacaattgttattgttttaaaaatttttcaactttttcaacaatctattgcgccgtttttcacaattcgatataattattattgagtgaatacaatattacacataagaaggtggaaagaatgtcaaaatatgatgctgaaattgttaatgcacaacaatccatcaccggacaacaagaaaaaatacgaagattaaaagaacttatcacaaaaatagaaagaaaaggtgaacagattagttccatacctattcgccaaatcgatttaccatttgatttttggcaaggtaaatctgatagtgtcatgagagaagtacttcaaaggcgacttcaattttggaataatcaaaatgctgtagtgaatgaccttgtacaggaattgcgcgcagcgatgactaaaatgcaaaatcagataagtgattatcaagcggatattagctactatacaaatttaaaacaaatggaggaagaagtaaatgtctgatatacaagtaaatgaatcacaaataattaaaagtatgaatcaatttgctggtaagcaaaaagtactttataaaaaatcttcctctacttcccataataataaactagctacatatcataaaatacaaactatattaacaaaaatggatactcaaatgaatcaattacagcagttaggcgagcgaacgacacaagacatagagaagaattgtgctgaattcgttaacttagataaaaatctattaactgatattgaagtaacggggtgattgtaaaatgaagatagatgtcagagaattaaatgagatagttagcgagaatatagtaatgcttaagaaagagtatgaaaatttaaatatagcaatgaacgctacaaccaatttcacagtagaaactcaggaattttttaaaggaaaaacagcagatgcaagtcgtgcttatctacaagaggcatataaacctgtacaacaaaaagcgctagaagttaataaattgatgacaaaaatattgagcgaatatattgcagatgccgaggcacagttcggagcaaatggtatgatagatattcaatctattgaaatggaatacaagcgcagttttaatcaagttagtgatgatgaaatgagagaataccgcgatttgaataatcttattcaagaggcaaacgaatttacttactttcagtcgagtaatttaggtttttttgaagaattgcatcatgatgctttaacagaaataacaaatattcgcatgaaactagaagactttgaaaccaaatggaatgttgaacttagtaaagctgaaaaattacaaaaagagcttgattggatgttaacacaagttaatgataataaaataattccaacaagctatcaagccggaacgctcccattcggtaagccatttaaatcacgagatgagtttgatacagtgcaagaatattaccaatatgtcgttgaatgggcagtggcaaatggtaaagcgaaagaaatcattgttgatgggcaaagatattatgagtttaccgatactttttattatgaaaattataataaggaagtcaatggaacattagttatgacagaagtaaatggagaaatgatattatttgtacaacgtaaagatatagagagtgcagtttctgttccttttggagtattttacccagatccatttcaaaggctagcaaatggaggagaaacagatggaactataaaattatatcactggaagagcaaagatataccagaaggactaagtgttccaaacgaagaattaaaggctatggcagatttcttcgcagatacacagaatagttatgatgcaggtatggctatattaaaatatttggctcataacaaaaatcctgaaaagctatcatttacagatacagaattagataaagttgcaacgaattggtctggcggtaaaaatagatttgactttgcaggtgaagttgaggcgcatgctgatatgcttactgattcaatactaacagaacttgccgcgaagccaatggataaaattgatagacctggtaatacagatgaagagaaggagcaaggatattatcacgcagcttcaatagctgatatgcaaaaaggagaagatggaatgatgaacaaaagttttaattcgatttggggttctggccaatattcagcttatcttcaaaaccttatgcatggacaagagaatacgccgaaagctaaaaagagaagtttcccacgccaataattttttataaatactagtagtgatttacaatgtaataatcataaaaagctagttactattaataagtaattcctttcaaaatttgagaatggaaagcactaaataaaaaaacgtaaacattaggtttttttatgaaagaatatatagttagaagaggtgcaaatttgcatctctttttgtatacaattattcttactttagaattttccaacaagccattgcgccgtttttcacaattcgatataattattattgagtgaatacaaaattacacctcaatttttaagaacgtaaatgaaagaatactgaatgggtgaattatgaataataagctaaaatttattttaaaaacactattaggggtgtttttactatctctttctatgtatctttttttagctcaattcagcaaattagttggctagaaaatagtagtatggaagatagaacacggtactttttacaaaggaaatttaatgatgattggaaagatatctccccgaacttagcatttgatttcaatgttgaaagtggtcgaaataaattaatgacagcgcattttgatatatccgcgcaagtcgaaaatagaaaagatgatttacacacatttaaaactaaaaagaaaagtgagttcagtaaacttattacatttgatatcgaagtaattaaaaatgtaaaagcaagtactaaaattgaaaagaagcagacagtatatatacatccattacctgtaaaagagaacaatgaaatttatacacttcagttttctaataatatgtatcaacccaatcgaaaaatggaaaaaggattagacatacggtcatcagatgtggttgatagcgtaatttcttctcagaaaaagtatcaacttttacttgagcagatcacaacaaaagaattatcaagcaaaaaactaacaaagaatattatacttttacttagcattttggttttgggagcttatgcatatttaataattattaaaaagtagaaaaagcgcagtacaccaagcgggctcagtgtactgcgctttttcatttattgaaacaaattctttattttatccaaaaacccaccagttaactcattcgcagtatcttgcaagttttccgtaagtccgctcgctttatcttgcagattttccgttaggtttgtcgcttcattctgtaaattttccgtgacattacttgcttgttcgccaagctcagatgctttggttgttgcctcttctgtcagtgttcctagattttccaggggcagggactcggtaactttattcttcaaatcatctaaattcattgtttcctccttattttggaagcttagagtccattttaaaggaagtaggagcgaagtacaaacaattcgttccgtcatttgtgaaaaaatatggtatgatgatatgaggaaatgaggactgacatgaataatttaaaattaagtgaagaaattaaaagagccattaatgaactaggatataaagaagctacccctgttcaaaaagcagtaattccagttgccttaacaggagaagatattgttgctaaatcacaaactggtagcgggaaaacagcagcatttgcgattccaattgcagaacaggttgtttgggaagaaaacaaaccacaagcgctaattatcgtaccaacgagagaacttgcaatgcaggttaagacagaatgtacgaatattggacgatttaaacgaattaaagcagcagcaatatatggacaatcaccttttgctaaacaaaaattagaattaagtcaaaaaaaccatattgttgttggaacgccggggcgattactggatcatatcgaaaaaggatcacttaatgtcgataaagtagcccatttagttttagatgaagtagacgaaatgttaagcatgggctttattgaccaagtagaagatattcttagccgtttaccaaaacagcgtcaaaacttatttttctcagcgacattacctgaagaaatgcaagatttaattaaacgctatcaagataatccaatggtaattgaaatggcttctgaaaaaacaaatccaatttttcatgtggaaatgcaaacggataataaagaaaaaacgttaaaagatgttttaattactgaaaatcctgacagtgcaattattttttgcaatacgaaaaatcaagtcgatgaactcaccgatttactcgatgtaaaagctagtaaaattcatggcggtttaagacaagaagatcgtttccgcgctatggatgatttcaaaagcggaaaatcacgtttcttaattgcgacagatgtagccggtcgaggaattgatgttgataatgtctcgcttgtaattaattacgatttaccaattgaaaaagagaactacgtgcaccgaatcggacgtactggccgtgctggaaaaagtggaaaagctatcagttttgttaaaacgaatgaaaatccgcttcttcgtgatatagaagaaatgctaaatattacgattgagaaaaagcggaaaccaactatcatcgaagtaaaagcaaatgaagaagctttccgtaaaaaacaacaaaaacgcccaaccataaagaaagctcgcggtgaaaaactaaataaaaatattatgaaactttattttaacggtggtaaaaagaaaaaaatccgtgcggtagattttgttggaaccatttctaaattagaagggattacagcggaagatattggtattattacgattgaagaccatgtatcctttgtcgaaattttaaacggaaaaggcccagctgtccttgaaatgatgcgctcacgaaaagtgaaaggcagacgtctcaaagtcaacgaagcaagaaaacgataatttaaagcaaagaaggtcacgcaatggaaaggccagataatcgacttattataatggtgttagaagttgtcaaaaatcctgtatacaatataaaatcattaaccatcaattttctgcaaagtgatattgttggcaattctacgagaaatgagttgttatactgcacttactggcttgaatttcatggctttatcatacgtgacgaaaataataataataaaaaatattatagtatgacgcagcaaggtaatcatttacttcaaaaaattaaaaatgaactttcttagtttgttcatacttttttcatatttattcggtatattaagagtaacctttttttcaatgaaatatctcacctgacagcatccgtttcccaacctaaacacggatgctgttattttttatgccgttaaatatgctatactaataaaaacgaaaaaagaaggttaaactatgtataaatacacgctctgctttatccaaagagctgatgaaattttattattaaacagacaaaaatccccttggatgggaagttggaacggcgttggtggaaaaatcgagcccggagaatcactcattgaatctatcaaacgtgaaattaaagaagagactggaattaatgcagccgactacgaaatacgtgatattggtgaaatgaaatggtttgtagaaggggagaaccttggcggcatgcatttgtttgttgctaaactgaaagatgactttatataccaaaccccgctggcaaccgatgaaggaattctcgactttaaaaaaatatcatggatacttaatcaagagaatactggtgtagtgaacaatctaccttatctgatcaaacatgttccggatgatttgaagagaatagaagttacaacaaaataccgtgaaaatacattattacatattagccatcaagtcttataaaaaaagcattgcgctgattcgcaatgcttccatttatcaagatgtagtaaaataattagcttcccatctactaattaaattttgagcatcatcggtagataattttttatggccgataatttgttctttcgcaatttctagactttcaaaatgatcaattaatcgctgcgatgggttattaatatagacgtcactaagcaaaatagaatgatttttttcactttcaatcgctcggactcctacgatataacctgctgcggtaatgagtaataatttattcataattcttcgctcccttttagttgttcatgtgcgccactggacactttttttctggataaaaacatgtaaataaatacgcaaacaaatgcgatagcaccagcgataatgtaaataccttggaatgaaagaacatgatgaatttcacccataatataaggtccgataccaaggcctaaatcaagcccaataaagtaagtagataaaccaatgccaatacggtggggttcacaaactttcaaacaaacagcttgtccattcgacataaaagttccataacctaaaccaattaatccacctgaaataagtaaaacaatacttgatgttgcagtactaagcacaactagaccaactgctaaaaagagataactaggatacatgacatatttttcaccttttgcatcaaatagtttccctgacataggtctggtaaaagtaataactaacgcatagacaacaaagaaaaaagtaccagcgctaactaaattaatttctcgcgcatacgaagcaaggaaggtaagtacgcttgaataagaaatccccatcaaaaaggcaataaaagtaatcggaataacttttgtttcaataaaacttttgacagtccaagtttgtaatgctgtccgatgttcttttgttaaaacaatattttttactggtagatagaaacaaagcagtgcagttaataagacaataaccgtggaaaaaataataatcgtataaaagcttgttttacttaacaaaatcattccaataaatggtccaatggcagcagcaagactcgtactaagaccataataattaatgccttctccgtttctagaattaggaatataagcagtaacaatggcatttgttgcagtagaagttgttccatatgcaaacccatttaaaaagcgaataataaacataattgcaatcgtcggcatgtataagtaagccatcgtcgttactaagaaaaataaaataccaaaccttaaaacttgcttacgaccaaataactcaagctttttccccatataaagtctcgcaaggagcgtaccaataatataaataccagaagcaaaacccgcttcgccgagtgatgcacccagctcttcttgggcaatgacagcaataatcaccatcagcaaataatagacaagataaacgacaaagttaatcaatgttattaaaacaaaacccttattaaataatttttctttcataaattaaaatcccttcctacgtgtgatttatctcagcgacaaagagtattataggcgaaattttaagagtagactttttaatttggtaattatttctgatatatacaaatttgtataacatatgttgaaaaaatagggaatagtattttgtatgattaatatgctttaactggaatgacaaaaaggaggttaagaacatgaaacaaaatattcttaataattatgtaagcacaaatgattttccagttattacaaggggaaaacgtaaatatttaacttacgaagggcttgaagattcttatgtgtacatacttaaaaaagggattattaaaacgagtattatctcaagggatggcagggaatttaatttaaactacattaataaaatggatattatctcacttttaaaagatgagtattctcaatttgccaatgcgccgtttaatattcgtgtggaatcagacacagcagaactatatcaagtagaccgagtacgtttttggaaagatgtaaaccgtgacgttgatctgcaaatttatgtcaaagattattatcgcacaagacttttacaatccatcaaaaaaatgcagcaaatgctgatgaacggaaaacttggcgcaatttgcacacagttatacgaactttatacacttttcggcgtggaaatcgaaaaagatcaatttttaatcgattttttagtgagtaatgaagaaattggtcacttttgcggaataaattcagcgagcagtgtcaatcggatttttcaacaattaaaaaaagagggcgtcatcaccatgaaaaatcgctatattatcataaaaaaattagatgttattcaagaaaacgtaattttttaaaggataacagtagaaaagcactgcaatcataatttgcagtgcttttctatcctctttttttaaatgtatatcgaactctaagtgtaataagcccaatgatgattagcaaagagccaaccagcatattttctaagtcgctaaagtcccaaaaaatagaaattccgatattagatagtcccaaaaaaacaaaaaccaagccaacaacaagtaaaaccatatatgccggtttagatattttcataaggacgcctcacttacattaaaaataatttccacatcattgtaacataagtttcataaaacaacatcattcgcttgtaatttgttttgtgaatccttctccaacaacactttgcacgtcattaataataaagaatgctttttcgtcatatttattcacgatttttgttagtgggagaagttgatcacgactaatcacgatataaaggatttttttatcttgacgcatatagaatccttgaccgttaaacagcgtaatacctcgttccaaattcgcatcgatttcggtagcaatttcttcatagtagtcagaaataatcgtaacagattttttaggattataaccttctaggatgaaatcaagcacttttgtagaaatataaagtgaaacaaccgtaaatagcatattttcaaaaccaataacaaaaacagaagggataacgacaattaaatcaaagaataatagcgcataactagtattccaacctaaatatttatttgctatttttgctaaaatagcacttccagcagtagttccgccgccgttcataatgagccccataccaattcccatcattaaaccagcgaaaatcgctgccacgatagattggcttgcaacaaaagcaagcggttcagaaaaatgtaagaatagcgaagtgaaactaatcgcgacaatcgtccaaacaatcgtcatgcgatccaaaaacttataaccaataacaagtaaaataccattaaaaataaacgtcgtaatcgctggagtccaaccaagcaagtagtaaagcatcatcgttaaccccgtaacgccgccttccccaagattattagggattgcaaaaacattgaccgcaagcgagaatataagcgctccaacaataatttttgcgatgttccaaccagttttatttttcatatccatttctcctttccacacaaaaaaagacccaagaacaccgcgaaatcggcactctggagtctttttataaaaaaagcattaactgacatctctgtcattaattgtctcaccataaaaaattgctattcatttcaacacaatttacaatataccataaaaaataagctgcttcaagcactattaagtaaaaaaattaaccgaagatcgctaagaatggcattaaattaagtaaaaataaaccaacaagaacactaataacaattttgatgacaagcggtttttcactttctgtttttttcaccttgattccctccctattagatgcttactttgcccagtgtacaaattcattttttagtggcatataagtggcagtttttttcttataaatctgataagcaaataaaaatccaagaaatgctggaacgataattgcgataatagttaaaataactttagtcatagaaaatacctcctcttaaatcaaaacaaaagaacaaatcttactactattagtgtaacaaatttcacgtgattttggtaataaagcggactagcaaatttcggttacatttatctgcaaatatgctacaatagcggtgggtgagttaatttgaataaaaaaaataagttttttgacatttatttagaattagagcaagatattacatccggcgtttatccagcaggcacactacttccgagtgaaaatgtcctggccaaacgtttttcagtatcccgtgaaacaatcagaaaagcacttgttttactacttgaaaacggctgtattcaaaagctccaaggtaaaggatcgattgtaattgatagggaacgatattcatttccagtttcgggattaactagttttaaagaattacaaaaatccgaacatatgaatgcgaccaccaaagtaattcgaaacgagcgagcaaccttgccaaatcgtattgctgatttcgctggtcttccgcgtggatcatcttgtttagctatcttgagagttcgttatttagaaggagaagcaaccattctagactacgattatttattagacaataccaatccgattgaaaccgagattttagaagactctctttatcagtacttagaaaatgaaaaaggctatgaaatcagttacgctcaaaaagaaattacggttgagccgctgaatgcagaagataagaaatacttagcgctccacggtgacactcatgtggttgtcgtaaaaagcaccgtatttctaaaagacacaactctttttcaatatacagagtcacgtcaccgattggataaatttcgttttattgattttgctagaagacgttaaaaggcccgagaaatattcccgggctttttttattgaattaaagttaatgtttcataaggcgataactctatctcagcactaatttctttacggtcataatttgatagtaatatctttccgtccgaaaattcttttggaagctgtatttttttctttgtagctccaaagtaatgaattgctagtagcgatgcagtttcatttgaacgcttataggcgataatcgaatcttcctcggtcaaatatggcgtataatcaccagtttgaatgaccggatattctttacgtaaagcaatcagtttttggtaaaagtagaaaatgcttgttttatcggatagcgctttttgaacattaatttcattggcgttatctgctacttttaaccaaggagtgccggtcgtaaacccagcattgttcgaactatcccactgcattggtgtccggctattatcacgcgaacgttctttaataatagtcattacttcttgttcacttagcccgtttttgtgtaagatgtcaaaatgattgagtgtttcaatatcgacataatcatcaattgtagggaattttggattcatcatgccaatttcttctcccatatatacaaagggagttccacgcataaaatgaattgtcgcaccaagcagggtggcagagtgataataatgttccggacgatcagaagcaaaacgcccaagcgctctaggttgatcatgattattccaaaaaagcgcatcccagccattctcttcagacattgcgacttgccacgtatggaaaatcgatttcaaattagcaaaattcacatccgctaagcgccatttttccccatcaggataatccacttttaaatgatggaaatgaaataccatcgataattctttttctttcgggtcgctataacggatacaattatcaatatcagtagaagacatctccccaacagttacaatcggcttatcaccaaaagttcgctcatttaactcttttaaataggcgtgaatgcctggcccatccgtgtaaaaacgacgaccatcaccttcaaaatcatcttctaaaaacttaggtttcgcaataacgtttaacacatctaaacgaaatccttccacacctttatcaatccaaaagttcaccacatcaaaaagcgcttcacgtacatttttgttagcccagtcaagatcagcttgagtaacgtcatataaatgcaaataatactcagatgaattaggtaacttttgccaagcacttccgccaaatttagactcccagtttgttggcggagatccatctgcttttgccggacggaaataataaaaatcacgataaaaagggtcaccagcgagagcttttttaaaccaagggtgttcggttgaagtatgatttaagactaaatcaatcataattccgatatttcttttctttgcttcagaaataagcgtagtaacatcattcatagttccaaataacgggtctacagccgtataatcagaaatatcatacccgttatcattttgcggagaaggataaaaaggattaatccaaatcatctcaattccgagttcctgtaagtaatcaagcttagcggtgataccaggaatatccccagtaccatcgccagtcgtatcaaaaaaagattttggatacacttgataaatagttttttgagcaaactttgtcataaagagaagcctcactttttaattggttgatttagcagaaccacgatattcttttttaccaaaagttcgaattggagcagtatctactttgtttaaaatattatatttgcggaataatacagttagaacgaatggaacaacaattgtaatcaacatacatacagcaaagattgcatagtatttaggattaattgacaagattccaggtaatcccccaaccccaatggagttagccataacaccactagaaacggaaacgacagctgcaattgctgatccaatcatggcagcaacgaaaggatataagtacttcaagttaataccaaacattgcaggctcagttacaccaaggtaacaagaaatagttgcagggatcgaaacctgttcttctttttcattaccgcggtgaaggaaaataatagcaagaacagctgaaccttgagcaatattagataaagcaatcatcggccagagatttgttcctttaaattggctcattaattgtaagtcgatagcgttagtcatatgatgcagtcccgtaacaacgagcggggcatataagaagccaaatagggcggcgaacaaccaactcagtccaccagttaaaccagcataaacgacatttgaaatcgcgttaccaattttccatccaataggtccaagaatgacatgagcagctagaacagttggaacaagggcaaagaatggaacaaaaatcatcgaaattgcatttggaataaatttacgtaaccagatttcgagataggctagtaagaaacctgccataattgcaggaataacttgtgcctgataaccaatcatctgcacttgagcaaagccaaaatcccagacaggaatgtcgccagcttttgtttcaacaacgctgtaagcatttagcagttgcggggaaacaagtgttaaaccaaggacaatccctagaatttgagttgtccccatttttttcgcgattgaccatgtaattccaactggtaggaagtggaatacagcttcaccaatcagccataagaaactataaacaccagcccaaaatggatacacatcaacaatcgtcttagtaccgtcttctaaaaacttaatatcaccgataacattacggaaaccgagaataagaccaccaacaacgattgcaggaattaacggtgtgaaaatttcagctaatccggcaagcaaacgttgaagtaagctcatatttttcttagcatctactttggcatcctctttatttacaccttccacaccactaatttttgtaaattcattataaaaaatagctacatcattacctataataacttgaaattgcccagcttgagtaaacgttccctttacagctggaatgtcttcgatagcttccacgtcagcattatcagggtctagcaaaacaaaacgcattcttgttgcacaatgtgtaacagatgaaatattttctttgccgcctattaattctaagagagcgcttgcatcctttttatagtcaaccataaaatttcctcctttttaacttgtatatacaagttattcgccattactatactataaatcagttgaaagcgcaaccactttatttatgctaaaattaaaaaaaggagagaggtttatgaaacatataagagtagcagcgattatcaggcatcaaaacaaaattttactccacacaactaagaatgaaagttattggacattgccgggtggtgccgttgaaaacgagttaactaacgaaggcttacagcgagaaatgagagaagaacttggagaagaagtgattattcgcgatttaaaaattatcgcagaaaatcgctttgtatatcatggcgaggaaattgatagtattgagttttattatgctgtggaattatatccaaacagctcactattagaactttcgacgtttacaaaaatagaacagtttgggcagtacggggagacaggttacgagttaaattttaaatggtttgaaatagacaaggtgagtgaggtagaaatattgccaaaattcctccaaacagaactagctcaactttcaagtgatcgtataaaacacattcaataaacagcataaaaataccccgcgaaatataagtttcgcgggggttcatttaattagtcaaagatactaatgtaatttcttttttgctaaggtctaaaaatggtaatttaacacgtgtatctaagcaatatgcgttgtatagtaaaggttttaaagtcgttgtagagctctcgacttggcgaacaaaattaccaatttcttgatacaaaatttcaatattttttagactaccaatttttgaatcaatgcggttttcactaacattcacattggagttcgttactttttcattaaattcatcattgatagcatcttttgtacgttcaattcttgtaaaacgagtatcttcccaatcaatctcaatgatatggcaatcgtcaagttggaggaagtcacctgtccacagttttccgtcaatttcaacaatcattcgcgtatcggggaaaacctctttgttacggtatttttttagtaaataatcatacatttgtaattgcgctaaacagttatccatgtgtgtcatctccttatgggtttattatagcacattgtgattatgtgaacaatcaagttaagataaatgaatagttggaactgtaactttttaactagttatacaaaagtcctaataaaaggcagtgaaatagtgaaaataactgccagatgttatactaatattaagatgaaatgggagggagacacatgtacaaacaaatgaaattaaaagcgacagatgggttagatttacatttacatatatgggatgaagttgaaaatccagttggtgtagttcaaattgttcacggcatggcagagcacggggctagatatggcttgtttgctgaacgtttgaatgaagcgggatatatcgtagtagcagacgatcatcgtgggtttggaaaatcagctatagatgaaacttatttgggtcatttagacggcgaaacaggttttcaaaatatgatacaagatgaagtagtcgttcgaacttatttaaaagaaacttatcccggactgagctattttattttcgcacacagtatgggaagtttcgtcatccggacttttatggcgcaacatcaagttgatggagtaatactgagcggaagcggattacaaccaatccctctcctgaaaatggggcaaattataacgaaacaacgggtaaaaaaagatgaaatgaaacgaagcggatttctaaataaattagcattttggggctataataagccgtttaatgaaaatcatcgcttcagttggctttcacgtgatgtggcgatttatgaagcttatgagaaagacccgttttgcggtccagtagtgggaacgagcggatttttccataatctttttgaagccgttaaaataagccagcaaaaagaaactgtcgaaagtgtgccgaaagatttgcctattttattactttcagggagtgatgatccggtaggccattttggaaaagatacgcctaaaattgcattagctttagaagcagctggagtggaagatgttacctataaaatctacgaagatgcgcgccatgaacttgtcaatgaattatgtaaagaaactgtttttaaagatgttattgcttggttgaatacaaaaaacaaggaagcctaactattaggcttccttttcattaattacggatttgaccgtccccgaaaataatatatttagttgaagtaagctccgttaagcccattggacctctggcatgaagtttttgagtactaataccaatttctgcaccaaatcccattgcaaaaccatctgtgaagcgagtagaagcattaatatatactgccgcagcatcgactttttggtgaaatgcttgtcctgttgcataatcattcgaaataattgcttcggaatgttttgtcccgtatttattaatgtgattaattgcttcatctactgaatctacaactttaatggccaaaataaagtctaaaaattcatcttcccagtctgactctgttgctgctttagaatcttttagaatttctcgtgcgcgttcatccgcgcgtaattcaacgttatattcctttaaagcggtttccatttcaggaagaaaggcttctgccacatctcggtgaataagtaaggtttcagctgcattacaaacagaaggacgcgaacattttgcgttcactaaaatatcgattgccatttgtttttcagcagctttatcgacataaatatgacaatttcctgtgccggtttcaatgactggaacagtagcattttcaagaactgtttggattaatttagctccaccgcgcgggataagaacatctaaaaagcgatttaaacgcatcatatcacgagctgtttcacgagatgtgtcttcaattaattgaacgctagaacgagggaatccagatgccgctagtgaatcctgaataacggacataagagccttattcgaatcaattgcatcactaccaccacgtaaaataacagcattaccagttttaaaacaaagtacagaagcatcgactgtaacgtttggtcttgattcataaatgatacctataactccaagtggtactctcgtttttccaatagtgagttcggcttcatttttccacatatttgttacttctccgataggatctttcaaagcaacaacttgtttaaccgcgtcagaaatttcttttattctttcttctgttaaacggaggcgatcaatcattgtttcaggtgtccctttttcccgagcacgtataatatctttgttgttttcctgtagaagggaagctgtatgggcaagtaaatcattgcttagatttagcaaagctgcatttttttgcttagttgatgcttgcgctaaaaattgggatgcttctttagcggcacttccttttttaatgagttccgtcatgggaaaattcctcctttttacttgcaaataaagtcccaacttgttcaccttgcattatatcaaaaataattgtaggatttttgccattggttaaaatcattttttggttagcattcatacaataagaagcagcggaaagtttcgttaacataccgccagttccgaatttagaacctttaccgccagcaagtgcttcgatttctggtgttatttgattgatttcagaaaacataactgcatctgggtcagttgaaggattactaccataaaagccatcaatatcagatagcatgataagtaaatcagcttgcacgagtttagctacaatagctgaaagaaggtcgttatcgccgtatttagttacatgttccagttcttcaacagcaactgtatcattttcatttacaataggaataatgccgcgttctaagagactttcgagcgtgttcataacattttctctactaatagggaagtcagttacatctcgagtaagtagtacttgaccaacaacttgtccgtattcaccaaaaaacttactatatatatgcattaattcactctgaccgacagaagcaactgcttgttgttcgggaatgcttgtaggtcgcactggaagttgtaatttatgacagccaacgccgattgccccagaagaaactaagataacttcttttccttcattacgtaaatcggataaaaccatcgctaatttttcgatagttcttaggttaatatggccatttccatacattaatgtacttgtaccaaccttgataactaatctcttgctattttttaaagattcgcgcatttctatgacccctctgctaattagataatacttctattttacatgaaaatagagatatgtctataatatattgttgtttggtcaagtaatcactaaaaaaaggattctaagaaattgtcttagaatccttttttattattttgtagctttactcgcagctgagatgactgaaacttgttttaatcctttgcttattaggcgtaaaataacgaaccacacaattacgattagaacaatttgtttaaacgcaatggctggtagtggattgaaaggacaatcccaaacgaaatgtaaagcaatcggaataataaaccatttccagaaagtgcctgtgaaaatatggttcattcctagtttttgatctcctttagcaattacaagagcggcaccagttattgcagcccatacaacatgaccaccgatagactgccaaccacgactaaagataacattcatcattgtttcaccagcaatatgaatatccttgaataaaaatgctgcatcgacactatagttaaatgcatagccaagcgattcaaaagcagcgaatccagccccaacagctgcaccaataagtaagccgtttaggatatatttcgaattaagcgagcggatgaatagggcaacgataatcatttttccggtttcttctataaaaccaactaataaagcattaaagtagtttaatttcccaactggaataatcgaataaatgacaagtgttgcaacaagcgctgcgacaccaccgatgaaaaacatttttacaacatcaaaaacgctgatatttcgcggtgcatttgtttcgaaaaagaataataagaccgaaaatggaactgcaaaagagccaataaccatcagcccaggtatggtattactattatcaaacaaatatgtacaagcaagaagtaaaaagtacgtaatgattaaaactaagaatactctagaaaacacccatggatgaggccaagtatggggaatgtcactagttgcaggcgtcgtatattttgtccctgcgataaatactttttcgccttcctctttagagtgctttttaaacacagcagagaaaagatttccaatttttaattctgaattcccgtgatttaacgcatgttgatgtaattctgtttgtttaaatgcgacccactctggatgaggggatttttggaccaatgttaaatcattaatctctttctttttatatagagctatcatctctacattagtaaaaggcccaactttctgttcgttctttttgaagtaccattctgacaaatgaaactccccctttaactttttagtttgactctgttaattattcccaaaaaaagtcaaagttaaacgggtgatgaatttaatcattaagttttttcgcttgttcatataggaaatctatcgaatcagctagaaaatgagcagctgaatcattcaaaggcttgccgtttaaattcaaatcatcttcatatcttaaatcttcactaatttttatcattcttttagcaatatctttctcaccttgaagttcactaggagcataagtaggaatactttgctgacctagtaaataatctacactaacatcgtaaagtgttgcaatttgtgtaaccatatctaaatcaggttcgcgaataccatactcccagttgccgtaagtagaaggtgctttcaaacctaatcttcttgctgtttcagcttttgaccagccttgtttttctcgtagtaatgtgagtctattacttaaatttggcatgatttcactcctttttgtttgattatacaataaattacacaatttagctataatttaacacaaagtgaattattttgcaattgacaacctcttatcgagttggtattattgtattaataactcaaactgtgtagataaggagaagatgacatgaaaacaatagacagcagaaaaattaacacggccaaaattcgggaattacgattagaacggggaataacacaagcttttattgcaagaaaaatgggttataagtacacatcaccatatttgacaaaaaacctataaataattcttttgattgactgacaattatttataaaaaacttattttcgttataaccgctttattttcatcatcttttacatattcaattccttcaataaacatacttataaaatctgttttttcagtaggagataatgaagtccaatttatttttagttcacgaagaatgttatttcttttagcaatatcttcaggagatacaaataatgatacgtcatattctttttttctatcttctgcagcatcaatctccatttttgtatcaatcattaatttagaaaattcatcatcattcataaggtcagcagcccatgctttctgaaacttttcacgttttctttgaagtgaaataatttctttttgaatcatttcttgttttctcaaattattatctaattttttagaagagatatttgctttattgagtgtatagtttgaaatataatcaataaatgctttctctattttttgctcgcttatctgtactgctggacgtctatgttctttgcaggtagcacaacgatagttattgttataaaaagtttccttatttttatttatatattttgttcttaatccagataatctttttccacaagctggacaaattaatctatttttaaaaatgtgatgaacgtgtccacgacggcttgttgttgatttacttcttattgatagtattttggctactttattaaatgttgccttatcgattagaggctcatgtgtattttcatatatttcattattccattttatcgctccgtagacagcaggattttttaacatccaaattaatgtagatactttccacacatcatttgaacgccttgttttcaaaccaatatttgttaaatattcacaagtttgtcgtaaagaataaccggttgaaaccatttcaactacttgtaaaaatatttctttttctattttatttactattagttttccgtcagtccccttagtataaccgaagggagcgagaggaatatattctccttgacgcactttctcagccatcccaaagctaactcgttcagaggtattctctctttcaaattgagcaactgaacttattattgtaataaaaaatctgcccatagcggaagaagtatcgtagacttcagtagcgcttttaaatgcacagttaaattcatcaaatatacttaataaattatgcaaatctacaacggacctagtaagacgatccaatttatatactaggactgtgtctataagtcctttttttatatgtgaaatcatttcttgtagaagagggcggtgcatatcttttgctgatttaccttcatcgacgtaaaacttgaaatcttcccatccttgcgctgtgcaatatgcttttaacttctctttctgtgctgatatagaaaagccttccttcacttgttcttcagtggaaacccttatataaatccctacagtcatgaactttctcacctccaaagagtacatatgttctgttttgagttttaaagaaaagcccaagaagggcaaatcattattaaaagttgaattcttttttttcagaatcgtgatataaagtgggttctttatcatcccaaactttactagatatgattgttaagttttttagttcatcggcttttccgtaaaaaggaacaacaagataaccagttttttcaacatttcccttgaaagtaccaacgcccataacatccaggctagtccaactctcgttagaaacatctatttgttgtttagtgttcgtaattatagtatctattccgtgaaacataatttctttattaggatcagtatcctctgtttttaagctgatttgtatgcttagatagttctcttgttcttttccagttaattcttgatactcttttttcacatctgcattcaaatcataatgctcaagcaattttatatctaaaatcctcatttgtattggatctaaatcaaacaatgtatttggcgtaataattttcagtaattttattttttccccatcgtcatttttccattgattaactttggttaagggaccatccttaatataattttcatctttcttagattctggcttactatatttttgttcgtcttcgttatcttttgtagttgtttctgaatcagttgttgaaccacagccaatcattagtactccaaaacaaactattatcccgcccagtaaaatttttttcattttttatgctcctttttttattctatataagcctattcagaatcataaattaataaatctttccatctctattggtattcctgaaaaaaggcaaatatcacgctttgtttcaaacttatcgagttcaatctctgaaagcaataaattaactgcaaattgatgagcttccacttcaattttacttaaattagaccaatgtattgatttagtaaacgtcgcatttaatcgtgtatgtaatacagcatgccctagttcatgagcaactacatacttaacctgataatcagaaagattactattatagaaaataaatctgtttctgcgaacatacttgtagaaaccatttgtatcatttgctaaattccatggtgtaacaattatattaagtatttcgcacaattcaaatggatcagatgtgtggtgtttatttctaagcatttccagcatctggtttggccacatatagaatacccccgttttactctatattattttttttgtctttaggtgcgtactttctattgatacgagttgcttgtttttcagcgaattccattgcatctaaaatactttccatagcttctgctgtaatcggctcaccatcataaagtaacccatctccatttttcagatcttctttaagtgcatccattctttttttcatatctatttcttctttgagagtaaaaccctctgcatttatatttttatggcggcttctgccatgtaaataatctaaacttacatcaaagtagttagctattttattttgaatctcagcatcaggcattcttttagattgttcataagaagcataagtagtctttgctactcctaatattttcgccatatcagcttgtgtttttttactttcttttcttagctctttaattcttaatgcgaacatatgtgcacctccttgattcgaattatactatacaaattgcgtactttctatttcaaataaaaaaatgatacaaaaagagtatttatctattgacataatacaaaatgcgtattattataaaggtacgcaattcgtactacttagaaaggagtgctaaaaatggagtggttaaagaaatatagattagaaaaagatatgacacagcaagaagtagctgaacagtgtggtatacccaaaaccacatatgcatctattgagcaaggtaaaagacggccatcgccagaacgtgcgaagttaatcgcaagtaagctgggattcgactggactattttttttaacaactaagtacgcgatatgtattattttaacttaagtttatgtatcacgcggaacaaaaatgatacatcggaaaggagagcatgtgacagtaataaaatcttcaattaatgcatccaaaataatgaaatatactggcgaactacctcaaaaacaattggcagacttacttttaacaagtagacctaatgtaagtcatatacaaacaggtaggcgaaagatgcagcaagatatagccattacagcattaaataatgtacagagtaatttattcaaattagcgctatcgcatgaatttactgaattggttccagacgttttttccggacaatacgtgaatcagaatccattaagtttccttgtaatgtatgaacaggaagccaacgaatttagtgcaaatattgatgaggtaatgaaaattcttgttaaaccagctaatcagctaacaacaaatgaacgtgtatcagctagaaataatttaaaagaacttattgatgtattgggctggggctataatcttttattttttgcaagtgattatttaaatattgatgcttataaattaattagtgaacaagatgagtgttggaaacaaaaaaaatggatttgaggtgttggaaatatgagcaaagtttgtgataaagaaaatgctgtgaaggttgaaatagtttatacggaactaactcaagagcaagaacaagcaatgtttaacttctttaaaagccgctcttttccaagaattataaaaaaactagaagaagaggagcgaaaaaaatgttaacagcagtattaatcacactgagtcttggaattgttatgaatatagcgctttatgcgtatcagaagggttgggaaaagaaaaatgtcgataccgatttggatagcgataatctggatactcgcactgctcggaacaatgtccgtaatatcaagcgctaagaagttgtgcaagacgataaaaaaagttggcttggctaactggtatgaaagctggatttacaaatgaatataggattattgtttgttggatttggagtgtttgtagcattgatagtagcttttaaaagcgaagaaggaggatttagaaaatggaggaaataagaccactgaataaaagaattaagattgaagatactacgtatatcgtgattttaacacctattaatgataagagcggaaagaaaactttcaagggaatcatggtagatatgtccttagacggtgaacattttgctagagatagatttgcttcaaatgtagacaccggagttattcaaaattggatgttgaacatgcataaagcatcgcagaaagttgaaagagttcttgaggcttttgaagagtgggatggtgaattgaatgagttctggtgattcaacgagcatcacgattgtagaaggagtaatgattgtaacgacaaaaaaataaactcgtgcgctaacacgagtctgacatagatagctattcgctaaatataagagttgaattacttatagtatatgcgattagccccgttttgacaaattaatttttagaaaggggtctttattatgcaaattaagactaatgagctcattgaaattttaaagaattcaagaacccactcattagaaagggtcaaggctttagagattaatttattcaagtacaaacgattaaacacgaaaccaccggcacaactaactgaaaggattgctaatcacgagaagaagattgaaacaataaaaaaattagaagacgaattgaagcaatcagaaaatgaagtttgtaaattttaaaaattggaggattcaagatgacacaaaaaagtattgaagaagtgaaatttgaagaggcaaaaaaattaataactgggttacaagcaattgctacatttaatgaaagcataacttgtgccgtgaatgtaagcttcaatgatggaaaaggtatacacagtgcgtcatctgcaattggagggaaaagcgaactcttaaagatgtatggggacatcgccgaagcaattgtatatgaatttatgaaagaccatgattgtgtgtgcaacgtgaatgaaaccattgaacatgcaatagaaggggcattaaatggatttcaaaatttcaaacaagatgcaaaggagaaaacagatgaaaacaattaaattgctaaagcttcaattagaaaattttaaaggtatcaaggaactggaaattgatttcgaaaacagtacatctatctatggcgcaaatgcctcggggaaaaccactatcatagatgcatttacgtggcttttattcgataaagatagcacaaataaaaaagactttgctattaaaacattagatatggaaggtaaagttattcacaagttgaatcatgttgtaaccgcagtgattgatgttgatggcgaacaagttgagttgtctaaaaagtacatggagaagtggacaaaatcaagaggaaaactagaacaagagttaacaagtcatactacagaatattatatcgacgagatcaaaaagaaagcgaatgaatataagtcatttattagcgagctactagacgaggaacttttcaaactaattactaaccctctttattttaatgagcaatttgactggaaaaaaagacgtgcaatgctaattaaaattgcaggtgatgtaacagacgcagaagtaacgagtgcagatgattcactgaaagatttaagcatctttcttggaaagcactcgattgaagataaattaattcagattaatgaacagcgcaagaacttgcgtaaaagattagaacttatccccgaacttgtaaatgaagctactaaagctaaacaagatgtaaccggcttaaatccaagcgatattaaaggtgaattatcagtaattgaagaacagattcaatttatcgaacaagaaaaaaatgttctgaaaaacggtggtatacaaactgagcttaataagcaaaaagcgaacattgaactggaacttacaaaaatcaaagcaaatgagcaaaaagaaacacaagaactattaatgagtaaaaaagaagaaattttcgaagaaagaaatgaacttatagatgtaaataaccggattggtgaatctacttttcttattcagcgtaaacaaggagaaattgcaactaagcagcatgaatttactaaattaggcaaagagtgggacgtattgcaggtagaaaaatttgacgaacatcgcaaaaaatgcccgacctgcaatcaagatttcccagcagaacatttgagttctatgattgaaaaattcaatcaagaaaaggcagaaaaaattaaagaaaatgaagctgcaggaaagtcaagtaaa

SEQ ID NO: 11 - DNA, 82689 bp, Listeria innocua
tttgatattttgaatagaaaagagagataaagtgaagtttttaaattttttgaactataaatatttaaactgggtattatatggtattacattattttttattgtttattacttttttaccgatgatgatatttttttaattttagcaatactttttctcgtttcatctaattttagtgataacttaattgaagttcttacagaaccagaaattcggtctatgacggatgaagaacaacagattattaaagctatgattttggaaaataagaaagacgtagtagttatcaaaaagattagagagtatacaaatttagatgttttacaagccaaaaaagtatatgaaaaaataaaaagggtctataattagataataacccctatacaacgctattaaaacaatccccgttatctattgacaggtataggggttgtttttatgtttttttatataatagaaccaaagatggagggattatttgggatggtaggcatgcttttacgctacgattacgcctgttttaacgattatgccgataacttgatgaaataaaagctaaaagctcctagaaacgattttaagcactttacagacgttttgaattatttcttagtaaaaaatccccgcctggtaggtcaaattcgcttaaaacgcaaaatatgacgttttagaactattcaaccaaaaaaaagaaaaagggcattattggtatcgagccatcgatgcaaatggtttaaccttggatatttggttacgtaaaaaacgggatacacaagcagcctatgcttttcttaagcggttagtgaagcagtttgatgaaccgaaggttgtagtcacagataaagccccctctattacaagtgcctttaagaaactaaaagaatacggcttttatcaagggacagaacatcgtaccattaaatacctgaataatttgattgaacaagaccatcgtccagtaaagagacgcaataaattctatcgaagtttacgcactgcctcacccacgattaaaggcatggaagccatccgaggattatataagaaaacccgaaaagatggcactctcttcgggttttcggtctgtactgaaatcaaggtattattgggaatcccagcttaaatcatagataccgtaagggattttattctttatttaaaactttgcaacagaaccttattttctaacactgaacatcgaacgagtaaatatttgaataatatcattgaacaagatcataggcctatcaagaaaaggcacaaattatatcagtccataaggactgcctcatccacaatcaaaggaattgaaactatacatgctttatacaaaactagccaaagagacttttctctctttggcttttcagtgattcatgaaataaataatctaatgggtgttccagcttaaaattagaaaatagttgagatatcattttacttctttgaactttgcaacagaaccgaaaataaaccttcagatttaagtcgattgaacgcactgcttagcgaaggagctttgtccgttacaaaaactctaggttctccaaattgcttgattaatcgtttaaagaaagcataggccgcctgtttatcccgattctttcgcaaccaaatatctaatgtcaaacctgtagaatcgatggcacgatacaaataatgccattttccttttactttaatatatgtttcatccattctccaagaatcgctagcagacttatttcttttcttccataggcaataaataatcgaaccatattcttgtacccatcgataaacagttgtgtgacaaaccttgattccacgctcattaaggatttctgaaacatcacgatagctcaaattgtatcttaagtagtagcccacggctaccatgatgatatcctgtttgaattgtttacctttaaaatgggacattgttattctcctcgtgtagtttcttccattctacactaaataatcagttaaataaaactttgcaacagaaccaattgcgctattaaaagtaatcgtatctgcaatattaaaatgtgtcccattatcagtactcatattttattttctccataaatgtaatttggatctattatatcatttaaattaaaaacagcccccattatctattgattagataatgggggctgtcttaatagtgttttagaggggcgattatctaattatagtccctgtactactcttgaatctcaaattctggtaattcatcaattaactcaagggtgcgcatacttacggtaataacggatagtaagaggttcaaaatatacttaggatcgtcactaaattcgttaggatcgtctgtaatacctgattttttatcagtttttacttgatactgatcaataatccattcgatagctggacgtccatttacaacatattcataggctttttcaggaatgtttttaatggtgatactctcattgtaaataatcgtatctaatacaccctttttagggtgcttcatctttttaacacgataatccagttcagatatttgaacgtcaatgccttcccaaattggttgattttcataattcaaatgtaaatcagctaattctttaccaatttttatatacttttctttatgcttaacattaggaatttttggaaatgattttgctaaatcttcataatatttttccccatattgtacgctatggaaaacgccgtaaatatagtacatcgcatcttcttcgctcaaatttgataatctctttaggacttccggacgaatcgctgaatatttttcatcgctatcaaaaagaccaccgttattattattctgataaaggtattttggtaaattctgtgaaccgcccgcaaaaatattcctatctggtaaaacatcaagtattaaggtagaaaactgttttcctccggttttatttgataacgaaatcatcaaatttgaagacgtggagacaggcaataccttagacatttggtattgcctgtctatccacgcttgtgcgtaatagacatgcttcttggtaaacggtcgatacatcccaagatatattctgtcaccttgccaagattgaggttctctacgctcataacgttgtttcaatgaacgagtccaagaaatatcagagacatcttctttataaatatttgtatcaccaagatattgattataataatcaatacttgttttcatcgttatttcaacctgagactgagaaaagttccatgaccaatcatctctacctgttgttatcccaccagtataatcaataaaaagagcattctgtgtttttttatttcctagagatataagttcatcaaaattagaattacgttgatttatccaatcacctttttcatttggaattatattttggaattctgaagttgctccatttaaacttttccagttcttcaatttttctaacttctgatatttatcaagattattcccgatatctaagtaatgaatccgtcctttccccgtataatctgatttcttaattaacataataatagtgacacctgtcataatgtcaaaaatatttccaccctctaatacagactgatctttagttttaccacggattccacctttaagattcaaaacataaatatcagaaaattcttccaagagagattgtcgcataccgtccattgcgtttccatctatgaatgaattgtttgtaatgaatccgatcacaccattatctgagattctatccgacgaccaacgcatagcacggatgtaggaatcaaaaagattattcttattagtagctgtcgaagtttcaacccaagaattttgcaaacttgcgtctagtttttcataagtagtcctaatttgatttccatcctcatttttttgtttcgcagaatatggtgggttccccataattacagtaataggtattgattgttgacgttttaagcgttcatcattagttccaaaataatcatcatccaaggtatcttcagtctctgtactctcaaaagtatctgttaagacaatcccttcaaaaggaacatatccttcttcatcaccgtttatttcatcaaaagtcgcttcaatgttgattgctgcaatgtaataacttaataaaacaatttcattcgcatgtaattcttgagtaaatttacgggtaatatcagctaacgatatttctccagcatccatttgttcttttaggtaagtcaacgttctaacaataaacgtccccgtacctgtaaatggatctaaaacatgcacgccttcactagctaatgacttgccaaagtgttgtttaagcacatcatcaacggaatgaacaatgaaatccaccacttcaattggtgtaaagacaatacctaatctttcagttgttgctttaaaagcagttttgaagaatttatcatacaaagtaacaataatcttttgtttgtcttctgctttttcaatcccttcagctcgcattctgacggattcatataaaggctctaggttttcttgttctttggcaaaaccagctttttctagctctgatacaattgattccatcgcttgggagacggggttttgattcacaaaactatattccgcaaatagtgcttcaaatataggttttgtaattaaatgctgtgatagcatttccgcagcttgtttttcatcaatactttcgttgatattatgttgtaatgatgaaacgaattttttaaattctaagctaatcggatcttttttatctgataacttatttttaatccagttaatttgacgctcggcaattttagcaacatctttcgaccaattctcaagatatttacgatctccaactttttgaacaattttaccaaaaatagctccttcaaatttatcccattcaaactcaagttccgtttggacaggagaattttcaatagttttatcttggtcattcccttgatctggagcactccctacaccaataacttttaactgtttaggttttgccatgtttaacttatcaatcattgcttcaaatcgttcatcgacagaacgtaacgcattaatcacttgccaaactgtttcgtaattcttgttattgtctaatattgtttctggcttttctccagttggaataacaattggtaagataatatatccatagtctttaccttcagccttacgcatgatacgaccaacagcttgaacaatatcaacttgagatttcttaggagataaaaatataactgcatcaagtgtcggaatatcgataccctctgttaagaagcggacattagaaacaattcgagcttcattggctggtttattaggatttgctaaccaatctaaaatctctcctttttggagtgcattcatttgtccatccgcatgacgcattgataaatggatagattcgtcttcaatagcttcgctgatatattcattgactacttcttcgaattgacccgatacttttttcgattcttcaattgttcgtgtaaaggcaatcgctcgttctaaaggggctccatcataaggactatttttgataggattcttatagccattacggcgcatcattccgttccaaatccccacaatacgaccaacatcatcaatattcaagccattttctggatcagcaagcgttcgttgcatatctttttgaattgctgcttcatcaactgctaaaaccatcactttataatcggttaggatatcacgtgaaactgcttgaccaaatcccatacggaagaacacttctccatatttactttcatcatccattgatgagagtaaaatactcttgtctttagcattttttttagcactttccccatatatctttggtgtagctgtttgatacattcttttcagcccttttacattggtattgctgtgaactttagagaatgcactggcttctttagttgcttcatgagcacctgtcgttctatgagcctcatcagagataataaaatcaaactcaggaaacccttctttttgggcttcaccaatgacttcaatactctgatacgtactaaaaacaacgagcatatcggttggttttggcaatgattcaaaatcatgccagttttgcaatatctttttactagaagtggttgctggataaccaatatcagaggcttttatatcctcagttccatctgtaccacgtgacgcatcacggtcagatgtaacagccatactcgttattgtaagttcagtatcattattccaaccacgcaatgtttgggtcagcaattggatactcggaacaagatataacactttaaaaggaccagctttatctttagctagagcttcagaaattttaagactagtgaatgtttttcctgtacctggcgccataatgagttgaccacgttcattttctttaaaatgagaaagtgcattatctttggctgtttgttggtactctcttaattttttaggttttttaacgactacattttctggacgttcaaaattaaattgagaccagtcaatttgagagtttctaaggtctgataatccaatgatttcaatccctttttcgttctgatcaatcgtctcacgtgcattggaattccaatcatccatcgtagatacaataagccctcgttgataataactttttcctaactcagcaacaaaggaattaatttcagacttaccaaccttatttgtataaaatttggcttgtatcgcaaccaaatcaccatttttttgttcagcaactaagtcaacacctgtatcttttttgggaataccataagattcaggaacttctgacaataaccatacattttgatacaaggctttgtaagttggttcattttttaaataagccaacgttagtttctcaaaaagcgtcccacgttctctttgtacatctttagaaacagtattaatctgattaattaaatcatcaaaagtttgtttagtcattttacattccttccaaaatgccaccattttttattttttgtatgaagttcttcttttgtattatctatgtctttagattttcgtaccataggatctttatcatcttttcgtactggtaccatcaaagattttaattccttgatttcttctttatattcttcaagtaattttttatcttgtaaggctagacgttgttgttggtctaatagcttatgaaggtcttttttttctgattggagttcggacactagattccttaaaaataaaatctcttcattcccctctggattgtcatcaactgaattattcacgttgtcgtcaacaaaaagtttttgttgacgttttttagttgacgttttgttaaaaaaagcactcttaataactttttgaccgtcaacgtcaacgtaaacggtatttcctttttttgacgtaagttgacgtaaatctattgacgattctttttttattttttgccatacagcttgctttgaaacacctatttcatccgcaagctctttgattgtctttaacttttcactcatcataagtcctgccttttaacggttgataggtattgctcgattgcttttttgaggtacttagcgatattgtgcttagaatattcttcacgcttgctagagacataacttaggtggtctttgacaccattcaaacctcgtaagtctttaagttcgtcatagagagggtacacgtgtgcttgtaagcctgaaagaattttagtatccgtcaagtctagataagacaataagaaatgttccataagcaacttggtatacggactttttagggcttgtaccgtcagcatgtcttcggtttctgctttacgtgctttatcttcttggtagactttatcttccaacttgtagctgttatcgtctgctcgacgttttttcgtaatatgaaagacgatagaatcaatcgagcgcccctttttgactttgtcatacgtcacggtaaaagaagtatgatcattgatttcttccaaaggtttttttaatatccatttttctaaatctgcaaaaagtttatattcattgactatatccgtcatttctcgtaattctcggattgaaattgaaggattgcggtaggcttccacttgttcttctctccgtccacccttataactataatgctcgtattggttataattcatggataaccaacgatacaagatgatagaatgtttactattgagttctgaaatatcggacaaggcatgttgtgtgaaattctttttaagattgattagataaggcatgatttcaggactaaatcgaatagtaacttcatcatgataatcggtccactttacatagggaatagggacgatattttcaaactcaaacccatgttcttttttttctttaattttgaaaaaagcttgtttctgcatattctcaactgcctgcttgaaacgactatgtttgtcattatcagaaactttaaaaaacgcaaaaagttcttcttttgagagatagactgtatgatctttaggcggttcttcggtatcaatgcacgatacggctaactcaaacattttgagtggggttttatccattttggcaatgcaggcaatgctggtaattaaagaattatgctccactacttttcgttttgataattcgttcaagatttgcacctgcttctgattttgttcattttttggtatactagtcatagaaaactgctcctttgagtgtttttagatacgcatgaagattctctcgacgaaaagtgtttcttcatgcttttattataccataatacatggagaaggtaatagacattctccatgtataaacagttttttctccatatattattctttaaccccttgaaaacactcacttttttttgacgcaaaagaataaaagattaaaaggttctgttgcaaagttcaaagaagtaaaatgatatctcaactattttctaattttaagctggaacacccattagattatttatttcatgaatcactgaaaagccaaagagagaaaagtctctttggctagttttgtataaagcatgtatagtttcaattcctttgattgtggatgaggcagtccttatggactgatataatttgtgccttttcttgataggcctatgatcttgttcaatgatattattcaaatatttactcgttcgatgttcagtgttagaaaataaaccttcagatttaagtcgattgaacgcactgcttagcgaaggagctttgtccgttacaaaaactctaggttctccaaattgcttgattaatcgtttaaagaaagcataggccgcctgtttatcccgattctttcgcaaccaaatatctaatgtcaaacctgtagaatcgatggcacgatacaaataatgccattttccttttactttaatatatgtttcatccattctccaagaatcgctagcagacttatttcttttcttccataggcaataaataatcgaaccatattcttgtacccatcgataaacagttgtgtgacaaaccttgattccacgctcattaaggatttctgaaacatcacgatagctcaaattgtatcttaagtagtagcccacggctaccatgatgatatcctgtttgaattgtttacctttaaaatgggacattgttattctcctcgtgtagtttcttccattctacactaaataatcagttaaataaaactttgcaacagaaccgattttcttgctttcgcttcgatggttgtcgttgaatgaatttgtaatacgtcgaacgatttacctgtaaagccctgcataatcgaacgatggtgtgttcatgttgaagcaaagaaatcgcttttaatcgttgttggagtgtggcgtgaatatggcaatcgctttttttaagattaaattttcctcctcaagttgtgcattccgtttttgaagctttttgacttgttgcgcagtaagaatggtatcatcatcgattttgacttccgaaaattgcttgacccaacgtgctatcgaagatagggcaataccgtactccttcgccaatgcattttgggatttcccactttcatacagtttgacaatggattttttaaagtcctcatcaaaggaacgagtaggttttctggcttttgtcatggatagttctctccttattctgaaagtgtctactttcttgatagtatagcagattttgtgtctacttttttagtatatatccagataaagaattatgaaaaccaagcaaataatttaatcgaagtacagaagcaaacacaaaatcttttagaccaacaacaacgactagccttacaagataaaaagttgttagaagaatacaaagcagaaatcaaagagttaaaatcattaacaactcaatcaacacctgctactttatccaaggatgttaaccaacccaaagatatagagatagataagaaaaaacgacgttggtggccatttggtaagtaaggaaaaatattatttagaaggggtgttgggagaaaatgaaaaattttaataatattgatgaacgtgtagtggatgatttaaaaaaagaactaaaagcacagagcaagttaaagattgctgcagcatcattttcaatctatgcgtacgaggaattaaaaaaagagttagaaaaagtcgatcaaattcagtttttatttactagtgatctatttacgaaagaaaaagcaccgaaagaaaaaagagagttctttattcctcgtctaaatcgtgaaagtcagctgtatgggaatgagtttgaattaagaatgcgcaatgaattatctcaaaaggctatcgctaaagaagctgcagaatggattcgtcaaaaagttacgtttaagtcaaatatttctgggcaacgttctgataatttcatggtcgtggaaaataaaggaaatataaatgtatatgcacctttcgatgaatttacaaccgctgaaattggaacaacaaaaggtgaaaagcttttttataatatttcaaaatttgaaaatgaaaatacacaacaattcttaaatgcgtttgagcaagtttggcataatcaggattatgtcgatgaggtcacgaatacagtattagataatattacggctgcatatcaagagaatgccccagagtttatctactatattgcgttatataatttgtttggtgaatttttgtctgatttagatcaggattatattcctgatgaacgtacagggtttaaagactcaaaaatctggtcattattgtatgattttcaaaaggatgctgtgttgggatccattagtaaattagagaaacacaatggtgttattttggcagattctgttggtttgggaaaaacgttctcggctataggagtcattaaatattatgaatcacgtaataaaaatgtcttagttttagtaccgaaaagattgaaagataattggaataattacaagaataactacaaaaacaaccccttagctgaagatcgtttacggtatgatgtcttatttcatacagatatggatcgcgaacgtggtgaaagtaatggaattgatttaggaaagataaactgggggaattatgatttagtcgtaattgatgaaagtcataactttagaaatggcgagggtactacacataaaaaagaagaaggtgtagaaaatcgttatcaaaagctaatgcgcaaaattattaaattaggagtaaagacaaaagttttaatgttatctgcaactcctgtgaataccgatttttctgatctacgtaatcaattgatgctagcatctgaaggtgatagtagtaatcttacgaaaactttgactactaaaaaaacagtaacagaaatttttggtcaagctcaacgagcttttaaagattggtcttctttggaaactgaaaatcgcacaacggagtatttacttgacatgttggattttgatttttttgagttattagatagtgtgactatttctcgtagtcgtaaacatatagaaaaatattatgaccaatcggatattgggaaattcccaaaaagatttgctccaattaacgaaagtccgaaattaacagacttagatataacctataatgatctatttcagtttatcgatttgctaaatctggaagtttatacgccgcttaaatatgtatatccctctaaaatagagaagtacacagagcaggcaacagctggagcttcaagttgggcaaatcgagaaaaaggacgcaatcagctgatgattacgaacttactcaaacgagctgaaagttctattcatgcatttaaattaacaagtgaacgaattttagagaatattagtttgaaattacaagttattgaagagtataaacaatcaaaaaatggcattgtaaaaagcgattcagatgattttgaagatgatgtgtttaccgttggacaggacttaaaaattgatatagcagatatggattatcaatcatgggaaaaacaattagtagcggataagtatgtgtttactgaactattggatgttgtaaatcgtattattccggaacacgatacaaagatggcaacacttcaagaaataattcttaaaaagatagagaatccgattaataaaggaaataaaaaggtcataatcttcacggccttttctgatacagcagactatttatataaatatttatctaatcaattaatccaaaaagatggggttcatacagctttgatatcgggaacacgaacagagtcaaccattccaggaagaaaaaacgattttaatgagttgcttactttatttagtcccaaatctaaaaatcgtgatgcattaggtttagatggtgaaattgatgtagtgattgcaacagatgtcattagcgaaggtcaaaatttgcaagatgcagattatctcatcaattacgatatccactggaatcccgttcgtattattcaacgttttggtcgtattgaccgaattggatctaccaatgataacattcaaatggtcaatttttggcctgatattagtcttgatgaatatattaatttaaaagcacgggttgagaaccgagcaaagttagtggctatatcctcaacaggggaggataccatcgataatacagatccagatatggagtatcggaaaaaacaactagaaacgttacagaatgaagtggttgatttagaggatatgtcaagtggagtcaatattatggatttaggtctgaacgagtttcaacttgacctgcaaaaattgagggaaaaatacggagattacgaagcaaaaccttatggaattcatgcgataacaaaggctgatagtaatcatccagcaggtgttatctttgttttaagaaatcggaataatgctatgaatatagacaaacaaaatcgattacatccgttttatttagtctatatcgctgaaaatggtaaaatcatttcgaatcattttaatcctaaaaaaattctagatgatatgaggtatctatccagcgaaaaatctgtaccgattgagaacctagttggttctgttgcaaagttttaaataaagaataaaatcccttacggtatctatgatttaagctgggattcccaataataccttgatttcagtacagaccgaaaacccgaagagagtgccttcttttcgggttttcttatataatcctcgaatggcttccatgcctttaatcgtggtagaggcagtgcgtaaacttcgatagaatttattgcgtctctttactggacgatggtcttgttcaatcaaattattcaggtatttaatggtacgatgttctgtcccttgataaaagccgtattcttttagtttcttaaaggcacttgtaatagagggggctttatctgtgactacaaccttcggttcatcaaactgcttcactaaccgcttaagaaaagcataggctgcttgtgtgtcccgttttttacgtaaccaaatatccaaggttaaaccatctgcatcgatggctcgatacaaataatgccattttcctttaattttgatgtacgtttcatccattttccatgaataaaaggattttttatttttctttttccaaatttgatagagtagtttgccatattcttgcacccaacgataaatcgtcgtatgagaaacgttaatgccacgatcatataagatttcttgaacttcacgatagctaaggttataacgaagatagtagcccacggctacaataatcacatcctgctgaaattgctttcctttaaaatgattcatcgtcattcctcctgctatctttttctattattctaccttatttgatagtagatttaaaactttgcaacagaaccgttttgtctatgtatctccatcctttcgctggaactgatgtctgttttcctgttaatggatgagtaagcggacgatgagaccttttttcaggtttatctggtgctgccatgctaacttctcgatatacatttcctttttcgtcaagtttagaatatgctttttcaccaccgcttaaatctttttttgaatttatccatttacgatattcttcattggcatcacttaaagtgaatttatcattaatttttttaaaaatttctttagacttattcagaataatttcagcattttttttaggccttttgaattccttgaattcagaaaaaatatttatgttttttgcagctgcaacaatatattcatgttgcatagacactccttttgaatctcctttagggttacgcttatcccagacaatggttcctgcaagattattctcaccaaaaatttctgtcaataatagttcaaggttagcaatttcattttcatcaatactaacaaaaataattccactatcagataatagatttcgggctaatttaagacgaggatatatcatagttaaccaatcggaatggtagcgaccatttgatttttcattttttactaatcgatcgccttcttcatctagaattccttctgataagtcattctcttttttcgtttttttgaagttatcctgataaacaaagtccttacctgtgttatatggaggatcgatataaatcatgtctatttttccaagataagattcctgtaaaagctttaatgcttcgagattatctcccgtaataaatagattctcagatccttcaaagttcacactttcttccggttgtgcacgcagtgttttagtcgttggagctgcagcttcaaaataggcttttgctttgccattccacgtaaaatcgtaacgttctttttgttcttctgctttgacaaataaatcacgtaattcattcaacaggtcagtatctacttgacgtgagtgaacatcagataaattaattttttctggtctatcagacatctttattctccccttaatttggctaagttctgttctattgtatatctttctctagccaacgcttgttttttattagtttggatagatcttttaatctgtgtattgattcgatctatttcaaattccaattcattgattatctttatgttagcaacttgttgctttaatggtttagagatatccttaagatctaacaattgacgaataaaattatcacgaacttcatcaatagataatcctttaatttgaagatgattctctactcttttagaaatacagtatccttgatagtacattatgagaatctcatcattgataatgaatagaatctcttgtggtattttagaaacaatctctttaataacacttaaatcaaagtcgatcatatcaacactaaaaatttcaatttcttgtatttttttcgcaggtaaattaatcgtagtaggtcctaatttccctaaccaacgaatacgctcaatttttgtagcatcatcaaagttaaatcgatctttaggaacaatacgattcacaactgcttgttttggaatctctatgatcatctactcacccctaacaactagaaaatcaattaattcaaaatcatttaatccatttatatcattctccaaagctgttgtaccaccagtagtaaagagactatcgatatccttttcctccttaacgctaatcatggagtcaattgcttgattaagtaaattcgaatacttactcatatctttcccctcaagtgtttctatgttaaatgattgaactaggtggttctgttgcaaagttttaaatctactatcaaataaggtagaataatagaaaaagatagcaggaggaatgacgatgaatcattttaaaggaaagcaatttcagcaggatgtgattattgtagccgtgggctactatcttcgttataaccttagctatcgtgaagttcaagaaatcttatatgatcgtggcattaacgtttctcatacgacgatttatcgttgggtgcaagaatatggcaaactactctatcaaatttggaaaaagaaaaataaaaaatccttttattcatggaaaatggatgaaacgtacatcaaaattaaaggaaaatggcattatttgtatcgagccatcgatgcagatggtttaaccttggatatttggttacgtaaaaaacgggacacacaagcagcctatgcttttcttaagcggttagtgaagcagtttgatgaaccgaaggttgtagtcacagataaagccccctctattacaagtgcctttaagaaactaaaagaatacggcttttatcaagggacagaacatcgtaccattaaatacctgaataatttgattgaacaagaccatcgtccagtaaagagacgcaataaattctatcgaagtttacgcactgcctctaccacgattaaaggcatggaagccattcgaggattatataagaaaacccgaaaagaaggcactctcttcgggttttcggtctgtactgaaatcaaggtattattgggaatcccagcttaaatcatagataccgtaagggattttattctttatttaaaactttgcaacagaaccaatcaattcgattaaaagatgacttggagagagcgggaatcgctcgtacttggtgggtagtgaacaatagcatgctttctagcggaacaacgaacccaatgcttttagcaagagcacaaaatgaagaagtttggattgataaggtagcagagctgtctaacaatcattacccagtgattgaatggaaagctgaggatatttcaggagatgctttaagagatattttataatttacgagataactcatattttactcattgacaaaacatagataaagttctatattaaatatagatgaacatctatatggaggtgagaatatggattatttaggattatcaaaaattatgaaggcaattgcagagcctaatagacttcaaatattagatatgatttcaactggtgaaaagtgtgcatgtgatattttggataattttgattttactcagccgacactatcacatcatatgaaggttttaattgaggcgggagtagtaaccgcacgtaaggaaggcaaatggcaatattattctctggtaacagagaatattgaagaatttcaagaattaatacatcagatattgaatataaaacaaaaagaaggagttatgtaaaatgagtaaagtatcgttgtatgaaccagcaatgtgttgtgacacaggagtttgtggtcccggagtagatacagaattgcttcgagtttcctctattattcaaacattggaaaaagtcgatggtgtagaagtagagcgttttaatttaacaggtaatcctgcggcattcgtagaaaatgaaaaagttggggagttgttacagtctaaaggagccgacatactacccgttgttttattagatggtgaaattgtgaaaatggctggttatccttcaaatgaggagtttagtgtctatactggtgttaatttctcagaggataagaaagaagaacaatcaaatagttgctgctctccatcatctggatgttgctaaaacgaagaaacgaaagcctatgagaagagattctcatgggcttttttattaagtgagacagaatctattgacaatagatagatgaacatctatattatgtatagaagaacttctatgtatggagggatgaaagatggattatgaattaacagcaaaagtttttaaagcattaggagacccaaaaagggttcaaattgtggatatgctctcttgtggtgagcgttgtgcatgtgatttattagagcattttgaatttacacaaccaacgctttcccatcacatgaaagtgttaatgaatgcagggattgttcaagccagaaaatcagggacatggcataactattcattgaatgcggagaatatgaaagtattatctggtgtcattcaaacaatcattcaaaacacagatgactgtatttgtcatgtgattgataatgctgcatgttcttgtgaggttaaagggagagtaacagctacaaagaaagcaacaactgcttagaatgatgatgttaaatttaaaggaggaaaccaaacatgaaattgtaccaaccagatcagttaccattaacaaagtatctattttttacaggaaagggaggtgttggtaaaacaacgactgcttgtggcactgctacttatttagcagatagtgggaaaaaagttatgttagtcagtaccgatccagcaagtaatttacaagatgtttttcaaacagaactaacaaataaagggaaagaaattccagaagttccgggattaactgtagcaaattttgatcctgtaacagcagctgatgactataaagaaagtgttgtaggaccatttagagggaaactacctgattctgctttagcgaatatggaggaacaattatctggttcttgtacagtagagattgctgccttcaatgaattttctggttttttaactgatccagaagcagagaaaaagtatgactatattatttttgataccgcaccaacaggtcacacgttaaggatgttacagttaccgtctgcatggagtaattttatggatgaaaatacaacaggagcttcatgcttaggtcaattatctggtttaggtgataaaaaggaaatttatgagcatgctgtagccacattagctgatggagcaaaaacaactttaatgcttgtaacaagaccacaaaaggcaccgcttttagaagcagatcgagcttctaaagaactacaagagataggcattgaaaatcaagttttattagtgaatggcgtcttagaggaagcaacagataaagtatctcaattgatttatgatggacaacaagaagcgttggcacaaatgccagatagtttgaaagcttttcctgagtacagtattcctttacgttcttacaatgtgactggtgttgaaaatctacgccaattgttgaaatccaatcaaggtgaatttttaactgaaatagtcacaccaagagcatttcctagattgaaagacatcgtgaatgagttgcatcaatctggtaaaaaagtgatttttacaatgggtaaaggtggcgttgggaaaacgactattgctgcggcaattgccactggtttagcagataaaggcaagaaagttcatttggctacaaccgatccagctgctcatttacaatttgtgatttctgaatccgatcaaatcaaggtgagtcatatcgatgaggacaaggaattagcagattatacagaagaagtattaagcaaggctcgtgaaacgatgtcaccagatgatgttgcttatgtagaagaagatttacgttcgccttgtacacaagaaatcgctgtattcagagcttttgcagagattgtggatgatgccgattgtgatgtggtagttattgataccgcaccaacaggacatacattactattacttgattctacccaaagctaccataaagaagtagagcggacatctggtgaagtaccagaatcagtgaaacgtctcttacctcgtttgcaagatggaaaagaaaccgaagtggtcatggtcactttacctgaaacaacacctgtttatgaatctatgcgactacaggaagacttggatcgagcaggcattgctcatacatggtgggtcgtgaataacagtatgttaacaagtggtacaacaaatccaatgttactagcccgagcacaaaatgaaaatacatggattgataaagtagcagaattatctaataatcattatggggttgtagaatggcatgcagaagaaatctctggagaagcactacacaatatattgaattagaagcattttattttttttaattgatagatagaaatttttctatctatcatgcacttatttgaattttatgatggaggaagatgatgatggaaaaagaagaacaaaaaggattgggaatatttgaaaaatatttaacgctttgggtggctttgtgtatggttacgggtgttttaattgggaaatatttgccagctatcccagcaactttagggaaattcgagtattatcaagtatctattccaacagcaatcttaatttggttgatgatctatccgatgatgttgaaaatagattttactagtattgtcaatgcagctaaaaaacctaaaggtctgattgtaacctgtacagtgaattggttaattaagccatttacgatgtatgccatttcagcatttttctttttcgttgtatttaaagggattatcccaaatgatttagccaaagaatatgttgcaggagcagtattgttaggtgcggcaccctgtactgcaatggtctttgtttggagttacttaaccaaaggagatccagcttatacattagttcaagttgcgattaatgatttaattattttagtgttgtatgcgccaatcgttgctattttattaggtgttggaaatgtagctgttccaattaatacattgattttgtcgactgttttattcgtagtgattccacttcttttaggtgttgtcactcgaacagtcatcataaaaaataaaggacttcattattttgaaacagtatttctaaaaaaatttgataaggttacgattattgggctgctcttaacgctagtgattattttttcttttcaaggtgaaagaatcttgaataatccactgcacattcttttgattgcaattccgctaaccattcaaacactattgatttttgctattgcgtatacatgggcgcgcttttggaagttgcctcattcgattgctgctccggcaggcatggttggagctagtaatttctttgaattatctgtagcagtagccatctcactatttggtttacagtcaggggcaacattagcaacagtagtgggcgtattagttgaagtaccagtcatgttgctattagttaaagttgcgaatagtacagttggatggtttcaaaaaaatgagttatcttaatcgttaagaagttagtttaagaagactaaatttattacttggagatgttgattgtggcaggtgtaacaaaaaaattatcattattagatcgttatttaaccctctggatttttcttgcaatgggctttggtattggattaggttattttgtaccagaggttgtaacaggaataaataaactggaagttggaacaacttctatacctattgcgataggcttgatattaatgatgtatccaccgttagctaaggtgaaatatgaagagatgtggcgtgtctttaaagattggaaggttttattattatcacttttccaaaactggattgtcggtcccattttaatgtttattttagcggttgtctttttacatgattatcctgagtatatggtggggttaattatgattggtctggctcgttgtattgcaatggtgattgtgtggagtaacttagctcaagcggacaatgagtatacggcaggattagtggcgttcaattccatttttcaaattatcttttattcagtgtttgcctatatttttgtgacagttattccgggatggttaggcttagaaacgcatgctgtttcaattggaatgggtgagattgcaacaagtgttttcatttatttaggtattcctttcattgcaggctttttatctcgttggattctaataaagaaaaaaggaaagaaatggtatgaagaaaaattcattcctaaaattagtccaattacattggttgccttattatttacaattgttgtgatgttctccgttaaaggagaaaaagtcattgaacttccaatggatgtagtaaggattgccattccattactcatttattttgtccttatgttctttgtttcattctttatttctaaacgtatgggaaccagttatccaattgcagcttcattatcgtttaccgcagcgagcaataattttgaattagcaattgcggtagcagttggcgtatttggtattaattcaggggaagcctttgcagcagtaattggtccactagtggaagttccggttttgattggtttagtaaatgtagcattgaaatttaagcaaaaatattttaagcaaacttaaaaaaggaatgaggcatctttatgaaaattgtgattattggttcagtagcagctgggacaagtgtggctgcaaaggctagacgaaatacagaggaagcagagattgttgtctacgaccaagacaaggatatttcctattcaatttgtgggattccttattatataggagaagaagttgaagagttagataagttgacccctagaaatgctgcatggtttaaaaagcgttataatgtagatatttttacagagcatcgagtgacagctattcatcctgaaactcaaacgcttgaggttgagaatcttcaaacaaaggagaagaaaaccgaatcctatgatgaattggttttagcaacaggagccaaaccgattgtgccagagatttttaaagcacagcaagccaatagaaatctttttcatgttcgtactattcaagatgctgctgcaattcactcatttattgaaaaagaaaagccgcaacaagccacaattattggtgcaggctttattggattagaaatggcagagcaattggttcataaaggaatagaggtaactattattcaacgtggcaatcaagtcatgaaacaaatggatgctgatatggcttatcgtgtccaaaaggagcttgaaaaaaatcatgttaagcttcaattgaatacaacgatcacaaaagtaatggagaaggatggctacattactgaattagcaaccaatcaagagcaaacaatcaaatcggatttagtcattcttgcagctggtgttactccgaatacttcacttattcaatcgacaactattcaattgggaaaatctggtgcgattaaagtgaataagaaaatgcagacaacggtaccacatatttatgcggtaggagatgttgctgagagctattctgtcattacagataaaccaatatatcgcccacttggatcaactgctaataagatgggtagaattgctggtgatatcatcacaggaggaacactggaacatcgtggtattttaggaactggtattgttcgagtttttgatttagcggttgcatatactggtttaacagaaaaagaagctaaattagaaggattagagacagctattctttataatattaagccagatcatgcggactacttaggtggaaaagagctgacaatcaaagctttagcagataaaagtagcgggagaattcttggagctcagattattggagagcaaggtgtagataaacgaattgacgtaattgccactgcaatttcatttggtgcagtagcagaagatttgttccatttagaccttgcttatgcaccaccatttgcgacaacgaaagaccccgttctttatactggaatggcgttagataatgcaataagcaatggaacacctttaatgaccccaactgaattgattgagcgacaagcaagtggagaacaactgcaaattattgatactcgttccaaaaaacaatatgaaatttcttgtgttaaaggggctatccatattccattagcagaaatacgtgatagagtggcggagctagataaaaatgtaacaacaatcacgtattgtaataagggcgtaactggaaatgctgctcaaaatatcctgttaaacgaaggatttaaagaagtctataatttatctggaggaaataaaaattaccagataattgcccaaatgctcgcctctaactgatttaatgatgaagggattaaatagatgacagaagaaaaaagagcgttggcaagacttgctggtatcttgggagctttcctcgctgccaaactattaaactatcaaataaatgttggtatatttgtaaattttgttataattgttgtggttctatatgttttagctaaaaaaagagaatctaaagctaaagaagacaaaaaatagtttgtcgcaaatgcagttgcaccttgactgcatttgttttttgacaaaagaaatataagtaaggaggtaatgagtaaataagctatgcactagatttaaaaggcttaaaaaaagtatatgcgaccagtgttgaggcgctgcgtggtattgatttaactgtagaagaaggagatttttacgcactgctaggtccaaacggtgctggaaaatcaacaacaattggaattattacctcacttgttaataagactgctggtcaagtgaaggtttttgattatgatattgataatgatttagagcgagcaaagcaacagattggtcttgtgccgcaggaatttaattttaatccgtttgaaacggttcaacaaattgtagtaaatcaagcaggatattatggtgtctcaagaaaagaggcactgaaacgtagtgaaaagtatttgaagcagtccaatttatgggagaaaagaaacgttcgtgcccgtatgttatctggagggatgaaacgaagacttatgatagctcgagcattaatgcacgagccacgtctgctaattcttgatgaaccaactgctggagtggacattgagcttagaagagaaatgtgggcatttttaaaagagttaaatgaaagtggcacaacaatcattcttacaactcattatttagaagaagcagagatgctttgtcgtaacattggaattatggttctgttgcaaagttttaaatctactatcaaataaggtagaataatagaaaaagatagcaggaggaatgacgatgaatccttttaaaggaaagcaatttcagcaggatgtgattattgtagccgtgggctactatcttcgttataaccttagctatcgtgaagttcaagaaatcggttctgttgcaaagttttaaataaagaataaaatcccttacggtatctatgatttaagctgggattcccaataataccttgatttcagtacagaccgaaaacccgaagagagtgccttcttttcgggttttcttatataatcctcgaatggcttccatgcctttaatcgtggtagaggcagtgcgtaaacttcgatagaatttattgcgtctctttactggacgatggtcttgttcaatcaaattattcaggtatttaatggtacgatgttctgtcccttgataaaagccgtattcttttagtttcttaaaggcacttgtaatagagggggctttatctgtgactacaaccttcggttcatcaaactgcttcactaaccgcttaagaaaagcataggctgcttgtgtgtcccgttttttacgtaaccaaatatccaaggttaaaccatctgcatcgatggctcgatacaaataatgccattttcctttaattttgatgtacgtttcatccattttccatgaataaaaggattttttatttttctttttccaaatttgatagagtagtttgccatattcttgcacccaacgataaatcgtcgtatgagaaacgttaatgccacgatcatataagatttcttgaacttcacgatagctaaggttataacgaagatagtagcccacggctacaataatcacatcctgctgaaattgctttcctttaaaatgattcatcgtcattcctcctgctatctttttctattattctaccttatttgatagtagatttaaaactttgcaacagaaccaaatcttttataaaactgtgttgcacttaatttgataatttaagacaaagaagtgtatacttagttgggtaaataaattctatttacgataaacattgacctttggaggtaatacgaatgaaatacgttatagtaggaacttcgcatgctggttttgaagctgtgcaaactctattgaaaaaagactcagatgcagaaatcgttgtatttgaagctggatcaaccgcttctttcttatcatgtggtattcagtcctatctagaagacatttcaaaatctttggatgaattacactacgcaaatgaagcatcatataaagaacaaggcgttgatatccgcatgaacacaagtgtgattgccatcaacccagagacaaaagaaattacaacacgcactactgacggtgtggaagctacagaaagttacgacaaactattgctttctccaggtggtgtaccaggtacaatcccgaatgtagatgaccaacacgaaaacatcttctacttacgtggtagaaactgggcagataaagtgaaaaatcgtatgtcttcagctaaaaaagctgtagttgttggtgctggttacatcggtatcgaagcagcaattgcttacgcacaagctggcatcgacgtaacagtagtcgactttgttgattcaatcttaccaacttaccttgacagtgaattcactagtcttctaacaaaacatatggaagaaaaaggtatgaagattaaaactggcgaaggtgtgaaagaatttaaagtcaacgaaaacaacgaagtaactgctgttgtcactgacaaaggcacttacgaagcagatacagttattatcagtgttggggttcgtccaaacacacaatggttgaaagacactttaacccttgatggtcgcggctttgttgaagtcaacgaacacatggaaacttcagttaaagatgtttacgctgcaggtgatgcaactgctattccttttgcacctacaaacgacaaagcttacattgctttagcaactaacgctcgtcgccaaggtgtcatcatggctcgtcacgcaagtggtgatgcagacgctaaaattggtcgcgtaaacggtacatcaggtcttgctgtatttgactacaaattcgctactactggtatcaaggatgctaacgcaaactcttaccaaggaaatgtgaaatctgtttacaaagaagacttaatccgtccttcatttatgcatgacgaagaaaaagttttaatgaagcttcattacgatgcagataacggtcgtatattaggtgctcaattaatgtcaacttatgacattcttcaagctattaatgctgtatctgttgcgattgaagctgaatggactgtagaccaattagcgcaagctgatttcttcttccaaccagaattcagccgtccttggaacttcttaaatgtcttagcgcaagaagctcaaggtcaaccatacggcgcagacacaatgcttttctaatccaaacgaaagccactttttcactacagatatataacattctttataacaaataaaagacaggcggtagactctcatttaatctactcgcctgtctttttcttctattatgtagctcacgatatccggttccaaaggtcaaactcttccaacacttcccaaaatacgccaattacttagcagtacttgttcggcttttgctccagcgcgccgagtcttagcgacttttgtcacacctctaatttttactctaaccaaccatcaactatttcacgattggcttcaatccaattatctgctgcttcttctggttctacatctgtcgctaattcttccataacagaagacatatcttcaacttcccagtagaagttatcaataatcttataggcttctggattatcttcctttagcccttctcttgcgtatgaatgaatttcctcgtagccaccaaagacattttctggatcgtcaagcatcttaagatcataatccatgaacatccaatgcggcttccaaccaaccacaactatatcctcttcattattgatagcctgatctaattcagcaatcatagcacctgttgaactcacagaaacctcccaatcggatagattgtcatactccttaacagcattttgggcactgttggtaacacctgcccctggttcaattgctgtaatagttgaatcattttcatccgtgaggtcggtaatcgaattgatatcttccatatatgttggaacagttaatgctgaaatagcaccttctaggttagcccctaaatcaaccatcgagtcaccatatttctctgcataggcctggtgcgttgtaggcacccaaccgccgaccatagcatccaactgcccttctgcaaccgaactaaacatgatggccgggtctactgttgtaatttgtacgttgaaccctgcttcttttagcacctgtgccaggacatttgttgaagctatttcagactcccaattcacagttgctagagtcactgtttggccaccagaatcagcacctacagtcgttttatacgaatcttcactgccaaaggtaaataatagccctataactgttgctactaataaactcattttcttaaacatttttacacgtcccaaaaaatgtttgaattggaaaacaccttatgaaatcttttataaaactgtgttgcacttaatttgacaatttaagccataaaaaatcgtatccataagttaaaacatttgaatactgttgaagcctctcaagagactatttggtttacacttataaatacagtgcatcaagatttcctattctacagattaatttccgaaattgaaataaaaaagattaaaagtataaagagtggtacgctgttcacacaaggagaaccgagatcattaatcgttcatattttatctcgtctgtggtggttagatattatacaacggatgatagtcgcgaaaatccttatgagttaatggagttttttgggaaaaaagatatatctgggaagatgattagtttcttttctagcgtaatgacaaacaataaaaacattcggcttggaattatttctggaataaagaaactatatgatgctgatttaattccttaccatagagagcaatttcgaacttcaataatgtattttaatttaatgggaggtgtcagaatcttagaaatactttcttttgaagaggttgaagagattacaattgagttgttaaaggaaaaaatagtgtcactgaccaagatatccaagttcttcaaaaagcataataaataccctctaaaatgaaatcattttagagggtattctattaatctgattatatattaggctggaaataattatcctgaataattatcctgaataattcatacctctataatttaagctatgaattattcaggtctaacatattgtaatttatatgtacttgttattttaatctccggttattcatagaatcgttatacatgaaggcgtgaatagggagaaaaagcggcatacactgattaaccctatagttttttccagtgtagaatctagtcaggatgcctttaagcaagccgcgcattatttaaatcaggtatacaatttaaaagataccattgtggttacgaacagtgatggcggcagtggctatgaagcagataaatttgaatccatggatggttatagtaagcagcacgagcattttagagacttatttcatgtgcacaaaaagataaaagaacgtttatcctttgataagccaatggccaagcaggtggagaaagctatctatcaatatgattgggatagaattgaaacactttgtgccaccattgaaagtcgtctgattgatcttcccgaagtcattatagaagatcgattggaacagattagaaagctcaaaaattacttatctcggaactgggtttatatcaaaccgtttaagaagcgtgaattatcgattgatagaggcacaggggctggagagacgggtcatcgtctgtatacatatcgcatgaagagacaaggccgaagctggacaaaaaaaggagctagccacgttgtggcaattctcactgcagagaaaaatgggcttttacagacagctttaacagctgaaataacagataaagtcgaatcactaggtgaagagattaaaggagctgtccgtcaagcgttaaagaaaatagattctacggccaaacaatccaaacgggttctatcgtcaattatggtccgaaaagcagctttataggccaactagccctttcatttagttaaatgaatagaaacaaaaaaccgcatttattttaagggtcatttagaataaaggttaccgaggaaaacttgatgcatacaaatgtaagtaaaggcttgaccgattaaatttgatgtgctattatgaaacttactttacaagacaagttgataaaagacgacaacttaatatgaaagctttgattaggggcgtttgagctaatcattgtgatctgaacaggcggtgaacgtaacacgaggttcatgcagctgggctgcaattatttgcggcagcagactatgtattctaagggcatatctgtgggacagttaattctgttctacgggtatgcccttttttaatacagaaaaataagtggaaaaggagggagaccgctctttaagccagttgtctgtgatatgtgatagaataaaaataatgatgaaagaagggaataacatgatcagttatttaataaagagtaggcagggccagtttttagctatcggtattttgtttgccgcagctggctttatatttggaacgatgaatagtgagtacagtcgctggcttttctatgctgctatatttttcttaggcttttatgcgtccaaaaatgcgatcgtagaaacagtgcgctacaagtcgcccaacgtggatctacttatgatcctcgctgcacttggtgctgtgatctttgattttgaatcagaaggagcagccttactactaatttttgccgcagctgaagtactagaagattatgcgaacaacaaatcgacctcagcgatctcggaattgatggctcaggtacctgaaacagctcaagtcttgaaagaaaatggtgaagtggtaaccgttcctactgaagacctgaatgtaggggaaagggtcgtcgtttctaaaggggaacagatcccgatcgacggaatcattgaccgcaaatcgatcgtcaatgaatcagctctcactggcgaatcggttcctgtcgtgaaagaggccgaagatgaagtgttcgcaggaacgatcaatgaaggcgacgttttttatatcgatgtaaccaaatccagcgatgaaacagtcttctccaatatcattcggatggtcgaagaagcgcagagccgtccttcacgcatctctaaattcattgaccggatagagagcaagtatgttatttctgtactagttatcgtgccgattttcatcgttgtgatgtatgcattgatggatctgccattcgaagaagccttttatcgcggtatggtctttctaacagtcgccagtccctgtgccttagtcgcttcggccacgccagcaacgttgagtgcgatcagtaatggagcaaaaaacgggattttattcaaagggggggctgcaatggaagctttgagcacgatggatatcttatacacagacaagacaggcacgctgacttatggtgaattcaaggtcgatgaatacagtgctcccgatgatgtattgaaagaagtgatctatatggaacagcagtcgagtcatccgatcgctcgagctatcgtgacggcgtttaaagagacggatctgagttcagtcgatcataatgaacctgttagtgaaatagccggttccggtatcaagaaaggcacagtaagggtgggaaaaccttcagccttcagtacattcaaaaactacgatcgcttcaagcagtacttccaaaaaggcaacacgatcattctcgcagcaaaagaagaggaggtcgttggttacttttcactcagtgaccagattcgcagacagtcggcagatgccgtggctaacttccagaaagaaggcattaaagtcacgttattaacgggtgataacgaagaagtgacagagacggtagcagaggtcgtcggtgtcgatgactataaagcgtccatgttgccggaagacaagatcgcctatgtcagggagagtcaggataaggaagaagtggtcggcatgatcggtgacgggatcaatgatgcgccagctctggcaaatgcagatatcgggatcgcgatgggcagcggttcctctgtggcgatggaatcatccgatgtcgttgtcgttaaaaatgacttgtcgaaactgttctacagttacaagttgagtaagaaactgaacaaaatcattttgcagaatgtgattttctcgatcagcgtgatcgtgaccttgatcgtcttgaacctctttggcgtattaggacttccactagcggtattattccatgaagggtcaacaatactcgttattcttaatggtctccgtctacttggatctaaaggtccgaagcaagaagagagagtctcggatccatctttaaagtctgtaaaggtttaaactgaacattttatgaaagaaagcccctgagactgatcaaacagacttgggggctttctagtgttggttctgttgcgaagtttgaaaatcaaacgcgccctctctgaactccaaatatcttaggctgttattcccattaataccttgatttcagtagacaccgaaaagccgaagagcgttccatttcttcggttctttttatatattcctcgaatggtctccatgcccttaatcgtggaagaggctgtacggagactttgataaaatttatttcgtcgtttaataggtcgatggtcttgttctattaaattgttaagatacttcacagttcggtgctctgtcttagtatataaacccacactctgtaactttctaaaggcggagccaagagaaggtgctttatcggtcacaattgctttcggctcaccaaactgtttatggagtcgttttaagaaagcataggctgcttgcgtatcccgtttctttcgtaaccagatatctaaggttaagccgtccgcatcaattgcacgataaagataatgccaacgtcccttaattttgatataggtttcgtccattttccatgaatagaaggattgtctatttttcttcttccaaagataatagaggactttgctgtactcttgcacccaacgataaatcgtagtatgacaaacatttattccacgatcatataacaattcctgaacttcacgatagcttagattgtaacgcaggtagtaaccaacagcgacaataatgacgtcttttttgaattgtttgcctttaaaatgattcattactctgtcctctctgtcttttttctcaattttacactaaaatagattttttggaaaactttgcaacagaaccaaaaaagtagttcaaattatccctaaaataaaaagcatttctaaagacggcgaaaaatatttatatgaatttaaaccagatcatatttatcaaaaactaagtacattaaatgaaagagagcttgaatctctagaacatgtattaggtttagaattttaatttgcttatttttaatggccaatagagtatactcttttgaccaatttgtttatgcgccacaacgaataaaaaataatgagcaataaagttgggcaatagtaactttattggagacacatatccattttaaaaatgatttagtgatttagtcactaaaattagtttaaaaggataacaatgataattagtaaggataataatctaattttaaccaaaaaccatatataggcagttctttgtattagctatcaaaataaagtttccgaaatacgctttttaactatatattttaaaaagttttcaaaggatataatttcccttttctgagtttagttgtatattttagggggtgaagagttcggaaatgttagctcgctagtagtggacatagctaaaactgtcaaaaatattcaaataatgaaagatagagcccccctaacgcgtccgaattaaaggctgaagtggtatattgttaatttgcaagctatctttaatgttaaagtaatagctatcggataaaaaattattatatcagttatgactgtgactaatatgagaggtcaaaaaattaaacggtaaccatttgatgctctgcctattaaggaaaagtaaaacagtaatgaatttatgtatcagtcagttaatcggcaaaaataggaaaaatatcaatatgttgagtatacctatattttattataagcaataacttcatgaaatatctttatactaaattaatgctatacagtaaaatcataatactattttgattaattacattatataataaaagggaatccgaaaggaatgggctatatgcatataaatggtcacgaaaataacgatatttttaataaacgacgcggtaaacttagaatttactttggctatgcggcaggcgttggcaaaacgtttgctatgctaaacgatgcacaagagctagttaaaaccggagttgaccttgttgtcggctacgtagagcctcatgctcgtccagaaactatgaaacttttaaatggtctggaaaaaatccccactaaacctattttatataaaggtgtaaaactatacgaattcgatttagattcagcacttaagagaaatcctaagttaattattgtagatgagttagcgcacacaaatgcgtatgcttgtagacataaaaagagataccaggatattgaagaattactacaggcagggatagatgtttttactactgttaatgtacaacatatagaaagtctaaatgatattgtggaatcaataacaaacattcatgtacttgagcgtatacccgatgcagtttttgatggggcagatgaaatagaattagtagatattgaaccacaagatttactagatagattaaataaaggcaaaatttatagggaaaagcaggctagacaggcagtactcaatttctttaccaccgataaattaattgccttacgagaaatagcattacgaagaacagctgatcaagtgaagagaattgccgagagtaatatagttaaccctaaaaataattatggaaaagagcatattctagtttgcatttcaccatctcaaggtaatgagaaagtgataagaacagctgctcggatggctgaagccttaaaggggaaattaacagcagtttttgtggaaacacctgaatatgaggaatcttcaatcaaagagcaagaatctttgagaaaaaatttacgacttgcagagcagcttggtgcccaaatatcatcagtttatggagaggatatttctcaacaattggctgaatacgcaaatgttagtcaagcaactaagattattcttgggagatcctcgaaacgaaaaagttggctcaagcctaagttagtcgataaactttctgaacaaatagatagtacagatatttatattattcctgatacgcagcctagcaagacaaaaaaacatttcaaaataaaaaacgaaatgtctttttcggtttcggattctattagaacagtcatcattttattattttgtacaattatcggtattatattcgattacaatcattttagtgtcgtcaatattatcattgtatatatcctaggagttcaagtaaatgcggtaattacaaaggggagagtctatagtattgtatcggctcttttaagtgtgctgatttttaattatttcttcacggagccgcgatatacattgcatgcaattgatcctggatacccggttacttttgttatcatgctcgctgcagcaattattactagtacattaactaaaagaattaaagagcaggcaaggcaagcgtcccaacgagcatatcgaacagagatcttacttgaaacaagccaaaagttacagaaagctagtactgaatcagctcttttaagagaaatcgctatacagataaataagctactagaaaaacctataattatttacccagtaagagtaaataaattagataaacctctaatatttaatgaagataaacgtgataataacgaatcagagtggataagcaaagaggaacgtactgtggcagaatgggtattgaaaaaccaaaaacgagctggagttacaagtaatacctttactaatacaaaatgcttatacttagctgtaagaggaaatggggaagtattggccgtgatcggaattgtcatggacaaagaggcgcctatggataatttcgaaaaaagcatcttaattgctgtactagccgagagcgctctggcattggaaaaagaaaaatttcgggttcaagagcaaattatctcattaagaatgcagcaagagcaggtgcggacgaatttattacgagcaatatcacatgatttgaggacgccattgacaagtatttcaggcaacgcaggtgttctaaaagcaaatagtcatatcttagaagaaaagcaaaagcaaaacttatataacgatatttatgacgactcaatctggttaataaatttagttgaaaatttattgtctattactcgtcttgatgagggtagttcgaatatcaatatgcaaccagatttaatagatgaggtaatttcggaagcacttaggcatatagataggaaaagcatcgaatataatattagtatggagattcaagatgaggatcttattgtaaatattgattctcaattaattatgcaagtaattatcaatattgtggacaatgctatcaagtatacgccaccaggatcgaaaatttgtatcgtagcaaaacaagatatggattcagtttgcgttgaaattaaagataatggagagggtattccagataaagagaaagataaaatttttgatatgttttatacggctaataacattaatgcagatggacggagaggactaggtttgggactttatctttgtatgtctatcattcaagcacatcaaggtgaaatgtatgtcaaagataatattcccaaaggtgctatctttggattggttttaccgattgaggaggtggatttaaatgaataaaaatgcaagtatactagttgtggaagacgataaagcaatcagaaaattaattacaactacgcttgaaacccgaaattataatttttatacggcggatacaggtaacgctgcattaattcaagtaacaagtagacaaccagatattattattctcgatttagggctaccagacatggacggtacaactattatccagcgagtaagagaatggtcgcaagttcccattattgtcgtaagcgcacgaagcgaagatagcgataaaatagttgcgttagacatgggggcagacgacttcttaacaaaaccatttagtgtggaggaattgttggcccggattcgtgtaagtttaaggcgtagagcttatacaaattccgaattgagtactcaaaatgtctttattaatggagatcttaaaattaattatactttacgcgctgtttatttagcggaaatagagatacatttgactcccattgaatataaattagtaagcttattagcgaaaaacgttggaagggtcctgactcataattacattacacaccagatatggggggactattcgaatgatatcccagcattacgtgtatttatggctaatttacgaaaaaagattgagaaaaaatcggctcaacagcgttacattcaaacccatgttggcataggctatcgaatgctacaggtttctgacaataaggaaaatgagacgatctagtttcttaatgcaaaattaatctggttctagaaacctttatactaccctaataccataagtgatacacttatcaagaattatttgattgagaggtggacgcttatggatttttttatgctcggaatactgattttcagttatttcatgttgaaaatgattgtgcactggtgtgattcgcaaattaagcagcgataagaaagggtgtaaaaattgattattttaggactattagtgtttttgattggtggatatctattctatgcgttaatccatccagagaaattttagggagaggggagttttaataatgctacaaatcagtttatttttaatcattgctgcacttttagtacttccaatggggaaatatctttatcacattgctacagagcagcatacttttgctgataaattattagatcctgtagataatttcatttataaattgtgcggtattgataataaagaaatgggatggaaaaagtacacactatcgatgttactcacaaatgccgtcatggtattagtaggttattttatattacgaattcaatcactgcctattcttaatcctaatcatatagcaggaatggagccatctttagcatttaatacaatcataagtttcatgacaaatacaaatttacaacattatgctggggaatctgggctgtcctatttaagccagttactagtgattacctttatgatgtttacttccgcagctacaggattttcggtagcgatggcttttattagaggattagcaggaaaaaataaaacaatgggtaatttctatcgagaccttattagaataattactcgtgtattattaccattatcgttaattggcggtttattacttatttcacaaggagttcctcagaatttactgtcaaatataactgttcaaaccatagaagggaagtttcaagatattgctatgggacctgtagcttcactagagatcattaaacatctaggtacaaatgggggaggtttttttggagcaaattctacaactccttttgaaaatccaaatattatttcaaatatgatcgaaatgctatccatgatattgttgcctgcctctgttgtaatcgcttttggttatatggttcgcgatcggaagaaaagagtgagcaaaagcaagaaacaaaatcttttttggataggaaatgaagcaaaaccattactttccgtaatgatcattctttttcttatgggtttaattgtgtgtgtaatagctgaaaagggaggaaacccactgctcgaaaaagttggcttgagtcaagctatgggaaacatggaaggaaaagaattgcgatttgggatagatcaatctgccctcttcacaagtgttacaacagcttttacaaccggttcagtaaacaatatgcatgatagtctttccccattaggaggaatggttgccctatttaacatgatgcttaatttagtgtttggtggaaaaggagtaggggttatgaacatcatcctctatgttattatgacagttttcatctgtggtttaatgattgggaaaacacctgaatatttagggaaaaaagtagaaggaaaagagatgaaacttgcagcattaggcatcatcattcatccatttttaattctaagttttactgcaatagcagtgagttgtacggcgggtttatctggcatttcaaacccaggatatcatgggctgacacaaatattatatgagtttacttcttcatccgcaaataatggttctggatttgaaggattagcggacaactcacacttttggaatatcactacggggcttgtcatgttttttggccgatatttgacaataattattcagcttgctattgctggttcgctcttgataaagagtcaagttaatgaatcgatagggacattaagaacagacacaaagactttttcgatgtcactatttatgattattatgttaattgctgcgcttacgtttttcccagcattaatattaggtccgattgctgaacatttgtctttatggagttaaggaggagataaacttggaaaagaaagcaaaacctggtttttgggataaaaaaatattaggtactgctgtaaaaggcgcatttataaagttgaatcctgtatatatggtgaaaaatcctgttatgtttgtcgttgagattggagcgataatttctttagcgttatgtttcttcccaaatttatttgggggcaataatcaggatatgattctatataatagtttagttttcatcattcttttattaacacttttatttgcgaatttttccgaatctgtcgcagaaggaaggggaaaagcgcaagctgctagtttaaaacaaacacaacaagacatgcaggcacgccttattttaaatggaaaagaaaaagtagtgaatgctaacacattaaaaaaaggagacattgttcttgtgaatatgggggaagttattccaagtgacggagaaattatcgaaggagtggcatctgttgatgaatccgcaattacgggagaatctgccccagtcttgaaagagagtggtggagattttgcctctgtaactggaggaacgaccgtggccagcgactacttaaaaatacaaattacttcaaatcctggtgaatcatttattgataaaatgattcaattagtcgagggggcttctcgaaagaaaacaccaaatgaaattgctttaagcacgttgcttgtaagtctgactattattttcttgattgttattgtctctttataccctatggcgatttatacaggtataaagcttcctgtatctactttagtcgctctaacagtatgcttgattccaacaacaatcgggggactgctatcagcaataggaattgcaggaatggatcgggtgactcgatttaatgtcattgcgctgtcgggtaaagcagtagaagcttgcggagacgtagacaccatgatattagataaaacaggaaccattacctatggtaatcgaatggcttcagagtttattgctttagataagggaaataagaattatttgatccattatgcgatacttgcgtccattcaagataatactccagaagggaaatcaatcgttaccttagggaaggatctattaaaagaagacttggatacaaatgatataagggaaaatcaatttattgagtttacagcacaaactcgaatgagtggcgttgatttagccgatggaacaagaattagaaaaggtgcttacgatgcaattataaaatatattaaaaacataggcggagaaattccacatgaccttgaagacaaagtaaataacatctcaaagttagggggtacacctctagtagtatgtgcagaggaaaaaatttatggtgtcatttatttaaaagatacaattaaacctggtttagtagaacgatttgagaggctacgttcaattggtataaaaacaattatgtgtacaggggataacccactaactgcagcaacaattgcccatgaagcaggagtagacagctttatcgccgaatgtaaaccagaagataaaatcaaagtaattaaagacgcacaaagtaagtcaaaggttgttgctatgacaggagatgggaccaatgatgctccagctcttgcccaagctgatgttgggatcgcaatgaatagtgggacaaccgctgcaaaagaagctgccaacatggttgacttagactcggatccaactaaaattttggacgttgtagaaataggaaaacaattactaattacaagaggtgcgttaacaacgtttagcattgctaatgacatagctaaatattttgcaattattccagcaatgttcttagctattattccacaaatgcaagttttgaatatcatgcatttgtcctcttcttacagtgcgattctgtcagcgttgattttcaacgcaataattattccttgtttgattccacttgctatgaagggcgtaaagtacaagttacaacgatcagaaaaaatgcttgctcataatatgttggtctatggagttggagggatgatcgttccatttattgggattaaattaatcgacttagttattgcaccgttattgacaatgatgggattaggctgaaaataaactatagccgagtatcgaaggagtctttgaagtggagagctttttggcaaatgttgggatgtttgttattgcactaagcactatccttggatataggatacttatattcttctatgatatagaataccgcattgttcgttttaataaaaaactttaccaagttgcagaagcttttgctgatggtatggattccgaagaagtcgaagcaaatttaattaataaagtaggaatagatcaagaaagtgctaaaagtattgttaagaagagtttaaaataccgaaaaaagaaacaagcttataaaaattttatcaaaataacaaacaaagtattaggtatacgtatctatgatccaaaatataaaagtgattaaatagaggaggatctttaataaaatggaaaaaattttttatttcattcggaagccgatagcaataacacttgtattagtcgtgatttgtggattaatatatcccctagttctaatgggtgtaagtaaagtggtttttccagaacaagcaaatggaagcttagtacgtataaatgacagcgtagttggctccaaattgattggtcaatcattcagtggcgaaggatttttgcacagtagaccatcagcggtcaactataacacatatacagtgcaagagaaaaaagattataaatataatggtgtagcatcgggttctagtaattacgctatgacaaatccagatttaacaaaaagaacaaacaaagatataaaaacgtttttaagggaaaatccgactatcaaaaaaaatgagattcctacagatttggtaactagctcaggttcaggtcttgatcctcatattagtccacaagcagctgccattcagataccctctgtttcaaaaaaaacaggtatttcagaaaagaaattgaaaaaaatagtaagagatagcactgaggaaaagtttataggcatatttggagaaagaacggttaatgttttagaggtcaatgtagatattgtaaaagcaaaaaaactcggtaaatttggttcaaagtaattttgtatgtaaacctaaataaaatcactataaaaaagtttaggaattataatttctagacttttttggtagctatgaaagaatatagtttgagaaattaaaataactattaatttttgccttaaaaaagtctgtaacaaaaagttgtggggagaataaaactaagggtgtaggatcaaacgagttaaacaaaggaccgaatgcgggaatggatataataaatatagtggggctaattatcgcctctatattagctttcacgctaccagtcattggattagttcctagcatttatttacttgtgaagcggagaaactatccgactagtataaaaattatcgctatcacagcaattgtttatcaagctataatgattatctttgtattattgggattctatttttttacagtaagtacttccacgaatcacatagagatttctgacgtgacctcaaaagttcaaaaataaagtaaacaaaaaaccagtatagaaaagggagtaaaccatactggaaaaaagggatttgatcaatcatcattaaaagggagaacgattgattgatgttatgaaatatatgatagtctctttcgctaaaagtaagctgaaaaatttctaaaaaattcatgagaaatagtttgtttgaaaccagaaaagtaaaattaaaaatataacaccttggataattattagttatctgaggtatttatttgttgagatatcgataaatcgttgttctagaaacattccagcgtgcagcaattgttttaatgggagttccattatcaatgagagttcgcattaaagctagatcttctgctgttagtttttccggccggccaccaaatcgacctctagcccgagcagcttccctacctgctgcagaacgctctaaaatcaggttacgttcaaactctgcgaaagcagcgaacaaatgaaagataagctgcccagtggaacttgatttattcatcgtgatgttttcttgcaagctatgaaaactaattccattattatttaattgatttactacgcgaatcagatcttccatgtttcttccaagacgatccaagcgccaaaccacgatcgtgtctccggatcgacaaaaatcgatcgcagcttccaatccagggcgtttactttttgcgccactaatatgatcatgaaaaattttctcacagccatgtttttctaaactatctacttgaagatctaaattttgcaaaccagtcgatacacgtgcatatccaattttcaaatattttcacatcctaaatttattctctgcttttatagtaacataacttattgggcatagatataatggacatagatttatttacgggtttatgaacacgaaatgatttgaaatagtagatgtgactttaaccgataattttcactattttatatagctataattcatgattgtttatagccgaagccaacttcttgtaagtataaaggtagttggcttctagccaaatattattcagtaaatccaataattagggactctctagcagcttgaactacatctgaagatatcttctcaagattattgatttccattattctatcaatttgagtaaataagcgttggagtaatcggaaattgccattagttagcttaataatgcgattaatagcatcataatcttcaaaattttcataatcaattgctagacctatatcttggcatctatattctaatatatgctttatttctgaagaacttaactttttaaactcatgtgcaaatccaattctagagtataattgaggatatttagatagtcttttttcaattccttgcattcctataaagaccataccgacatcattttgatcataaatgtctcttagaagatccaacgtttggatcttcaaacgatctatttcatcaataattattaaatcaaccgcataaaatatattttccacgattcgatctatactagttgccatgtaatctattctatcagttttagggattactttattttctgtacttgaaattatctcatttacgtgtgctatatctattgcaagactgcttaattgagaactcaatgaactgggtttagtggcaggtgctgtcacaaatagagtattggtttttatcccttttaacttatctatgactaattccggattgagtctattaccttttctagttaaaatagtttctaatctatgccagtttgcataatgctttgctgaaatggtcttcccgacacctggattgccataacatatgccaatatatttatatttcatgcatgctctacaaaattcggcaaatttcttgtattctttagtttcaataaagttgagttcattcattttcatacctcctcaaacttgatacattatttttaacagtactactattctctttttgtctcccaaccaatttttctatcactttattagtggagacgattagttccctttttaactctcttttcagtttgctcctttctttttctatttctctaattccgatagcgtattgttcaaaagatgtagacactgcggtacaaaggaatacatttttataaaagactctaacatcactaatatctctaggatcatatctaatcaccacaggttcactaacaaaagctgaaagagttgggtggacatacttcatcccaaataagtgaataccgtcagagtgtaccacccgttctttcttaacttttattaaaagaagatctaaatcctccaaagagtttggcatattcggtagaaaatcatagttattccacatagctataggtttttctttagttgtactatgctgtttttgatggtatattcttaacaaccaatttctgaaaatatcggaaaactcctccaatgttagcattgactttgctttccgattcttaatataacctggaagatcttgtagtaacatagaatttacagtatgaaaaaaccgttcgattttccctctacctctaggcaccccaaccttagaaaactttaattctattttcaaatcagcagagacctgttcaagatgttgagaagtaaaatcgctaccgtgatctgtataaaaaattctagggataccacaaataggccagtcagcctgatcttttctccatattgcttgtcttagagttagagctgttcgtagtgagtttggtgattcaaacgcaataaagtacccagtaattgctcgactgtagtcatccattattattgttagccaaggcctttcaggataacctttcgcattcaatacctcaatgtctaataatgtatgatcagcttgccatatgatattgggagctgtagtttccctaatatgaactaattcgtaatgattcatatatattttagatccctgatgcgctagtactttcaatttatcgggaactaattgaataattttccttacctgatagtaagaaggctcctgaatattattttctttacaccaagacacagttctcctataaatggaagttatagaaacatttttattttctaagtaaatgtgtttaatgattttacaaaggtcttcagaaattttcattgaatttttatccgacctttcttttgtaattaatcccaccaatcccgattttttataattcgaaatccactttctaagtgtacgtgttgaaatatcattttcttcacttactttggaaagtggaatttctttttttaagtatggctgaagtacccgaaatttttttaatgcttttaatctctgctcctctgagtaattagctaaaatttttttattactcatttcctcacctcctgatatgaacaaattatttcatatatcagattatatgtctaattagggtctaccctaattagacatataaaacagattgaaaacaaacgatttttagtgtatgtttagggtgtgtgataaacagtcagaaaataggaagtgggaaaatgaaaattgcttatgctcgtgtttcaactttagaacaaaatttaacacgacaaatcgaaacactcaaaagttttggtgctgaaaaaatttttacggaacaaaagtcaggagcttctattaaaaatagaaaagcatttcaagaagctttgcaatttgttcgaagtggtgacacttttatggtagaagcgattgatcgattgggtcgtaattatgatgaaatcatccaaaccgtttattttctaaaagaaaaagaggtcaaactggttattacgagtctgcctattatggctgaagcaataggaaatccattattggataagtttattaaagacttgattatccagatattagccatgattgccgagcaagaacgagcagagagtaagagacggcaggcacaaggcattcacagtgccaagcaaaaaggaatttacaaaggaagacctattctatattcgcctacttcaaaagatccacagaaacgagttatctatcagagagtcattgacatgttaagtaaaggagagtctatttcaaaaatagctgaagaaagtggtattacaagacaaaccgtatatcgaattaaaaattcgaactaataaactaaaaggatctcttcagccaataaaaagtagcccttttgatctaacagcaaaagggctacttatattattatacgttattatatttagatgaaaattatcaataaaaagcggtgaaatttattaatggaagtcacacgaaatttaataggaaaagaagagtgttcagaaaatgaccattttatgaacattcaaacattcacttgaatatagatggatgttctgatataatacattcaaacaaacatttgaatgtaaaggaatgatcgtatgaataatgaaatttgtgaaataacttgtattcatgaagacaaagttaatcgtgctaaatctaaactagcaaactttgatactccgtcagtaagtggtttctttaaaatattgtcagatgaaaatcgacttaaaattgtacatgctttagttcatgaagatgagctatgtgtttgtgatattgctaatatcattgatgcttcggtcgcaacaacttcacaccatctgaactccttaaaaaaattgggagtagttgatagtcacaaggatggtaagttagtctactattttattaaaaatatcaaaatcttaaatcttatggagcttggcgtaaattttaaagaagaggtgctagcatgagtgagaaaatgaccgaaaaaacctatcgaatagaaggattaagctgtacaaattgtgcaggtaaatttgaaaaaaatgtaaagcagttgccaggagttacgagtgcaacagtaaactttggtgcaagtaggatttcagtagaaggccaaacaacaattgaagaactcgaagaagcgggagccttcgaaaatcttatcattcgtgatgatcaagaaaatgatgaacaagttagatcaaaagagtcttttattaaacggaatatcgctttaatcatctctcttggttttatacttgttgctgtgatttcccaactatcattgggcgaagatcatttattaacgaaagctctttatatattggcaataataattggtggatttgatttatttaaagaagggttctctgatttgatcaaattggacttctccatggaatctttaatgactattgcaattattggggccgcatttattggagaatgggccgaaggttctattgtagtaatactatttgctattagcgaagctttggaacgattttcaatggataaagcaagacagtcgattcgttctcttatggatatagctcccaaagaagctcttatcaggagaaacaatgtagagcaattagtcagtgtcgataaaatcgatatcgacgatattatgatcattaaacccggacaaaaaatagccatggatgggcttgttatcaacggtcattcttcagtaaatcaagcagcaataacaggagaatcggttcctgttgaaaaacagttagatgatgaagtgtttgcaggaacactaaatgaagaaggtgttcttgaagtcaaagtaacaaaaaaagtaacggatacaacgattgccaaaatcattcacttagttgaagaagcgcaaggagaacgagctcctgcacaagcctttgtagataaatttgcaaaatactatacgccattcataattattatggcccttttgatagtggttgttcctccgctattctttggtggtgactggaataaatggctttaccaagggttatccattttagttgtcggatgtccttgttcattagtgatctcaacacctgtttcaattgtttcggctattggtaatgcagcaaaaaatggtgttttagtaaaaggtggagtctatctggaagaaattggtcatttgagagcaattgctttcgataagactggaaccttaacaaaaggaaagcctgtcgtaacggatttcattgcaaccagttctgaaactgatataaattatctatcgattatttcatcgttggaatctctttctcaacacccattagcttctgctattttaaacgaagcggataaaactaatgtggattacaagtcaatacaaatcgaggatttccaatctatcacaggtaaaggacttacaggtatacatcaaaacatacgttactatattggaagccctaaactgttttctgcatcagtaatcgaagaaacagcggtcaaagtacaatacagacaatttcaagaacaagggaaaaccgccatgtatttcggtactgacgaacaaattttaggagtaattgctgtcgcggatgaagtaagagattcaagtgctgccgttatttctgaactccacaagttgtcaattgaacacactattatgcttactggtgataatactaaaaccgctgaatctattggtaagcaattaggtgtgactgaaataaaaggagatctaatgcctcaagaaaaattagattcgattaaagcgttgcggacaacttataataaagtagcaatggtgggcgacggcattaatgatgcaccagcattagctgcatcgacggttggtattgcaatgggcggtgcaggaacagatacggctctcgaaactgctgatgttgctctaatgggcgacgatttacaaaaattaccattcattgttagacttagccgtcaaactctaaaagtaattaagcaaaatatcaccttctcattaggtataaaactattagctctactactagtcataccaggttggctaacactatggattgctattgtagcagatatgggagcaacgcttttagtaacattaaacggattacgattgatgaaagttaaataacacaacaaataaaagaaggcatgtttataagcgtgccttctttttatgatactttttagtttttttgaacgctagttatgaagcaaactatgcgccatttaaatattaaaatgacagtctaaccttattaagtaggtgttcccattaatactttgatttccttagataatagaaagctccagagaaataaaataagatcttcaaattataaatttcatctctttaaaaattattattttgaatttttaaagagagcttttatgagcaccaccattataaaagctaaaaacaaagctactacaccaacgacaacaaaagaagtataatcagcatagctatcatcactaaacatttgaagagtaaaaacgataaatgctgcaataaagctaattaaaaattgaagccatatctggtggatatatttttggaggagaaaaatatatccatacatgcctattaaaagtaaagtaaaatctatattttgaagtataggatttccttggatgatatttataattagagtggtaaatgtgactactaaaacaataaatatcatcctaaaaacaggtttatttatattttttttaaacaaactaatgtaattttttaacataatgatcatccctctttttaaataaaaaatattatccaaaatctatttggtctaacatattctctcgactggcttgatctaatccaagatacgttaaggtcatagcttcacttgaatggtttaataaatgcatcactaaaccaatattatagtttgactgcgtatagacccgataagcgcctgttttacgcatggtatgcgttcctagatagttaattcctaaaagatcaccaactcgtgccataatcttataaaactgtttctcggtaataggacgatcaggacgagaagttgaaggaaataaccactctgaattcatattttgttggatgagccatgcatgataaagcattaaatcttgttggacaggtttcaaatataacgtatttttcttacctgttttttgatcatgaataaatgcagtttgtttgactgttccatcaagattaaagacatctgttttttttaatttcatgacgtcactcacacgtagcaaggtcgctttcccaacttggaaaattgggttctgttgcaaagttttatttaactgattatttagtgtagaatggaagaaactacacgaggagaataacaatgtcccattttaaaggtaaacaattcaaacaggatatcatcatggtagccgtgggctactacttaagatacaatttgagctatcgtgatgtttcagaaatccttaatgagcgtggaatcaaggtttgtcacacaactgtttatcgatgggtacaagaatatggttcgattatttattgcctatggaagaaaagaaataagtctgctagcgattcttggagaatggatgaaacatatattaaagtaaaaggaaaatggcattatttgtatcgtgccatcgattctacaggtttgacattagatatttggtttcgaaagaatcgggataaacaggcggcctatgctttctttaaacgattaatcaagcaatttggagaacctagagtttttgtaacggacaaagctccttcgctaagcagtgcgttcaatcgacttaaatctgaaggtttattttctaacactgaacatcgaacgagtaaatatttgaataatatcattgaacaagatcataggcctatcaagaaaaggcacaaattatatcagtccataaggactgcctcatccacaatcaaaggaattgaaactatacatgctttatacaaaactagccaaagagacttttctctctttggcttttcagtgattcatgaaataaataatctaatgggtgttccagcttaaaattagaaaatagttgagatatcattttacttctttgaactttgcaacagaaccataaaagataatttatatcactatttttggattcgtcttggttttgctagtgacggccgtgtttagtcaagtatcttaaacttggagaaattgacttatgaatccggttgcaatgtgatagagaaggatgaacacaataaaaaaggatataatagggaggataaaatgaaaaagagaatgtattgtttagtgatgcttcttgcgttcgtgttgttggttagtttatcaaatcaacaagtagcagcatcagaaacgggaaatgatgataaagaaattcaaacattgtatcaaaaagcgattaatgaaaagaaagtagatcctaataagtatacctttgaggcctttcaagaaaattacaacttgggaaaaatggattattatgcgatgaaagatattatcggatcaggactagattataataattggtttggagagattatgaattatggtgcttttccggacggtgaaggccattctccttcagaagctaagtcaaataacatgttgcgtagtcaaacatcaaatggcaataaattagaaaaggcgattaaaaaaggtgatatattgattgttaaaagtagctcctttggacatgcggcaattgctactagtaacaagtatattttagaaatgagtggtggaggaaatccttcgaaatgggcaactacggggattaaaaataataatcaccaattgaataagcataaatggatttttggaggtaaggaacaggattatataaaaaaaccgactatcaattattggatacaactatggcgtgttcctcaatcgagtattgctaataaagccgctagctatgcagacaagacctattggaatagtaaccataaatacgaaaagaataaacatattacctataatttaagatcggggactctaacaagaaaccccaattattgttcaaagatggtatatcaagcatattactatggaacaggtaatgcaaatgttattgaaacagcaacaactggaatgacattcgtttccccagcagctattccaaatacatttactggaaaatatgctcctaaaaaggttggaacatattgaaaaaagaggtgaagatatcttatgaaaaaaatcattattggggtgcttgtcgttatagtactaattatagctgtagttgaaggaaagtactatatcaatatgtactaccaaaagggacaagctaaaaaacctatagaagcttctatcaaggcttcaaaaattcctaaaaaggacatttatgtgataaaggaaaatgagtatgaatctgaatctataggtgatagtgttcaaaaggaaatcactacaaagaaagattacgaaaattggaagcaacttgtgagcaagagaaaaaaatacttagatggaagttcatggcataagaagaaggggtgggataaaatagataaatgtgaaatatcttatctatttgtctatgatactcatactaaaaaagtacgaaagtattatatccttgcaggaaattcagttgatgacaaaaagaataaacaatattttagttatcgtttaaattaattagtaaataaattttttattatgtgttcattcgcaagcttcagtttttggctggagcttttttattatttaataaaatttaaacttgccaaacagaacatttgtttgtataatttagtacataaatagaacatttgttcttgttggaggaggtcatttcaatggcttatcgagatcgaggcatgcaaaagtggcaaggcatgattctatccgagcatacagaacaactagaacaagcaaaaagaaagttatcttggctaccgcagcaaagtgaagaatgcctggtagaaattttaagctacgctgttacaaagcagcatgctataacgatacaacgacttacagaagatgaaaatggttatcccctaccctttgtagtcggtagaatcgttggtgtggaagacgatcgtatttatatgagagatatggccggagagatcactgtgttgacatttgacgatatcaatcatatttcagaagggacaatcgaaaaatggtacaggtagaagattacacccacgtcccctctcgcgatattctttgtgtcgatgtgaagtcgttttttgccagtgtggagtgcgttaaacgtggattagatccactacaggcttttcttgtcgtcatgagtaatgcagatcgcgctggaggattggtgcttgcagcaagtcctcaaatgaaaaaagttttccgaattaagacaggatctagaaaatttgaagtgccagaggacgatcctcgcatcattattgctccacctagaatgcaactatacttaaaagtgaatgagctcatccagaaaatcttccttcgatatgtatccagggaagattttcatgtctattctatcgacgaagcctttttggatgtcacgcacagtaaaaagctttttggatccgctgaagtcatcgcaaaaaagatacaagcagatattttaaaggagttaaagctgtatgtcacggttggtattggagacaatccccttcttgcaaaattagcattggataacgaagccaaacatcaaaaatctggtattgcggaatggcgatataaagatgtaccggaaacagtgtggaagatccgaccgatcactgatttttggggaattggaaaaaggactgcttttcagctggagcgaatggggatctatagcatccatggattgagccagatgctcccctcctacttaaaaagacgtttaggtgtgattggggaacaattgtattatcatgcgcatgggatcgattatagccgtttatcagagaagtataagccaatcgaaaagtcttatggtaaaagccaaatcctcgaaaaagattatcatgatccgaatcagatcgcgatcattatccaagaaatggtggaagaagtagcaatgcgcctgcgtaatcatcacgtcgataccagtgtcattcatttaagctgcggttacagccgatattccactaaaaacggttttagccaccaaaaaaagataatgtccactagcagtagcaaggagcttgtcccctacttccttgaactcttttggaagtatcaggaaaatgatgcggtgcgatcagttgcggttagctgcgcaggcattaaaagaaaaacatcaatgcagctctcagtttttgaagactacacaaaaacgctccagcaagaacagctggagcgaacaattgataaaattagagagcgttatggttttaaggcgcttatgcatgcgaatagcttagtagccggggctacagggttgaaacgtgccacattggttggtggccacaaaggataagccaaagtataatttatttgcatactccccttcttatttaagaatgtcgtatagtgtattgatgttactagaacatgtatgtttttcttatcggttaaagcagagagttttttcctatttagttatctaacaaactaaaaatatccctatatccctatatccctatatctatatatcgctaaacatgttaactataagagttacctgagcaatgttaattatagatatatataaatatccctatatccctatatctatatattactaaaaatgttagctataagagttgattgagcattattaattatcgatatataaaaatatccctatatctatatatagatatagggatatttttactctgtcatagctttgaatttacgacgttgttcaggagccaactcattgttaacataggtatcgattagcaaatcaataatttcgtaatcaaatttagtttttgttatggtttttagagcttgtaattcttctttggtttgcatagaagtttttattgttccagcttgatttttaaacttagcagcggactttgatatagattctgtttgaatgttgcttgacgaggaaggaagatctgaatccgtgtatgattcttgtggtttgaaatttcctggaactcggtttggtttcgaattgattaaacctctgccttttcctttgttatccattaatagcaccttctttttcttcttcaaagtaattaattctatctaaaagttcatctgaaactttatcatacaaatttagtactttttgatcatgacgatctttatctgtaataccgttgacatcaaaccttttaattctctccatttggggaacaacgttttcaaagagattgtcctcaccaaatgtttcttttgcgacttccattacatattgatctactgaaccattattcttatggatcacaggtaaaacgcccacaacctctaaatccaagtcgtattcattatgaagtttatttaattcttctacataactttcagcaccactcaaagatctttcatgagtctgtaatgaaattaaaacataatcagaacatatgactgcatttcttgtgactgctttagacattggaggaacatctattagtacaatatcgtacttaccttgtaaaggggtaaagatattttttaaataatagtcttcttctctttgattgctcgtatttttatatagatatttggggaaatcttcaaaatcaatatacgaaggtaagaggtaaaggttatccataattttcacttcaaggccatcaagatttttttcagagattcctgtcattaatgtcttttctatagttacaacttcatcttgatataaactggattttgttagcaataaacttttggtagcattactttgagggtccaagtctaatacacatacttttaagcctttctttgccaacttatatgcaagtaatacaacgtttgttgttttacctgctcctcctttataatttccaacagttataacagtagcagtatttttttgctgtatcttgctgataattgaattaatattattactcgacatctctattcctccttaaatttctatatatactaatatctaaatatctatattactatataagtatataattaattgtgaaataaagcaagtattacgataatgaatttatatagtttcaaatggcttaaataaaaggatttccaacattttttatagatattactaaatatctaaatatctaaatatctataaatagataaaaaaatagatatatagtaatattaatttatctatatatctaaatatctatatatctatattaagagtaaaaaaagttctttacaaaataaaattttgattgtaaagtaaagtcaaacaaaaaaaaggactcgctcatgaaaaagtactaccaatactttttcatgaatcctctcatctaccaaatgagggataacacgaaacccttcttaatactataattcgattaaaatccttaaaaaaattatagcataagtaggcttatttaacaatgcttttaaccgcattttatctaaggtttttaacgtttcgtggcgatgactttgctccgaaacgtttgttgttttctgacaaactggctaggtggcaaagtttgtccttttttattggcaaattggtgcggataaaaacaggaaaggggagctacttatgcttgtcagtgatgctatttatacatactctgcagtaatcaacacggtggtacatgaaggtttaactgcttatcgtaaaaaaaatagtcgcggtgtgatggccgtgcgtgatcatttcgctgcgatcgaagcagcaagtaccaatcggaagggtgttcagttcgtcgttcgggacaaaagtcatctacaaacgaagtgtggcgtgaaaggctttattgtcactagtcaagaagcgttgatcgcagaagtagatcagattacacattggacaccgaatacataccgagttggcacttactcggaccgaaatcggaaatacataaaaggacacgaagaaaagaacttacaacaaatcaatacgtttgtgatcgatatcgatacgcaaaaagtcgacgtggcaaaaatgatcacggcatcgatgcgtgtcttgaatcaaacacctacgttcatcttgaaaaccgatcacggctttcaaatgtacttcgtactagaaacacctagctttgttagtaatgcgaatcaatttaaatcgttaaaaatcgccaaaagaatttcgcaaaacgtcaaatatgcgtttgcggaagagttgccagctgtcgatattggctgcaatgactttggtttctttcgcgcgccaaatacgcagaatgtagcctttttaaacctagaaagtcaattcgatttccatgaaatgatggaatggtcgaaaagttacagtgatcaaaaacggcgttcggtgctttctttggtaccggaatcttcaactgcagtctttgatgcgaccaaacaagaatggttttccatcatggcgaatctaaaaaatgtacgtggacgcaaaggccaatacggccgaaataacgttgcatttaccctagcgttagcttgttatgcgtccggtaaaagtaagcaagaagcgacagatttgcttgatcagttcaatgacacgctggatgcaccattgcgatttagggaaatcgaaacatgtattcgtaatgcatactcgggaagataccagggcgcaaatgctgaaaaaatcagcgatatcttgcagacgtattggaaatctgaatacgaaatcaagggctacacgccatttatctttgatgaagtaggtaaggttaaacctcaattctttagaaagcacaggaagagtagggaagaacgtacgtattcgcattttagcgaatgggaaaaggacttagaatgttacatcgagtcacagctgttatccggacaaacttttttagaacgttcgcagcgctcggtcgctgaagcattaaaaatgccttatgcgacgctaaaaaaaatactgaagcaatcggatcgtattattagcagagtgaacgggaaggggagagctgcccaaacccttttttctacagtggccatcgttgtggagcaagcgatacgacacgccttgacaaagaaagtggcagaaaaagaagcctacctggaatttttagcgagttttacggacgcagcgaagcacattcttgtgacgttgcaaacaaaaggtgtccccgcatccggttttaatatacaccctgttgtccagggggatagaagtgtccagctgtccttgaatctcctcgacaagctctatcagcagcgtcccaacaacgataattgccaaagcaggtatggttaaattaaatgggctcaattgccaattacttatttctagttactgttggctgttgttttgactattgactagtactctattaatctaacgttgtgtggctttttccttactactggaggatttaagattaatataagttattaaattagaggtgtatatttttttaaaaaatagaatatggagatactcaacggagtaataaaaaatccttataatcaatgctatacgctaattacaggttattttatctggttctgttgcaaagttttatttaactgattatttagtgtagaatggaagaaactacacgaggagaataacaatgtcccattttaaaggtaaacaattcaaacaggatatcatcatggtagccgtgggctactacttaagatacaatttgagctatcgtgatgtttcagaaatccttaatgagcgtggaatcaaggtttgtcacacaactgtttatcgatgggtacaagaatatggttcgattatttattgcctatggaagaaaagaaataagtctgctagcgattcttggagaatggatgaaacatatattaaagtaaaaggaaaatggcattatttgtatcgtgccatcgattctacaggtttgacattagatatttggttgcgaaagaatcgggataaacaggcggcctatgctttctttaaacgattaatcaagcaatttggagaacctagagtttttgtaacggacaaagctccttcgctaagcagtgcgttcaatcgacttaaatctgaaggtttattttctaacactgaacatcgaacgagtaaatatttgaataatatcattgaacaagatcataggcctatcaagaaaaggcacaaattatatcagtccataaggactgcctcatccacaatcaaaggaattgaaactatacatgctttatacaaaactagccaaagagacttttctctctttggcttttcagtgattcatgaaataaataatctaatgggtgttccagcttaaaattagaaaatagttgagatatcattttacttctttgaactttgcaacagaaccagaaaatcaacaactcaaaaaatggattttagagatttatagccaagccaaaaagcgctttggcgctgctaagattcaagttgttttaaagcgtgattatggcgtatccattagtttaggtcgggtttatcgcctacttcgtcaacttcaattgcctaaaatgtccaccgtaaaaccaagctatcaaaagagaaaagtggatgaagcacctcatgactcttgtcctaatcatttaaagcaagcgtttaatccacctgcacctaatcaggtttggacaaccgatttttcttacatccctgtaggaaaaaaaggctttgtttatttatgcattgtcatgaacttattctcacgaaaaatcattgcctggcaagtcgcccataagatcaatacagatttagctcttcaaacactggaagttgcctataaacaacggcgaccgtctcaaactgtcatgattcacagtgaccgagggtcacaatatacagccaaagcgtatcgcagatggttagacgagcatgatctgctcgcctcttattccaaaaaggcttatccttgggataacgctgtcaccgaagccttctttaagtatatgaaaaaagaagaactagatcggcgagctttttcttccattcaagatgtgcaattagcttgttttgaatatattgaaagcttttataatcggcaccgtcctcactcgactattaacatgctaactcctgaagaaaaagaaaattttttatttcagcaatcagtaaatgattcttttttgtgtctactttattgacattgatccaattcatagtacaattacctcctatcattttccaccactactttcattattatactttcttcgataaagttcaataaatattatgttataatataaaggcagtagcaaagtgagaaagatggtggctaaatcctcattagggggtgatgcctatgcttgaatgtatagttttactcctggaaaggagctagacttgtctgtgtttgaagcacttacgctgatgatcgcttttgcgacattagtcgtgctgatactaggctttgagcaaaaaaaataaccatctaactcgcttttgaccgggtgtgttagagggttacttcttaatatatctatggttaccgtctttttaacggtgctactgctggagagctatgttgaagcatagctctcttttcattgttagtataccacaatagccattttaaaaacaatattttcttctttcgttatttaaaggcaagaccataggatactttcctcacggcgttccagccaccaccgctctgttcggaaagaaaacactaggaaaataatcacgctatgatgcgttttattatattttatttgtatattcattataactagaagtttcactcacaagccccataggccgaactgtatcaacaatctcatacaactgcgaaaattggttagctgaatacttcacaaaacgacctgtaatttctttcactacatattcccctggaaaaagcgtaattgtaccatatcgggtgtttataaggagtcgattccccttggctaagcgtttcatctcattttcttcacaaaaataggcgactgcttcctggttaaatccatcataaaaaataacttgatccgtcgcctttttcttgcagcctaattgctcttcagcgtgataaaccgtttcgccaacctttccaaactcactctggacaatgatttgctctaagtgatggtaagcgccatggtgccagaaatacacatgtttccagtcttctctttcaattcgatcataagacttcatcacaatatcatccaatgtcaaaagcaaattcagatctgcttcttgaaaaactttataaatgaatattcgatcgtcaattgttcttaccttaagtattaatgggaccacggcatatagacctttcttaaacagccagcgcttaaagaaaaagtctgggatatcataccttcgctgtatctcctctacagaccaacccattctcgtcaactcatcaaacatccgtttactaaacatcttttgccaatgtaagattcgttctaaattagtcgcatttaacggatacttgatataatgccattttaagagatctttcgcatgtctcttttcttctgcccgtatctcatcctttttttgaagcagctcctgttccaacctccggatcagtatcgaacacgtttcaatttgtcgacatatctcgcaagttatcagcgtcccttctttatgatcttcgtgttctttttcgtgcgtctcatacaattcggccaataagaaaatagcagattgcttatcatataagatatcttctactgtcctcatgcttctctactccttattatcgacttgttcatcttccagaacttctagaataaacaattcgttcatgtcccgaatatgtaaagattgacagattcgttctaaatgagtaatttggacacgttgtcgacgatcattggcatacgcactaattttggacggctcaatatcggttcgcctagaaagttctcccattgtcagcttatatttttcacaaatgcctttgatattgattctgatacgcacatctggttcctcatataaccgcaaattattctaccccatctccttgatcttatctcctattttatagaaaacttgccgatacaggtttaccgatatagacatgcctatatcggctatagatgggatacccatgttaaaaacgatattttttaggtctattattttcttttactttctgtgtttgtttcctgtcttgtagcggaacttgtttggtccattctttttccaaataaccgacaaagtttatcaaagtagagttctgatacttcggaagatcgagcacgatcccttttttgtaggcattcataaaatctgaaatatatctcgatgtccgggtataaataggcctaattttatttttcacttcccgatactggtcattagagatgaaagctgtctgaatatgtgtactatctttgacaatgagtgtatgactataatctagtccagctttaggtcgatctttagacggtgtcgctacaccatttcgatgattcaaatgacttctgaaaggaattaagtaatgatagtggtccttttgaatatctagatataaataagtacgccgcatttgtttttctggatttcctggatcaagcatattaatgaaatggggattagactgaaaaaattcttttttcaaccgtactacttgatacttgtatggtttatcgttcattccttgcagcaccctcttatccataaaaaaagacccgtctatttttagacgagtctttttctataagtttgtaggttttttatttttttatgagaagatcaccaataaaacttctcgaatacgattggttttttattttttctgtgaagatcaccaataaaacttccctaatttcctttattgtacatcatgcaaacgattttctcaagtatctgcagctaggaaagctattgtgccattttggtttgataaacgtttttcgctgtaacaaccagccatcgtacgacaaatataagtgttgcgacaagtaaaatacttaccacgattttgcccacaaataaaaagagaggaatcacaatagcaagtacgaaggcactcataagtaatatatgccaggtaaagtagaggataataaggattgttaccacaatcgcgatcgcataaataaactttgtaccattggaactcgcttgaaattgatcgcctaaaaaatgaaggaacgctaaacatccctttcctaaaagggctagaataatcatccctaattgcataatcccttccactatccaatcgacaaaatgaaataaaccttgaactacttgcatccctatctcctcctttttttaaagagccatatcgagtgctagcattgcttccttttgtaccatatcgaagtcatgttctaaaatatggatggttttttcccgtccaatggagtatctttgctgtcttaccattccagtatcttcatcgctgcagatgatcatatatatttcatcattaatgatcatttcaagctccgctaggtacgcttgcaccatttctatagataacgcttgatccagactcataaaggttagataatcatccgaatctcctgccacatcttgctctagtactagtatatcacgatttctttgcgataatgtaactattttatagcgtttgatctcttttttgtccgttgtttgtgaaggttggatagatgtcaataaagtagacagaaaaaaggaatattttatgaagaatcaattagaaaagcaagttcttttaaattaggtgataagaagttgtttgcagaatgtggtctttttgaattatagaatccttcaatatactcaaaacaagctaattttacttcttccaaagaggaaaaatttcgacgattaagttcttctttcttcatgtatttaaagaaagattctgtgacggcattatcccacgggtaagcaagtttagaataggaagggataaggttgtatttttcttggacctgccgtaattcttgagacaaatattgggaaccacgatcagagtgaagaataaccgactgcacaggatttctagaatgaacggctcgctctaccgtatcacaaactaattttgcagtcatagaggcatagacattccaagcaatcacttttcgagagaagatgtcaagaattacacaaagataaacaaatcctttttttacaggaatatacgaaatgtcgctgacccaaatacgattgggttgcttggaatgaaattgctgtttcaacagatttggacaagtagaagaaaccgtcggtttttgataacggaatcttggttttacggtagacattttaggaagatccatggttttcattagtcgatacactcttccgatactaatggaaataccataatcacgctgtaaaactatttttatcttggctgcgccgagtctaaactttgtctcggtataaatttgtaaaataatccgtttgatttgttggttttccacggaacgagccgaagggattttggataaaaatttgtaataggtactgcggttcactcgcaatacttggcagattcttacaatagaatgatcggtagctaacagagaaatagcctttaatcgttgctcgagtgtggcgtgaagatggcaatcgctttttttaagattaaattttcttcttctagcaaggctttctgtttttgaagttcgcgaacttgtttgacagttagcagttcgccagattccatttggacttcggaataaagtttaatccatctagaaagagcggtttgagagacaccatattctttgcataaagcagcttgtgttttacctccgttgtataaatttactagactctttttaaaatcttcatcatattttttgtaattagacataagctgtagttcctttcgttttagtgtctactttataaacagtataccattaaaaaaactgtctactttattagtatatatccaactgtagaagttgatgttcatttaacagatggaacgataggaagggcagctgttccttccggtgcttcaactggagatcgagaggcagtggaacttagggatgggggcgatcgtttacagggattaggcgtgaaaaccgcagttcagaatgtaaatttgacattaaatgatgccttagtagggataagtccatttaaccaaagagaaattgatcataaaatgattgaattagacggaacagcgaataaaagcaggctaggagctaatgctatcttaggtgtttcaatggctgtagctcgtgctgcagcaaagtctgaagcagtccccctatatcgctatctgggtggaatcgatttagaacttcctcgtccattttttaatgtcattaatggcggaaagcacgcagattcaggtatagatgtacaagaatttttaatcacacccattgcagcgctctcttttcgagaaggcttagaatccattgcggatgtttaccatacattgaaaaagcttttatcaaaaagaggattggcgacctctgtaggtgatgagggaggatttgccccacgactcgcttctacagaagaagctcttgaagtattggtagaggccataaaaaaagctggatataagcctggagaagatatcgcgattgcgatggatccggcagcaagtgaatttagtgaaaataacacttattactttgaggggaaacaactatcatctgaagaaatgatccactactacgagcatctcgtacaagagtttccgattatttcgattgaagatggattgtctgaacatgattgggagggctttaaattaatgacggagaaattaggaaataaagtccaattggttggggatgacatttttgttacaaatccaattatttttcagcaaggaatagataaagggattggaaatgcgatcctcataaagctaaatcaaatcgggacagtaacagaaaccattgatacgataaatttagctagaaaaaacaattatgcaacgatgatctcccaccgttcaggggagactggggacacctttatcgcggactttgcagttgctatgcatgcagggcaaattaaaacgggttcaattgcacggtcagaacgtgtagagaaatacaatcaatttttacggattgaagaagaacttgcaaaaataaagtaaatttgttagggtttaaagggaatatagttaaatgaaaaatcaaatagtgacgatcggttgagcctatgcttcaagttctgttttctggggggagaaaacgttctttacgcataggcttttttcgttttaaggaaggaatgaagggtatggaaaaaatttatttagcgattgctcttgtattaggtgtgtcgcaaatttttggggtattggcaagtcgaatgggcttacctaaaatagttggggagttattagtaggtgtagtattaggtcctagtttgttaaacatcgttcaacccggggagtttttacatatcttttccgagataggtgtattgttactgatgtttattgccggtatggaaacggattttaaaaaattgaaggccaatttaaagccgagcattattgttgctttatttggtgttataattccattggttgcttttttactatttggaaaatatcttcatatggagactatggagtcattttttgtcggaattattttctcggcaacttcagttagtattactgtaaaaatattcatggatagcgatatacttcaaacaaaagtggcagccattgttttaggcgcagcggttattgatgatattttggcggtcttgttgataagcgcttataaatcagtagatcagttagcgactgcaaatatcttttttatgttatgggatttgcttctttctaaaatacttttctttatcatgctttatttattctataaatttgcattaccatggataaaacgatacacggagaaatggacgtggtcctttttaccagttactatcacactaattatctgcttcttttggggatactttgcagaattaatgggattaagtgctgttttgggttcattcttttttggattaatgttggcaatctctggaaccaagcagcgcgtagagaaagaaatcgatctgattgccaattccattttcattccactatttttaacttccatcggagcagcgatcacattaagtgatatttggggaaatgtaggtccgatagcacttggtacattgctggcgattattacaaaactcggaagttgttatattgctgctagagcaagtaagttaagtcgtccggattcatttttgattggtagtggtatgatgtctagaggggaaatggcgttagtcacacttaatattgggatatcgctacatttcataggtgaagactattactctatattcgttgcgatcattgtgatgacgactattttgtcgcccttgtttattaagcttgctttgccaaagagttctcattaaggagtatttgagggatatggaaaaattatcaaaggaaattatgttgcaagtgttactaacttgcgaaagtgaaaatgcaacgacttgggaacttagtaaaatgattattgacgttgaaggcgccaatcgcttcacgaaatcagagttgttaaaagcggtttatacacttgaatatctaggatatgtaaaaagaataaagtatgggagcagtgtacgatatacgaaaaccaatgaaggagtaaggtttttggatgaattaaagacacagataaaagataatcataatgaagatgcaaatatcaaacaataagactatagtgtcaagggccatattaaaatgttggttttaggccactgaaaatgtaggtgaaagtcgtttaaacgtttttacgatttcacctctttgttttcgctataactcttcattctataagagggccccgtaatttggatcaatttagagtgatggaccaaccggtccagtagcgcgttggtaagcttcttgtttccaaatatttcggaccactgggatagtgggatattggttgtaacaatcgtagattttctttcataccgcatattaatcagctgaaaaagtaagttggaaccttctttggagaaaggtaaatagccgacttcgtcgataatcaacaccgaataacccgaatatttttttagcatcgtttcgctagttccgcgcttgtgagcgcggatcaaacgattcactaattcagtgctcgtaatgaacaaacaacttaaaccacgatcgatacattctaatccaattgaaacggctaaatgggtctttccaacaccactatttccaataaagagaatattgtcatatgtgtctaaaaagcgtaatgttaataaatcctgcatttccttctttttttatccttggttgaaaatcaaaattgaaatcatggagtcgtttgtggtaggggaacattgcacgctttaatacctttttttgactttcttttttacgataactaatttcttgttgggtgagcttgttgggtgagctcgaataaagagtctacaagcgatttatcacttttggcaacctcatctaaatgggcagctagattttctttcatgcaagataaattcaattcgtttagttgatttaacaattgatggtaatgggacatcatttcctccttatagatcgtcatatgcatgtaaattatcatcgacaaatcgctctaattcttcatcttctaaatatttaaatacatcggaacgcaaaatttcaagcgagtcttcgcgttgataattaagcgctttttcacttataggatgggttcgaatacatttatccccataccaaacaaatagattgtccctacgaatatctaacgtcacttctttcccaatatatttaacaggaacagaatatttagcattttgatattgaaccatggactccatcgatacctttctcagtagacgtttatttctagaaacatagctgagcaattctaaacgatggatgggagctagtatgggaagctcttcctttagtaaaaccgtcggtttgttgtggatggcttgtgagacggagccattcagatcttgcatcaattcatatatgatctgttttaactcttgtacatctgtaaattcataattaaagaccattaaacgctcaactgttcgggctaatgcttccactttcccttttgtttggggtctaaaaggacgacaagcaatcggatggaatccagcatctttcgcaaattgccggaatttttcattgaaaacagtttgtgtgaattgactcttactacggtcgacaacggttttcatattgtcaaaccaaatttcttgaggaataccgtttccgcaatattcaaaggcattgactaaacactgaaaaaccgtcggttgtgttcgatcaaaagtgagctctaagtacttcattcttgagtaaccaagaatatagagaaaaatattgaaataaaacacttcaccgtctcggctaaccattttaacgttttctttccaatctacttgagcagaaagaccgggtgtggtctcaatgcgaatcgttgctttttgtactttttcttcccggtatttacgacaataacgtttaatcgttgtataactccctttataatcttttttacctaagaaataaaagatagaagctgccgaacaatttaattctaatttatcacgaataatttcttcaaaaccatgaagcaaaggagggaccgaaggttttctctctctaagcttatctaaatcccccgtcaatccagcttcataatagcgtttaaccgttcgataatcacaattatattgtttggcaagggctgcgaaattaggatgaatttcattcataatgtgtagtaacactccttctaagacatcttttctcatgattcactctccttggatagtttcatgaaaaagaatatcagatttgtcatgtacctacattttcgatggcccttttcctacattttaatatggccctttacagcttactgcccatttatctaattcgaccaaccaatcttggttcgcttttggcacacattcaatgaccttttgtccaccatacatgccagatagcttcaattcccctaagactttttctggatgattgtaaaaatacgtgttaattcttccttgactatcttgaaatcctgttgtttgcacccattctggaatatcttccaccacaaatcgttctttttctagcttttgaagaagcaggatatcagtggttgcttttgtcccacccaatccggaaaatgctgtatttggtaaccttaccgcacttattaaatcagctcgttgcgctaaataatggcgcgctcgactatctttcttatccattgttcctttgctagtaacaaaaagaatatatcctcctggcttgacgagatctaaacttttctcaaagaaataatcatggatcaatttatgcggatatcgtttggatttatcggtcacattaaagtcattaaaaggaatattcccaatcgcaatatcaaaggtattagattggctattcatttcttcaaagccttttaattgaatagctgctttcgggtataatttttttgctattctaccggataacttatcaatttccacaccagttaaagaagcagtttgataggccttaggcaaccgaccaaagaagtgacctatccccatcgatggttccaaaattttttcgggttctacatttaggccttgaagaacttggtacatgcgatcgattaaagcaggttctgtatagtaggtcgttaaagttccttcaaatgctgcttgatattcttcaggtgttagtaactccttcagttcgagatattctttttgaaacgctagcttgttttcatcaaaagcatccgcaagaccaccccaccctgagtattgcgctaatatattgcgttcttcgctattagcgaaccgattctccgtttctaatcgatgcagcaagcgaatggctgcaatattcgcttgaaatttagcttttggaccacttggaaaggtgaatgtatccgcaaagcgaaagttctctaccgattcttcctcattatcttctaaataagaaatttctggatcttccatgtagtttgtttcttctgcaaataaatcgacttgttctcctcgctcactgacaggcataaaaaaagaacctgatcgctcagattcttttacttcttctactatagttggttcagaatgatctcctctgcttgcatccgaagcgatttcagacgcttcgctctcgctaatggttccatctcggtcggtaagctttctttcgtcacgagtttctcgtaatactggttgatcttgtcttgcacttgaatttccattcgtttcacttcctgaagataatttccgtttaacttccatttcatcacttgaagcgatttttctttctcccatttcaattggatcagcttcccgatctttccaatcggcatcatttcttctgacgtttctatctctggaagcaggttgccattctcttcgcgataactcatcttcaaatttgattctgtcatggtaaagcaccctctcttttttcagttcattatttaaaatgcgttccacatcttgtaaaaattcctttgcggttaaattggcaaaatgttgtatctccagtaacgtattatctcttttcccaatctgtaaaacgctctgtacatctagtagtaaatcctctggtattagtgtatttgttcgttgatagatgatatacgctgcaaccacttcaatatcttttacaaaaaacggatgaatctgatcacctattggtttttgataggaagctatttttgcgtgaatgccatcttcccaattgacaagcgtaccactctgtttttcatatgtgttccaatatcgaagtaaatcatttttgtcattatcaagtaactgccaatcaaatacctgaaggggttctccgcctgtttcggatatatcaaagacatactttctttgttgtgtcgtgtaatcaaatagaagcgctgcagtagatccgcgtttcacaaaccgaccaagctttttccaaatatcaaatgtcgctaccatgtggacatcttgtttttgtgcatataaaagcagctgttcatcaaagctatatttatgcaccctgctggcgaaattcaaaaattcgatgtaacggttctcattgctcgtaatttccttcatcgttccttcgtaaagtgtggtaagtgaaggtctttttttcttttttctagtttcttcgttcatgtcttatgctccttcttgctgactccttcttgctctcatccattttgaaatgctcgttttgcctttataaatgataataaaaacaatcgtaagtagaaaggtagctacaacgattgtcaaaaaggctttgacaaaaaaagccattaaagggaccaaaaacagcgtagctactgcgacaataataaaatagcgaatgataaatacgacaatcatacaagctaatatagtcataaccgtccaccatgcccatttcatctgaccgcttgcttgatacgcatgatataaagcagtaaatacgttttcaatcacaagtaaaatgcttgtaacaatgatactaactaattctccaaagaagtaagcgatccgatcacatatatctaaaaatccttgtatgatagacatttgtcttcactccttttcctataaaaaggaaattatatttcttaaactcataatatacttatttgatttcattttcaagtgataattacattcttttttatagaataaggaaatatcttttctttttagaaatttttgttatacttaaaacgttaaataaaggagggatcaccatgactattcaacaccaatttgctgaaaatctttcgagattaaaaaaagaacatggtctcaaaaatcatcaaattgctgaattattaaacgttcaaacacgaaccgtcgcttactacatgagtggtgaaacaaaaccagatattgaaaagctgatccgtcttgccacttacttccatctatcgatagatgaattagtcggttatgttcaggaagacaaagtatggaacgatttgtccctaaagcaatggttactatccctaaatttgagaagcgaagaagaaatcgcgaaaattaaaatattggttgataccgttgaaactttgtatccaaattaaaaaagaaccccccccgataccagggaggttctttttcttatctttctagatcctctatacttttttctacctctcctaattgcaaggctttattctccttagctgcttgatttttagctgcaagattttgtatctgtgcttccgtcacaccataagcctccattttttcttttgtaagcacgataccttcactgaagtagtccaactcgaagttatttttacacacaacttgaatttgtttatcagtaaggacttgatttttcgctttcaatattttttctgtctctggaactacaatcaaaactcccacaccttcagccgcaacttccattacttcacttcgtcttatacgtgcaagttctggcatatcgatgttattaaaataattcgtaattacattgtgatcatctccccttactccctcataggtggaactcgtcatttgaccatttggccataaatgcatcgcttcttttatatcatttgtataatgttgggaagtgtcttctacatattgatccaatgcttcttggttaaataatggatgtttttcttcttcatatttcattgtatttaccactccttttataatttggcacaaaaaaaagaacttcctttttaggaagttcctagctatctaattatttttgaaaaaaactcctcactgacgtaaggaaccttttatcgttctaaatcatccttttgcttttttggcaactggatttgttctttttccgtagatctaaactgatctacccgttctttttcttgagccagcttttgttttgcaaatgtatggaagcccgaaacatcttgattggctagatacgtcatgtagaccgccttttcttctgacttgataatcaatggtggaaaatcattttccatcaataggtaattcatgaccatccgtccagttcgcccgtttccgtcgctgaatgggtggatacgttcaaaggcaatgtgactctccaaaatagtttctagcttatcgtctttcgaaggttctttctccaaactttcttcatgcgttcctaaacggtaattgacattatctacccattgttgcacgagtaagggggtctcttgtggactcgccgtctggaaatctgcaccaagtatcgcattggcactcgctttgaactcgccatgatcatactgcagtcgatccgttaaatacgcatggatctgtttgattgttggaacactgatcggtcgtaatgcttctatctcttccatcacataagcaaaggcttgttcatgatttttcacttcataaatttcccgaagatcgtaactttctttccccgtcactttattatgcaagataatagataccgtgtcggcgagcgatatcgtattcccttcaatcgcactggaatggtgggctaaacgtaccaatacatcttgtaaatattcgttaggaaaccgttggtttgtatgcattcttctcacctccttttcattatagcgtaatcccaagcgttgtacatgattttaggctgcttttatcctctggatgcagcacgcctatccgaaccatcccttttattttcactggaataatcaaccgaatgtccacaaaggttggtttgaaaagcccttcttcgatccacctccttaaagggattcccttaggctttgttgtcattttatgacaccaagcaatttctttttctttatcaatctttaaaactactaccggtctaactttcctgttcgtctcttcctgatacatcaccgtggtcacacaaatgtcgtccggttgaattaagcacgttctccgctttgagcgtgctttcttgttcgctttatattttttttgcatccaatatctcctactctctgtccattgatttttctctttccatttcctgctctagttgttcaaatgcgcgatcatttttccattttttgtacgaattatctaattcataatccatctttttcaactgatagatcaccgacccccgtcgccggcgataacgggcaattttatcttttggagttaaagacccttccttttttaaatttccctgctgatctaaataatgatgatctgatttggaatgattgaaacgcttatcataatttttaacttcttgtagcacttgatttcctagctgcttgtataatttttcatccttactttctaagtaagtgtgaatattaaattctgtttttttaccataggcttcttgttgtaagttaccttcatgttcccacgctttacgaaatacttgcatctcttctggatgatgctgcattaaataattcgttgtgatctgatctacaactttttttgctggatgtttgtttaaatttccataattccactgaccagaatgttttttatacatttgatgtagctcaagaaataaggcctcattttcatgtgatcgaatcacttccttcgacgcatgaagtggtgtaagaagttgttcttttgcataatcatcgatccgttggtaaatgcttcctcgctgtgctatttcactataaacggtactacgtacggctcttctagttgctggtgccatacgtccatctcttactggcttcccgtccgttcctttttccaactccggccgtcttttattggaataaaatttacgtgttggggttggttcagtaaccgagatatgcacatgaaaatgttttgtgtttttatggatcgctgctaaccaaatcgcactgccttccatgccttctttccgcaaaaaacttttcatcgacgcactagttacttgttgcaatcttttttcgtcaagcattcctatcttcggatcataaataccttgtttagccaaccactcgttatcaaaactgataacatgctggaacataacgctgttatttttttctgcagtttggaacgcatctttatattttttcttttcagcttgtgtcaacttcggttttccttctgtaaataaaccagatgtttttttcggatttcccatataatcgatatattttttattccgttctttttcctcttccgtacgctcttcttcattaccaatcatgctaaattctttgtaatgctcgtttcgaacggcttcatcacgatcaatatatttgatatagtttgaccagtatttcttcgacttatttaatggactgtttgggacaataaatttcgtcgctaaaacaataccggcggtaatcttactcatggatcggctccggtactactggaacattttgtttttttctgctcgcttctttcttttgatcacgcatgattttaaatcgacgttgcacttcttcttctgctttccctgtaataaaatgtttatctttttcgattgggaagaaagcttcttctggttcgtgattgaataagaagtagttgtttaacatttctttgacaacttgtgtgcctttctcagcattattcacacctaatcgaattcgatcaaataatttttttgaatctgcatattgatctctcatcacttcaaagattgcttgttccctctctttttccgaaaacatatggatgataaaattaattgtttcagaatcagatctaagtccatatcttttttttgctttcatcataatttctttcgattcactcttcatatcaaattcttttctagccatgttatatcctcctattcacgaatttcagttaatagttgttgtacattttttgttaactcaaagactcccatagacattttttggaaagcctcttcttgttttccaataagatgattggtttcttccaatgcggcgatgcttgtcaaatactgacgcaaaaaactttcgcgagacatctttttttcacgagccatttgatccaattgcttcacgacagctgcatccagatcacgaatttttatttctgccaaataattccattcccttcgtttaaagaccgcacgatctcgcttacagcgaattcgtacttggtcgaacccgggttccccggtttcttttttattttaaaatcaagtgcaatgattcttttaaacaatgaataatctattgagattatccactgtctaaaaagagttatccaaatttacgaagtaaatggataagagcataatacgtttttgcccccaaaataggtttggggcttgtcagagacaaggaaaacggtggggtcactttttttcgtcgttacggtggtttatccgtatatcgaacttcctagaagccggtggatccaccgtatatctttctacctgttcctggtggttctaccgtaggtcgaacggaacgatctcgggttctgttgcaaagttttaaatctactatcaaataaggtagaataatagaaaaagatagcaggaggaatgacgatgaatcattttaaaggaaagcaatttcagcaggatgtgattattgtagccgtgggctactatcttcgttataaccttagctatcgtgaagttcaagaaatcttatatgatcgtggcattaacgtttctcatacgacgatttatcgttgggtgcaagaatatggcaaactactctatcaaatttggaaaaagaaaaataaaaaatccttttattcatggaaaatggatgaaacgtacatcaaaattaaaggaaaatggcattatttgtatcgagccatcgatgcagatggtttaaccttggatatttggttacgtaaaaaacgggatacacaagcagcctatgcttttcttaagcggttagtgaagcagtttgatgaaccgaaggttgtagtcacagataaagccccctctattacaagtgcctttaagaaactaaaagaatacggcttttatcaagggacagaacatcgtaccattaaatacctgaataatttgattgaacaagaccatcgtccagtaaagagacgcaataaattctatcgaagtttacgcactgcctcacccacgattaaaggcatggaagccatccgaggattatataagaaaacccgaaaagatggcactctcttcgggttttcggtctgtactgaaatcaaggtattattgggaatcccagcttaaatcatagataccgtaagggattttattctttatttaaaactttgcaacagaaccgattgtcaactcttaaattcctttcgctttgctccagtcatacatttaaagttgacaatcacaaaaattttacctctataaaaaaacatcaaaacagtttaatttgttcaaaatcaggttccttattaacacttttattcaaaaataacggttcgcttttcaaaagctcaatttcttctaaagatttaatgacataaaattctttagtaattgttaaatacactaacactcttttattcaactttactaaattatatatattattaagagttcctttacttttaccattccaaatcataaatccataatctgcagattttaccattgctaaatcttttgctgcataaaaatcaaaacctttcactgttggatccacttcaacattattaacttcccattctccaacattatttctcgcttttccatttgaagcaaatactgtaacagaagtatattgatgctcaaaacaaaactgttgcacctgcttatcaacaccatttgcatccccaacaattatattgaaattctgattaataatattctcaatacgcttcttaacattaccattcaaagctttaatagctcttggaccggcaataaatattttcatcttaaatttcaacctcacttattcttagttttagtcatacataaaacatatatattttttatatttttatcgtttcttaaaacatttacacattcagtcaatgtctgaccagattgatataaatcatcgaccaacaaaacattagcttcaacaagaaacattttctttctttcaattgtacctaccaactttttcttatcttctaatgttaaatttttcgattgattactactatttttattcaaaaccccacaacaaatatctttattaataatttctgatactttttcacatataacatcgacaggctgaaaatctctttgtgttgaagaaggtacaggaataatgtaatctaccttattttctaaatcaatttctttcaaaagtggttcaataatttcaccaatatcagtaattttatctcttttttgttgatactttaattcatataaacattgtcctaattcacttctagtagtgtcaaaaatcaaattcccatactcattctcacctaaacatgtacttgataatacatgatgatctaaagcatacccttcatcccaattaccagtaagatttataactcccataataaaaaccccatttcatatataataatttttcaaattccagttccactgtgccacaatcgaataggctttttcttctgtatccgaatcttcatcaactcgcactaaatcgccatcttctatatcgtctaaattcaactctttatgaacttgttttaacaaaccaccatacgcaatcattcgtttacgaaataaacctttttccaagtctttcacaacttccaaatcattcactacatttcctgttaaataatcggaatcttttacggaatatttcgcagtttcttgtactgctgcttgaatcgctgtgtactcactttttttatttcgctttttgttttttacagcttcaatatgaacaactggtgtgtaatctaatttcattgctttttgccaaagttttgtccaatcttcttgtgataaatagttatcatcattcttaaaataagttgattctacacataataaaacgtgcatatgttgattatatgaaccatctttttcattcactgttatttccgttgaacgcataaacccaatcatattttttgctacctttttgtacttcatcaaacgattaaaaccaatcgccatttctttcaaacttttatctaattgatcaccatcaaaaacgttctttacagaaagtgttaaaaagagccatcttgccctcggtttttgtcgaataacttcttctacaattttcgttgtttgtacacttcgtttcatcgttttcctccagttacacattggacataacggtgatttacagaaccatgtttttgctaacttcatacgtccttcttgtgtcacatcaaattctaaaatttcgccacattgcgatactcgttctgctttcttaaatttcaaaatttgcagtagctcaaaataattcacattcgctgtttttttctcacgccaaggttgcacttttccgttcgcttttttatcgcaaagtattgtcttttcatctgaaatcatgctattatgaacacacataaaactataaaatctcctttttgattccacgtgaattaaaaaagggtacaaaaatcccctacgtgttattttgttttctcgacaattacattctaacacattgggatttttttgtatatttttctttcaaccatcaaaatagacttgagcccagtcataccaaggatttgagcctatttcagaaaatcttgttatttctatatgtatccagtcataccaaggatttgagcctatttcagaaaatcttgttatttctatatgtatcaagggacagaacatcgtaccattaaatacctgaataatttgattgaacaagaccatcgtccagtaaagagacgcaataaattctatcgaagtttacgcactgcctcacccacgattaaaggcatggaagccatccgaggattatataagaaaacccgaaaagatggcactctcttcgggttttcggtctgtactgaaatcaaggtattattgggaatcccagcttaaatcatagataccgtaagggattttattctttatttaaaactttgcaacagaaccatgaagagttatagcgaaaacaaagaggtgaaatcgtaaaaacgtttaaacgattttcacctacattttcagtggcctaaaaccaacattttaatatggcccttgacatcttcatcagcgtaagttagatttgttgaaagagcagaaaaaaggatttctacaaaaaatgtttgtttgatattttgaatagaaaagagagataaagtgaagtttttaaattttttgaactataaatatttaaactgggtattatatggtattacattattttttattgtttattacttttttaccgatgatgatatttttttaattttagcaatactttttctcgtttcatctaattttagtgataacttaattgaagttcttacagaaccagaaattcggtctatgacggatgaagaacaacagattattaaagctatgattttggaaaataagaaagacgtagtagttatcaaaaagattagagagtatacaaatttagatgttttacaagccaaaaaagtatatgaaaaaataaaaagggtctataattagataataacccctatacaacgctattaaaacaatccccgttatctattggacaggtaataggggttgtttttatgtttttttatataatagaaccaaagatggagggattatttgggatggtaggcatgcttttacgctacgataacgcctgttttaacgattatgccgataactgaatgaaataaaagctaaaagctcctagaaacgattttaagcactttacagacgttttgaataatttctaagtaaaaatccccgcctggttagtcaaaatcgcttaaaacgcaaaatatgacgttctagaactattcaaaacaaaaaaaggaaaatggcattatttgtatcgagccatcgatgcagatggtttaaccttggatatttggttacgtaaaaaacgggatacacaagcagccta

SEQ ID NO: 12 - DNA, 201 bp, Listeria innocua
acaggaacgtgtttacgtccatcatatactgcgattgtttgtccaacaaaagttgggaaaatcgtggagcgacgagaccaagttttaattacttgtttcttttcgctttctgctgctgcttccactttcttcatcaagtggtcatcaacaaaaggtccttttttcaaactacgacccatgacggaacctcccttcgcatag

SEQ ID NO: 13 - DNA, 201 bp, Listeria innocua
ttgtgttcgtctatgattgcttggattttcttgcgtttcgctgctgaaaccgaggggctgttattaatcactcgtgagacagttgaaacggaaacgccactaagtttcgcaatttcttgtatagttatttttttcattaggaatattcacctcgtaagcgtttttagctattttaagtgtagcttatttggatctaaataa

SEQ ID NO: 14 - DNA, 201 bp, Listeria innocua
atcgctggctcagttacaccaaagataccggaaataaatgctggaatactaagagatttgatttttttgtttctagttttgaagaatactgctaatactgcaccgatttgggcaaaagaagcaccgaacatcattgcaagtactggatctgatccaagcgttgttaagttgttgattgccactggaataagaccccagtga

SEQ ID NO: 15 - DNA, 201 bp, Listeria innocua
agaagaatgagatcatttgatgtttctacttatttcaaatcttttgtggatgatgataaggaagcgttggaattgttgaatgaatacatcatcagaaataataaaagaccagtttccgtgcagtttcaagtagtacattatcctgaggcaaatcgtgatagagtttatatctttgctgaatttgaattggagggacgatag

SEQ ID NO: 16 - DNA, 201 bp, Listeria innocua
cgcatacgttgcaagattgaactcatggagctaagagctgaatccgctgtttgtaacaagtcaatacccatggatgagtttttgcttgctgcatctaagcctgtagatttaacgttcatacgagtaacaactgcaagaccagcagcgtcatcaagagaactgttaatacgtttaccagatgctaaacgttcttgcgcttga

SEQ ID NO: 17 - DNA, 204 bp, Listeria innocua
gatgataaaagcgaatatttccagcgattgtatcatggaaaaggtacggatgttgcggaatataagttacttgggtttgccaatcagttgaagcaagcgccgcaccagtttttccattccagcgaaaatctccggaagttggtgtcaaaaagccacttaaaacatcaattaacgtcgatttcccagcaccagtcgcaccgataa

SEQ ID NO: 18 - DNA, 204 bp, Listeria innocua
atcattccagggctatcagtttcaaataattccggaccttcctcaccaacaagaacttgtttgttcagtggtggtcttccgccccgtctgaatgctagacctttcttttccgcaattttagctacatcttccgatccagatgcttttttctttcctccaattgcacttccaggattaacaggagaaccatttgcatttacctga

SEQ ID NO: 19 - DNA, 204 bp, Listeria innocua
ggcatgccattcaatctaattgtttcaccgattggattaccgaaaccaaatagatcactggctaccgtagagcctattacagctactttctggccatattccgtatcaatcggtaataggaagcgcccctctttcatttctaagctacgagccgctttgtactggtcattcgtcccaatgactttattgcttgaacttttataa

SEQ ID NO: 20 - DNA, 207 bp, Listeria innocua
ataataaaagaaatacttaacttgaattcgaataatttaaaaataaaatgtatccgctataaaacttacatttattacgttggtggtattgaggttctatatgaagcggataggaaagtagttcgtcagtatgtttattcggatgataatgaagacgaatgggaaaacactatatttataatacacatagtgatgttagtactttga

SEQ ID NO: 21 - DNA, 207 bp, Listeria innocua
atgattcatctatcagaaattgatgtacttatattagaaacaacagatattactttgactacgatgttaattaactgcttagtagctgaaaatattttgattctcttttgtgatgataagcgattgcctattggaaaggtacttcctttttatggacgacatgacagtagtttgcaattatcgaagattcgaccatatttgcaatag

SEQ ID NO: 22 - DNA, 207 bp, Listeria innocua
cctgcaagaataccgattgcaatacctagaataagacccatcatcattggttccccgaaaataccgaaacgtttttggatagtttctgggtcaacgtggatgtttttaataccagggattttagcgattagccaaccaaccggaataccgatgaaaccgaatgctgctgtagaacctgttggtaaggagatcccttttaagccgtaa

SEQ ID NO: 23 - DNA, 207 bp, Listeria innocua
agcccactaccaacaccgccaaaaataacttcaccaagctgcataaagaacattggaactagcccaccgagcggagtcaagctatcgtgcatcgcgttcacagcgccatttgaagcagccgttgtagaagccgcaaaaagcgacgatccgccaacaccaaaacgcacctctttaccttccatacttccagaagtagtaacaccttga

SEQ ID NO: 24 - DNA, 207 bp, Listeria innocua
atgaacgacaaaaaagtaagattctacgtttctacgggcatgcacggatcacttgaaacagaaacatttcttttgaaagcggacttgaatattgagttcgagatattaacacctgaacaattagaaaaagagattacagaggcttacgacgactggctaggcaataatattgactcgggctggtctatcgagaaaggaagcgtctaa

SEQ ID NO: 25 - DNA, 207 bp, Listeria innocua
tttaaaggcataaggaaaggcggagagaaaatggatattcaagcgaaaatagcagtccaactatattcagtacgcaaagaaatggaacgcgatttagaaggtacgctccagaaaattcacgaaatcggctttcgttatgtgcaacttgatggtatgcgaggcaatgtccggcagaggttttacgcttacttcaaaaatatgagttga

SEQ ID NO: 26 - DNA, 207 bp, Listeria innocua
acagctcccataattttaaatgctgtcattacgttatatgtttcaattaagtggttcgcaatcggtgcagcaataattgtcgctccacccattcctgcagtaataagtccagaagcaagaccacgtttatctgggaaaagacgaatcgtgttactaagacaacctgaatacgcaaaaccttgtccaagcccagcaagaacaccataa

SEQ ID NO: 27 - DNA, 207 bp, Listeria innocua
atcgtgtcagtaacaacgctgctaccttctgcacgggttaaaagtgccgttaacggttgttgcaagtcagtcggaaaacctggatacgcatatgttttaatatctacttttttgattttttctacttccccaacaaaaatagcgtcttcttcaatatccatcggaattcccatctctgtcatttttgcgatgattccttctaaatga

SEQ ID NO: 28 - DNA, 207 bp, Listeria innocua
agtaaggaaagagagataatgaaaagaatgaaaactaatttggaagatggagtgatgagtttggataataatcaaaaagatttgaatcaagtaatccgtcagctcaaagaaaaaggtattgtggttgaaaaaaccaaatcccgaaaagatatatggaaatcggtaagcgggaaagcgatgccgaatatgacacttcgattgcaataa

SEQ ID NO: 29 - DNA, 207 bp, Listeria innocua
ataaccatccaaataagcgtagtaccgattgctgctatcgagccaaaaagcggtacgataattttccaagtaatacctgaaataagaatcatccccgacataatggcgataaatacaagtgctgtccctaaatcgggttgtagcataattaaaataagtggcattaatgtaaataagccgattttcagcagtaaccaagcgtcataa

SEQ ID NO: 30 - DNA, 207 bp, Listeria innocua
atcacggaggagagaaaaatgaaaaaacatattgttttaattgttgttgcttgtatcacggtcattgcggtatttatgtacataattcaagtcaatagtagcgaacttaaatatcaaaatagagctcagattaaaatagcctctcagttagctagccaggaagattcgggagaaaatagtattattagtgaagtaaattacaaatag

SEQ ID NO: 31 - DNA, 207 bp, Listeria innocua
cagaaccgacagagccaacaaaagagggttacacatttgatggttggtatgatgccgagacaggcggaaacaaatggaattttgcaaccaaaaaaatgcctgccaagaatgtcacgctgtacgctcgttttacagtcaaatcatatacagcaacatttgacaaagacggaacgacaacgacacaaacagtcaattatgatagcctga

SEQ ID NO: 32 - DNA, 210 bp, Listeria innocua
agcgcaaatcccatttctgtatcatttttatgcacttttaaggcgattggcgcggaaaaagaggtgttttgtgtcacgaccgtattgccatcaacaccaattttcaagtcaaagtcacggtctaaagttcccgccgtctcgatcgaaacatactttaatgccttcttcgggaaaaacttgaattctactttcttaccagttatcccttga

SEQ ID NO: 33 - DNA, 210 bp, Listeria innocua
ccaatcacgacacgtagtgttgcaatgatgaccgctataagtagcgtgtacttgatgccgactagcaattggtcgagaatggagttgccggcttggtcggtgcctagccatacttgcgcgtttggcttgaaaggcgccatatcggttactcgtccggtcgcatcactgataaatttgagcgaattgattttgtctcccataagcccgtaa

SEQ ID NO: 34 - DNA, 210 bp, Listeria innocua
gttactaaattgccgtccatgctctcatacaactgctgctctctttctgttaaaaactcccaggacaacgtttcaaactcccctgtggtaacagcgttcttattgccaattggtgcgctaccgccaacgttaccaaccgcattaccattccctggtggtgcacctccgcgattaccgattgcgttgctgttcccttttaacttatggtaa

SEQ ID NO: 35 - DNA, 210 bp, Listeria innocua
tctttaattacacacaaagaaacaaaaaagaatactataagctgtttgatatggatgaatatcaacggaataaggagatatggaatgattgataaagtagcgaaatttattggagctttgactatatacgctctgtgggtcctagtactgattttcgtactaggattagtggttaaagggattttatgggcatggagtaatatgttttaa

SEQ ID NO: 36 - DNA, 210 bp, Listeria innocua
cacataatctatttttttcttttcgttttccatagctctaagcctcccatggttgcaacaaatagattaaagcatgcgctcaaagcatatcgactcggcaataaatttgtagcagcgctctctgagctcgctgctgaatataagaacagcactatcgcacctattcccccgccaatcatcaaatttataaatcttgcatttgattcttga

SEQ ID NO: 37 - DNA, 210 bp, Listeria innocua
tggcatcgatatttttttcatgagcaattcttccaagcgaaagaattacagaatcattttcttcaattccaagtgattgtttcaaatccagaattcgctgtttttcaaccggagcaaatgatgaaatatctgtaccagttggaactgtatacattaatttatgaatcccttgctcttctaagtgatgccttacctttgcagttggagtga

SEQ ID NO: 38 - DNA, 213 bp, Listeria innocua
aacaaattcagccgaggttctcacagcaggtgcggatggggtatcggttatttcagcgattactcggtcggaagattgccaatcggttatcaagcaattaaaaaacccaggttccccctcctaaaagggcaaacctgggtttctcatttttataaatcttcaccattggtagcaataacgttcttgtaccaatcaaaacttttcttcttataa

SEQ ID NO: 39 - DNA, 213 bp, Listeria innocua
ataaaagctcttcaggaacaacaatcaacttcaatcccacgattaacattactattgaaggtggatcgagcgaaagcgagtcatctattcgaaaaactgttcgagcggaaatggaaaaattattcgaaaaacttgttggaatttatactcctggagaggtgtgatattaatggtagcaacgttaggttcagtaaaattagtaaatacaaatga

SEQ ID NO: 40 - DNA, 213 bp, Listeria innocua
atgcggcggataactttcttggtaaattgcttaactgagtttcctaacgctcgccaagctgaacgggaagtcaataaagagtttgatatttggcttcctatcattgccggtatagcaacgaaagaagaagttgaagttgctacatcatatgaattagcaatcttatgtgaggttgctagacaaaaaatagaactaatgaagggtggtgtctga

SEQ ID NO: 41 - DNA, 213 bp, Listeria innocua
atgagcaaatataaagctatgcttacaaaaggtgaacattatgttttgttaccacaaaatattctttttaaaaaagatattcctgttgacatcaacgaagaaattgttaatattttacaagatgcagaggagttcttagttacagaagagacgtctgaaaaaacagaagagacttcggaagtgaaaaaagcgaaaaaaagcagcaaagactag

SEQ ID NO: 42 - DNA, 213 bp, Listeria innocua
cgcaagaaataccagcttgatccagcccattgtggcatcgtatttgtttcgcgacgaccttttcgaccgttttcgtctgttacgtttacccagtcatgcaagttggcaagtggtgattcgcctgttcctgatggtttgatttctgttgcttttggcagaagtagtggtagttcgtcttctggtacaagcgttgtttccccgtcttcccagtga

SEQ ID NO: 43 - DNA, 213 bp, Listeria innocua
gtggatgatgatattaagcaagctgtcgcatggcagtgtgagcatatcaagaaatatggtggatttattggtattggtaactttacactaggtaaattaactatgggtggtcaatcacaaaactcgaacaactttatacctgacgttccggacaaagttatggatttgcttttatctagtggctggctttatgcgggagtaggtggctgttaa

SEQ ID NO: 44 - DNA, 213 bp, Listeria innocua
aagaacaacaaaaagacggggttatcgcctctacagtggcttaaggaggagttttttgtgcaattaagaaaagataatgcagtatacaataccgacaatgaagtattaattaagcagttagaaaacgatggctttgaagagttcgtgtataaagaaccagaaaaagaaccatccaagagcaaaaaggagcccaaaaacaaagagggtgagtaa

SEQ ID NO: 45 - DNA, 216 bp, Listeria innocua
tcatctgctccgtggtcaagtccagatacgcgatcaatcacagagtctcgcgcagttatcataatgatgggtgtttgtttcacttggcgtacacgacgacaaacctctaccccgtttaaatgtggtaacattaagtctagtaaaatagcatcccattcttcatttagtgcgagttctagcccagcacgtccatcattagcaacagcagtttcataa

SEQ ID NO: 46 - DNA, 216 bp, Listeria innocua
atgtcggagcaaaagcaaaaaaaagttaaatctgcatcagtgttacatgaagaaactacaaataacgaagttcaaactgaaaaaacttatgtagtaaaacaagatgaaaaattagcagggatagctacaaaacatggtgtatctgttggtgaattagcagaaaaaaacaaactagattcttataaattaaaagttgggcaagaattagttttatag

SEQ ID NO: 47 - DNA, 216 bp, Listeria innocua
aaaaagcgattgccatcttcacgccacactcgagcaacgattaaaggctatttctctgttagctaccgatcattctattgtaagaatctgccaagtattgcgagtgaaccgcagtacctattacaaatttttatccaaaatcccttcggctcgttccgtggaaaaccaacaaatcaaacggattattttacaaatttataccgagacaaagtttag

SEQ ID NO: 48 - DNA, 216 bp, Listeria innocua
gatactaataatagatgtgaaaacaagtatcatcgcgaaaaagattctaagttcaccgaattgctgttccggatcttgacgtataaaaagcgccagttgctccccgtccgccttaactggaacaccaattgtattcctgacatcattatcaaaaaatcctgtgataaaaatgcccgtatcaaacgtatcaatcccgtgataagtctcgcccgctaa

SEQ ID NO: 49 - DNA, 219 bp, Listeria innocua
atgtattgtccgaattgcggtcatgcattagataacagggaaactgaatgtcctggctgtttagctccaataacttatcaaacaagcaacaacgaaaaagcgcaaaaagtcggcgcttttatggaagaatctggtaaattaatgtcaggatgtggttgtttaatgacattgttgataactattcctgtcatagtaattttaataattatgtttttataa

SEQ ID NO: 50 - DNA, 222 bp, Listeria innocua
tatattttaccaacgtctttaaaacggacgcctacaattttaagcatggcgattacctcccttggatttcaagaactaactgctccattagaagttgcgtgttcatattggaatccagttttgatttcgcagcgagaatcttctcgatttcccctgtggtttcggacagtgacttacgtagcgcatcttgtccgagcatttctttttgcgcagtgcaaatag

SEQ ID NO: 51 - DNA, 222 bp, Listeria innocua
tcagatgcaaatacatcgattaattctgttctcataaaacgagctgctgttgcaagcgggaacatagcaagtgcgaacgctggcaaaattgtatctgcaaacgaaccccatcctgccactgggaaaatttgtaatttagctcctaaccagtattgcaacacagtcgcaaatacaaatgatggaactgatttacctagtattgctataaatgtactcgtgtaa

SEQ ID NO: 52 - DNA, 222 bp, Listeria innocua
acgacatctgccgcaataaccgaagcaatcgacataaacaccccatgcgcaaatgccgccactacccgcccggtaaggagcattccaaaacttacagcaaatgccgagacaagattccctatcagaaatactaacattactaataatagtagatttttacgattcattttcgacgtcattgttgttaaaaccggcgcccccaccatcacacctagcgcataa

SEQ ID NO: 53 - DNA, 222 bp, Listeria innocua
gtcaaaagcgttaagcggaatggattctctactgtccattgtacaaatgcctggggtgttcctgttgctactgttgcaatcggtgaaagtggagcagtcaatgcgggtcttttagcggcgcaaattttatctattacaaacgatgcaattactaacagattacaaaaaagacgtgctacactagaagaaacagttctagaaagtagtgattctcttggataa

SEQ ID NO: 54 - DNA, 222 bp, Listeria innocua
atggcatataaaccaacaccgattaatgcggaaggtttacggccaaatttatctgaaaaaggtccagaaattggcagtgtaagtaaacgtcctaggccgagtgctgcgataacagcaataaccatactgacatcaaaggtaccgtcggaaagcttgtctgctccccatactccagcgaaatcttgtttgtattggccaagaatggataccccaataccgtga

SEQ ID NO: 55 - DNA, 225 bp, Listeria innocua
tacatttgctcagccaaggtaagtccgggaagctctaaccccatttgttttgcttcagataaagcaattcccatgtctttaataaaatgtttaataaagaatcctggtgaaaaatcatcttgtagtacgcgtggaatcaagtttgtaagtgaccaactacccgctgctccacctgaaatagaatcaagaacgcgtgaaggattaagtcctgctctttctgcataa

SEQ ID NO: 56 - DNA, 225 bp, Listeria innocua
gctttcccggttgtttcgtctaaggtgattaggcaaccagataaaactgctcgacctgttttagggacttcaaatcttgttggcaaggctgttttaaaacgacgaataacagcttctttttccattccaaggatagcgtcatatggtcctgtcatacctgtatcagtcaaatacgcagtaccttctggaagaatacggttatcagaagtttgtacatgtgtgtga

SEQ ID NO: 57 - DNA, 225 bp, Listeria innocua
gttttaccacctgatggagctgatgaagcgttagaagtggttgcttttgaagatgaagcatttgcgatttgtgatactttcgctttttcttttgtgccacgtacaactactttatctgtcttttcagaagtaacgttttctttaatgacatcgcgttttgtttctttgtcattttcaaaagttacattatactcgacaactttttcgccatttttaccttcttga

SEQ ID NO: 58 - DNA, 225 bp, Listeria innocua
gcaatacatttcccgtctttccatttcgtttgcattttgtcgcgcacttgctggaattgtacttttaaatcaagcgctcgattcccggcaaaatctccagaacctgccgcactacaaaatgtacaaccgccatgcgctactgtgccatcacgatttggacaatcaaaaccaccatcgagcgcaactttatatgtcttttgcccaaattcttctcgtaaacagtag

SEQ ID NO: 59 - DNA, 225 bp, Listeria innocua
atgaaaccggaattaaatgagttaaaaaaagctaattacagaattaggcaagaagctgcggatgaaccgcgaattatccaagtatggtgtccttattgctgggaagaaaacagatttaattttgaggaactcaaaaaaaactatggtccggaaccacgttggcttaaacataaaaaaataacgtgtcataagtgtgcaactgagatggaatttggtgattgctga

SEQ ID NO: 60 - DNA, 228 bp, Listeria innocua
cttgcgacaattcgccatctggaagctggagttattgcaaaacttctggcaatactctgctcttcatcgtgcacttttaatgagaaaacagctaaagaaacagtgaccggcgtaatagacaaaatccccgcaattacccacgtattcactaattcctgtattccaatcgtttttccagaagcctgcttaaacatttcttccatattatttcctaaaaaaatggcatag

SEQ ID NO: 61 - DNA, 228 bp, Listeria innocua
ttattaatcatttatttcccctccaaagctgcaaaaattttctcgatttcttctggtttagtgcgacctgtagctttatcaattgtttttccaaagatatgtggcatgaaaaacggaatgccggtcgtcttgatggcagttgttatttcaaggatattctcggcgccaatccctcctgctggctcaatgccgtatatccctttttccgctgcaacttttgttaaataa

SEQ ID NO: 62 - DNA, 228 bp, Listeria innocua
gtgagtaaaggaaaatacatacattttgatactttagtatcagctaagacaggtgatatcgtggctattcaagacattttaaatcaatttcgtggatatatcataagccgctctctgcgaacggcttaccgatcggacggctcactctaccaatatattgacaccgatgttcagcacaaaatggaaaccgacttaattgaggccatctataaatttgagattcgttaa

SEQ ID NO: 63 - DNA, 228 bp, Listeria innocua
ttgtgctcatatactaagaactcagttcccgatttatacatccgcgccggatttgatttaaaatccgtcttcggcaatagtggcgcactgccaacgacctgtccgctgtgcctattcggatttttagatgtaatacgattgtactcatctataattgcttgttgcactgctggccatcgtttatcatcaaggatacgatgtggacaatacttaccggaccagtcttga

SEQ ID NO: 64 - DNA, 231 bp, Listeria innocua
ttgcattgcccagattggtttggacaacgagattacgcagcaacagcttgccgaaaaattagttgtaacgaagggaaatgtcacccaactcctcgcaaaattagagcaattaggctatattacgcgaacaaaaacgggacgcgagaaacatattgccctcaccgaaaaaggccaagcgtgttaccgcgaaaatgtgccaaaacaagaagcttttcagcaatctcaatttga

SEQ ID NO: 65 - DNA, 231 bp, Listeria innocua
tccatcccaatggttgtaattacagagattaaaggcgttaaaacatttgtggaatctagtcttcctccaagcccgacttctatgatgccaatatcgattgactcatattctgcaaaacacaagaacatcattgctgtaataatttcaaattcagatgggggaccgtatacagttttttcaagttcttcagctataggttttattctatttgctaaatctacaatcatttga

SEQ ID NO: 66 - DNA, 231 bp, Listeria innocua
atgacgaaacagaataggcgttcgattgatgaaaacgcaaatgatgaattattagatttagagattagcaaggctcttgaagaagttaagacagatgaagaatacaagaaaattattcgcgctacgctgggtaagtggcttaataatctacaagaaggcaatatacgtcttgaatctgtaaatgaccttaaaacactaatcgaagcagatagattactaagaagagattaa

SEQ ID NO: 67 - DNA, 231 bp, Listeria innocua
cttgttatgcgtccggtaaaagtaagcaagaagcgacagatttgcttgatcagttcaatgacacgctggatgcaccattgcgatttagggaaatcgaaacatgtattcgtaatgcatactcgggaagataccagggcgcaaatgctgaaaaaatcagcgatatcttgcagacgtattggaaatctgaatacgaaatcaagggctacacgccatttatctttgatgaagtag

SEQ ID NO: 68 - DNA, 231 bp, Listeria innocua
gtcgccatcttccattttgatattgatgttgtgttctttgaagaaacgtttagtgtagcttgggtagtatccgcgcgcttgaacgtcaatgaagaagtagccttcacggtccgcctcgatagatttccagacatcttttggattacaagtcattggatacgtgttacccgctgcaagcatacaaccgatttgattttcagggttgatttcatgaccaagttttgtcgctaa

SEQ ID NO: 69 - DNA, 231 bp, Listeria innocua
atgaaaaaggagaacgagcgttcggttgatgggaacttaaatgatgatttattagatttagagataactaaagctcttgaagaagctaaaacagatgaagaatacaaaaaaattattcgagctacgctggggaagtggcttaataatctacaagaaggcaatatacgtcttgaatctgtaaatgaccttaaaaccctcattgaagcagatagattactaagaagagattaa

SEQ ID NO: 70 - DNA, 231 bp, Listeria innocua
atgattaaagtttcgctaatcgaagaagggaaagttcttcaaaatatggaactctattatttacctagaaaaggtgacgtcatttcaagtaccaatataaaagcaccgcattacctagttaatgtagtagcacatgtagatggtcacgaactggtaaatttacatgtccaggaattcgcgaatcaagttgtcgcaggcaatgagattaacggtttccgaaataatcgatga

SEQ ID NO: 71 - DNA, 234 bp, Listeria innocua
tcaatcgctacttggataccatcttctttttcaattacttttaccatagctagtcttgaaccaattccgaaaataccttttttaccttcgtctagaacttctacttcgaccttgtcgcgtgttgtttctaaagtcgctaatgcattttggattgcctcttcaacatttgagccttgcgcagttatatctctcactttcttttcttacctccttttttggaagctttcatgttag

SEQ ID NO: 72 - DNA, 234 bp, Listeria innocua
attgctaataaattaccttccaaagtggtgctacgttctgtagctaatatcacttggttcttcttccgtggcattaatgtagcaattctaaaaataatccctctacttattttacgaattaaaattggagctttaaacttgcgtcgaacaataaatttaaatgaaattttacgagcatcacgccaattattattttcaattatttgtagagcagccttcatgggaattgggtaa

SEQ ID NO: 73 - DNA, 237 bp, Listeria innocua
acctttacagactttaaagatggatccgagactctctcttcttgcttcggacctttagatccaagtagacggagaccattaagaataacgagtattgttgacccttcatggaataataccgctagtggaagtcctaatacgccaaagaggttcaagacgatcaaggtcacgatcacgctgatcgagaaaatcacattctgcaaaatgattttgttcagtttcttactcaacttgtaa

SEQ ID NO: 74 - DNA, 237 bp, Listeria innocua
aagacccgcattgactgctccactttcaccgattgcaacagtagcaacaggaacaccccaggcatttgtacaatggacagtagagaatccattccgcttaacgcttttgacttaattggcacaccaataacaggcaaagttgttttagcagcaaccatacctggcaaatgcgccgctcctccagcgcccgcaataataattttcaaaccacgttcccgcgcttgttctgcatattga

SEQ ID NO: 75 - DNA, 237 bp, Listeria innocua
tcaaaggtacgttttaatttatacgcatataagtttggtagtaagttgcgttttgtttcgacacgttccccgcgttcacaacggtttccactaacaaacatccggtcatcgccaaatcttgtcacggttaactggcatgtgttactacaaaggttacaacgcgattgcgacgtatctgcactaaattcacgtaatttttccagtacgagcatctcggttacttcgccagtttcataa

SEQ ID NO: 76 - DNA, 237 bp, Listeria innocua
ctcaaaaccacttataaagtctttcatatgaacaattggcgcccgtccactgtatcgtttaataaattccgtttcatcatgtccggctgctttaatccagtacgtatctggttctgcgtaaatgcaaattccattaactggatctgtgataaaatccatcactcggcggccattgatgcattcattaaaatcgtattccggattgtgaagaccgatgcgaaaaccgagtgcgtgtaa

SEQ ID NO: 77 - DNA, 240 bp, Listeria innocua
atgatgaacgtaccattattggtgaacattggtgtattccatttgatttctggctttagatttggaaaagtttccgccacccaggttaaaacttcttgtgttcgtgcgcggtgttccgggttttcaatctcagctagatattctgcaaaagcttccatattatttcctcctaaaaaacataatcttacagttactcttattataaagaaaaactgctgtgatgcaaggcgcggctattag

SEQ ID NO: 78 - DNA, 240 bp, Listeria innocua
actaggaaaatacttagaatcgtgaatggtaagctatcggctgctttgaagctcggtgccattttttcatataagaattggatggcagttgtgtctagcaggttgaaaatgataaagataatcgagaaaaaggtcattaaaataataccaggaactagggctgcgaatgtctcagatagtgaggctgggacgctatcgggcatggttattcgaccgacatttttcttgcgcatccagtga

SEQ ID NO: 79 - DNA, 240 bp, Listeria innocua
ggtaattgttttaattcaagcaacttcgtatcactgtcatatccattaataattccaaatgcattttcgtctccctgtactttagcagaaacacgatttttaacatccgatgaagttaacaattcaaccgtagcagattttgcacctgttgttgtcaccctaccaataagaccactcggcgtagttactgccatatctggttttactccatcgcttgagcctttgtcaatctcaacttga

SEQ ID NO: 80 - DNA, 240 bp, Listeria innocua
ccggcaagctgttttgtccctgcgtcgatattagtcgctgggtcggttcgattagagccgtacattagttgcattagaccagtggcaccagcacttgaaaccacattcggattaaaattagattctacttggataactcgtttgataagcgcttctggtacaccgtatttggttgctgctgttttaattaaatcgctatatttgccttcattttcagcgctaataggtttaatttggtag

SEQ ID NO: 81 - DNA, 243 bp, Listeria innocua
aagttcacagtcgttaaaattaaaatcaaaaaacctgcaataattaatactttaggtccaaatttatcgttccaacttccagcaatcgcccgcataagtaaggcgacaattgaaaatagccctaccgctaaactagcttccatttgtgttccgccaagttcaataattcgagctggtaacgtcggcataaacaccataaacccaatatataaaagcacactgcctaataataaaaatacgtag

SEQ ID NO: 82 - DNA, 243 bp, Listeria innocua
tttctagcggtaaaaaacttttatttaaatggcccgttggtcaagcggttaagacaccgccctttcacggcggtaacacgggttcgaatcccgtacgggtcacttttaatcaaaaaaagcagcttgaaaaataaatttcatttttttgaaaaaaaagctggtaaaaatactaaaaatgttatatcatgtattagtatctgttttaaagaattaattatgcaagagatttcgatttgccagtag

SEQ ID NO: 83 - DNA, 243 bp, Listeria innocua
ctccaaacaaagaccattgcagtacagggtgccgcacctaacaatactgctcctgcaacatattctttggctaaatcatttgggataatccctttaaatacaacgaaaaagaaaaatgctgaaatggcatacatcgtaaatggcttaattaaccaattcactgtacaggttacaatcagacctttaggttttttagctgcattgacaatactagtaaaatctattttcaacatcatcggatag

SEQ ID NO: 84 - DNA, 243 bp, Listeria innocua
aggttcgactcctcttgggcgcactttattaaacgggaagtagctcagcttggtagagcacttggtttgggaccaaggggtcgcaggttcgaatcctgtcttcccgattgtttcatcttttataatggggccttagctcagctgggagagcgcctgctttgcacgcaggaggtcagcggttcgatcccgctaggctccaccaattatttttttgaaaatgtgttgacattgtcaaagaaatag

SEQ ID NO: 85 - DNA, 246 bp, Listeria innocua
acatctaacaatataactatccacttaactttcattttcggaataagttctccttacataagcgaaaggcttattctcagtttatttttagtttgttcatcaaattttgttctactttgtcaccaaaatagagaagctctctactttttaatttattacattccaaataagcgtgattcgttgtttactaagataatttctaaattttcatttcttatagaaataaatcccctatccgaattgtaa

SEQ ID NO: 86 - DNA, 246 bp, Listeria innocua
tccgctaatttgccccaaaccggcgacataattgctgatactaaaaatgttgagctcagtgccacacctgaccataaacttacttggtcgggattatgtacgccgagttcttcaatatataatggtaaaaatggcatgattaaatttaatccagtcccggtaagaaaacaccccacccaaacaacatacaaattcttcttccaattttccataagttcacctagattcttctatcgttatccttaa

SEQ ID NO: 87 - DNA, 246 bp, Listeria innocua
atcttgagcaatatttttatgtttgttaaaataaaagcgaacaaaaataaaaatattggagggattttaatgaatgaaaaagaaaaaattgattttgcaaggaagtatattgatgaaaaaggctaccatgaaatctataaagtaacagatggaggaattttggttaggttagataaagttgataaatttctttcattaccaggcaacgaagaaggtattataaataacatagaaaataataagtag

SEQ ID NO: 88 - DNA, 246 bp, Listeria innocua
actgaaagccactttacaaacgaatttgcgaacatttcacctctggagtcgccccccgagaagcacgttatgtgtgaaggtggtccggttactaagccgttatcgaattttgagtgggaacaaattttgttcttattagggtggtaccgcgagaagtctcgtccctttgtggatagagcttttttattttgtctaaaaagaaggagtgaacggtatgttagagcaattacaaacgctgaaaagtga

SEQ ID NO: 89 - DNA, 246 bp, Listeria innocua
atggatttacagccaaacgatccagaatatcaaaaattaaaaaaatcaattgaagagtttggctatatcgatccgttaatctggaacaagaaaactggtaatttggttggtggccatcagcgttttaaaattttacttgaggaaaatccggaaaggttgactgtatcagtagttgaccttgatataaatcaagagaaagcattgaatattgctttaaataaaatagaaggcggatggagtacctga

SEQ ID NO: 90 - DNA, 246 bp, Listeria innocua
atcacctttttatttccggtttctcggttcactatttccattcgatcattaagatttttcaccacgagccaattatccggattaagaccattattttttagcatcgttgcttggtttctagttaactttttaccgtttttcattattatcttcctcacaatcttcacaatcttcacatgttctcggatatcccggatttacatcatcaatgaatactccgcaattcctacacaaaataccctctaa

SEQ ID NO: 91 - DNA, 246 bp, Listeria innocua
atatgcggaagtagttcagtggtagaacatcaccttgccaaggtgggggtcgcgggttcgaaccccgtcttccgcttgttttcaaaagttccaatatgccggggtggcggaactggcagacgcacaggacttaaaatcctgcggatagtgatatccgtaccggttcgattccggtcctcggcattattttcatatgcgcccatagctcaactggatagagtacttgactacgaatcaagcggttag

SEQ ID NO: 92 - DNA, 249 bp, Listeria innocua
ccaactacgccatatgaattcgggatgcgctcatctttcacacgtgcgtctaataaacctacacgtaattgtgttgttacgaaatctgcgtcttttaaagcttcttcacggtctaatgttaaatgtacttccatgtcaacgccagctttttctaccatacgttttgctaaattaccaacgatttctaatttttcacggccagcttctacgtctactaaccatagttcgcgaactggtaattcgtcttga

SEQ ID NO: 93 - DNA, 249 bp, Listeria innocua
aagagtaatttcgaaattgacttaacgcctttatcaaagctagtgtcgccgcgacgttctgtagctgcgattgacaatgagccgaaaaatgttgcgcttcctgttcgtaaaacaaccgccttaccgtgcccacttaacacatctgtccccataaataataagttttcccgttcaaaaagctccggattggcgcgtttgtcttccacaaatttttcagaaggaattgattcgcctgtaagtgctgactga

SEQ ID NO: 94 - DNA, 249 bp, Listeria innocua
accgaacccgtttctgcaatttttccaatatcattacgtcctaaatccactaacattctgtgctctgcaagttctttttcatcggataataattccgctgccagcatttcatcttcttgttttgttgccccgcgacgccttgtaccagcaattggatttgtcgtaacagtccgccctttcgttttaattaaactctctggtgaagaaccaattaagaccgtatcgccaaaatcaatgaaaaagagataa

SEQ ID NO: 95 - DNA, 249 bp, Listeria innocua
cacgtcttttgtaaacttgctttgttatcacccaaaatttactcattagattcccccgctttccatttgaaaatttcttcaagcgttggagcttggaggctgaaagtttggatgaagccatcctttgtcacatattcaaaaatcttttctgcatctgtttcgttagcaatttcaagttggagaacgccgtcacgatgctgttggacatttagcacaccaggcaaaatagctagttcttctgccgtatga

SEQ ID NO: 96 - DNA, 249 bp, Listeria innocua
gtggaagatcgtgtgatgttactgcaaatggataaagagataagtagattaaagaatattataaatgcaattgagtctgtgcttaatagattgaacgacgaggataaacaattgattcagtttagatactgggacagaagcaaaccgacgtgggtatggattgctagtaagttgaatatggacgagagtacagctagaagaagaaataaaacaatcattctttcaatagctgaaaggttgggatattaa

SEQ ID NO: 97 - DNA, 249 bp, Listeria innocua
ctctctccttcagttgcaattgaagaattggataaggcttcccaaaaccgtccaagtcacttctggaagaaaccacaaatccatgcttcaaataaaatctcgtggcattttcattttgttcattcacatccaccaggtttatccgcttattttctattagccaacccagaatctgactcccataaccattacccgtggctaccggatccagaaacaacatatctagttcccgctcgctcgtcccactaa

SEQ ID NO: 98 - DNA, 249 bp, Listeria innocua
tatcaattattcgctcgtcaaagcgttcaagtgatacaatgtgttttttgttgtcaatgtggacaggaactacatacttgtatctcacatgatgattattctttaaaaacagtatttctatcgaccaatttctttttaacgcatctgctaacactattgaatgttctaaaatatcatcaattaaattatacatgttcttcaccccttaggaacattatacgaacaaacgttcttaaaatcaagtggtaa

SEQ ID NO: 99 - DNA, 252 bp, Listeria innocua
gtggcacaagatacaaagttctttgattcatttattcgattagtaaattcaagtgtatcagtacttcttatgtgtagagtcgttaattatgatgcaagtaacaaacgagcggatgtgcaaccattgaatttaaagcccaacggagcaaaacgagcaatgattttagatgctttagtattaaagcataccgaagaagatattgcacaaggaaagatagtagctgtagtattttgcgattgcggaattagataa

SEQ ID NO: 100 - DNA, 252 bp, Listeria innocua
tttttattgaaagattggagaataaacatgacccttatattttggactaaaaatggacaagagatggaatttgatctagttgaaaatgtagagattgacgagaaaattattacattcgattactatggagaaggtgaaaaaagaggcgtagtgtttatattaaataatcttgctggcatggctgtagaggatgagaattcggagagtgaaagtaaagatggcgcatcttggtttaaagtgtacaggggttaa

SEQ ID NO: 101 - DNA, 252 bp, Listeria innocua
tctcttcttagtaatctatctgcttcgattagtgttttaaggtcatttacagattcaagacgtatattgccttcttgtagattattaagccacttacccagcgtagcgcgaataattttcttgtattcttcatctgtcttaacttcttcaagagccttgctaatctctaaatctaataattcatcatttgcgttttcatcaatcgaacgcctattctgtttcgtcattgccttttcaccagctttctattag

SEQ ID NO: 102 - DNA, 252 bp, Listeria innocua
catataaaaagtccccacttatcgattttattgcaatcgaagtgtcatattcggcatcgctttcccgcttaccgatttccatatatcttttcgggatttggttttttcaaccacaatacctttttctttgagctgacggattacttgattcaaatctttttgattattatccaaactcatcactccatcttccaaattagttttcattcttttcattatctctctttccttactttaccatattctctttag

SEQ ID NO: 103 - DNA, 252 bp, Listeria innocua
tctcttcttagtaatctatctgcttcaatgagggttttaaggtcatttacagattcaagacgtatattgccttcttgtagattattaagccacttccccagcgtagctcgaataatttttttgtattcttcatctgttttagcttcttcaagagctttagttatctctaaatctaataaatcatcatttaagttcccatcaaccgaacgctcgttctcctttttcattgccttttcaccagctttctattag

SEQ ID NO: 104 - DNA, 255 bp, Listeria innocua
ttggaactatctatctggaggaaccgctacagcacttgtgagagcaagaaagagagaggtgtcggaataatgtgtgagtattgcaagaatgactctatgatgaataatgagcctttactaagttttgatgaagagtataaagaacctggtgttgttagactagatagcactggcaacttaggagttttcagctactacggtttaacagctaggaatatcaattactgtccaatgtgcggaaggagtttggaataa

SEQ ID NO: 105 - DNA, 255 bp, Listeria innocua
aatataaaaaaatggggctggttgacaatggaggaatatgtaaatatcagtttagataaatatgaaatgttaaaaatgtttgaaaatgatagatacgaaagagatgctaaagaatttctaaaacagtttattaactttacaacgatatttggaaatcaaaatgaagagtattacacggcgcatgtcaacaaggaagaactgaaaaaactaattgaacaaatactaggcaaaacgtgtgagatagaattttattag

SEQ ID NO: 106 - DNA, 255 bp, Listeria innocua
atgacgtcaaatcatcatgccccttatgacctgggctacacacgtgctacaatggatggtacaaagggtcgcgaagccgcgaggtggagccaatcccataaaaccattctcagttcggattgtaggctgcaactcgcctacatgaagccggaatcgctagtaatcgtggatcagcatgccacggtgaatacgttcccgggccttgtacacaccgcccgtcacaccacgagagtttgtaacacccgaagtcggtag

SEQ ID NO: 107 - DNA, 255 bp, Listeria innocua
gctccgcgaaaagtaacattttcgtggagttttttctgttttaaaaatagcgagaggggtaatgatttggaagaggaggtaatgctgatgaaagtaaaaaatagtcaggcctcaaaagtgctcgaaactccgaaaatcaaagacgctgtggtgcatgaaaaaagccaccccttagcggaaaagcgctctgtaccaaagaaaattattgatgcagacgtaccgcaacaacaataccatcgtagacttatgaaataa

SEQ ID NO: 108 - DNA, 258 bp, Listeria innocua
gtcattaagcaaacaattattgcatcaaagcttgcaataacagccattgtacttgccgttgctaacatattaaaaggatctggttctttctttacacttactgggaaaaagatatctgcttcgttggcgataacagattctgggttttctgttacaccaatcaatgtactcccttttgttttacaagcaggaattaaattaagtaattcgcctgtatttccaccttttgaaatgagaatcaatatatcttctttttga

SEQ ID NO: 109 - DNA, 258 bp, Listeria innocua
tttctttttagcgtcgcccgttttatcttctacttcgcctttagctttttgagctttaccttctacttgtttgcctttatcatctgttgctttaccgaacttgtcttttgcgtcacctactactttgtctttaagtccttttgctttgtctttcatacctttatcttcgctcattgttattgcctcctaattagaatttattttctaatgaagaatctttatctccatagtagtgttttccacattatagaaagctaa

SEQ ID NO: 110 - DNA, 258 bp, Listeria innocua
agggaggtggaatttgtgaaaaatcgcatggatataatgttcaaaggtatctctgatgaccagcccattgctctaatgggcgttataagcattacatcttttccagataacaaaagttttgatttaaatgatttttatttagaagccgataaaacttacaaaatcatttataagggtgcaagcgagttagaaaacgatttatcgaaagtttttctaatgaactcaaatgatgtcctttacattgagttcactatttaa

SEQ ID NO: 111 - DNA, 261 bp, Listeria innocua
tgttttagtgactttttcgcttgttttgatggtatttattttacttttaatgacacaagtgaagattccaaaatcagaaaagatcgtccatcaaaaaatgaaattgttcgagaaaacagcgctacttccggcagggctatgcttgctaatggctattccgcttggtggtattcagacgtttatgatggtatacgggacggaaattgggatttcgacaacttgggtttattttatcgggcaagccattatggtgcttattag

SEQ ID NO: 112 - DNA, 261 bp, Listeria innocua
atgcttcttttaactgatgtgtttggatggaaggaacgccgccaccttcaagaccagaccataaacgaaagacaagttcggtcgtttttccggcaaaattatctggaaaaagaacttcttggtgattttgatcgacgccttggaatggttcgccgtttacgaataataaggattcaaagccagaattatgaccgtcgccagtattaccaaaatcaaagtaaccgatcaagcgagtaccttctttggcactggggaaggtaa

SEQ ID NO: 113 - DNA, 261 bp, Listeria innocua
gctgctgtccctggaggatatgcgccgcttaccataccgttagaaattaaatcaccaacagtcaagttgtccccttctaaacggttcacaggttccagaatatttttaacatacgctggtttttcagtggcggtacttgcttctgctgttaaaactggatttgcccagctttccggcacttctactttatgcaagttagcaactgtttggtccatcgcgagaatatttttctccgcaactgccatatcttttttcccgtaa

SEQ ID NO: 114 - DNA, 261 bp, Listeria innocua
aaaagtttcgattttttcttggtaggatttaatttcattttggttaacgcgtacagaagcgatgatggaaccttctggcatattgagtttttgaccgtccacggagaattcgaagcctgtcgctgtccgtgtcgaggtaatttcagttgtttcatcaccttgtacgacaagacgtccgccaattgtcacatcgtatacatctgggttatttgggtgggcgctaacagaaataccagcatagcccgacatcgtactaagtag

SEQ ID NO: 115 - DNA, 264 bp, Listeria innocua
ataaaactcatatttgcttatagtgaattgaagaatgccattagctcttcttcaaaatctgaggcttcaaaaaatccgatgttttcctcttcttcaatctcacgcacaatatccgctagctttggattatcaatgagcgtatgccctggtaagaataagtcgaaagcttccacaatacgattaccattgactttttggttagctgcccaacggcgaactttaagctctcgatgttcagtacggtatttcttacgtgtttcctga

SEQ ID NO: 116 - DNA, 264 bp, Listeria innocua
atttccttgccttgtttttctaaggcaaaactattgaaaagtttttcaatgatgtctgctcgtgtagcaactgttccaagaccacctgtttcaccaagagtcttggccagtgctttactcgttgtttccatatattttgacggattttccattgctgacagtaaagttgcttcattaaatcttgctggcggctttgtttttcctgtttctaaatttacacgcttaacaggaattttgtcgccttttttcattttagtcagttga

SEQ ID NO: 117 - DNA, 264 bp, Listeria innocua
aatagaaaggagaataagaaaatgggtcgtcctgtgaaaaataaaaacaggcatgtgaatttcctgtacggagtttggacgttagaagattttgcgcaagctagtccacgaagttacgggtggtggttagataacattaaagactttccagagcttgcagaatttagtaactgggctacaaagaatcaacgtgaagcgtgggcattcgatgcagtaaaagcaaatgattggctgattaaaaaatttgtatataaggaggtctga

SEQ ID NO: 118 - DNA, 264 bp, Listeria innocua
gaatatcaattactgtccaatgtgcggaaggagtttggaataatgactaaattagtaagatgtggcgtatgtgaagaagcttttagtgaatatgatgacataattaacgtagatccccatggatggtttcacgagagatgtgtagaacttgttccaatacgttatgctgtttgggctaaatccagatattacgatgtagatggctttctcggaacttgcgatgaagatgataaaaattttgcaagctatgtttttgaagaatga

SEQ ID NO: 119 - DNA, 264 bp, Listeria innocua
atcccagccgcatcacgtccagcaagcggtatatctcgtgcattaccagccccagtcgcaagaacaatcgaatcatattcagcgcgcagttcagcaaaagtaacatcagtacctgctgcaacacctgttacaaattcaattccttcttccgccatcaagttcactcggcgtgtcacttgttctttttctagtttcatagttggaataccatacatcaataagccaccaattcgatcacttttctcgatgactgttacactatga

SEQ ID NO: 120 - DNA, 264 bp, Listeria innocua
atgaatatcatgaaaataaattggattgttcgttttaagaatcccgtgtggttgatcgctctagttggcggtctttttttaattgcccaatccgtactctacgtatttggtattgaatgggattacaacgaattattgaataggcttatcactgtaattacttctatctttgctctaatcggaattattcaagacccgactacggcaaacttaaaagatagtgaaagagcacaaaaatataatgaacctggaaaggatgaatag

SEQ ID NO: 121 - DNA, 267 bp, Listeria innocua
aaaatgaataatcaagaatttatagacaaatgtaaaggcgttgttttaaattacgctaacagtcatttagacaaaagcgataaaaaagaaattggcttagatgatgtttttgtagtatggagttgtaaaacattacaaaacagcaaagcgctactaagcacaacgttgtacgatggcatgtattatgaatgtactttcaatggcgacaaatcagaattgtattttgacgcatacaaaaaatgggaaaataaaaaaattagtatttga

SEQ ID NO: 122 - DNA, 267 bp, Listeria innocua
ttgcaagtgttactaacttgcgaaagtgaaaatgcaacgacttgggaacttagtaaaatgattattgacgttgaaggcgccaatcgcttcacgaaatcagagttgttaaaagcggtttatacacttgaatatctaggatatgtaaaaagaataaagtatgggagcagtgtacgatatacgaaaaccaatgaaggagtaaggtttttggatgaattaaagacacagataaaagataatcataatgaagatgcaaatatcaaacaataa

SEQ ID NO: 123 - DNA, 267 bp, Listeria innocua
aataatttgcggttatatgaggaaccagatgtgcgtatcagaatcaatatcaaaggcatttgtgaaaaatataagctgacaatgggagaactttctaggcgaaccgatattgagccgtccaaaattagtgcgtatgccaatgatcgtcgacaacgtgtccaaattactcatttagaacgaatctgtcaatctttacatattcgggacatgaacgaattgtttattctagaagttctggaagatgaacaagtcgataataaggagtag

SEQ ID NO: 124 - DNA, 267 bp, Listeria innocua
ttattgagtacttactatcttgcaaaaataaatataacttggcaatttaaaaggaggaagttaatgatgaatttaaaaaatatttttgaaaaatggggctacgggcatttgaaggaagaaattgaagatttagaggatggctatgaagtagtaataaatgtagtagatagagatacttttaatcttatgaatgatttaaacgaatcaactaaatttactgtttatgaagattgcattaacgatactataacaatagcgcatagctaa

SEQ ID NO: 125 - DNA, 267 bp, Listeria innocua
acaaaccctcgctttgtgcgggggctttttttatgcaaaaaatacgctaaacaaaagcttagcgcattatttcttcttcgattttgtagaattcatctaacaattcgccaggagtgcattgaaagacctctgctattaaacgcacatttttcgcagatatttggtctacagtttttgagtcagcacttcttattgtttgatgtgcaagtcccgttgcattacctagctggtaaattgtccaatctttactttctaagtattttttaa

SEQ ID NO: 126 - DNA, 267 bp, Listeria innocua
atgagtaacgaagagttaactttgtcaatcaaaactagtcaaagagaagatgggtctgcatataatgccattcagctaggagattggaagctagggcgtggggtgcgatcaatcaatttagatatgacagcggaccgaaagccaaaactagtgattgaatgcgatccagatttaattgaggttgaaggattagaagtagaagcatttttaaaagattattcgaaagagtatcagaaatctcaacatacacgaggaggaactcaataa

SEQ ID NO: 127 - DNA, 267 bp, Listeria innocua
atcagcctatggaaggatgtatttcatttcgttgcgcgtataatgagatgtagaaaaaggtgtggagggattaaaatggaagaacgtttgtatgaactagaagataaagtgcaggatttagagctagaagtacacgatttacgtgaaagaattcaactactcgaagatagaccagctgctcgtcctagcctgattggacacaatgtatgggttttaattccattagtcgctattttttcatggatgattgttgaaatctttggttaa

SEQ ID NO: 128 - DNA, 267 bp, Listeria innocua
atgaaagtaggagacattttagaaattgcgggacgagtagttggaagaattgaggaaataacagaaggcacactgcttgttaggaagggttatgtaacttatcaaggtggacaaaaagttattgtgcttaccaaacaagcagtgtacttagatagcgaaacaattaaaaatgcatattggattaaaacaatagattcatcgattatttcggaaaccgttaatctcattgcctgcgacaacttgattcgcgaattcctggacatgtaa

SEQ ID NO: 129 - DNA, 270 bp, Listeria innocua
agctcaatcattgcaataaccatcgccgctagacctgatttcatatccgtcgcgccacgtccgtatattttcccttcatgctccgttgcttcaaaaggcgggaacttccatttagatacatcgccagcatcaaccacatccatatgccctgaaaacgccaaaactttgccatcattagaaccaatttcactaacaagactagctcggtctacatcatattgcacctttttagactcaataccatactcagcaaacaacttctgtaagtag

SEQ ID NO: 130 - DNA, 270 bp, Listeria innocua
tatcaattattcgctcgtcaaagcgttcaagtgatacaatgtgttttttgttgtcgatgtatacaggaactacatacttgtaacgcacatgatgattattctttaaaaacagtacttctattgaacaatttctttttaacgcatctactaacactattgaatgttctaaaatatcatcaattaaattatacatgttcttcacctcttgttaacattataggaacaaacgttcttgaaatcaagtggaaaagtaattttttagtcttgtaa

SEQ ID NO: 131 - DNA, 270 bp, Listeria innocua
caatggtttcggcgtttttgttactttagtgataaaaattgtatacaaaacaaaaacttgaagaaacaatctgaaaatgtcaatgattttcaaagaaaaactattttttttggtttacaattcacaaagttgtcaaatttagttttttttattattatgttcatagggaagaattttacgttaatattgcttgcttataaaagtgattttttctatgggggaatttttctcgagtgtgtacttatgttgcatgtgagcattgtttactag

SEQ ID NO: 132 - DNA, 270 bp, Listeria innocua
atgattaattctaattatagggaaagagctgcagaagatttaagaatgcgaataaaaaaagtaacaatcaatggcgaagaacttccattcacttctactaggaatggaaacaaagtaacagttataactgaacgaagccctaagattacacaaatacaatcattaaagatactagacgaaaacaatgttttaattttagaaaaaagttcacaaaccgatgtgagagagaatgttacattagattttaaaattgaaattgaggtgaaatag

SEQ ID NO: 133 - DNA, 270 bp, Listeria innocua
agctacacgcatggaaatttgatggatatgaggtcttatctaatgcagatgaaaacttttaaaatttggctaaaaatttactgggtttctggcctttgtcaaaatagaagctttgaagtagaagctagaactttcaaagaagcatttgataatgcagaaaaaaaggtacctcaagaaaaagtgaagaaaataaaacatttacagggagatatcgtaggttacatttttgaaccgccaaagagaggagctaataattttgaaacgaattga

SEQ ID NO: 134 - DNA, 270 bp, Listeria innocua
tgctgtaactggaatgttcgcaacatcatatatttctttaactgttccgtactcaccttttttaacaaactttgttttgtatgttgtttttactttgcttcctacttgtatgttcattgtttcgccacctctttttccacatctcttttacgcaacaatcgttcatatttacgtcttgctttcttatctttgccatggcatttttcatatttcccgtcgtatgtgaacagcaaatcaccatatactcgactgctctttcttcggaaataa

SEQ ID NO: 135 - DNA, 273 bp, Listeria innocua
gctgtaattccagcattacttgcattgccaccttcaacaccgcttgtatcaatcttactaacgaaaaacataagtagtgccaaagttaaaactgctgcaaataagacaatttgcataatccaactagattttctagaaaataatttagtgaattcattttttattaatgctatcatgcttttacacctccgccatttgttaattctaggaatcgttcttcaagggaggcttgaagtggaaccatttccaataaatcgatatttgcttgaataa

SEQ ID NO: 136 - DNA, 273 bp, Listeria innocua
aattccggaggttcaatgatgaaaaaacaaattcaatcaatcgtaaaaggagttcttaattcagaagttttagcggattttgttccaggtgaaattttaaacattgctcctctttcggtgaaaataaatgacaatgataaactgattctttctggtgaacaagttcagattactgaaggatttatggaacgtggaccagttgaaggtgatagagtactctgcgctagattaaaaggcggtcaactattcgttgttttggatagattaatttga

SEQ ID NO: 137 - DNA, 273 bp, Listeria innocua
aacagaaacggaggtgattttatgcaagttgaaattgatttaaaatatatcagagaaaaaagagaatctcttggattttctcaaaaagatatggctataaagttaggatttaagaatgcatccacatatttaaaatatgaaacaggagagtataaaattaaagcagaaatgttgcctcttttggcaaagatactaaaatgcaatatatcgaatttttttaccaaaaacgttgctaaaacggaaacgaaagattttgcgaaaataggaggctag

SEQ ID NO: 138 - DNA, 276 bp, Listeria innocua
atgtctgatatacaagtaaatgaatcacaaataattaaaagtatgaatcaatttgctggtaagcaaaaagtactttataaaaaatcttcctctacttcccataataataaactagctacatatcataaaatacaaactatattaacaaaaatggatactcaaatgaatcaattacagcagttaggcgagcgaacgacacaagacatagagaagaattgtgctgaattcgttaacttagataaaaatctattaactgatattgaagtaacggggtga

SEQ ID NO: 139 - DNA, 276 bp, Listeria innocua
aggttcgactcctcttgggcgcactttattaaacgggaagtagctcagcttggtagagcacttggtttgggaccaaggggtcgcaggttcgaatcctgtcttcccgattgtttcatcttttataatggggccttagctcagctgggagagcgcctgctttgcacgcaggaggtcagcggttcgatcccgctaggctccacttacttcacatttaatcacataattagaaagaaaatggtagccttattattatggcggcgtagctcagctggctag

SEQ ID NO: 140 - DNA, 279 bp, Listeria innocua
tacattatcctgaggcaaatcgtgatagagtttatatctttgctgaatttgaattggagggacgatagcatgagagaagtaatccttttaaaaagagaagagtactacgaagaagaaatagacatcagaacatcatatcgttataaagaaacaaacgaaatagcatactttcacgaatttgtaactatccaagaaacaatagctggtgaatcgggcgtatatgctgttttagaaaaagataatggcgagtgtggattgtacggactatctgaattttga

SEQ ID NO: 141 - DNA, 279 bp, Listeria innocua
tccattgttagcgaaccagtatttccagttcccggatcagtcggattacttgggtctaatggatctatcggtttcgttggatcttctgggtcaaccggattaactaccccagttcctgctttaaatttaattgatgcttttgaatccccttctgaagatactgcaaaagcagacggtgcaaaaagtgtgactgaagttatgccaattaatcctacaattaatgtttttttgaaaatcattttgtttctcctttcgtcatgcgttatctttatattatga

SEQ ID NO: 142 - DNA, 282 bp, Listeria innocua
acaattggaactgccaatgtacgaacgatcatagttaagaaaagacctgctactgcaagcggaattgcaattgcgattgcggacggaatacctgctaccccttgtccacctaaaactaatataattgctgaagctactgaggcaagcgcggcatctggtgctacggctgctccgatgtttgcccatccaagtgcgatcatttgtagagttccgccaaggatgatacatgctgttaagttacctgttacgagaccaattaatgtacatgcgattaatggctga

SEQ ID NO: 143 - DNA, 282 bp, Listeria innocua
agtggcaagcgcccttttttatattcgcggataatcgtgaatgtcgggcttttaatcatttgcggaatcaaaagaccttcaccaagaccttttgtaaaagtagttttccccgcgccgagatcgccttcaagtaaaattacatctccggctgccaattgttcaccaagttgttttgcgagaagcctagtctctacctcacttgtcattattaattcgaattccattacctcacccgtccatcattttctctacatatcataccacaaagccgcgccaaaataa

SEQ ID NO: 144 - DNA, 282 bp, Listeria innocua
atgaaaattaactggaaggtacgattgaaaaactggcgaactgttgtggcaactcttattacagttctaggcgtcgcgtggacagcgggaggctttactatatctgatttagataactggtccgtcttgtggctttcgtttgtaaggttcctaaatagcccaatggcaattattaccacaattgtagccgttgtcggtattttgatggacccaacaactagtaaattctccgatagtttgaaagtaatgaattattcagaaccaagaaaggatgataaataa

SEQ ID NO: 145 - DNA, 282 bp, Listeria innocua
atgtctaattacaaaaaatatgatgaagattttaaaaagagtctagtaaatttatacaacggaggtaaaacacaagctgctttatgcaaagaatatggtgtctctcaaaccgctctttctagatggattaaactttattccgaagtccaaatggaatctggcgaactgctaactgtcaaacaagttcgcgaacttcaaaaacagaaagccttgctagaagaagaaaatttaatcttaaaaaaagcgattgccatcttcacgccacactcgagcaacgattaa

SEQ ID NO: 146 - DNA, 282 bp, Listeria innocua
accactgtggccaatcaccagtatcttgatattgatgagaaaaaatggtcaacactagcttacgtaaaacagccttattgcccgttgcaaggaaaaattcaaatggaccttgactcacatcacgcgtaccccaagccgctccgctgtactgctctaacccatgaggtgaagcatagtgaaccaacatttgatgcgcataccaataaaccgttaaattcagtttctccgctgttgtactttgatgatttaaatggaactgagcagttaattcgtcatagctag

SEQ ID NO: 147 - DNA, 285 bp, Listeria innocua
atattcggtggaagggattctcacccttctttcgctactcataccggcattctcacttctaagcgctccaccagtccttccggtctgacttcaccgcccttagaacgctctcctaccacgaacctccgaagaggttcatccacagtttcggtaatatgtttagccccggtacattttcggcgcggggtcactcgaccagtgagctattacgcactctttcaatggtggctgcttctaagccaacatcctggttgtctaagcaaccccacatccttttccacttaa

SEQ ID NO: 148 - DNA, 285 bp, Listeria innocua
aaacgacttgaccttgaccgtctgcggcttgatttagaccgttttctaattgatcgagtccagtttcaatctgaccaagtccagtgccaaatgcgcttaggccgtctgaaatttgtttggactgttcatttaattggttcattgcggttgctaattgttgaataccttgatttagttctttcatttttgcttgaagagcggccatttgttgtcctgcagttgtttttaattcattaccagctgtttgtagaccttgtatatcagccgctagtttttggaatttag

SEQ ID NO: 149 - DNA, 285 bp, Listeria innocua; identical to SEQ ID NO: 147

SEQ ID NO: 150 - DNA, 285 bp, Listeria innocua
atgagcgctgaacaaatcaagataagtccaagtacaataatgtatctccagtcaaaagatgcaacaatggcaccgattggaactggtacatatggagaaaccatcgtaaatggattcataagacctagcttgattgagaaccaaccaattaatgctgcaatttgtggcgcaaccatcattggaataaagaatctcgggtttaaaacaatcggaacaccaaacattacaggttcattaatactgaaaaatgttggaattaatgccaatctaccaagcgtcttataa

SEQ ID NO: 151 - DNA, 285 bp, Listeria innocua
atggaggaaataagaccactgaataaaagaattaagattgaagatactacgtatatcgtgattttaacacctattaatgataagagcggaaagaaaactttcaagggaatcatggtagatatgtccttagacggtgaacattttgctagagatagatttgcttcaaatgtagacaccggagttattcaaaattggatgttgaacatgcataaagcatcgcagaaagttgaaagagttcttgaggcttttgaagagtgggatggtgaattgaatgagttctggtga

SEQ ID NO: 152 - DNA, 288 bp, Listeria innocua
ccagccaaaataccaccaatcataccgcctagaaatcctgatccaccaacagtcgccagtgtccctgcgacaagtccgggcgcaaatcctgctcgaccagcaacagaaaccgctatccccgctgcaagtgctggaaccattaaaccaaacgcagtatccccaccaattttagaaaatgcagctgcaagtgcgttatacgaatcagagtcagggtttgaggcatcaatcccaaaagcaaaactaatggcaattaaaatcccgccagctataacaaatggcaacatatag

SEQ ID NO: 153 - DNA, 288 bp, Listeria innocua
tttaaaactgagaatgctgcaactcctgcagtaccagcaatggctgcgatggaaatattatatccgaaagtaaataccgacacgccaacttctgctaaaaaacttggcaagccgatgcccagtgtttttttgaaaaaagctttattccaattcacttttacaaatttcaagcgactggattttttaaagaaatgggtagttaggataagcacaccgataataattgcaatcatcgtagcaagcgcagatccggttacgccccattcaaatacaaataagaataaataa

SEQ ID NO: 154 - DNA, 288 bp, Listeria innocua
atgaaaacaatcgcaaatgagtataaagaatacattaacgagcacattttagagcaagcggaaaatgaccaattcggaattcaacaaactatttataaatttgataacgattatggcgctagtgtaatcaaggaatatatgggtcctggcgtagaacttgcggttattcaatttataaatgacaaaaattgggagctggaatacagcacatctgtaacaaacgatgttcttagaaatttaacacatgaacaactgattgaaaagctagaagagattaagaatttatga

SEQ ID NO: 155 - DNA, 288 bp, Listeria innocua
atcatagataccgtaagggattttattctttatttaaaactttgcaacagaaccttattttctaacactgaacatcgaacgagtaaatatttgaataatatcattgaacaagatcataggcctatcaagaaaaggcacaaattatatcagtccataaggactgcctcatccacaatcaaaggaattgaaactatacatgctttatacaaaactagccaaagagacttttctctctttggcttttcagtgattcatgaaataaataatctaatgggtgttccagcttaa

SEQ ID NO: 156 - DNA, 288 bp, Listeria innocua
gaaacaccgagttggctaagtccaagaatcattactacatcaaaagttcctacgccccctggaaccatcgaagcaataccgatgacagaagcgataacaaacaatggaaataccttgaaaatatcaactggttctcccattaaaacaccaataattgcaaaacagccaaatgcaaagccccactctaaaagggaagcaacaattaacgttaattctctcttaattggcaagtccacgaataacgatttacttttccattttgtaatcgtgaataaaatcggaaagtaa

SEQ ID NO: 157 - DNA, 288 bp, Listeria innocua
ttgtctccgttaaagtttacagtcactattttatcaccacttttagtagatacactcgcaggaccattagccgcttgcgcaatctctggagttacagttatcgaatttgttgttgcaggaccattagcacctgtagaaagcattgctatagaagctgaactagcaggtagcggtacagaaggcatttgtataacgttattaactgtatttctttgttgtcctcccatatcgaccccgagagcattagcagctgctccaagaagcatttttccacgccctacattttga

SEQ ID NO: 158 - DNA, 291 bp, Listeria innocua
tcaacggaaacagataacatctactctgtttggagcggatgttatttacgtttagaaagagtgagcataccgaataaaatacttgctgtgctcgcggattcgtctgtttttgttgaatttgattgtcttacagaactgacttgctcttgtgctattcctgcgttcagttgttgttctggactggtcacagtatcaatttgcgccagtacgtcattatgggttacttttttcataatatttccacctgtctctgtatttgaacgaacaatagaaattatactattattatag

SEQ ID NO: 159 - DNA, 291 bp, Listeria innocua
atgattttatatggagtagtaacatataacgaagtaacagagtggacaacggacttcctaacagctaaaaaatggttggaaaatgctaagcaagttttctatgacggagaacttgatgaagattactatgttgcgttaataaagttagacgtagaagcattcttatacgataaatatgacaaagaaacagatttgagtgatcagttacatgatgaagctgagacaatgaaagagtattgtttgttattagatgatgacggaacttacatggtgaaagaggtggcgaaatga

SEQ ID NO: 160 - DNA, 291 bp, Listeria innocua
atcataatcggcataaatacaaatacaggccatactgattcaattctcgttaagaataatactagaagcacggtaaatgaaatagacgcaccaagtaagttagctgataaagacttcttccagcctttcggacgctgtttccaccattttacaatcatgcctgtttgcgacagagtgaatggtatgaaaacccctacagaatataacggaattagtaactctgttttccctttaaataatataattagcaagatagatcccactgctagagtaataattccattggaatag

SEQ ID NO: 161 - DNA, 291 bp, Listeria innocua
gtgatggataccgatacaattttagaacttgtaaaagcaagagaaggtatttctagcaatgttagagatacctatttacttgcgataatcgacggagtaattcaagagttagaaaatgaaaaaagcattgttttaaatgttgatgatgcgaatcatttaatgtttgtagttgattatacgtcttggagatacaacaatcgtgactctgaaaacatgcctcgtcatttacagtatcgtttgcataatcttattattcaatatcgagaggtgtatgtgaatgaattggaatga

SEQ ID NO: 162 - DNA, 291 bp, Listeria innocua
atgaaaaaagaacaaattagtactcagttttatgaagtaaatccccacacaatgattatttttccaaaaaaatctggaagtatagtctattcagaaatttatgaagttgattctcattatacttctaaatttaccccatttgagttaattaaaaccagctgtaactttttcggatcgagttatgatggagggagaagaaacgggataccaaaaataaagacatcctctcaaaaggatgtctttattttacttttatatagaagaaacagtatttctgtgactaattattaa

SEQ ID NO: 163 - DNA, 291 bp, Listeria innocua
gtgatgagagatcaatatgcagattcaaaaaaattatttgatcgaattcgattaggtgtgaataatgctgagaaaggcacacaagttgtcaaagaaatgttaaacaactacttcttattcaatcacgaaccagaagaagctttcttcccaatcgaaaaagataaacattttattacagggaaagcagaagaagaagtgcaacgtcgatttaaaatcatgcgtgatcaaaagaaagaagcgagcagaaaaaaacaaaatgttccagtagtaccggagccgatccatgagtaa

SEQ ID NO: 164 - DNA, 291 bp, Listeria innocua
gagcgaggtgcaggcgtgaaaacaatcgcaaatgagtataaagaatacattttagaacataagaaaaagaatcagtttgaaagtgaacaaactatttatcgatttaaaaatggctatggcgctagtgtaatcaaggaatatatgggtcctggcgtagaacttgcggttattcaatttataaatgacaaaaattgggagctggaatacagcacatctgtaacaaacgatgttcttagaaatttaacacatgaacaactgattgaaaagctagaagagattaagaatttatga

SEQ ID NO: 165 - DNA, 294 bp, Listeria innocua
agcactcgcgtacatcacattataagccgcaatcattgttttttgcgtatcttgatagccgggcggatagttgccgattttatatccgttagcaacaaaccattttggctcgttaaaagtggtccaattggtgattttgtcgccaaagtggtcgtaacaaactttggcataatgctcgaatgcagcacaaacgtcgtgatccaaccagccaccagtttcttcccaatattgcggcaaatcccaatgataaagtgtcacaaacggctcaatatcatattttttacacgtatctag

SEQ ID NO: 166 - DNA, 294 bp, Listeria innocua
tttttctgtacttattttacttttttacgtctgatgttgaaaactagggcagtaatgattgatataacaatagatttggtaattatatcttttttcattttcatcgcctcatttcctttaccttattataacaaacttaccatacaaaaaaacctaacttctgtaaaagaaattaggttctgtatatctaaaagcctagggagcttatttagcaaaagattaccagtcgtaacggtctttattgtcgcgttgacttgtatgtttcggggaatttccccacatgcgataaagtaa

SEQ ID NO: 167 - DNA, 294 bp, Listeria innocua
atggattatttaggattatcaaaaattatgaaggcaattgcagagcctaatagacttcaaatattagatatgatttcaactggtgaaaagtgtgcatgtgatattttggataattttgattttactcagccgacactatcacatcatatgaaggttttaattgaggcgggagtagtaaccgcacgtaaggaaggcaaatggcaatattattctctggtaacagagaatattgaagaatttcaagaattaatacatcagatattgaatataaaacaaaaagaaggagttatgtaa

SEQ ID NO: 168 - DNA, 294 bp, Listeria innocua
atgatttctccggttgttttatccgttgtaaatggcttaacgcttgtactagaaccactgaaaacatatctgccatcgtcttctgagttagcaacagaaataagaacatcaagtaaacctttgatttcttcggctgattgcgacatattgtctttatcgctcgtaccgttaattgcttgtaagactagagcatttacccggttcatcgatgtggacatggatgaaagagaggtttctgcggtatttaataatgatttcgcttcagttacgtccgttttttcacgattaagctga

SEQ ID NO: 169 - DNA, 297 bp, Listeria innocua
ttctgcgtaactaatggcagaacaaatcgtatctgtatctggatttttatgaccgaatacaagtgtttttgtcattattttcgtctcctttttaactgttttgaattttatttaataaatctgggtcaaattcgccatttcttaacatggcgatttcccatttgtatggtgcttttttcgatgctttatcttcgccgacataaggcgtttcaaggatttttggaatgttcgataattgtggatgatgaacaatatagtgaagtgcatcaaagccgatatgaccaaaaccaatattag

SEQ ID NO: 170 - DNA, 300 bp, Listeria innocua
aatttaatgctttggaaaacatctggtttttcacgagcaagggaagcccattgtacaaaatggtttggatgggtttcaagcacgtatggtttatattcgcgtagtaccttttcaatatttgttttagatggatttgcgattggtaataatgggaaaccaagagacatcaaggaagacacaccaatattaaaacgagaatggacaggtgaaatatggaaagctacaagccctcttggtttgatgaaattaagaatacgtctttggtatttcgttctccagcccatcgaattcgcagagtga

SEQ ID NO: 171 - DNA, 300 bp, Listeria innocua
gcttttccaggtgaaccacccgtattacctttagaggctgtttctgatgaaccactgccagcctttaaatcatttccgtatttcttcgttgcatttagaccaccatttgatgatccattttggttacttgctttacttcctgactctttgtcattagccgctgttttatcgcttgcttcggttttatcttcagcagcttttttattttcggcttctttttcgtcttttttaacaacgattttcttattgtctgttccaccaaaactagcaaggtcaatcttgcgttcgccaattgtataa

SEQ ID NO: 172 - DNA, 300 bp, Listeria innocua
atacctcagataactaataattatccaaggtgttatatttttaattttacttttctggtttcaaacaaactatttctcatgaattttttagaaatttttcagcttacttttagcgaaagagactatcatatatttcataacatcaatcaatcgttctcccttttaatgatgattgatcaaatcccttttttccagtatggtttactcccttttctatactggttttttgtttactttatttttgaacttttgaggtcacgtcagaaatctctatgtgattcgtggaagtacttactgtaa

SEQ ID NO: 173 - DNA, 300 bp, Listeria innocua
aataacaaaatccgccagaaaacttgcttaatcgctttaggaacacttttttctggagtagcgctttcaccagctgcaatcccaaccatttcagtaccttggaaagaaaatccagcaatcaagaacgtgcctaatatcgcgaaaaatccacctttaaatggtgcatctcctgctgtaaagttagaaaagccaatcacttcgccgccaagaataccaacaattgtcagcacaccgacgataagaaaaataataacagtcgctactttaataattgagaaccagtactctgactccccgtaa

SEQ ID NO: 174 - DNA, 300 bp, Listeria innocua
tcctcaagctctttattgccaatcattttgccaaaaacagatttaagaccacttgtattgatatcaagtaatttagaaaaaatttgttttattagcgctcctggatctagtgaatctagaaatgatttcccaaatgacttagcagcttcgccacctacattagccataatattaactaatcccatgcttcctgctacttcttcgcccttcacttcactgctaaacaaaacaccagtaataaaagcatttattgctgaaccaaaagcagaacccgccttactaaaaaagtctttaatttga

SEQ ID NO: 175 - DNA, 303 bp, Listeria innocua
aaaaacacccacttgcgagtgggtgtttttcatcctgccataaattgttctggagtaattccttccatcccaatcaacggatcaatctccgtaatgttttcggcagttaatattcgtttatttgtcatttgttcgagcatcacatcttcactcattaaacgttccgatagcgttgtattccgcttattttcatctacacgttctacacccattcggaaagcttcttcttctccgcaaagaattaggaattgtttacttcttgtaacgccggtatataacaaatctctacgcaacatccggtaa

SEQ ID NO: 176 - DNA, 303 bp, Listeria innocua
gcgatgcttggaactaagaaagcattaatccacgttggaatcattaagtatggattgaaggcaattggtgctccgaagaataatggttcgttgatgttaaaaattgacggaacaataactgcttttccgattgcttttagctgtaaagatttacttaaaatcagcatcataatcgaaagtgataaggttgtacccaccccgccgattgaaattaaagcgtacactgtttcttgtgttgcgatatttgatgcacttgcgccatttgctacggcttgtgagttttctgcgagtcctgccatataa

SEQ ID NO: 177 - DNA, 303 bp, Listeria innocua
tatttattcatttttatatataagtattactttttatttaatgatagattcatttatagcttcgtattttttataatatatacaaaaaaagtttcccacttttatagcgggcaactttttttatttttcatgaaaaaatctttttatggtttaaaatggaatttattttcgttttctgctggcaaaagaaggtttttgcttagggtaaaaaagcattttctttctttttgtgctcttaaaatcttattttccactttttacaaatccgtttcatccagctatgcttatattgttccattataa

SEQ ID NO: 178 - DNA, 303 bp, Listeria innocua
tcaacatttgttccaacttctaaagacatccccgaactagacataataaatacattgccagcagctgccttagaaaacgaatttagtagtcttctagtatcaactgtctcagatgaaataatctcatcttgcacaatatcaagaaaggccattccagaagcttctagccattctttaaactttttaggcaagtcttttttgaatgtatctaattctgcaataaattcttctaaaccttcgatttccaatcccattacagtatcacctttcggaatgcttccacttcaatgtgatggtttttag

SEQ ID NO: 179 - DNA, 303 bp, Listeria innocua
ataaattacacattacttctttttttgttgctcataatattcaataaatgttttgaccgctttaacagcctcttcgtcatccatgacacgtgcagcaactgctttgaagtccggattctcttctacaaactttgccacgtcagcatctttctttgcagcgatgtccgtgatatctatttcctcttcattagcatattcttttcttttttcttctatataagcgagaatttcctccatttcctcttctgttgcgttgggatctatatgagccgcgattgtatcagcaatatcgttttgttttga

SEQ ID NO: 180 - DNA, 306 bp, Listeria innocua
aggaaaaagccttcaaatgaaaagaagaattgcctccttcttttggctcatttttcctgccaaacaaaaaaagatgtcagaaagaatcagacatcttttcaattaaatcattattttttgctcatggaaagttcatgtagcgcggataattctttctccagtgtggaaattaatttttttccttcttccggttcaattagtcctaggcgggttgcaaaattaatttcacgggataagccatacatctgtgtatcaagaacttcttcatatgctggacattgcggtaatgttaaattatccatttga

SEQ ID NO: 181 - DNA, 306 bp, Listeria innocua
atgaattggaatgatgaagtaactttagtatcagaaaaacttgttactgatgagataggaaatcaaataccacagtcaactgaaattaaaatactatgtgagaagaaaaatgttacacgtcaagagttttacgaggcgagtactagagggtttaaaccatccctcgttttgaatattcatgggtatgaatatgggaaccaaacgaaacttgtttttgaaaacaaacagtatgtaattattcgaacatatagcgttgattcagaaagactagaacttacttgtgaacgtgatttaggagggcggtga

SEQ ID NO: 182 - DNA, 306 bp, Listeria innocua
tttaaaaagatattaaacggaactgtacaaagcgtaattaacatggtgactctggtcaaaccaagcgaatcaatgaatgagcgtaaaatcgctgaaataaaaaaagcgggaatcccaatacatatcccatttaagaagtggcgagcgatatgcgcaacttctgcggtgacaggcatatgcgtcaaaatcgttggaacgactaaaaaattaataagaattaaaataaaagctaaaaataaagcaatatataaaccattatgcacggtgtttttgacttgtttttctttcttcgccccgattaattga

SEQ ID NO: 183 - DNA, 309 bp, Listeria innocua
tgttgtagagatgcgccaattccagcgtttgcaagagcaacccatactgaatgttgtgcaatacctgaagattgttcagaccatacagggaaattatctgcatatagtgcaaagttttcttgtagaccttcaataacagcagtatcttcaaagaaaagaactgttccgtatccagcgcggaaagaaccaactttttcttcagtagctgcaaagttttcagcaggtacgatagcgcgcaatgtgtcttctacgatattccaaagtttatcatggttttctcctaaaagaataacagcgcgagaactttga

SEQ ID NO: 184 - DNA, 309 bp, Listeria innocua
gacagcttacaccgcctacacggtttccaaccgtgctccttcggccactcggacagctctccagaaaatggctccacaggcaggactcgaacctgcgaccgatcggttaacagccgattgctctaccaactgagctactgtggaataataaattgcccggcagcgacctactctcgcagggggaagcccccaactaccattggcgcagagaagcttaactaccgtgttcgggatgggaacgggtgtgaccttctcgccataactaccagacaatatgaagttgttgaaagattgctctctcaaaactag

SEQ ID NO: 185 - DNA, 312 bp, Listeria innocua
ccattatcaagcgcaaatagagcaatgttttcaacaacagcttcatgtacagctgggtcgcgaattattccttttttacccacctgttcacgtcctgcttcaaattgtggtttgattaaagtcatcacatcgccacctgttacgagcacagttctaagtacaggtaaaataagtttgagtgaaataaaggaaacatcaatcgttgcgaattccgctaagccttccgtaaaatcagctggcgtcacatggcgaaagttagtccgctccatgactgtaacccgttcatcattacgtaatttccatgcaagttga

SEQ ID NO: 186 - DNA, 312 bp, Listeria innocua
atgaaaatcggactaaaaccatgtctatcaatccattccattactcgtttaatttgtttatgtccggaaataaatcgcaaaaatcgagtctgcccaaattttcgagctaacaagaaaacacataaactacctgcaattgcagctgtaacggatattaaaaagccgccaaacagtccgtatgcattaacgttaactacaacaaaaacaataaatggtaaaaaaggtaaaaacgcttcaataaaaggtaagaaaaaagctaaaagtggacctaaatttcgatactcacttagccagtacattaaattatcataa

SEQ ID NO: 187 - DNA, 312 bp, Listeria innocua
acaataatattaattactaaaaagatacttaatgtcaaaactgctggtattaatgcagcaaatgatttagcaactgctggaggcaccccatcaggcattttaatcgtccaatcacgttgcacgaagaaacgatataattctccggcaataaaaccagtaatcatcccaataaacataccttttgcaccaagtctgtctaaagaaagtgctccagtaactaattccccattggcactattaaagaaaaatggcgttaaaatcaagaaactagcgagcgcaacagcaccaccatatatagcttctactttataa

SEQ ID NO: 188 - DNA, 312 bp, Listeria innocua
ccatttagtatcaatccaccgattcctacaacaagtgcgattaatacagtcaaagctaaacaaaccaatgtgtatctatctgatttttcaatatattcatttccgttttcatcaatacttattagcccaaaaaatcgtaataacttcattcaaaaacctcatttcaagaatattttaatccactccgctacaatatatgtgactgacagtaatgctccgatttggaaacaaaacagaaaaagtaatattttattttcatgctcacttatgaatttcttcattctcatttctccgtttctatgttataattaa

SEQ ID NO: 189 - DNA, 312 bp, Listeria innocua
atgtatttatcaaaaaatcatctccctattttaagaaaacagaaaaatgattcttgttattatttcttttcaatgaatatttcttccccaactgtattatcatctgtatacgtttcttgcatggactggataattgctcttaattcttctaaactaacagacacatctgctgcaacaatatcccaagcaacttcttcccgtccgttaatcgatgtcatgatctttaatcttccctgcgaaaaaagaattactgctggcttaattagttctgtccctttaatttcattccacggcttaaaatcgccacgataa

SEQ ID NO: 190 - DNA, 312 bp, Listeria innocua
atcttttctatttctttatattgcgaatctacgtttgcctttctttcttctgctctcttttcagaatctttcatggcgttgtctagtaacgcttgtacagcaggtgaagcttcatcatatgctttcttgaagtcacccaatgcatcgtctgtattcttcttaatttcgtccgccatgtttttgaatgcactgacaattttctcgctgtctgccgttgctcctgatgcaaatgtgtctaatgccagtgtaccttccgatgcaaactcattaaatttcaccatagacttatctgcctcggcgccaatgtcatag

SEQ ID NO: 191 - DNA, 315 bp, Listeria innocua
gttgttcatgataagaatcgaacatttcattacattttttgcttatacattcattttctgtgctatgcttttagtaggaacaaatattctaccaatggcacatccaaacaaaatattttccctgaatacggtatgacaggaagccgatatagtaagaacccgacttactgttcaaagattgtacttcaagcctattatttcgaaacaagaaataagcctgttgtgcaagtatttccgtccttagttactgtgtatgatttaccaaactatttttcaaaagcatataagccacaacaagtgaaatactttaaataa

SEQ ID NO: 192 - DNA, 315 bp, Listeria innocua
aaaacaaggactgcaaaaagcgttgcgccaacgagttgtgtaccatttgaaatcggcattgccttcgcgacactagaagccgcaatccctttaaactgcagtaattgcccaaaactccaaaagatacccgaaacaaaactcactataaaagaaagaactgttatttctggtgataaaatccagaacaaaatgaaagcaaataatagcgcgctaatcgaagtccccagtagttgttcctcgggggtgctttttcgtaagttcgcaattatcggcataaatccccacccaagaacagggagtaacgcaataagataa

SEQ ID NO: 193 - DNA, 315 bp, Listeria innocua
atttatttagatagtttatcctgcgtgtgttttttgctatacttagaaggtacaataaaactaagggagaacagcatgaaaaaaatcatcaagtttatttttgttactttatttattttatttttagtagattgtttatggacaatgattcaaacaaaagacggattagattcacctctttggctacaaattgtttatttattagcttatctagtttctgcaattggtgcctataaagaaaagtggttcggtttttttatcgcatttttatttggagttatgattatgatagcaagtattattatcactttataa

SEQ ID NO: 194 - DNA, 315 bp, Listeria innocua
atgacggcagaaatagatatacagaattctatacgtttagaactttcccgccatgggcattatgttttcagagccaacgtgggcaaagttagaatgccaaacggacgaatatttgatacaggattaccgaaaggctttccagatttattcggatttcgcggaacagatggaaaaatgttttttattgaagtgaaaaatgagatagggaaattacgacaagaacagaaaaactttcaacaagcgatggaaataacaccagctatttgtggagttgctaggagtgcagaggaagctttgaaaatagtggagggataa

SEQ ID NO: 195 - DNA, 315 bp, Listeria innocua
atggaaggcactgaattacaatcttttaaaataatatcaagtgcaggagatgcgtcttccttgtttctaaaagccgttcaacacgctgaaaaaagtgaatttgcagaagcagaagcatgtatcgagcaagcaaatcaatctttaagagaagcacatcatgttcaaacgtctttgattcaagaagaagcaaacggtagctcaaaagaactttctttactgctgattcacgcacaagatcatctaatgaatgcttttgtatactctgacttagttaaatccgtgcttaatttgtataagcgtttagatgaaaagtaa

SEQ ID NO: 196 - DNA, 315 bp, Listeria innocua
atactatctagctccatatcaagaatgtttgatttacgtacggcttcgataactgtcgcggttgaaaccatatcaattgagcgaaccggaatgcccgtacgttcagaaataactggagcaaaacttgtgagtgagcccatatcaacaagtagaagtagaccacgtcccatatccatttctttcgctcgttcagtcagcttatccagcacgattttcggactttggtcaagcggcatatcaattccttcgaccaatccttcgccgagtaattttttcgcaacgctaaccatactactagcggtattatttccatga

SEQ ID NO: 197 - DNA, 315 bp, Listeria innocua
aagcgaagaaggaggattcaagcgatggaagaaataagagcaattcagaaagttgtgaccgttaataacgaaaaaaaatatattgtaagaattacaccaatcaatgactccacaggaagaaagacgtttaaaggcgtaaaagtaaatatgttacttgaaaatggagagcactttgctcaagatacttttgcatcaaccatcagccctggaataattgaaagctggattgtaaatatgcacaacgcaagcgaaaaaattcaaaaaaccatggatgcttttgaaagttgggatggtgaattgaatgaatactggtga

SEQ ID NO: 198 - DNA, 318 bp, Listeria innocua
gggagaaatgttgcctttttcaagttttttacctccctatttaacaatttgatgacaggaacctttagcgtaatagtagacttgaagcagttttgttctaattggtctattccggtagcgataactgtaatgttttttaatctacctgtaatgttatttagggtaaaaacaagttacaatgttagcagtagaaaagaccaacacaggtgcttttttattttgtctaagaaaataagaaccacggataacttttcaaaagaatttaaaatcaaaaattgtgtttcctattacaataatcgagatattgtcataccctga

SEQ ID NO: 199 - DNA, 318 bp, Listeria innocua
agcagtttgatgaaccgaaggttgtatgtcacagataaagccccctctattacaagtgcctttaagaaactaaaagaatacggcttttatcaagggacagaacatcgtaccattaaatacctgaataatttgattgaacaagaccatcgtccagtaaagagacgcaataaattctatcgaagtttacgcactgcctcacccacgattaaaggcatggaagccatccgaggattatataagaaaacccgaaaagatggcactctcttcgggttttcggtctgtactgaaatcaaggtattattgggaatcccagcttaa

SEQ ID NO: 200 - DNA, 318 bp, Listeria innocua
tcatttcgtaatctcctttccaaacgatcggacactttcgttaaaatggtaatgacgattaagtacataattccaatgataagccaagtccatgtactttcaaacgtacgcgccataataattttaccagattgtgttaattcgacgagtccaattgccgacataatcgacgtatctttcaaagtgataacgaactggttgataaaggatggaatcatcatccgaattgcttgtggtagaacgactttcatcattgcttttttatgtggtaaaccaagacttcttgctgcttccatttgtcctttgtcgacagattga

SEQ ID NO: 201 - DNA, 318 bp, Listeria innocua
tacaaacttcacatacagaaagggaaaacaaccatgacaaaaattcgtattaataaagaaaaaatgaataatcatgctacaaccctaggtgagagtgcgggaaagttagattactatcctttgaaaaatgaaaacatgagttatacgcaaactaattctatccacctttttcgggaatcattacttgaactacttgaaggcatcgaaaatttaggatctgttgcgcaagatgatgctactcgaatcaagcaaatgggggaagcttttgcaaaacaagataaatccatcagccagaagatgaatttggaggtgcgttaa

SEQ ID NO: 202 - DNA, 318 bp, Listeria innocua
ccacgtttaaagcgatgttgtttcccaccttttgcttcgatgaatgtttgcagatgtccgcttgttgttgagtcagtcacgatagttgttcctggcttttcttccaaaataatactagaaataacagcaattaatggattacggtttaaactttctccatttttatccataatcgcagctcggtctacatccgtgtcaaaaatcacgcctaaatccgctccgctcgcaagtaccgcttttttcaagctagccatagcttcttcattatcgggatttggaatatggttaggaaaattgccatccggatctaaaaactga

SEQ ID NO: 203 - DNA, 318 bp, Listeria innocua
ttcatttgcttttttctgagcggcttctgctgcggctttttctttagcagctttgtctgcagcggccttctctgcggcagctttttcttctgctgcttcttgttctttcttagcggctgcggctttagcagcttcatcttcttgggattttttatctgcagcggctttctcttctgctgctttcttttcttctgcagctttttcagccgcggctttttcttctgctgcttttttagctttttctttttctgctttggtttgtgtgttgtcagaaacattaactgtcgattcagtctctgttttcacttcattagttga

SEQ ID NO: 204 - DNA, 321 bp, Listeria innocua
cgaattctggaagcttctgaaataatttggttcacagctggcataataaagtcagcaaactgcatttctgctactgggcggtatccatacatcgctgctccaattccaactccagcaatcgcggattcagcaagtggtgtatcaagaactcggtcttcaccgaactcatcatataaaccagcagtcgctttaaaaacgccaccttttttccctacatcttctcctaaaataaatactttatcatcgcgctccatttcttctttaagcgccattgttattgcatcaatatatgaaatgactggcattcaaattccctcctaa

SEQ ID NO: 205 - DNA, 321 bp, Listeria innocua
tccatatttttcattttttcacctacttattttaataaacctgtaaatgctcctaaaataccaataccagcaattaaaagcagaatccaatgcgcttttagaccttttttatctaaccaaaagataaagaaagtgaagccgagtgcgagtatgcctggaacaataccatcaaaaacgctttggattgtaacagcctcgtcgccagaaccgaatttcattggcatattgattgttaccatcgtggcgaccatagcccccactacaccaagacctataatagaagcgccgtatgacagtttatccatcaaaccagtcttttga

SEQ ID NO: 206 - DNA, 324 bp, Listeria innocua
atgactacgtttgaacgaataaaaaaactttctgctaagaaaggaataacaatttcacaattgactagcgaattagaaatgggtgaaaactctatatacaggtggaaaactcaaaaaccagctttagacaaacttcaaaaagtagccgactatttcaatgtatcaattgactacttattaggaagaaccgacaatccgcaaattgactccgacatccctccggaagcgacaacactagccgctcacattgatcccgcggcaacagaagaagatatgaaaaaaattcttgagtatattgatttcattcaacaaaaatataaataa

SEQ ID NO: 207 - DNA, 324 bp, Listeria innocua
atgcaaaagtggcaaggcatgattctatccgagcatacagaacaactagaacaagcaaaaagaaagttatcttggctaccgcagcaaagtgaagaatgcctggtagaaattttaagctacgctgttacaaagcagcatgctataacgatacaacgacttacagaagatgaaaatggttatcccctaccctttgtagtcggtagaatcgttggtgtggaagacgatcgtatttatatgagagatatggccggagagatcactgtgttgacatttgacgatatcaatcatatttcagaagggacaatcgaaaaatggtacaggtag

SEQ ID NO: 208 - DNA, 324 bp, Listeria innocua
cgattcaccgtttctctttgttggaaaaagatgtctggattttggttggaacctagtgttttaggattatttggcgtcattgcgcgatttctgaattgttgtaaggcctctttatcaagtaaattttctaattcgtcatattcgagcacttcgactttttgtaattcatggctcgtccggaagccgtcaaagaaatttaaaaatggtaaactcccttttaacgaggctagatgggcaacggcagataagtccattacttcttgcacggaaccttctgcaagcatcgcaaatccagtttggcgcgctgccatcacatcactatga

SEQ ID NO: 209 - DNA, 324 bp, Listeria innocua
atgtcgaatgaccaattagctgaacgattaagaagaacaaaagcctctgtagcggcaagaaaggtactgttaggactgacaaacaaacacatgtctaaaaaagatgacaaaatgattcgtcatcttggaaatcaagggtacacaatcaaagagatttcagcagaaatgaatttgccttattgtttaattaaaaactatataagaaatcacagaatcaattatagaagggaatcaaaaaacgagatgaacggttggcgaaaagaagcagatgcgacatattcgcattatattaactctaaaaaaatcaaggaggaacaagcatga

SEQ ID NO: 210 - DNA, 327 bp, Listeria innocua
atattattaagaaagaaggttgttattctgggcttagaatggtcaataaaatcaaaagaagattatgaagaaattttgaaaattatagaaaagagtattattgattcggggataaaagatgtgaggtcatacttcaatgttttttgtgtgccctctggtatcgaaaagtggcccgatttaatggatttcaacatctatcacactaatgaagaaacttatatatattgcttattaaattcaagcctagcagaagccgagttaacgatgaaaaagattaaatgggaattggatgctttaaactatcaatgcgagatagatgaattataa

SEQ ID NO: 211 - DNA, 327 bp, Listeria innocua
cgtgataaatacgcctcacttaaaaactctttttgtgcaaactcacgaagcgacaaggcttcatcaaaccgctcctccacttctcgaataatgcgcgaaatccgtttatcattgacttctttcctagcagaagatggaatcccttttttcaaaaaacgcgtaagtaataataagatttggaacaacgccgattgcgcttctaatttattcgctcgtttcttcgtcgccgaagcaatcaaaagctcactcaccgacttcctcaacgacccaacaacccgctctctcccagggtcactctccttcgagaaaaatttaaaagaatgctga

SEQ ID NO: 212 - DNA, 327 bp, Listeria innocua
ttctctccttattctgaaagtgtctactttcttgatagtatagcagattttgtgtctacttttttagtatatatccagataaagaattatgaaaaccaagcaaataatttaatcgaagtacagaagcaaacacaaaatcttttagaccaacaacaacgactagccttacaagataaaaagttgttagaagaatacaaagcagaaatcaaagagttaaaatcattaacaactcaatcaacacctgctactttatccaaggatgttaaccaacccaaagatatagagatagataagaaaaaacgacgttggtggccatttggtaagtaa

SEQ ID NO: 213 - DNA, 327 bp, Listeria innocua
ttgatggattataatttaaaagaatataaaaaaattttagaagaagatatttatttacggggttatcaagaattaagatacgctatattcgaaggtgagaaaaataatcgacaagaatatcaagttagaattgagaagaatgaagctaaatttgaagtttatatgacagctgatagagctagtgtaatggggaaacatgagtttaataatgtttttgatgctatggataaatttttaaatattatgcaaagtaggattttatcgaatcgtcgaagagtgaaagacggggaaccaccagaatactcctgtccgttatgggataattaa

SEQ ID NO: 214 - DNA, 327 bp, Listeria innocua
tctgcgacgcgttttgcaaactccatttcatgtgtgacgacaatcattgttgcaccggcacgagcaatttctaacattacttctaaaacttcaccgacaagttccggatcaagcgctgcggttggttcatcaaataaaattacatctggattaatcgcgagcgcacgtgcaatgccaacgcgctgtttttgtccgcctgagagttgggaaggatatgcgctaaacttatcggctagccctacctttgttagctcccgctcagcaatctcccgcgcaatttttttcgggatttttctagcaacagtgagtccttccattacattttga

SEQ ID NO: 215 - DNA, 327 bp, Listeria innocua
ttcgttagttgtaaattgaccataaatagatattttgcgcttggccaagagctgacgagattggttaaaatcgttccggtaatgagtgaagcaagcataattcccatcacggcggctgtagagcggactagcacggatacaaacatcgtcaacacgccgaccacaacactgacaaaccatgcgagtccgaactccatgagcagtaattgccaaaccggaagctggtacacattggttgtcgttatcgcgccatctttcacaccaaacccggtgagaactggtgcatcccagccaccgtacccaaagacaattccagaaatcaggtag

SEQ ID NO: 216 - DNA, 327 bp, Listeria innocua
gggctgcatctaagaggtgtgccaaggagtttaacagccattttacttttaaatcgtagcatagaaaattgggcggaagaagtcctatttttaggactttatgaaaaaatgttagtaaaacttgatatattagaaatgaaaaaaacagatctatttgcatctttttttatgatatttaacaagagaaagaaggaagttttatggctaaagcaaaatatgacgagaattttaaaaaaagtttggttgctttatatcgcagagggaaaacgaagcatagtatctgtcaggaatttagtgtccctaattcaacttttggaaaatgggtaa

SEQ ID NO: 217 - DNA, 330 bp, Listeria innocua
agtttcaggcacaaatctgccaccaaattttccgtaaaaaccattttcatcaggtgcttgatatgtcattattttccaactccttttgctgttttaatgaagattttaattttttcaggatctttttcaccattcgtttctacgccggaagaaatatcaacggcatatggttcaaagcggttaatagcttctttcacgttttcgacatttaagccaccagcaataatcaatttattttttataagtaaatcactatttactttatcccaatcaaaagttttcccgctgccgccctcgtattcttctgccggagcatcaagtaagatatag

SEQ ID NO: 218 - DNA, 330 bp, Listeria innocua
tcttattcgtcttttttatcgtttggagtttgctcaatgtttggagcatcttccgaagttacttcttttggttcatcttgtgtttcttcgactttttcttctttcaagtcttctttttcttcttcaaaagatttacctgctacttcttcgtctttttcggaaggatattccgcttctacgtcaatcgtatcgatatctggaggcattacaccgtcatcaaatagggaacgaatttggcgagcatctaatgtttctacttttagtaatgtttccgcgataagtttatgttgctcttggtgttctgtaatgattgttttagcgcggtcataa

SEQ ID NO: 219 - DNA, 330 bp, Listeria innocua
agtagtgattctttcttcccttcttcaaattcattcgtcccaaactctgcatgtttttgtttcacttgttctttcgttaaccctgtgtctaaatttgtgtgtagtttgctaagaagttgctcgactgactcttttacccaaagcatacatctacctcctacgtacctactactaaaagcaagtacttactttattttgttgcaaaaaaatatttatttaaaatatctgctttcttattataattgtataatatatcacgttttattgcaagtatttcgtttttctttacaaatatccttttctctcaaacatgacttcaaagcggtttag

SEQ ID NO: 220 - DNA, 330 bp, Listeria innocua
tacaggagatgtttttatttactctttttgagtaaggtttctacttttttatttaagcggattaattcttctatttcttcttcggtcaaattttcaaatactttcatcatcgctttgtacataaaagcgtttgcagtggagcgcttggataagtcttctcctttttttgaaagctttagtgttaaatccatattatcagttgggattgttttgtttaattttacaacaaggcctaagctaattaacccgtccacattagctgcggcagaacttccagtaattattaatcgtttcgttaaatccgccactgaaatgccaggtgtgctataa

SEQ ID NO: 221 - DNA, 333 bp, Listeria innocua
aataaaaaagaaaccggggaacccgggttcgaccaagtacgaattcgctgtaagcgagatcgtgcggtctttaaacgaagggaatggaattatttggcagaaataaaaattcgtgatctggatgcagctgtcgtgaagcaattggatcaaatggctcgtgaaaaaaagatgtctcgcgaaagttttttgcgtcagtatttgacaagcatcgccgcattggaagaaaccaatcatcttattggaaaacaagaagaggctttccaaaaaatgtctatgggagtctttgagttaacaaaaaatgtacaacaactattaactgaaattcgtgaatag

SEQ ID NO: 222 - DNA, 333 bp, Listeria innocua
aaatttgtgctcccctttttgtgttgttcgtccacttttgttatggaaacaacgctccacttcgttacgccttgtattgtagttctagggaagcggactacgcttctggagaactacaataataaaaaaccacctaaattttcattcaggtggttaacatctcgttactgtacaaaatatgccagtgcaattagtattgcgaagaaaacaatggatagaacgatggttgtacgatgtagaataagttctagtcctcttgctttttgcttaccgaataattgctcagctccaccagagatggcaccggatagcccagcacttttacctggttga

SEQ ID NO: 223 - DNA, 336 bp, Listeria innocua
tcaaggagttcgatatatccttctgttccatttattcgaatacgtgcaccatcctgtataattttagtggcattttcgacaccaacaacagcagggagaccatattcccgagcaattactgcaccatgtgtcatcagcccgccaacctcggtgataagccctttaatcgaaacaaacgcgggagtccagcttggatcggtaaaagctgtaactaaaatatcgccatcttctaaatcagctttttccatatttaaaataacgcgtgcccgaccttcaaccacacccgatgaaacaggcagaccgagaatcgtattttccggaaggttttcgcggtga

SEQ ID NO: 224 - DNA, 336 bp, Listeria innocua
atgaaaacagacgttagtaagctcaaattaacggcatcatcattagcaagcgtctctgatgattctctacaagtacacattgatgattcatatttagaagtacaagaaaaaggatttcctgaaaaatttgaagaaagagcaaataggtaccttgctgcacatcttgcaacattagcaaataaaaatgttaagtcggaagcagtaggttctttaaagcgggaatattacgaagtcaaaggagattctggactgttgtctaccgagtatggccaagaatatgcaagattgcttaaggaagcaaatggcggatcaggaattagcatggtggtggtttga

SEQ ID NO: 225 - DNA, 339 bp, Listeria innocua
tttagtttcgccagcttcttttgcaatttcagcttgatgacggcgtttttctacataaacttccatttctttatattctttatagaaaagagatttcagttcgcgttgtttttctaccatgcgttctgcgtctttcatttcttgttttgttttatccatatagtaacttaccgaattacgacgtttttcttcacgtttttcgattttttcacttacttctttattccattgtttcattttttcaaaaaggtttgccatttttttctcctccaattatttattgtatgggtagtcgaatacatcatcattttttctaggtttatttttatttctagttag

SEQ ID NO: 226 - DNA, 342 bp, Listeria innocua
agttgttttcgctttcacattttcgccttatttatctttcaattgtggataaatggctttctatccacatttttgctttttgacctatattttcgcaaaaaatgtgtttttttcaaaaataaatctgagtttattgatttaattatcaaaattgttcttttccacaagatattcactgcttacacacaggttatccacagaagttatccacatatccacaataaccgcctatatttagtagccgaattcttgttctctaccatatctatatctgaaaaaaatcactatccacaagttttccacagaaaaaaaccaccctcttttttaagaggatggttttag

SEQ ID NO: 227 - DNA, 342 bp, Listeria innocua
ctgtttatcattctttacgctatctgtatcaactacttttactctttgccctttactaaatttcattattcctcatcctttctatttctattaagaacaagctcgctatcagctgtcccttctgtggtagggtcgttaactacacctaagacacctagtagcaagaacactgaatttacaaaatctaatgcttgcttgttgactgtatctgcgggaattgtcacaccaaaccagccgagcaattgctgcgctaagactagcacaagtgggataaccgatacccaaaacactttcgatttcattcgtactttccaattgattttcatgatattcctcctataa

SEQ ID NO: 228 - DNA, 342 bp, Listeria innocua
atggaaatatacattactacaaataacgaaggttatttaactggctattcaacaagcgaatgtacgcctggtaaaaaaattgatatagacgaaaacgatgcctttttccaacgaggttttgccagttataaatataaagcgaatcaacttatatttgacgaaaataaagaaaaagagtttcagtatgaaaagacgctacaagaggcaatgttaagcactgaagagcaattactaacgacccaagaagcactagttgaattatacgagcaaaatactaaattagaacagcagttgattgacacacagctggcgatggtagacatgtacgaagcgaatttatag

SEQ ID NO: 229 - DNA, 342 bp, Listeria innocua
atgagcgagttaataaaagtttttaaatatgatgcagacggtatttttgaacgtgatgacttaattgttttggaaaaaggggaaaaggttccagatggttatacattaattgcgccgccagttccttctgtaaatccagtttttaatgtaaagacccaaaaatggagtgctggtgaagatgcaagtgttatggaccctcctccactatcagaaatagaaaaattaacacaagattatgcggacttaatgctatatgtggcagaagtcgaacagaagacggaacaaacgcaacaagataatgcaaacttactattatctttggcggaggcaggtgttttgtaa

SEQ ID NO: 230 - DNA, 342 bp, Listeria innocua
atgagcgagttaataaaagtttttaaatatgatgcagacggtatttttgaacgtgacgacttaattgttttggaaaaaggggaaaaggttccagatggttatacattaattgcgccgccagttccttctgtaaatccagtttttaatgtaaagacccaaaaatggagcgctggtgaagacgcaagtgttatggaccctcctccactatcagaaatagaaaaattaacgcaagattatgctgacttaatgctgtatgtagcagaagtcgagcagaagacggaacaaacgcaacaagataatgcaaacttactattatctttggcggaagcaggtgttttgtag

SEQ ID NO: 231 - DNA, 342 bp, Listeria innocua
actctagcatctggcgtgtgtgtaaatagaaactacgctagtaaactgttgacttcctgcaaggtgcaaatccttgccgagtatattataaaaaacgaagaaggagttaattacatgagagacattataaaagcggggataactgaggtaaaaggaaaagagccggaattcaaaataaatattgctggttcagaacaagaacaaagttttgcattagcccagattcattacatgaaaatagagcggttagctatgctaaatggtaagacttttgaacaagctaagagtgattatttagaagctctaagcatcattgtaggagcaattaaagataataattaa

SEQ ID NO: 232 - DNA, 345 bp, Listeria innocua
attaacgactttaccttctttataagcccagtgagcagcgaccccatattcagcgatttggtgcatttcatgggttctgatttgcacttcgagtggttcgccctgtggtccaataaccgtcgtatgaatggattgatacatattagattttggcattgcaatatagtctttaaaacgacctggcatcggtttccagcgcgtatgaataatcccaagcacagcataacaatctttaatactactaacaacaatgcggactgcaagcaaatcataaatttcgttaaattgcttattttgctccgacattttccggtaaatagaatagatatgtttcggtcttcctga

SEQ ID NO: 233 - DNA, 345 bp, Listeria innocua
gcattaacaatttcatcatctgttacagaatggatgtatccgccagattcgtcgcgagctgcttctgcaagctcccaactagctggatttccgatacgaatcgctgttgcaattgtttccgggttatcaatcggtttcccttggacaattgcagccgctccttctgcttcaaatccatgcatccgtggaagtccagaagcgtttgcctcattccactctttaaaacctttccagtatgcagaaatatttccggcgttaccgactggaattgcaagaacatctggagcagaacctaattgctcacagatttcgaatgcagccgttttttggccttctaaacgataa

SEQ ID NO: 234 - DNA, 345 bp, Listeria innocua
aaaacgttatctccattaatacttctggtcacaaatacggcctcgtttatccaggtatcggttgggtcctttggaaagatgaaagctacctaccagaagaactcatttttaaagtcagctaccttggcggagaaatgccaaccatgcaaatcaatttctctcgtagcgccagccacatcatcggtcaatactacaatttcttacgctacggcttcgaaggctaccgcaccattcaccaaaaaacaagcgatgtcgcacaataccttgcccacgcagtcgaacaaaccggctacttcgacatttataacgacggctcccatttaccaatcgtctgctataaattaa

SEQ ID NO: 235 - DNA, 348 bp, Listeria innocua
aaatcagccgcctcgctcatttcgctatgtccacctttaataacaaccgcttttacacctaaatcaaaaattttcttagcagcttgttcgatttccgcctttgttgtgattttttctcccagaatttcttcggcttctggaatgttcggcgtaattatcgtaccaagtggcaaaagctcatctttcaacacttgtgtcgcctcgttttcaagcaaagcagtgccaccttttgcaatcatcacgggatcaataacgatatttgggaagttgtgcaaacggatattccgcgccacttcccggataatttctgcatccgcaagcattccagttttcacagcgcttacttga

SEQ ID NO: 236 - DNA, 348 bp, Listeria innocua
agaagcggaaagggcgttgagacgatgaacttaaaagatgttttaagcgaaacaggactacctgtcgcatacaaccacttcaccgaaacggacaacacaccaattcccgctcttccatatctgacatataacgagtctgacagtgtcaacttgatggcggataatattgtgttaaaaaaaatatcaaattacaccatcgaactgtatacagaatataaaacaccatcagcagaattacttttagaaaatgctttaatggcaaacaaactgcctttcaattcctctcaaacagaatggatagaggaagaaaaaatgtttgtaaaatattattatgtgaggatgatttaa

SEQ ID NO: 237 - DNA, 348 bp, Listeria innocua
ccaatatccgttgctactttgatcgctgcttctacggaagtggctgtttttccagctggttgtgggatttgtaagatttctaatgctttttcaaaagcgtcgcggttttctgcacggtcggtatcttctaagcttgtaccaagaattttaactcctcgtttcgcaagcccatctgctaagttaatggcagtttgtccaccgaattgtacgacaacgccaagtggttgttcgatttcgattacatgcataacatcttctaaagtaagtggttcaaagtacagtttgtccgatatactaaagtcggtagagactgtttccgggttattgttgatgataatcgcctcgtaa

SEQ ID NO: 238 - DNA, 351 bp, Listeria innocua
gtttataagaaagatcttggtttaattcttggactggtagtgcatccatatccgctcgtaaagcaatcgttttgcctactttatcgccttttaaatctgcaattagtccggtgggattggtacgtcggtaagggattccgagctgatctagttgttttgcaacttgatcggttgttcgaaattcctgccattgcagttctggatgcatgtgcaaatcgcggcggaaggctatcatattttcttcattatttaagactatttgttttattttattattcatgttcgctttcccccgtccattttttaactgtttcaagtacgacttcgatgcctttttggagcttgtcgtaa

SEQ ID NO: 239 - DNA, 351 bp, Listeria innocua
tgctttggcttctttttgatttacgggtacatcttggacaatatgcgtgtaagcttcacttgttgcttttcgctcgaagtaaacggcgctatcaccgctgtggctttgattatcgactacttttgcttgtgtcagcgcggtattgcctgtacgcatccagccagtcggaagtgttccattatgattttcaaagctgttattgactactgggttgtaactggaagcaacactgcctttttcaaattgaacattatcgtaccaaatcgttccttttcctttatgtggagctggttgttcgttgtccaaataaagcaagacttggcgcgtgtttttagatgttttaaaggttag

SEQ ID NO: 240 - DNA, 351 bp, Listeria innocua
  misc_feature (1)..(end): n can be any nucleotide: a, g, c or t/u
atgccctcccgggtagcgggggtttccattaaattaaaaaccggtggcgcggttacgcccaattatcgggacaagctggcccctaagattaccgcggctgtggcacgtagtaaccgtggctttctggtagataccgtcaaggaccaagcagttactctatcccntgttcttctctaccaccagtactttacgatccgaaacccttcttcatacacgcggcgttgctccgtcagactttcgtccattgcggaagattccctactgctgcctcccgtaggagtctgggccgtgtctcagtcccagtgtggccgatcaccctctcaggtcggctatgcatcgttgccttggtag

SEQ ID NO: 241 - DNA, 354 bp, Listeria innocua
ccctttgttcgaataaatgtatttactgcactacgtacttctttatctttatattttcccatgcgttcttcgccctctcctttttcttcgtctttagaagcgttaggtttgtcatttgcttcttcaagttctttttctaactcttcaatttttgctgttaattcgtcacgctctttttctaatttttctttttcggtttctaattcatcgacacttttttcaactgtctcaacttcttcttctgtttttgcttcttcaagtgcgcgagttaatacgccttcttgttctttaaaagatttagaacgagtttctaattcctctaattcaccgcgttttgaatctaattttttttga

SEQ ID NO: 242 - DNA, 354 bp, Listeria innocua
aaagtaacatcttccatcccaagaccgcgaacccattttaacaatcggaattttaaccaacttaaaacgagccctactaaaataccaccaatcgcgataataaaaaagctaatactcgcatccattaaactaaatacgcctgtcaccatcgcagcaatcgcaaattggaaagcaactagtcctgaagcgtcattaataagcgcttctccttctagtaaattcattatccgttttggcaaattaatccgcccagaaagtgaactaacggctacagcatcagttggcgcaagagctgctgcaagagcaaaagctgctgcaagcggaacggttggaatcatccagtggacaaaataa

SEQ ID NO: 243 - DNA, 354 bp, Listeria innocua
acaataagtaactatgaaaattcatatagttcaccttcggcagaagttatatctatgcttgcagacgccttagagacaagcacagattatttactagaaaaaacagatgagattgaaattaaacagaaatattatgatcttactaagaaagatgaaaatgatattgaaaaagaattagaaaaaatcctcagtaatttagattcatcagacggtctagcattctcaggggaaccactggatgacgaaacaagagaactactttcaatatcattagaaagatcactcagattcgcaagacaagagtcaaaaagaaaattcactcccaaaaaatttagagataaagattctgattaa

SEQ ID NO: 244 - DNA, 357 bp, Listeria innocua
acaacaccgattccgccttggcgcgcaattgcaatcgccattttagcttccgtaatcgtgtccattccggcactccaaattggtacatttaatttgagtgatggagccatttctacacttaaatctacatcatttggtaatacgtccgatttcgctggaacaagtaaaacatcatcaaatgttaagccttcttttgcaaattttgtttcccacatgggtcgcaaacactccttttttattggtactagctttttttatatagaaaaaacgcatcatcttctctttatttgtataaagaaaaaatggtggaaaatatccacatcatgcgacttgtcttctataatcatgctgaaatag

SEQ ID NO: 245 - DNA, 357 bp, Listeria innocua
agaaggaaccgaaagcgactatctctgtgcttttggttccttttttgttattttcttctaaatgcaattaatccagcggtagaaagcgctacgagcaggattccgaagccgctagcaaatgagctatctcctgtttttggtaatgttgttggttgctcatctgaacttactattttatctggtactactggtgtttttggcacagtaggtttttccggaatatcaggtttatttggaattataggtttttctggaactccaggtatttcaggttctttcgtgttttcttttgtcacagttaaattaaggtgtgcttcactaatagtaaagttaaccggggtggcgtcaagaatatag

SEQ ID NO: 246 - DNA, 357 bp, Listeria innocua
atggaaaaaacaatagaagttgatggtaagaaaatcccgcttaaaagtacaggggctacagtacttagatacaaacaacaatttggtaaagattattttggtgaattattgaaaatgacaaaagctattgaaccaatgaaaaaaaataaaaaaatgactaatttagcggatagtgatttatcacttctggattttgagatcctttataattttatctgggttcttgctaaaactgctaatcctactattccggaaccgttagaatggttggatggatttgattcattcccaattgtggaaatcatgcccgaaattgaagatctccttgctgcaagtattcaaactaaaaaaaagtaa

SEQ ID NO: 247 - DNA, 357 bp, Listeria innocua
atagaaaagagagataaagtgaagtttttaaattttttgaactataaatatttaaactgggtattatatggtattacattattttttattgtttattacttttttaccgatgatgatatttttttaattttagcaatactttttctcgtttcatctaattttagtgataacttaattgaagttcttacagaaccagaaattcggtctatgacggatgaagaacaacagattattaaagctatgattttggaaaataagaaagacgtagtagttatcaaaaagattagagagtatacaaatttagatgttttacaagccaaaaaagtatatgaaaaaataaaaagggtctataattag

SEQ ID NO: 248 - DNA, 357 bp, Listeria innocua
gtggataaacgtacccaagaattaggtgaaataaaaaaagagatggagcgagaagatgacgctctatacgctattaaaaataaaattagacatttagaggatgtggaagaagatattcatcaagctagacgtgaaatggatgacatcctttatcatatgaaagaagcttggcgaggagaacacgcagaggatactttttggcaaatagaagacgaggtaaatcattacaaccggaaaactgcttgcatgactaccgatattcaaaccgaactaaataatgagcaaaaaaagcatcaacaaaatctccacgcgctcgaaactaaacaacaggatatcacaaaggagatgcgtttatga

SEQ ID NO: 249 - DNA, 357 bp, Listeria innocua
gttgcttactttcgatttatttcacaaattagacattgggttttcattcctttgcgtgttatgataggtatgtatttacaaagggggagaaacacgcagatgagcgcttatccaaaattcgatgttattttgaaagcattaaatttgtctagtgtaggagtaattattacagatcctgagcaaaaaaacaatccgattatttttgtgaacacaggctttgaaaatattactggctatactaaagaagaagctattggctctaattgtcacttttgccaaggagatgatactgacaagaggaagttgcgaaaatccgtcatgccattaacgaaaaatcaactgcgaacgttctactaa

SEQ ID NO: 250 - DNA, 357 bp, Listeria innocua
atgaaaattatgttagtatgttttggcggattatccacctccattttagtgaaaaagatggaagaggctattgcggcatcagaaaagtttaagaataaaggaattacaattgaagcttgggggaaagatgaatattctgaccacctagataacgtgtctattgttttactcggaccgcaattatcaatggcatatgaacaagtaatagaagctacaacagaacgcgggttaaaagttcctgtagaagtaattgataaagaagattatggcaatatgaatgcagtaccaattcttattgctgcatttaaaaaaattaaagaagctggaacgaatacatttacgacggagggaaactaa

SEQ ID NO: 251 - DNA, 357 bp, Listeria innocua
gtagcggctttttcttctggttctgctacttcgacagtttccagttcagcgctagtttcttctaaggtttctttgagtgtttctgccattttttattcctgcctttcattgagccatttttggatgactgctgcggcgcgacctggatcttctttggccatttcgccgagtttatttttcaagctttctttacgagctttaagttctggttctgataaatcgaatgcgtctgtttggaagttgaaatctggatgttcttctggattaactatcgcctcttcggctgggatgaagtctttctcttctgcttctagggcttcttctatttgttctttacgtttcaagaagatgatatag

SEQ ID NO: 252 - DNA, 360 bp, Listeria innocua
cggatttcagatattttattaataacgcctgctgaatgtccgtgcgcagtatcaattacaatcgcatctacaccagcttcgattaatttttcaacacgaacaaaagtatcatttgtaatcccaacagcagctgctgcaagtagtctaccatgtttgtctttggcagagttcgggaattcaattactttttcaatatctttaatagtgatgagaccttttaggatgcccgcctcgtcaacaagtggtaatttctcgatgcggtgtttttgcaaaatctgctcagcttgttttaaagtagtgccaactggtgctgtcactaggttttctttggtcataacatctttaataactgtagagtag

SEQ ID NO: 253 - DNA, 360 bp, Listeria innocua
gagccgaattcaattattttgatgaaagttctagacaaatattcgtggctgatttatctgaaatattgtatatcacttctgagcggtgtcatgacaaactaccatatcacactttccgcttttgaaaatagcgtaaaacgtaagctaattgatttcacaaaatatgatgtgtcatctgaagatttaaaaacatctattttaaaaaggctaggtaacatatgttctgtaaatcgtgtgaataaacacaaatataaagtgaaacaaattattaaatgttcaaagtcaattgacgaaatgattgagcgtataaatgatgaaacagattttagtattgttgcagaggaggttgaaaaacaatga

SEQ ID NO: 254 - DNA, 360 bp, Listeria innocua
tttgacttgaagataaaaggattaaataacgctatcgctgatgtgttgaaaacatacactaaagatgttgaacaagaactagaaacgattcaaaaaaaagtcgcaactaatgctacgaaaaaactacaacaaagaagccctgtaaaaaaaggtagatacgcgagaggatggaaagctaaaaagactgccacaggatatgttatttacaatgcttccgaccctggtaaaactcacctcttggaaaacggtcatgctaaacgaggcggaggaagagttaaagcttacaaacatattgagccagtggaacaagaagtaatacaagaatatgttagagaagcggaaagggcgttgagacgatga

SEQ ID NO: 255 - DNA, 360 bp, Listeria innocua
atgaataatgaaatttgtgaaataacttgtattcatgaagacaaagttaatcgtgctaaatctaaactagcaaactttgatactccgtcagtaagtggtttctttaaaatattgtcagatgaaaatcgacttaaaattgtacatgctttagttcatgaagatgagctatgtgtttgtgatattgctaatatcattgatgcttcggtcgcaacaacttcacaccatctgaactccttaaaaaaattgggagtagttgatagtcacaaggatggtaagttagtctactattttattaaaaatatcaaaatcttaaatcttatggagcttggcgtaaattttaaagaagaggtgctagcatga

SEQ ID NO: 256 - DNA, 360 bp, Listeria innocua
ttgagttattcacaaatgctggataaaaaatgcgatatttttcatttagcgggcaaagaaaagcaagaagagggtaactttgggattaatatttccaacttgccagatgaagtagaatatagtgacactccagatttaaaagcaattgattgttactacatgaagaagtcagaatcaattgtgcagggtgaaccacaaaatattttaatacagagttggcttttacattttaataaaaatattgatgtccgtcggttagataaagtaatagctgacggatatgtttttattttgcaagagccgataagtcctaaaaaccatcacattgaagtggaagcattccgaaaggtgatactgtaa

SEQ ID NO: 257 - DNA, 363 bp, Listeria innocua
ctattaatttttgccttaaaaaagtctgtaacaaaaagttgtggggagaataaaactaagggtgtaggatcaaacgagttaaacaaaggaccgaatgcgggaatggatataataaatatagtggggctaattatcgcctctatattagctttcacgctaccagtcattggattagttcctagcatttatttacttgtgaagcggagaaactatccgactagtataaaaattatcgctatcacagcaattgtttatcaagctataatgattatctttgtattattgggattctatttttttacagtaagtacttccacgaatcacatagagatttctgacgtgacctcaaaagttcaaaaataa

SEQ ID NO: 258 - DNA, 363 bp, Listeria innocua
ccgagtatcgaaggagtctttgaagtggagagctttttggcaaatgttgggatgtttgttattgcactaagcactatccttggatataggatacttatattcttctatgatatagaataccgcattgttcgttttaataaaaaactttaccaagttgcagaagcttttgctgatggtatggattccgaagaagtcgaagcaaatttaattaataaagtaggaatagatcaagaaagtgctaaaagtattgttaagaagagtttaaaataccgaaaaaagaaacaagcttataaaaattttatcaaaataacaaacaaagtattaggtatacgtatctatgatccaaaatataaaagtgattaa

SEQ ID NO: 259 - DNA, 363 bp, Listeria innocua
aaaagtagacacaaaatctgctatactatcaagaaagtagacactttcagaataaggagagaactatccatgacaaaagccagaaaacctactcgttcctttgatgaggactttaaaaaatccattgtcaaactgtatgaaagtgggaaatcccaaaatgcattggcgaaggagtacggtattgccctatcttcgatagcacgttgggtcaagcaattttcggaagtcaaaatcgatgatgataccattcttactgcgcaacaagtcaaaaagcttcaaaaacggaatgcacaacttgaggaggaaaatttaatcttaaaaaaagcgattgccatattcacgccacactccaacaacgattaa

SEQ ID NO: 260 - DNA, 363 bp, Listeria innocua
atgtcaaaatatgatgctgaaattgttaatgcacaacaatccatcaccggacaacaagaaaaaatacgaagattaaaagaacttatcacaaaaatagaaagaaaaggtgaacagattagttccatacctattcgccaaatcgatttaccatttgatttttggcaaggtaaatctgatagtgtcatgagagaagtacttcaaaggcgacttcaattttggaataatcaaaatgctgtagtgaatgaccttgtacaggaattgcgcgcagcgatgactaaaatgcaaaatcagataagtgattatcaagcggatattagctactatacaaatttaaaacaaatggaggaagaagtaaatgtctga

SEQ ID NO: 261 - DNA, 363 bp, Listeria innocua
gttttcggcttttttattattgatgctttgaaaatattaaagcagattaggaggaataatatgaagtcgcagcagacctttatggtagaggttaccttttattctagtgcaagaaaaacggttccggaagcggggtatcggccgcattttgtgatggagttggatgaggatcgggaatatttaggagttgaaatttatgatatagaagtggatacgctggattcggtggggtatgcaatgtgttcttttttatatgaacaagagggcgttggttatagtaagattcagccaaataggtcttttatggttatggagggcgcgagtgttgttgggagagggaagatagtgtcgtttcatttgtaa

SEQ ID NO: 262 - DNA, 366 bp, Listeria innocua
cgaaaaaacccgctagccttcattcaaggttggcgggttttacttatttacttacatacgctaaaatatcttctggtttttcgaagacaagttcagccttttcaaagccatcagttgtctttgcaccccaaagcgctaagccaaaatgagctccggccgcatgggcacatttcatatcataagaagaatcaccgacataaagcacctcatgtggctctcttccaagaatttctaaccctttcagcagcgggtccggatgaggtttatggttttcggtatcacttgcgcaaacaatcgcttgaaaatgatcctgaatatcaaatggatagaaacctttctccatttctaacgcatttttcgaagtaa

SEQ ID NO: 263 - DNA, 366 bp, Listeria innocua
aaacagagactgaatcgacagttaatgtttctgacaacacacaaaccaaagcagaaaaagaaaaagctaaaaaagcagcagaagaaaaagccgcggctgaaaaagctgcagaagaaaagaaagcagcagaagagaaagccgctgcagataaaaaatcccaagaagatgaagctgctaaagccgcagccgctaagaaagaacaagaagcagcagaagaaaaagctgccgcagagaaggccgctgcagacaaagctgctaaagaaaaagccgcagcagaagccgctcagaaaaaagcaaatgaatcaacacaaaagaaagctggaggttctcatacagttcaagcaggagatactctatacagcatag

SEQ ID NO: 264 - DNA, 366 bp, Listeria innocua
atgactagcaagcaaaaagaatttatagaccaattactattagaaaaagaatgggaactaaccaatgatttacaatcatataatgatggtgaagtaactcaggaagttgcagcaaatattattgaatacttaatatcttgtgatgatacggcgaacgcagctgcgattagagtggaaatgatgaatagaatgactgatagacagaagaatttcattaccgaattattatcagaaaaaatctggaaaacgacttctgaaatagaaattttccttagttcgaataatacagaagttgataaatatacagcatcagtgattattgagtacttactatcttgcaaaaataaatataacttggcaatttaa

SEQ ID NO: 265 - DNA, 366 bp, Listeria innocua
gtgttatttgatgttgccggcttagaaggtgtcgttggtttaataggagcgggcttagacgttgttgtcttcggaacagaatttaagcctcgtctttttaaccattcttttgtgatcgattctataatggcttttttattgcttttccaaatcgctacatcactagctgaatcaatgaagaacagctcatgtagtaatgcttgcgcttttgtatcgcgtacaatggctagtctcccgtgtcttgtagaagtgtctgcttttgcgcctcgattttttaggccttttattgatccggctttcgcaactgcaatcgcatcttgctgggctgatgcaataccagcgcaaaatagtgtttcggttccttga

SEQ ID NO: 266 - DNA, 366 bp, Listeria innocua
atatattttaggagtgtgaaaaatatggaaatttacattaccacaaacgaggaaggatttcttacaggttattcgacaagcgagtgcgtgcctggcaaaaaaatcgagatagacgaaaacgatgtgttttttcaacgtggttttgctagttataaatataaagtgaatcaacttatttttgacgaaaataaagaaaaagagtttcagtatgaaaagactctacaagaggcaatgttaagtactgaagaacaattactaactacgcaggaagcattagttgaattgtatgagcaaaatacaaaattaggacagcagttgattgacacacaattggcgatggtagacatgtacgaagccaatctatag

SEQ ID NO: 267 - DNA, 366 bp, Listeria innocua
attttaaaaattggaggattcaagatgacacaaaaaagtattgaagaagtgaaatttgaagaggcaaaaaaattaataactgggttacaagcaattgctacatttaatgaaagcataacttgtgccgtgaatgtaagcttcaatgatggaaaaggtatacacagtgcgtcatctgcaattggagggaaaagcgaactcttaaagatgtatggggacatcgccgaagcaattgtatatgaatttatgaaagaccatgattgtgtgtgcaacgtgaatgaaaccattgaacatgcaatagaaggggcattaaatggatttcaaaatttcaaacaagatgcaaaggagaaaacagatgaaaacaattaa

SEQ ID NO: 268 - DNA, 366 bp, Listeria innocua
atggattatgaattaacagcaaaagtttttaaagcattaggagacccaaaaagggttcaaattgtggatatgctctcttgtggtgagcgttgtgcatgtgatttattagagcattttgaatttacacaaccaacgctttcccatcacatgaaagtgttaatgaatgcagggattgttcaagccagaaaatcagggacatggcataactattcattgaatgcggagaatatgaaagtattatctggtgtcattcaaacaatcattcaaaacacagatgactgtatttgtcatgtgattgataatgctgcatgttcttgtgaggttaaagggagagtaacagctacaaagaaagcaacaactgcttag

SEQ ID NO: 269 - DNA, 366 bp, Listeria innocua; identical to SEQ ID NO: 267

SEQ ID NO: 270 - DNA, 369 bp, Listeria innocua
agcttatactttccatttaagctttttttagataaaatgggaatatgcttattgtttaagaaaggggatgacttgatgacggatacattttcggcttggtatgaggatttagaaccagcgattttaattaaagtggaagattttcatattctaggctaccgagaaatcaaggctagtcacatttgggcgtttttaacagaggaaaagtggaagaataacccagccccagcattgcatgaaagaataaatgatgtcatgcaaatgaaaattggacaattaatgcagtttattatgacaacagctgaacaagaatctaataaccatgttgctcaagcggaaaattcgcttcaaccaaatgtggaagattaa

SEQ ID NO: 271 - DNA, 369 bp, Listeria innocua
gtgatggcgattagaagttatataccagtggaacttgataatattcctgaaatctttgaatttgatttcgatagcagaagttatctatttggcattaattatgcagaatcacaggacgttttttcagttgatttatttgatattgaaggtaacgcaattgtattaggagaaaagttagtgttaaacgaacgactgtgggcagatgttatagatgacagattaccagcagcagatattgttcctttagatgaatcaggaaaagaagtatctattacaaaagataattttacaaaaacagtgtttttatattttgacgaattagctccgaatgttgattttccaacgttagaaggcgaggtcgatgtttaa

SEQ ID NO: 272 - DNA, 369 bp, Listeria innocua
gaggaaacaacaatggcagagaagaaaaataatgcaactaaaagtgatgtagcagcagctcaagcagcacaaaagattccgaaagtagaaaaaaaacctttggataaatttggaaaaaaagaagtattcaaagctagcaacaaggttgaatacacattccagttccctggaactcgcgctgcacaagcaatcttagacgagtctaagaatggctatggcgtgattgtggattctgtatattatgagcgaattatgaaagatgtaattgttgagcctttgggtttggacttagattattgggatgaacatgaagggtatcgcgaggttatgaatgcggcggataactttcttggtaaattgcttaactga

SEQ ID NO: 273 - DNA, 369 bp, Listeria innocua
tccagcacaataattttaaaggagcgtaactttatgaacgaatttccagttgtatatgaaccagagtatatgacaatttatttacttgttatcatcggtgtcttttctacaacattggctttatcacttgaaaaatataagttcactttagcgggaaaagcgttgattgggatgtgttttatttctctagctgtgttatttatatatgttttagagttagcatatctttcggatacagctgatttgttatttcatacaatcggtgtttgggaagtagtgcttttcacacatccatatattttcttaatacttgcaatcttgctcggtggggaaaagaaaccgccacatgtgcccaaacctaaaaaataa

SEQ ID NO: 274 - DNA, 372 bp, Listeria innocua
tccttccctccaaactctaaaaaggcatcttctagtttgccagatgaagttttacttgagagctcttgtggggtccctatggcgattatttttccatttcttatcattgcaagtctatcgcatttttcggcttcatccatcacgtgcgtcgtcacaaggatacatttgccgtttgctttaagatcgtccagttcttcccaaatggtttttcttagttctggatcaattccgactgttggctcatctaatattaaaacatcaggatctgcaaggacagaaatagcgagagacaacctgcgtttcattccacctgaaaaattattcactttttttgttaaatcggtttgtaaattaaccaggttcgtcgcatag

SEQ ID NO: 275 - DNA, 372 bp, Listeria innocua
  misc-feature (1)..(end): n can be any nucleotide a,g,c or t/u
tttacatatanaattaaaaaganaatggttanaatttatggatatgatgcagaatatattcaaagttggttacacacagttgtgttaatacgaaatatatgcgcccataatgggaggctctataatagaacgataacagtatcgccaaaattacctaatgggacggctaaactaaatataaagagaatatttattgttatatttatattcaaatttttgtgcgttgatcaaacagagtgggaaatatttgtaaataaaatagaagaattaatacaaaaataccaagaggttattgaactagaaatgattggttttcctgaaacgtggaaagaaatgttaattgacagagtggtagttaattcgaataactag

SEQ ID NO: 276 - DNA, 372 bp, Listeria innocua
gtgaattacacaattggtgcattttcaaaagaagtcggtttatcaattgatacattacgatattatgaaaaagaaaaactaattttaccaaaaagaaatgagattaaccgtagaatttatgatagttcggatattacttggattaacttcataaaaaaattaaagcagacaggcatgccaattaaagatattaaggaatatgcaaaacttcggtatctgggagatcaaaccatcgagcaacgaatgactttgttatataggcaatacgatattttagttgagaaaagggaagaaattgagctatatacccagtttctactaaataaaatagatatttataaggaaatgttgagtgaacgagatattaaataa

SEQ ID NO: 277 - DNA, 372 bp, Listeria innocua
atgagtaaagtatcgttgtatgaaccagcaatgtgttgtgacacaggagtttgtggtcccggagtagatacagaattgcttcgagtttcctctattattcaaacattggaaaaagtcgatggtgtagaagtagagcgttttaatttaacaggtaatcctgcggcattcgtagaaaatgaaaaagttggggagttgttacagtctaaaggagccgacatactacccgttgttttattagatggtgaaattgtgaaaatggctggttatccttcaaatgaggagtttagtgtctatactggtgttaatttctcagaggataagaaagaagaacaatcaaatagttgctgctctccatcatctggatgttgctaa

SEQ ID NO: 278 - DNA, 375 bp, Listeria innocua
gggatgaaaaaattgaatgagaaaacaaatgaacaaaaacgagcaacatataatgaattaattatccaaaaagaaaatcagatggataagttggtagaaaatcaaaaggaaattgaaaagtctctttaccaattagatgaagattttaaaagaggttttcagcgattaaggtatttgaatgaggataatactgggacgggaaaaaatgagcactatcaagctcaacaatgggatgatcatttggagagtaagcttcgacatcaagttcaatatgcacaagaagagtttaattattgttttcaaaaagagatacttgaaatagataatgagcgagaagaattatttaaaaaaaggagtgagattccttgggattga

SEQ ID NO: 279 - DNA, 375 bp, Listeria innocua
atggaaaaaatgattttccaatcattactggatagttttggtgttccgttgacagtttttccaaagcaagaaaaaggtggagaattcgttaacggcgagtgggtagtaagtcagcttgacgaaacttctaaaattgaagttaatgaacccttcattccaagttcgctcatgactcaaatgccccaaacttctgcctacacagctgccaggtatgaaaaatacgaaatgatttggttttctagtcaagttctgccgttaaaaagcaaagtgatccataaagggattacgtattctgttgaagacgcaattcctttcactgactattcggatgtaactcagtatgggtgtaaggcggtgagtgttagtgccaaatga

SEQ ID NO: 280 - DNA, 375 bp, Listeria innocua
atagaattaattactttgaagaagaaaaagaaggtgctattaatggataacaaaggaaaaggcagaggtttaatcaattcgaaaccaaaccgagttccaggaaatttcaaaccacaagaatcatacacggattcagatcttccttcctcgtcaagcaacattcaaacagaatctatatcaaagtccgctgctaagtttaaaaatcaagctggaacaataaaaacttctatgcaaaccaaagaagaattacaagctctaaaaaccataacaaaaactaaatttgattacgaaattattgatttgctaatcgatacctatgttaacaatgagttggctcctgaacaacgtcgtaaattcaaagctatgacagagtaa

SEQ ID NO: 281 - DNA, 375 bp, Listeria innocua
atgttaacggaaatgaatgagaaacactcaggagctgaagatgcagtacataattggctctgtactcaagaagaagaagcgatttttgaaggtattctgaaagatgatagaagcattagtggggcggttaaatactgctcctcaagggcttcaaagcatcaggctgaaggcgtggccatgattgatgacaaaacggtcttttcctgggtgaaaaagtattttatatcagaaaaagtgccgaaaagtagtgtaaaggctacagttaaaacaactgcaacaaaaccagaaaaagcgaaggttaaagctaaggaaaaaccgaaaaaaacaactgcgcaagaagggtatgagcaattagatttgcttgatttcttatga

SEQ ID NO: 282 - DNA, 378 bp, Listeria innocua
cgaatgtcttataaagcaacagatccattctacttaacatcaaagtggaaacgaaaacggaagaagatactgcgacgagatgaatacctttgtcaggagtcgaggcgtttcggacgaacagaatcagctgagatggtccatcacatctttacgaaagaagaatatcctgaattagcatttgaggactggaatttaatttctttatcaaatcgttcacataattcaatgcataagagaggaactcacgaactgacagcgaaaggcttgatatggcaagaaaaacgaaaaaaggaattcgagtcattttattcatcccccccgtcaaacgtttcagaaaaaagctctggggataccgagggtggggactttttccaatag

SEQ ID NO: 283 - DNA, 381 bp, Listeria innocua
atatcaaattcactatctaaatcaccgtattggtttggtccatcactttcaagacacataaagacaagcataataatgctaccaacaaacggaattaaatcaagcaataagtataaaccacttttccctgaatcatgtaaacgccgaaccatcaggctaattgtaggaagtaatactgctagtaaatatagcaatacaagaaccatcataaagagcgccccaccactactcgcaataccagttcccccaagagcactttccataaatatagaaatgccaaaaacaaaagctaaaaagtataatactgcaaaaataataacattccaaagtactacataccaatacgctgaccgcggagctcgcccactaaagttaacgtaa

SEQ ID NO: 284 - DNA, 387 bp, Listeria innocua
gtcgaacagtcgctgctattttggaaaactaccaagaggcagatggatctgtactcattccgaaagtactacaaggttatatgggcggtatcgaaaaaatcgaattaccaaaataaaaaggaagaaggaactgtaatggcgaaccttagcgaattaccaaacattggcaaagtactggagcaggacttaataaaagctgagataaaaactccagctgagctaaaagatgttggaagcaaagcagcctttttacgtatttgggaaaaagattcaactgtttgtttaagtgaactatgtgcgcttgaaggagccgtacaaggcatcaggtggcatgatttagacgaagcaaagaaaatcgaactcaaaaagtttcatcaatccttataa

SEQ ID NO: 285 - DNA, 387 bp, Listeria innocua
atgattattgaaaacaaaggcgactatgtacgttttttaggaaaagttagattagttccaggaacaaacaatattgataatgaacatgctgaagaattggaacaagcgcttaaacatccgcttaatatacacttgattgagtcggatgaattaaaagtacccgacaatttacaacaagattctagccttaatgatttcaatgctacgaaagcggcattgctagtcaaggatacttttgatttaggagccttaaacgaatttttagcagaagagactacaaacggaaatcggaaaactgtaatcgatgctattaataagcaaattgaatcaattagcaatccgccacaagaagaacgatatgttcctgaagaggattttggtgaatga

SEQ ID NO: 286 - DNA, 390 bp, Listeria innocua
acgggaactcttgaaaaattctcacttaataatgcgtcacaaagttcttccgattctgtttcggcatcaatcataaacgcatctgtccgtggtaccattacttcacgcgcatatttattatccatttcaaatacaccacgaagcatttgtaattcttctacctcgataatgccgtcacgtcgaccggtttcaatcagtagctgcatttcctctcgcgtcattttttcattatccgtatttttctccattctcgttaatttcacaagaatatctgttgaaaaagataggaattttacgaacggacgaagcacaacaccaactgccataattggtcgtacagaaacacgggcaattttttctgatttttggagtgctaaacgttttggataa

SEQ ID NO: 287 - DNA, 390 bp, Listeria innocua
atgaattttaatctttttgttagaagtggttttattggtcttattttactttttgtcatccaggtattaggggctgtaagagggttattgattcaatctggttttatggatgggagcgtcaatcagagtttactgggcacaaagcttattatagtgccaattatattttttactattagtattgtttttttcttattatggttttataaagactatcaaacaaataaaaaaaaagtcgatttcctagttaaggaaatcgacttttttatgttaattaaaccaaccttgcacaccattagaaacgtagcttccaatgcctttaaagaaagaacctactgcttgagcggaaagtgcaaaccagtttgccttttcgacatcgccagcagttag

SEQ ID NO: 288 - DNA, 390 bp, Listeria innocua
tgccgttgtcgtaggagtgtgggatgtatgaaagatttactaataagttcagatggtgatttacttattgaacaaaatgagataatgatgacggatggcattgaagatattattcaatctgtacgtttgattttgctgactcgtaaaggtgagttttattttgatcaagattctggattggtttatgaaaacttgttttcaaaactgccaaactttgactatattaagcaagatattgttactgcgataacagaacaagaagagcgtgtatctagtgtagatagcgttctttttaattttaataaatctgataggaagctattcgtaagtataaaaatgactgcagatgatattcctgtaagtatagaagaggtgattttaaatgcttga

SEQ ID NO: 289 - DNA, 390 bp, Listeria innocua
gaaggaggaacttcaatggcaaaaaagagtaaagttgaaagcatagaaaaatacaaacctctctctgtaaaggaaagagtgattaaagatatgaaaggtttaggagtttataaaacggaatatgataacatcattactatttactgtgatttattaactcagtatgacgacgcgcaaaagaaatttattgactctgattatcaatatgaaacttcaaccgcagcgggcggaacaaaaaaatctgctattgttgcaactctggaaaatctaagaaaagacatcattgcttattctgaccgattgtgtttaaacccgcgagcaatcgaaaacatcacgactgaaaataaaaagcaatctagtttagcagatatattgagtgaaatgcgatga

SEQ ID NO: 290 - DNA, 390 bp, Listeria innocua
atgttaaatactgtaaatggagaattgaagataaatgatgaattgattgttcatcctgaatatcaatttgatgaatttaagaacacaaagtattatgatggacaagacgggattaaaataatttatctggagaaaatacaaaaaattgatacgtatcattactttgtaaatttattttttaaagaaaagcaattatatagtgtttctcttattaattgtgatcaaaacatttctgaatctaatgaaatagataggaaaacaatacacgataaaatattaagtgagaacggtattcaaaataatgtaagttataattggggaaaaataatttctgaatatgatccaagaagtaatataagtagtatagatattttttataatataaggtaa

SEQ ID NO: 291 - DNA, 390 bp, Listeria innocua
agaggtgaggaaatgccatcagaagaattaaatttattcgatttaatggattactatcctgagcagtctgctaaaaaaaagcgaaaggaagaagccttaaaaccgattaaaacacataaaaacgatagattagattatcctacagcaagagccgaaatagagcggattttaggtaagaaagtaactacagtttgcggatattacgatcacccaattaataaagaaattcgatggatattcaatttagaaaaaggatgctgctacattaacgataaatgccatttgtattcaacagaagaaggaaaaggatacaaatatcgcggaaaagtacacgaggaggttttttataatgcagacgatagaaaaagagctactacaacgattgagtga

SEQ ID NO: 292 - DNA, 393 bp, Listeria innocua
aggagaattagcttaatggaatggaaacaaataaaaaacgaaaccgatattgtaaaattaatggactcattaaattattttcatgatagttgcattactggtttaacttactcaagtagcacatatgtagacgaaactgacttatcaatggtgatgggcacgaatccagtagttaaattgattattcaaagacaagcagattcattaacgaccctagaattttgtttagaaggcgttactcatttatgcatacataacgatttaaacacgtcgtcagaaatccaagaagcaaatctttactataaaaacggtaactttcattggaacgttgatgatgaaatggcaagttttaaatgtaagaaagtatcgtggagagaaattcaaaagaaatag

SEQ ID NO: 293 - DNA, 393 bp, Listeria innocua
attattcatgtcagtcctcatttcctcatatcatcataccatattttttcacaaatgacggaacgaattgtttgtacttcgctcctacttcctttaaaatggactctaagcttccaaaataaggaggaaacaatgaatttagatgatttgaagaataaagttaccgagtccctgcccctggaaaatctaggaacactgacagaagaggcaacaaccaaagcatctgagcttggcgaacaagcaagtaatgtcacggaaaatttacagaatgaagcgacaaacctaacggaaaatctgcaagataaagcgagcggacttacggaaaacttgcaagatactgcgaatgagttaactggtgggtttttggataaaataaagaatttgtttcaataa

SEQ ID NO: 294 - DNA, 393 bp, Listeria innocua
aacggggtgtcagcaatgaaaaacagtatagactacattaaaactgtccaaaatgtaaaacgtttttttgaggagtttcagtatttggttttccttttaggacctaggaacaagatacaacttaattctgagggtatagtagaaaaaaagttaataacagatgacagtagcgatataactgcaataggaaaattagttcaattatatacagagatattaaataccatgaaacctctgcatcgtttcattctaattaaatgttatattgataaacaaaaagacatcgctacaatgatggaattaccttatgaaatagcacaatttaaaagaataaaaaaacaagccgttctcagtttagccgaagaacttgagattatcgttgaaaaaaactag

SEQ ID NO: 295 - DNA, 396 bp, Listeria innocua
aacaattctatcgatcaccatcgtttaagtatcagctctcttattccattatttttcgaatgttatcataaaactatccagcttagtaatttagatcaaacaagtgaatggcaattatttttggtacaaactcggttagaattagaaaaagcaacaaatatacaagtacatccagaaaaactctctttcaaagtaaatgataatctcgttacttattcaaaatacaataacattctacgacggcaagtaaacggtaaaggacatgagcctttattacacaaagtaactaattggcaaatcaccaatgaggaaaaccagcttattttaaaagttactttttccaataataagttctatacttccaaattccctctgacgaaagcgaatgaattctaa

SEQ ID NO: 296 - DNA, 396 bp, Listeria innocua
atgatgaaaaaaattgtaattgcgattgctataatctttggtgtactaggagcaagtggcgctacagagcaaagtgtagaagccgcttcaacatataatgcgacaggaatgtataacggattgctcaaggcggagttaagcttaaattatggatcatggtcttcagcagctaggtataccggaaccaagccgtataatcttcctagaatagctatccaaactcgaattcaaagaaaagatggtgtagtaaggacatattgggaagaaacaagtaataattatgtgaaatatgatggtggatctaatacagttggtccaaatggaaataattatgctcgtgcatatggatattattatggtggtggtgaaactcgagtagccactagatggatgtaa

SEQ ID NO: 297 - DNA, 396 bp, Listeria innocua
gccttaggaacgtgtttttgtttggatcgttcgaagcaaagcgagttacgagccaaatatgcatgcgagcaaagcgagcatgtaatccttccagtaaagtgcgccctccacacaaaaacttccctcccatcaaaatccatccaccatcaatctaaaaccctccatcccattcggcccgttcgaagcaaagcgaattacggccaaatatgcatacgagcaaagcaagcatgtaatccttccagtaaagcgctccctccaaacaaaaagccccacccatcaaaatccatccaccatcaacctgaaatcctccatcccattcgacccattcaaagcaaaccaaatccccccaaaacaaacacacactcaccctcccccaaaccccagccaaaaaactaa

SEQ ID NO: 298 - DNA, 399 bp, Listeria innocua
ccaaattgtagaaggtgggatgcgcttatgattgaggatttagtagtgcatttcaaaaaaacattcccagatataaaaacacttggattcattaaacaaacagggcttgattcaatggtagtaattaatgaagcaccgacatttcaaaacaagcaagtacaaacgcaaagtcgtgttcgtgagagcatcggctttttaatttatgacaaaaacacaattcaatgcaaacgaacatacgatttattacgtaactactttcttttaacaaacccttctgagctgaatatccaaaatcagaaggtagtagcaacagatgtagcaagcggcggacaagtcgattatgacgatgatggtcgcttgatttaccaactaacaatattatttgaaaaggagatgtaa

SEQ ID NO: 299 - DNA, 399 bp, Listeria innocua
tggctggctttatgcgggagtaggtggctgttaatgagctttcagttaccgcctattcccgaggctatactaaatacggaagttacaataattagtaatagtggacgtgatgactttgggaaccttttaccagatacaattaataaatcgatgtttcgctatgagtttgaaaagctcgtaaataaaacagaggaaggattaaacataagatatattgttaacttattttgtaacaaattaagttttgttgtgaatgaaggagacaatgtatcttttgttattcctggctattgtttaattaaaggtgaggttcagagcgtatccttcccgccaaatcccgatggcagtatacaccattttgaaattgtcgtaggagaggtgaccgagcatgagctttag

SEQ ID NO: 300 - DNA, 399 bp, Listeria innocua
gctcaatccgttgttcaatattatgaacatcaaatccatgtaaaatatcactccactgggtcgaacccgattcttttaaccagcgcgcagtatttaccattaactcatttattgctgaacgatcatttggcaaagcaaagcggactagaaattccagtccgccagctgttattttattttggttcattattgtcttttggagcctcaggagcttctggagtctcaggagtttctggtacttctttcgtttcaggagcttctggaacttctggtgtttcgggttctatcgttgtttcaggagttactggagcttctggttctacttttgtttcaggtgctttcggaacttctggtgtttcaggttctacctttgtttcaggtccaaatccctctggatga

SEQ ID NO: 301 - DNA, 402 bp, Listeria innocua
tttgagcttactaacgtctgttttcatgagttaccccctcattcaccaaaatcctcttcaggaacatatcgttcttcttgtggcggattgctaattgattcaatttgcttattaatagcatcgattacagttttccgatttccgtttgtagtctcttctgctaaaaattcgtttaaggctcctaaatcaaaagtatccttgactagcaatgccgctttcgtagcattgaaatcattaaggctagaatcttgttgtaaattgtcgggtacttttaattcatccgactcaatcaagtgtatattaagcggatgtttaagcgcttgttccaattcttcagcatgttcattatcaatattgtttgttcctggaactaatctaacttttcctaaaaaacgtacatag

SEQ ID NO: 302 - DNA, 402 bp, Listeria innocua
atcaaatcagaaagtttcttctggaattccggacttgctgttactgctgcaaactgtttaaatgcgtttttagcaacatctagtgcttggataatcggaccttttaagttttcggcgatattagcaaggctcttaacggctgcggttttcatgttcgcaaatgaaccactaatagtgttacctgctgtttttgctagacctgccattttagccgtgttgccagccattccagtcgttccttcttcgatgccttttgtcaacattgcgatagcttttgttgattctaaagatccctcggaaacatattttttcatttctccaacagatttgcctgtggaatttgctaaaatttgccatgcaggaacacccgcttcaactaaacggttaatatcgtctgcataa

SEQ ID NO: 303 - DNA, 402 bp, Listeria innocua
atgactaacacaataaaaatatctgaaatagataaagtgttccagattgcgacggaagctgggtgggttgaacagactggaatgcaagcgacgattgacggaatagactttgcaatatgtccattaaaaaatgaaaaaaatgcatttatacaagttagcgaagttaaaagcggcgctgcattactgagggttccagtaaatcttatagacatttttattttggatactcgagataaagcaatcgaatattataaatataatgtaattcctttaatcaagaaaaaagtcgaatttaacggattagataaatttagaaaagaagttgaaaaagcgaaaaaatatatggttgaaactcacggagaacgaccggaaattaaagattttgagggggaatgtaaatga

SEQ ID NO: 304 - DNA, 402 bp, Listeria innocua
gagaacgccatgaactggacacgtataagtagtattttaatagttggttttacagcatttggagcaatttatgggggattatcgatggtttttaagcctagtggtagtcttttatcactttcgaccggattgcttgatggttcaccgtttgtcgattatttaatcccaggcatatttttattcatatttgttgggttattccatttagcagcactaatttatttactaaaaaaattaccacgaacaaaagaagtcatgtttgcagcagcggctgtactcgcagtttggatggttgtccaaataatcattatcggttatgtatttattttacaaattatctttttagtagtcgctgtggtggaaatgttcttagcggtacaattaaagaaacaacaacaataa

SEQ ID NO: 305 - DNA, 402 bp, Listeria innocua
aactgtaataagagttgccacaacagttcgccagtttttcaatcgtaccttccagttaattttcatcatttcacctccttttcatttttttcagtaacatatttccaaatcgctttatcttcccgtttcaataaagcaatctctttatcgtggtcgttttgcttttctcgtaaactcatacgatctttcttgctttcagacatttcttctctaagactttttaaagttatatcaagagaatctatcatattccgcaaaggtgcgactaatgcccatctaattacaaatcccacaattgccgctattaagctaattaaagctattaactcccccacgctcattcctgctatcgatatgctcccaagtaccaattttcatcatcccctcgttgtcggtccataa

SEQ ID NO: 306 - DNA, 402 bp, Listeria innocua
aaagtagctggatcaatagttgcttctttttctaaatcaagtacgacaatatctgctactgcgccttcttctagttttccgtatgggagtttaaagcactctgctggcttcactgtcatccagtcgataagttgttttaacgtccattcgttcgttttgacaaaatgggtgtatagcagcgggaaagccgtttctaaaccaacaataccaaatgcggcttgctccattgggacatttttttcttccgctgcgtgtggtgcgtggtcagttgcgataaaatcaatcgttccatctagtaatccttctaaaagtgctgcgcgatcttctttgctgcgaagtggtggattcattttccagttgccgtcatttcccggaatgtcctcttcgtcgagtatcaagtga

SEQ ID NO: 307 - DNA, 405 bp, Listeria innocua
agacaaatgtctatcatacaaggatttttagatatatgtgatcggatcgcttacttctttggagaattagttagtatcattgttacaagcattttacttgtgattgaaaacgtatttactgctttatatcatgcgtatcaagcaagcggtcagatgaaatgggcatggtggacggttatgactatattagcttgtatgattgtcgtatttatcattcgctattttattattgtcgcagtagctacgctgtttttggtccctttaatggctttttttgtcaaagcctttttgacaatcgttgtagctacctttctacttacgattgtttttattatcatttataaaggcaaaacgagcatttcaaaatggatgagagcaagaaggagtcagcaagaaggagcataa

SEQ ID NO: 308 - DNA, 405 bp, Listeria innocua
atgtcctatatcacgcctgaagaattaataacatactcagactttgaagcagtaagagaaagaaagcccgaaaaattaaaaatggatattttagaagctgaaatggatcttcaagctgcgttgggtaaatcattagttgatataaaaagcagaagtgtagaagaaaccggctttccagaaacgctcaagctagctttattacgactagctcaatttagagctctgtataatactagcgaatctatgcagaaaggctattcagctgaaaaaattgctgactattcttattcattagcaaacggcgaatcaataaattatccagatgtatcaaatttaattgctgattatttagatcaaaagtcgacagataaacggaaattccgatttagaatgggggctttttaa

SEQ ID NO: 309 - DNA, 408 bp, Listeria innocua
tcatctctttcaccaatacccattaaagcaaataggcaaaccgttcaatttttcacaagaatttgttatactacggtggtacataaaaggaggtttgctatgtttgatttaattttcccgcttttattaattattattggcattttttacagagttaatccacccaaaaataaaaatggccgctttagttaccggacgaatgcttctttaaaaaacgacgccaactggaaaaaggctcatcgattgcttggaatttactggataatcattggcgtgtgtattctagttttttcactgatacttgcatttattccaatgtatgccatgattcgcagctccattttattaactactagtgttttcgcagtgttattttcggtcatattagtagagaaaaaattacaataa

SEQ ID NO: 310 - DNA, 411 bp, Listeria innocua
attaaagatacactgaaaagaaccagatgtcaagaagagaaaactggaattctaaatttttttcataaaaatagactaggcataaaacctagtctacgcttcttattttgcagcttgtacttcttgatattccggcttcttagcaaattctgctttcgcaaacggacaaagcggaacaattttctttccttctgttttcgctttttcgaccgcacgttttacaagttcttgcgctatcccctgacctcgagccgcatcatcaacgcctgtgtggtcaataataaacatatcttccccagttggcacaaaagtcacttcaccaacctcgacaccttcatcatttaccgcataaattctattttcaccgtttttatattccatttgttatcctcctatttctctatatactga

SEQ ID NO: 311 - DNA, 411 bp, Listeria innocua
atccctgcaccaagtaaagctgcgcctgctagaccaatgacagctggcaacgctccaaacgatcccgctaatcctgccgctgccaaactagttccttctaccgctgttgtagtagccccaaacccagctgccaaagaagttaatttacttcccaatcccaatatcttacctagccccgcgaacccttttattagtccgctagtcattgatactagttttccgccaaccgttaatacaggaccagttgctgcaataattccagcccattttataatgttttgttgttgttctccagaaaggtcattaaatttatcaatcattttattagcccactcgatgattggagtgagggcaggcattaatttttgtcctacgttctgttctaatacttcgagcgaagctttgaattga

SEQ ID NO: 312 - DNA, 411 bp, Listeria innocua
atggggtttttagaagcttataagtcattttggaagaattatgtgaattttagtggtcgtgcaccaggttctgcatattggtatgtagtggtttggaacctgatgattattgtacctcttcgtgttatggcagctatttttggcgcttcatcaatgatagatggggttggctttgctggaatcgtagttatgttctttcttgttggtctacggtggttgtactggttggctactatagtcccactaacgagccttattgtaagacgactacatgacactgggaaaagtggctatcttgctttccttgctttaattccagtcgttggatccattattattataatatttatgtgtcttgaaagtgatggaccaaaccaatatggagatgtctatcataaatcagaggtttaa

SEQ ID NO: 313 - DNA, 414 bp, Listeria innocua
gccgaaggaagggacgatagcatgagagagattgaatatagagcgtttgtaaaagaaactaagaaaatgcttccagtcacagatttgtgttttaacgaaacagagtctgtaggcgtaagtggttgcggcaacccatattgtacaatgtgcgtcgactggtacaactttgacgatgtcctgctgatgcaatacacagaaagagaagacatcaacaacaataaaatatttgaaaaggacattgcaacttgtcagtttttcgacaaaaaaatcactggtgttatcgagtttatcgaatttatgtgggcagtaattgatcacaagaatcaacgactatatcagttgaacgaagttagcaatattgaagttgttggaaatgtggaagaaaacccggaattgttggaggtgtcggaatga

SEQ ID NO: 314 - DNA, 417 bp, Listeria innocua
tcgttgattcttgtgatcaattactgcccacataaattcgataaactcgataacaccagtgatttttttgtcgaaaaactgacaagttgcaatgtccttttcaaatattttattgttgttgatgtcttctctttctgtgtattgcatcagcaggacatcgtcaaagttgtaccagtcgacgcacattgtacaatatgggttgccgcaaccacttacgcctacagactctgtttcgttaaaacacaaatctgtgactggaagcattttcttagtttcttttacaaacgctctatattcaatctctctcatgctatcgtcccttccttcggcttatttttgaatttaaattcagatagtccatacaagtccacactcgcacatgccacaaaacaagatatatcttgtgtgcttctctaa

SEQ ID NO: 315 - DNA, 417 bp, Listeria innocua
gtgataaatttgagcacacctgaaattgaaattgataatgatgatttagaagcatttgagacaatttctaagacatatgaaatcgacttcgttaataaaaaaatgaccgggagaataatcgatggtttagaagctattcggcaatttgtacacttagctatacaagtatctagatttaaatatccggcctatagtgacgattacggtagtgagttatttgacttgataacagatgaagaatctacagaagaattgattgagattgaaataccacgattaataagtgaagcaattgaatatgacgatagaatagaagttgtagataattttgttattgaaaaagttagtggctcttttcatatttcatttgatgtaacaacaagtgaaggtgttttagaggtgcaggaggtgatttaa

SEQ ID NO: 316 - DNA, 417 bp, Listeria innocua
atgtatgcgtggatgattgaaaaacaagatgacataataaaaaaatggaacactagaaatccttttgaaattgccgaattcctcgaaattgctatcttttttgaggatcttggtaacatgtacgggtattacaatatgaaaaaccgtattaaaatgattcatattaacgaaaatataactattgatgaacaaatattcacttgtgcacatgaattgcaacatgcaatatttcatgagcaggctaatacaccttttctatccgaacacacacttcagtctgtacagaaaatcgaaactcaagctaattttttagcaacaaggttattgattgcaaatagaaaaatagatggaatcaacacaaaaattgagttgttaagatattatgggatacctcttgagatggcgaggttcttataa

SEQ ID NO: 317 - DNA, 420 bp, Listeria innocua
aaaaatcaaggaggaacaagcatgaatttcaaagtaggagataaagttacttggattaaagataaaaatgttattgggaaggtagttagcattaacgattttagaccaccagaaatggagtgcgcggttgattttggatttagcgatttggtgttttgcagtagagaggaattgattttagacgaaagcgcgacaaaacaagaatctgttatctgtacaatgtgcaaacaagaaattgaagaaggctcatatttattaaaagtacgtgaagatttattctgtggaaattgttatgaagagcaaccggtagtattttattatcgactaaatggtgatgacggctggatggacgattcggaagctaaagaatacagacttgaggattacttggaggaagtggagggtgaagacaatgagtaa

SEQ ID NO: 318 - DNA, 420 bp, Listeria innocua
atgtggccaaaccagatgctggaaatgcttagaaataaacaccacacatctgatccatttgaattgtgcgaaatacttaatataattgttacaccatggaatttagcaaatgatacaaatggtttctacaagtatgttcgcagaaacagatttattttctataatagtaatctttctgattatcaggttaagtatgtagttgctcatgaactagggcatgctgtattacatacacgattaaatgcgacgtttactaaatcaatacattggtctaatttaagtaaaattgaagtggaagctcatcaatttgcagttaatttattgctttcagagattgaactcgataagtttgaaacaaagcgtgatatttgccttttttcaggaataccaatagagatggaaagatttattaatttatga

SEQ ID NO: 319 - DNA, 423 bp, Listeria innocua
tctgctcgtaacgcatctatcggcatttttttcgaagctttctgcgctggcactacaccaaacacaattccaataaacatcgaaaatccaactgctaaaagaatcgttgtagcagaaacatgcatgtcaaaactagatgcggctgtaactatttgtgcggaaaaaattccgagtaaaataccgatacctccgcctaacaaactaagcacaatcgcttcaatcaaaaattgcctcaaaatatccccactacctgcaccgattgcttttctaataccaatttctcgcgttcgttctgaaaccgagacgagcataatattcatgattccaatcccgccaacgagtaaagaaattccagcaatcgcgcctaaaccaatggtaagcgtgctagtaatactgtcaaatgtatcaagtgcctgttgctga

SEQ ID NO: 320 - DNA, 423 bp, Listeria innocua
ggctttttagtatgttataatagaataaatactgtattacagcttgtcacaatgtccatttttacgattataagtttagcagcgatgttctttacgtgccacaagtacgaaatcatcttgtttagtaacttccgtttgaatgccacactgtctttaagctgtttttttgtatttaaaaagtttaaatcattactagttagggaaaagatttatcgattgccaatttttttggtagtggtaaagaaaaaatggaggtgtataagcgtgttaaaattcgaacacgtaacgaagacttataaagggggcaaaaaagctgttaatgatctaacacttaacatcgataaaggagaatttgtttgttttatcggtccaagtggttgtgggaaaaagacgacaatgaagatgattaatccggcttattga

SEQ ID NO: 321 - DNA, 423 bp, Listeria innocua
aacttgtttggaaaattagatacctatttacttgattttatcaatgaaaattcatcggaagacttttggtatgattatgcttatttacaggcacaagaccttttaaacaattttactcaaagcgactgggcggaattgcaccaaaatattgatactaaaagtgatttatggaaaataagagtagcctattgtattgatgaagatacggggatgaatggctttgaatttcttcttagtttaatgaatgatagtgatgatgtcgttgaatatgcaatagactcactaagatcgtttgattcagaagaatataagaatatcatacattcaaatcgcatgttaaaaataaaaacgcaaaaactattagaaaatgctagccttccagtaaaaagagttttagaagattttttacaacaaaacaaataa

SEQ ID NO: 322 - DNA, 426 bp, Listeria innocua
gtgatggcgctgttcgaactaccgcaaattaacaatgttagaacaaaaagaaacgtaataagagctttagaaaaatataaaattatgagagttagactcggcgagagaagaatgccaaagttaacttctacattgaccatagtgccaccatcatttaataatgaattccattctacgacagaagaaagtgcaatatggaatgtagatgcagtaaatgaagcaaaagcatatgttaaattgattgatcatcacatcaaccaacttcctgaacggagtaggcaagtgatactaactaaattcattgaagaaaatagtgattatgaagctatgttggccatacatgtaagtcactcgcagtacaaagaagaaaagagaaaagcaattgaacgcctagcctatcagcttaatatagtagttgaaaaatga

SEQ ID NO: 323 - DNA, 426 bp, Listeria innocua; identical to SEQ ID NO: 322

SEQ ID NO: 324 - DNA, 429 bp, Listeria innocua
atgtatggcaatacttatcaacgtgaatacgcccgtgcaattgggaacacatcttatgatttgaactatcaacttcaaattattgagcgagaactcaagaaaaaagatttaactgccaaagaacgttcgaatttacttgcagcagaaagtactttgaaaaaacaagttcaattgaaaatcttaaagctagatgcaaaaaaatcagtagaaaaactaactcagcaaactagagaagaaatagctataattcaaaaagtaaatgaaaaaattggagatgaattagattttattcaagataaattagcggatgcatttgaatcaagaactgcaaaagctgttcaaagttggatgaagcatattcgggaagaagaattggaagagcaaaaagaggttcttgttatttgtaaagaaagtatcagaatggattaa

SEQ ID NO: 325 - DNA, 429 bp, Listeria innocua
atgttcgcattaagaattaaagagctaagaaaagaaagtaaaaaaacacaagctgatatggcgaaaatattaggagtagcaaagactacttatgcttcttatgaacaatctaaaagaatgcctgatgctgagattcaaaataaaatagctaactactttgatgtaagtttagattatttacatggcagaagccgccataaaaatataaatgcagagggttttactctcaaagaagaaatagatatgaaaaaaagaatggatgcacttaaagaagatctgaaaaatggagatgggttactttatgatggtgagccgattacagcagaagctatggaaagtattttagatgcaatggaattcgctgaaaaacaagcaactcgtatcaatagaaagtacgcacctaaagacaaaaaaaataatatagagtaa

SEQ ID NO: 326 - DNA, 432 bp, Listeria innocua
actgccgctaatgctttacttgctaaagaagcggccgcctctccaaccgcacccatgccactcaaaataccattcacatatccagatgcaaaatcagaaccaactccgctggaatcaacggaaccagcaccagatttagcagaattgccaatgccagtgcctgccgaaaatgcattaccttttccgtccaaaataccactattaaaaccggatgcattatttgaccctgtcattttgaataaatttgggtcaaaagcgccattttttgcattgtttttgagttcggcaccagcgcttttatttgcttcagctgtactctttaaaccgtcagcgtttgcatttccgccttgtttaccgatattgttcatctcacctggtagaggagatgctcctaatttcactccatcaagtaaaaatttgccagctccttga

SEQ ID NO: 327 - DNA, 432 bp, Listeria innocua
tttcacaaaaactcttttagttcattttttgaaatatttaaagtatccgttttagaaaaaaaggagtataatgtaacaagtgaacgtaacaagtcaaatctaattgaatcaggtgaaaaaatggagaaacaaacagcaacttggaagaaagctctattttggtttgcgtatgtagtagcaggaatttgttttttattaacgattgtggcctttattgtaggatttattcatcacatgcatgatacaggtggatggcgttccgttattcaaattctcgaaaccccaattacgggctttgtaaaaatgactggtggctacatcggtaaaggaatcttagaagtaattattcttattatcgttagctatgtattaccaatcttcttctgttttgcaacgcattatttaaaagtaaaacgacgtgaaatggcttaa

SEQ ID NO: 328 - DNA, 438 bp, Listeria innocua
gtcgctggagtaggagaacttgttttgtcatctggattgctgactgttatgggttcagcgggtgttttttcaacttgttttgcaactggtgctttttctgtaggcgtagtggcttgttcttttgtttcagtttgttttgtttcggttttattttctactgttttatcaggtgttgctgtttcagtatttgtgttagtttctgttgaagcagttggattggctgttttagaagattcgtctgcgggtgctgtttcatcagcgctaaccattacttcaattcctggaacagtaacagaggtcgctatggctgtaactccagcaattgttgccccagttttgaatttgttactttttttattcttcttttcttctttcaaagcttctaaaatacgttcttttctcgttttttgcatggtaagtcacttccaattcttttaa

SEQ ID NO: 329 - DNA, 438 bp, Listeria innocua
gcagctttagaaaggggattgctaactatgagtacaaaatttgctaaatacaaagaagttatttataaagttagtaaaattggtgataatacagtaagacttgttagtagtaatgaacaagatatacaaaagggatttgtaaagaaagaatacccagataactatttaaataaagaaaaattgccagacttatatatatgtgaagttgacttttcttgtataaaagagctgtatgaaatatcagatatagtcgtgtataaagaaaaggaatttgaatctattactgaaaccaaagatttttttagaattggtactataaatacagaaatagctaaagaattaaattttgaaagaactgataaatattattatgaaaaatgggtaccgaaaaatgaagtaaagattgagaaggaacgaaaaaatatacctttaaattaa

SEQ ID NO: 330 - DNA, 438 bp, Listeria innocua
atgataaaattcacgattaatattcctccacatccacaagaacgaccgcgttttagaaatgcaggcaatttcgtacaaacgtacgacccgcctaagtcaaaagagtacaaaaagaaaatagcaaatgtggcaaaaatgtatgcgccaggaacgccaataagcacaccaattcaaataaaattgatattctttgtgtctattcctaagtcgaaatctaaggcttggaaacagcgagcattgctaggacaagaatttccctcagtacgcccggacattgacaactacgttaaagccattttagatgcgcttaacggaattatgtttagtgacgatggcaagattgttgaattaatcgcttataagagatattcggacttacctagaacagaagttagcataacagaattagtttcagaagttcaaacaaaattattttaa

SEQ ID NO: 331 - DNA, 441 bp, Listeria innocua
aacttaaaaatggaggcaacaaagatggtacaaaaaaatatcgtagtagaatcaggagtaaaagtttataaggataaaacgttcaaaaaagtagttgcagagctacctaaaggcgctatttttaaatatgaaagcggattttgcgaattcaaaacaatcaaaggctacacaaatcgcgcaaattggacctgtcctgcgatttctggtagctacgttatcgcactagcaaaagtaacgcaaaagcttgccgaaaaagttggtggcaaaggtgtcattcaaatcacgaaaggcgaaatagttcgcattgatccatctagcttgaaaaacggctatgtgaattgtgctgttttcaacgatgtgtgggagtggggattcaagattaaacttgcagatgttaaacgatgcgaaactttatcctataactcaatagcaaaattataa

SEQ ID NO: 332 - DNA, 441 bp, Listeria innocua
agcgattttggcatttttgtaagcaagtttcacgagttcttttttatttccgcgctgtggtacgatgatttttgtgtcgggaacgacggcttgaacggcttcgctatcaacatcatctggcaaataaatttctttaggtgggatatggtttgctttttgataaaactggccgataaatgtgaggaagtcttcatcagcatcgttgtaaaatggaaactgggaaacatcgcgctcaatgagttttccttggcgaatgaagaatacttggacgcacatccagcctttatcaatggcgtaaccgaagacatcgcggtcaacgaaatcgttcatcgtcattttttgtttttccattgttgtttcgatggcgttgatttggtcgcggaattcaccagctttttcgaattccatattttctgcggcttcttgcatttttttcattaa

SEQ ID NO: 333 - DNA, 444 bp, Listeria innocua
acacgtgttccaagtcccattgcaccaatcatcgaagcaattacaaccatggaaagtgctaacatgatactttggttaatcccagccatcatggtcgatttcgccattggtagctgtactttccaaagtttttgccaaggtgttgaaccaaatgaatctgctgcttcaacaagctcagtcgaaacttggcgaatacctaggttagtcatacgaacagttggaggcattgcgaaaataacagaagcaactacccctggaaccatcccaattccgaaaaatgctacggctggaattaaatatacaaaggcaggcattgtttgcataaagtcaagcaccggtttaaagatgctttcaacgataccgcttttcgccatccaaataccaagtggaacacctataacaagtgcaattaaactactcgtaagaacaagagtcagcgtttga

SEQ ID NO: 334 - DNA, 444 bp, Listeria innocua
caaatatgtaagtttaaaaatccatttcgttgccttttgcaagggtttgtcccgctcttttcttatacaataagtgtaataactcagcaaaggatgattgacttgaaaaaaatcgttatacttattataagcgtactattacttggtggaattattggtggcgtatattactttaaaaatgccaacaaaattggtgcagatgcttcctatgttaaaattacaaaagatcccacaaaaagtaatgaaataagcttcaacaataattatactcttcctgcatacgacgaaaatggtaaagagacagaagttactttttctgcagataaagaattacgtaaaggcgcttatttaaaactttatattaaagaagacaaaggcgtaacttcatttgaagaagtgcctgaaaaagaagtcccagctaaagcagctgaaaaacttaaataa

SEQ ID NO: 335 - DNA, 444 bp, Listeria innocua
aaagtttcattccaagaccaaccgagtgcaaaatgcggtaaaaacatcatcactaaaacaaataataatactgctttaacatacgcatcctcaaatcgctcaataaaacgagcggtttttgaaggttcactctgggcggtttctactaagcgaataatcttgctaaaaatcgtattatcaaaagtttgcgttactttaatggtgatagcactgctgacattaactgtcccaccaaacacttcagcaccaacagttttctcaactggaaccgattcaccattgattgctgcttcattcaaagttgttgaaccacgaacaatcacaccatcaattggaacactttctccaggtcgaacgagtactttatcatctaattgcaaatcttttgcagctacttcttcaacatcaccatttggaagaaaacgaaaagctcgttccggttga

SEQ ID NO: 336 - DNA, 447 bp, Listeria innocua
aagtataaagagtggtacgctgttcacacaaggagaaccgagatcattaatcgttcatattttatctcgtctgtggtggttagatattatacaacggatgatagtcgcgaaaatccttatgagttaatggagttttttgggaaaaaagatatatctgggaagatgattagtttcttttctagcgtaatgacaaacaataaaaacattcggcttggaattatttctggaataaagaaactatatgatgctgatttaattccttaccatagagagcaatttcgaacttcaataatgtattttaatttaatgggaggtgtcagaatcttagaaatactttcttttgaagaggttgaagagattacaattgagttgttaaaggaaaaaatagtgtcactgaccaagatatccaagttcttcaaaaagcataataaataccctctaaaatga

SEQ ID NO: 337 - DNA, 447 bp, Listeria innocua
atgtcatttaaagctcaaaatacaatctcaggaaaagaaggcggattgtttatagatggactagaagttgcagaagtaaaaacatgtgaagccaacattgaaaaaaataaagcagaagtaaatgttatgggacgtcgtatgacaggatcaaaaaccactggggcaaaaggttctggaacactaacactatacaaagttacttctcgttttgtgaaaatgatgcttgactatgttaaaacaggtaaggacccttacttcacggttcaaacatatattgcagatgcgtcatctggccgaggaactgaacgcattacattactagacgtaaatattgatagtgctaaaatcgttggtttggatgtggattccgaagcattagaggaagaaatcccgttcacttttgaagatttcgatgtaccggaatctctacggtcagattttaattaa

SEQ ID NO: 338 - DNA, 447 bp, Listeria innocua
ttggaaagagtgataaaaatgaacaaaaatataggaagaactacagagttttgtttaggcttatgtggggggatatttggaattttagcggcaactactatgttgggatttacgataccagatataggtgatatagattttagttattggttgttatccattttattaacgagcatattttccatttctggagtagtaggttctttgtttgttcgtaagcaccatctacttggaggtgttttaatgctcggtgctgcaatcggtggagtactgtcacaaaatatgttttttattatgtatttagcttttccactcctcttgattggtggattagtagcacttattcgagggggagagtttttaaaactatttagtatgtggtggttttatatcgttttagcattatctatctttgttccacttttacttttccggggatattactga

SEQ ID NO: 339 - DNA, 450 bp, Listeria innocua
cactggccaggagtgaaatggaaacttccttcaattttctcatcaaaaagaatatcttgcatcggttcgtggataaacggattgacaccgatagcaaattccccaacaaaacgagcaccttcatcagtatctaaaactttattaatgcgatctgtatcattggcagttgctttaataatttttccgtctttaaaagtgaaagagacattttcaaatgtgaagccttggtatggtgaaggggtgttatacgtaagtgttccattgatagaatcacgaactggagcagtaaatacttcgccatctggaatgttcatttcgcccgcgcatttaattgccggaatatctttaatactaaatgttaaatctgttcctggtccaactaagtgcactttatctgttttattcataagttctactaaaccatccattgcagtgctcattttaccgtaa

SEQ ID NO: 340 - DNA, 450 bp, Listeria innocua
atgtcaataaaactattagatgaattcttaaaaaaacacgatttaacgaggtatcagttaagcaaattaactggtatctcgcaaaacactttaaaagaccagaacgaaaaaacgttaaataaatacactgtttcaatattacgagcgctagcgcttatcaccggtatgcccatttcggatgttttgtttgaattagaggacttagaaaaaaacgcggatgatctcgccggttttaagcagctgttagatacgcataaactctcctttcctgcgcatgaattcgaattatactgcttaatcaaagagtttgagtccgtaaatatagaggtgcttccttttacgtttaaccgatttgaaagtgaaactcatgtagatatagaaaaagatgtccgaaaagcgctggaaaacgctattacagtgctgaaagaaaagaaaaacgaatttatataa

SEQ ID NO: 341 - DNA, 450 bp, Listeria innocua
atgagtattccaactggacaagagtatatgatgcctgagctaggtttaggtaaaattgcttcttatcaacgttcgcaagttgatagcgcagcagtaaaaaaggatatcaactttggccaagccgttcaagttatcgatgacgaggctagcccattgactacaggtgatttttatggagtcgctgtggcaaagaattacgttgatgagtatacagatgataaagcaggtgtttataaaccttctgaagcggtaccggtgttacgacaagggacaatcacagttattgtggatgaggatgtgaaatctggagaaaaagcagttgttaatacagctacctctaatttcttaccttctacaacagcaaaaacaactaaaactgaagttattggagtatttaaatcaacaacgtcaagcgacggattagcaaaattagaaattaatctgccttaa

SEQ ID NO: 342 - DNA, 450 bp, Listeria innocua
atgcctggcgcttttggtttttctgtttctgtcgtgctattggtcgataaatcaactgttccgataacttgctcgatttgttctatagtaatgccacctggacgcaaaataatgggtacatcaagtgagcaatctatcacggttgattctaaaccaacacccgtaggaccgccgtcaataataccggcaatttctccgtctaaatcttctattacatgttcggctgtggttgggcttggttttccggaacgattggcgctcggggctgctataggaatattcgctgttgctattaattctaggcttactggatgttccggcatgcggacgcccactgtggataagccagcagaaacgttagctgctagactgtctttttttaaagggagaataaccgttagcggacctggccaaaatgcttccattagttggagcgcttttgggggataa

SEQ ID NO: 343 - DNA, 453 bp, Listeria innocua
gcgtgcgattccttccttaacagttacttggtgaccgccaaaaatatactcgccatcgccaactcccatagcttgaagggcatcggtcgtgagaacaatcttatctggtcctttaattttatggatgagacgcacaatcccaggatgaagatggaccccgtctacgatagtttgaacgcttaccgcatcattttccaaagccgctgtaacaagtccgggtgcccggtgatggattgctggcatagcattgaagcaatgagttatatgtgttgctcctttttcaaaagcatcttgcgcctcttcataagttgcattggaatgcgcaattgcaataacaactcctctttttttcaagaagtcaatgagttcgataccaccgggcaattctggcgcaatcgttaccattttaatcagaccatctgcttcatcaaaaatctgtttcatttcttttaa

SEQ ID NO: 344 - DNA, 453 bp, Listeria innocua
atgtggttagataaatacagagagcgatatcctgaactaactatcattgaagacaaaaatatgcaggaagttcacaaaggattatattataatagtagaatattcgtaaatcctcaacaaaatgatgttgaaatgcgttgcactttagcggaggaaattggacatcataaattaacagttggaaatattattaatcaaaatacagttaataatagaaaacaggaaaagcttgcaaggagttggggttatgaagcgcttgtccctttgcgtaaaatcatagatgcttattatgaaggattcactgattactacgaagtcgcagattttttagaagtgacagaagattttttaaaacattctatagaatattataaaggtaaatacggtaacactgttgagtgtaacggatatgttatcatttttagaagtagtatacagattattgcttgttag

SEQ ID NO: 345 - DNA, 456 bp, Listeria innocua
gcgatggaattatctatttcaaaagacatttctggaactttacgaagtcgaatacggcgaccgatttcagagcggataaagccatgcgctttctcaagtgcgagtaacgtattttctttttccttatcggtaccaagaatggaaatgaacaccttagcttcttgtaagtccccagtaacatctactcccgttacagtaacaaaacctaagcgagggtctttgattttacgatttaaaatatcgcccaattcttttttcatttgttcactgacacgatttgctcgtacgttcaattgtattcacctcttttataacttctccattactgtctcagctcgctcccactctggaaaagaatctaggaaagcaagtacttctctagcttctttttcagcttggatatgcgaggcggatacaacagcaaagctaatttcagttcgctgccataaatcctga

SEQ ID NO: 346 - DNA, 456 bp, Listeria innocua
ataactcctgaaacacgactagtggcaccattattaatattggtcgctgttcttgcaattgctccagttgctggaataccaccaaacattggcgtcacaatgtttgcgataccttgtccaatcaattcacggttactattatgttttgtattcgtcatcccatctgctaccactgccgaaagaagcgattcaatcccaccgagcattgcaataacaaaagccggcccaatcaatttactcatattagcaaatgtcatatcaggaaattggaatggtggaaaagtactcgggatttctccgtatgccgatccaattgttggaagcgcatctttgaaaaacagcatggcaatcccggtcgtaatcacaagaccaatgagtggcgctggaattcgtggtaaaatttttggaaaaacaaataatacaaacatacaaatacaggaaattaacacgctatag

SEQ ID NO: 347 - DNA, 456 bp, Listeria innocua
tatacttatttgatttcattttcaagtgataattacattcttttttatagaataaggaaatatcttttctttttagaaatttttgttatacttaaaacgttaaataaaggagggatcaccatgactattcaacaccaatttgctgaaaatctttcgagattaaaaaaagaacatggtctcaaaaatcatcaaattgctgaattattaaacgttcaaacacgaaccgtcgcttactacatgagtggtgaaacaaaaccagatattgaaaagctgatccgtcttgccacttacttccatctatcgatagatgaattagtcggttatgttcaggaagacaaagtatggaacgatttgtccctaaagcaatggttactatccctaaatttgagaagcgaagaagaaatcgcgaaaattaaaatattggttgataccgttgaaactttgtatccaaattaa

SEQ ID NO: 348 - DNA, 459 bp, Listeria innocua
atgacacaataccactacctcgcctcaaaagcagcactgaaaactacgacacacgaaaataagacagattttgtatatcaaaacgacttagatttcctgagcttgaattttgaagaaaatattgatgagcgtacaaatgaaaaattttcctactccaaatattttaacccaacctgcaatttccaagtcgctataagtgaagggaaattgccgttaaaaggtgaagagcaaaataatgattatgaatctaaaagtttaaaaatactacacgattacattaaaaaagctagtaaagaaagtgatacccttgaactatacacttcatggaacggcgaagaaaatttccctctgacgaataaaacagaattagctatagaaaatttaacgccagaaaatttgattttaagagacagagaactattaataattaaaaataagacatttacatacaccacttaa

SEQ ID NO: 349 - DNA, 459 bp, Listeria innocua
gggcttttactaatttggaggacaaaaatgaaatcatttaattttaacgagaatgaagtaaaacttcctttggaaattaacgggaaaaagtattatgcggacatttcggcacaagcacacattaagtacagtgcgcttttggatgaagctcccaaaattttaggacaagttcttgcgcctaaactaaaagctgatgaaagtgatgacgaacatacaataccaaataatgaaaacatgcatgaattgttaatgactatcacagatgggatcgtagcgacaaatgatgatatttttgctatttttttcagcaaagaagacagagaagaaatcaattccaaaacattgccaactaaagtctatgaggggcttattgaatacattatagctaaattatttgaaagcgatatgagcgaggaaagtgacgaggggaagccacaggaaaaaagtattacggaatag

SEQ ID NO: 350 - DNA, 462 bp, Listeria innocua
cgtgcattatattcaatttcgtcaaggttatcaaattcttctttcgttacgccacttactgtaatgccatcatctgtaattgtaagacgtgaacttggaagtgccacatcgttaaaacctaaatacgtgttacttgcagaggttgacttagaaaaaggagcaactgtcccatcaaagctagttaatggctttggcatcatcgaaaatggtaaatataacgtttggtttgcttcgttaaaatcaagtttgcctgatttaagcgtgatgcgcggatttgtccgcccggtattttgtccaaatgctgctaaagcttttaagttaccatttttaaaactctcaaaattatttaaaggacgaaaatcatcaattccatcaaattgcacaaaaagcgttgttaatgctggcaaagaggctaatgcagaaatatccgtgattttcattgaattttgtgcgtacagatag

SEQ ID NO: 351 - DNA, 462 bp, Listeria innocua
agatatcttatgaaaaaaatcattattggggtgcttgtcgttatagtactaattatagctgtagttgaaggaaagtactatatcaatatgtactaccaaaagggacaagctaaaaaacctatagaagcttctatcaaggcttcaaaaattcctaaaaaggacatttatgtgataaaggaaaatgagtatgaatctgaatctataggtgatagtgttcaaaaggaaatcactacaaagaaagattacgaaaattggaagcaacttgtgagcaagagaaaaaaatacttagatggaagttcatggcataagaagaaggggtgggataaaatagataaatgtgaaatatcttatctatttgtctatgatactcatactaaaaaagtacgaaagtattatatccttgcaggaaattcagttgatgacaaaaagaataaacaatattttagttatcgtttaaattaa

SEQ ID NO: 352 - DNA, 465 bp, Listeria innocua
aaaaaactaaaccggttaaatgatagggggatacatgtgaaactgacgaatgattttatagagagaaatatgcggcagtttcaccgatatgcactaagaacccttcattacgcagctctcaccgcctactatgagcggctgcggttagggaaaaatacaatcacattttcaagtctatcctttcaagaaacccgtctcctttatcgtattgatcagcactttactgacgatactatcttcaatgtattggattatgaaattattgtacaagacaataatctggctaacgcattaaactgtctgccagagcagggacgtaatatcattctgctcaaatactttcttgggtggacagacagaaaaatcggagaggctttttcaagttatgactcttcaacacgcaaacgtcggttagcggcattaagggttctacggataatatatgaggaacaaaacggtgagtaa

SEQ ID NO: 353 - DNA, 465 bp, Listeria innocua
tgtattcttatttatgaggtgaagaatatggaatatattgcgcatgaagtggctgagaagttgggcattacagttcccacactgcactactatgaaaaagctggtttgcttccatcaataaaaagaaatagtgtaggaaatagaatatacacagaagagaatattgaatggctttacatgattgtgttgatgcgggaagttggcgtaccgattcgtgaaatacgctcttacatacaattattgttgaagggccctgaaacaatccctgaacgctatcaattagtaacgcagtacaagcaatctgtagaagaaaagatgaaggcaatgcaaacttctttaaaatggctgggtgctaaagtgaatttctatcaggaaatgatggatacaggggagaacaagccttgccgtacctttctggaggaatctgaactttttaggttgaagcaagcggaggagcaaaaatga

SEQ ID NO: 354 - DNA, 465 bp, Listeria innocua
catagggatagaagactgcgctcagtattcactacaatcccgccgacgctagttttcgcgttgactgaattggaatttatacgggcactctatatcaaaatgcaactcatgataagtgagtccggctgttttttccgttctttttcttgggaaaagaactttcggtcgcgaaatttgcgaataatcgtatcgaattcttttaccaataatggtagaagtttttttatttgtacgaaagagagtttttgtcgccttttttgtgaaatatcacacgaacaggaggcaagttttccatcgattacggaggtgttgattgctgttaaatggacaaagataattctggcggagcaatctaagaaacgactagattttgaaatcaaaaaaatctcagaaataatgggctattcttttatggatagggtcaattgtggtactattagtaatagatgtacgcacaatttgtga

SEQ ID NO: 355 - DNA, 465 bp, Listeria innocua
cctagtccgataacaaggccaccacctacaaaattcccaagtaaagcaaggactaaattgacggtcacattgcccgctgtcattgcagcaagtgttccaccagaagcgaaaaatgctaatgagaatgatgagaagttggcgataacgtgctcgaatcctaagaatgcaaagatgaaaataatgaaaatcatcgcaatgactttaccagcatcatctttcattcgaagtgtacaaagcacggccgtatttacaacaatattggcgaaaataccttctacaaaaatttgtaatggcgctttttcaagtttaccgctaacggcagtaaataagaagtggtcagcaggtaaattatggaaaacagatgtcagagaaactaagtaccctgcaagaattccacccaataaattacaaacaatacataaaatcaaaatttgtaatgcttttccaggtttaacaattttttga

SEQ ID NO: 356 - DNA, 468 bp, Listeria innocua
tctcctcctcgtcaactgattgtttactttccaggaatttcacctttaagcattttcgtcccaatcagttctggcgcttctattcagttgtactatcctccttcaatacttttcaaggaaacaaatctattttacaataatatgtatactaggtcaagcattatatatagccgtttgtttaaaattggtctatacattgacaaaaaaaaacaaatgactaataatatagttatgatagaaaaaggagcgagccgtatggttttatcaaaaaaaatagtttctagtattgctttaattttttcactaggttttatttattttcgtgtgagcacggtttatgcactcgagcatacaagtaatgcgtcacttttaccttcgaccggggatgcattttcggtttggccgattgttatcggagtacttctagtagtcttagcagtcgttctcttcattaagaaaaaaatataa

SEQ ID NO: 357 - DNA, 471 bp, Listeria innocua
gtgataaaaatgaactggaccatttgggataaaacacaacctgccccactagaactattactagaagctgatccgagtgaagaccaaattgcgaaataccttgataaatcacgcgttttccaactaaatgataccgataaaacaatcggcgtcgtttgcttgcttccattaaataataagcaacttgaaattatgaatattgctgttctacctacccagagaaatcaaggaattggtaaaatacttcttgaaaaagcgtttgattttgctttacaaaacaacttcactgaaatcattgttaaaacaggtaattcaagtattgaccaacttgctttttatcaaaaaaacggctttcggatgcaacaaattgttccaaattattttatagaacattataaagggcaaaccattgtcgaaaacggtattctttgcgtagaccaaatcattctttcgaaagaaataaaatcctga

SEQ ID NO: 358 - DNA, 471 bp, Listeria innocua
cttcgatatggtacaaaaggaagcaatgctagcactcgatatggctctttaaaaaaaggaggagatagggatgcaagtagttcaaggtttatttcattttgtcgattggatagtggaagggattatgcaattagggatgattattctagcccttttaggaaagggatgtttagcgttccttcattttttaggcgatcaatttcaagcgagttccaatggtacaaagtttatttatgcgatcgcgattgtggtaacaatccttattatcctctactttacctggcatatattacttatgagtgccttcgtacttgctattgtgattcctctctttttatttgtgggcaaaatcgtggtaagtattttacttgtcgcaacacttatatttgtcgtacgatggctggttgttacagcgaaaaacgtttatcaaaccaaaatggcacaatagctttcctagctgcagatacttga

SEQ ID NO: 359 - DNA, 474 bp, Listeria innocua
aaaatatcaatggcaaaaaaattgaaggatttcaaaatgaaatatgaagcagattttataaatagattcaaatcattaatagaagaattccagttaaattataaagttatatctgaagaggagctagcactttttggttctaattttgcgcatgtttttttgattcattttgatgaagtttctttgaattatgtatgccgtgataaagataattcacttgttagttatgatgtatggtcttattttttgcatgtctttgatgataaagatagggagaatttgccaaaatataattctgtgcaggaacgggttgatatttcgtttttaatacttgcaagaggtcttccgcgtcattggagtagtgtgctaaatggagatgacaagtggttggaagattataagcagtatgaattagcccgtgttcctagaaaagtaatgggggacttgaaggattgtttgagtttatatatttaa

SEQ ID NO: 360 - DNA, 480 bp, Listeria innocua
tctatttgttgcggtaatggggggcttggaattatggaaaacgaaaaggaaaaaatagattatgtgtccagagcagagttatttgagcatggaattgatataaaaaaagagatgtcaagaaaagtcgataaagttgagagcaaagtagataaaatcggtgaggaagtagtagaactgaaagttctggtgattccgatggtcacgtcatcaaaagagacagctcaaaacacgcagaagatggcggacacacttgaacgatatacgcgatcaacaacaaagcagttgcacgaacatgacttagaaatcgccggcgtgaagcactcaatcgataatactttaaaaagtataagtgatgaagagtctgaggagaaacataagaagtttagtaatgtgcaaattataacttctgttttagctcttatagggataattttaggcggaattctaagctgggattggggacaatttatatttaaatga

SEQ ID NO: 361 - DNA, 480 bp, Listeria innocua
atgacaacactttattccattcaagaaaagtatcaacagttattaaatttagctgagcaattagatccggaggcattaaaagatacccttgaaagcattgaagatgaattagaaacaaaagcagaaaatgttgcgtttgtcattaaagaattagaagggcaatcacttattttagatgtagaaattaaacgtttatcagaacgaaaaaacacgattaacaataatgtgaagcgactgaaacaatcactacatgatgctatgctagttgctaataagcaaaaaataaaaacgaatttatttacattagatattcggaaaaaccctcacagtgtgtttgtagaagatgagagtaagctaattaattatttagttgagcaacctaaaaagctggataaaactaagttaaaagatgacttaaaaaaaggcattgatgtgccgggagctgttttggttcaaacagaaagactacaaataaaataa

SEQ ID NO: 362 - DNA, 480 bp, Listeria innocua
tctatttgttgcaaccatgggaggcttagagctatggaaaacgaaaagaaaaaaatagattatgtgtcaagagcagaattattcgagcatggaatggatataaaaaaagagatgtcaagaaaagtcgataaagttgagagcaaagtcgataaaatcagtgaagaagtagttgagctaaaagtattagtaatacctatggtaacatctgcgaaagaaacggccataaacacacaaaagatggcggatacactggaacgatacacgcgatcaacaacaaagcagttgcatgaacatgacttagaaattgcagatgtgaaacactcaatcgataatacattaaaaagcataagcgatgaagagtcagaggagaaacataagaagtttagtaacgttcaaattataacttctgttctagcacttgtagggataattttaggtggaattctaagctgggactggggacaatttatatttaaatga

SEQ ID NO: 363 - DNA, 480 bp, Listeria innocua
ttggaaacaaaaaatgttgagttgggttcaataatggctttttgtgtgaaatcattgaaagatatcgcatcgaatatcaaaatttacgaaaaaagtgttccaacaaattttgtaagtcctagtttgtactttccacaaccttcagttagtggcgttggggcttctttatcttcattcaaaaacatttgtatatggaatattaaggtttttgattcagataaagtaaaagcattcaaaattgcagaagtcgttaggaacgctttttattctaagaggctaataattccagttctaaagccggacggggaagagtcgggtttttttattcgactaaaaagcgtggatattcgggatggtgatgagttttcaaagagtattatactgaactgggattcatatgaacgttatcacactgaggcgaagatggtaattagtgatgagaacgcactacaaataaatggaggtctaaagaatggctaa

SEQ ID NO: 364 - DNA, 480 bp, Listeria innocua
atggaagtaggaagtttggcagaatgggtatcaggaattgggacattactagcggttggaacgtcattgtatttggctaacaggaaccccaagaaaaaattattagtttcacatgaaattaaagagataggaactttagcaacggtttctgattataacatagaaacattagttgtaactgtcgcaaacttggaaattacttcagtacaaataagagatttattttttgtttcagaatcaatacgaataaaattaccactaagtgcgctggttggttttgctgcaatgggtaaaactactccatgcgttgttgatccattttcagaagttaggttcttggtgatttataatgattttcaaagtctgttaaaagaaaaaaatgcaagaggaatcattacgggggaaatattggttgtagatgaatcaaataaaaagcatagagataaagtcaaattaactattgaagttgttgatatgtaa

SEQ ID NO: 365 - DNA, 483 bp, Listeria innocua
atgtttaaagtagatcataatgatgttttcacaaatggagtagaaaatggtacgtatgaggtggttttatacaacgcaaatgaagatgcgacaaaaaacggagcggagttcattaatattgatttaattattcgtaatgatgtaaatcaaaaattccagaatgcgcatatttttcaccgagtatggaaagcaaaagcaacaaatgaatatagtcaaacggcattaaatacaatcgctaaagcaatccaattacctaacggcaaagattataatacattggatgaattattaaaagacctgttaactaagacatgccaagttactgtgaaaaatgaagagtctgagtataatggtcaaatttataaaaatttaaatgtgaaagcgtgggctgaaagtaaaattactggaccattacaacatgtatttaaaaagaaagatgctgaacctatgccagaaataaacgagagtaatctaccgttctaa

SEQ ID NO: 366 - DNA, 483 bp, Listeria innocua
atgtcccattttaaaggtaaacaattcaaacaggatatcatcatggtagccgtgggctactacttaagatacaatttgagctatcgtgatgtttcagaaatccttaatgagcgtggaatcaaggtttgtcacacaactgtttatcgatgggtacaagaatatggttcgattatttattgcctatggaagaaaagaaataagtctgctagcgattcttggagaatggatgaaacatatattaaagtaaaaggaaaatggcattatttgtatcgtgccatcgattctacaggtttgacattagatatttggttgcgaaagaatcgggataaacaggcggcctatgctttctttaaacgattaatcaagcaatttggagaacctagagtttttgtaacggacaaagctccttcgctaagcagtgcgttcaatcgacttaaatctgaaggtttattttcggttctgttgcaaagttcaaagaagtaa

SEQ ID NO: 367 - DNA, 486 bp, Listeria innocua
tcacgtggaaaccaaaatcatattcctatcatgtatcaatatttattcaacaataaactaaattataaagaacggatggctaaatgtcaactgtttattaagctattcgttgattgtttcttttcaacaaagcttccgtttttaagagttagttttacatctgacactttcgcaatttctgggtcatgcgttaccataatgacacattttccttctttatgcgctaaatcttggaataacgtaactacttctttacttgttcgttcgtctaagtttccggtaggttcatcagcaacgattaattctgtttcacaacataacgcccgtgcgatggaaaccctttgctgctgtccgccacttaaagtcagcactttttggcgcgccattttctcagtaatgcccactttttcaagcatgcttagtgcaaaagcttttttgtctggctggttgacatgggtaatttccattgcagttgttacgttttga

SEQ ID NO: 368 - DNA, 486 bp, Listeria innocua
cagagtaataatcgttgtaacgaaggggtcgatggggtaatgaaaacaaaatggcgaaagtttatagatcaaatgcttgaaactaattacaaagaagtttttgcgttgtttttcttgttatcagtttcattttataatattctgactggtttttttttgatgacgtctggtgataaaattgttgaaaaaagcaagacatatcaactgatggacaatcttatgacaattgacacatgggggttgttgtttattttaagtgctgcactgatactaattgcatcttttcaagaatcaaatgcaagatttataaatttgatgattggcgggggaataggtgcgatagtgctgttcttatattcagcagcgagctcagagagtgctgttacaaatttattgcccagccgctatgctctaagcgcatgttttaatctatttgttgcggtaatggggggcttggaattatggaaaacgaaaaggaaaaaatag

SEQ ID NO: 369 - DNA, 486 bp, Listeria innocua
acaaggaggaacttcatggaaatcacattacaacaacctacaacagctgactttcctttcattgaatggttgtggggagatttagcaacaacagaagtgctcggcggaccattttcttttccagaagaaacgcgaatggactggctaaaatcaaaatcacaagcgagcaatgcttattttattataaaaaaaggtacagaatctgttggtgaagttagttttcgcgattttgaaaaaggaacagctcatttaaatattaaagtggctgcatgttataggggccagcgaatcgctcaaaaagctttgcaattattcttagattttttccaaactgattgcggcgggatagttttgttggatgaagttagacgggaaaatgaagcaggcattgggtttctcgtgaaagctggtttcgaagttatagaagaaaaagaatggacgatggtgctcaaatggagtgttcaagcagaggggagttttgaatga

SEQ ID NO: 370 - DNA, 489 bp, Listeria innocua
aaccctgcaagttttgtacaagaaaaaaatattaatgatgttctagaaatgagcgtagatgaggctatctcatttttggaaagttcaacgattgacctatccgtattaaatatccttaaaaaaatagggatggattatgtgaaattaggtcaacctacctcaactcttagtggtggtgaggctcagagaattaaattagcaaaagaaattggaaaaacaagaaaaaaagataccctttatgtgttagatgaaccgtcagcgggcttaagtcaatatgacatttcaaaattgctttatttactaaatgagttagttacaagtggtaattcagtaattgttattgaacatgatctcgatatattaaaatgctgtgactggattatagagcttggcgaaggtagtggagacaagggcggagaagttattgcacaaggaactccaatcgacttaagcgaaaataatgtatctattacagggaggtatttataa

SEQ ID NO: 371 - DNA, 489 bp, Listeria innocua
atggtagcagatagagaaattgaaaaagtagaagaatcaaatgaagaattagtttatgatatcacagcatttcttcctggaaaacatgaagaaaaggtcaaactagaacgtgctgtctcgaatcgttttaaagataaaaatggaaatgtaattaaatttgtatttgaaaatgtaacttctgaacgtctcgaggaactaagaaaagattgcacaaaaagaattccaaaaggccgtggacgtcaaccagaagaaaaatttgattctgataaatttcaagcactcttggcattagaatcaactgtttatccgaagtttagttctaaagagttgctaaacgcatacaaatccccctctgctctagaagtcgcgaaaaaagttttatccgtacctggcgattacatgaactggatttcggcagcaagcgaagccaacggatttgatgacgaaatcgacgatgaagcagagtctattgaactagcaaaaaactaa

SEQ ID NO: 372 - DNA, 489 bp, Listeria innocua
tttacaatgaatccgtcaacattattatttagtgaaactgtaatatcagctgtggagtcaaaatttgtaattgctccactatcctgcaattcatttaaatatgctgtttgcatcgatagaataaattgcaccccattttcatctgcgggaatgtctgtattagcatcttttctttctttaatagcgtctaaaatatttctgcgtgtatcattattaatgccatctaggattcgcgaaatcttattctttcggaatttagagcttttttctttactaaatgtagttaatgaattaaggtcctgttctacgtatactgctttgtcgcgagcatcaaatgtcagaacaaattcaccattttgtaatgcttcctctgcttcatcattggccaatcgaggtgtagcatcaattgccccatcatatttaacaaaagtattagacttcagcatagaggcagaagcatcagctccagcaacccaagcaactacttga

SEQ ID NO: 373 - DNA, 495 bp, Listeria innocua
gtgttagtgccaaatgatactgctggttatgactatggaaaacttgttaaaactttgattaatgctgttaatgagctttcgggcgggttacaacttatcgaaagttctagtggtggggaacaaccagaatatccattttgccaatacaccataacatctccttacattgctatcagtcctgatatagtcgaaggggagcaatttgagattgtaatctcgcttacatggcgagccttatccggccatcaagcgttaaacttggccaacattacaaataagtatttccgctcccaaaaagggcgtttttttatgcaagaaaatgggggtattgttgttgtcagtgttcaaaacagcgggctgcgcgatactttcattagcattgaatatgagcgctcggcaggcattgatttgcggttgcgtgtagttgattcgtattcaagtgaaatacaagaaattgataatatcagctttacaaatgagaatttaggaggataa

SEQ ID NO: 374 - DNA, 501 bp, Listeria innocua
cggttatcccacgctttagctaaaattttctttggatttgcaagtggagtgaattcagcgacagggacgataaattgccctggtttgataccgattttttcagcgtccgctttatcatctgcaccaatatcaataagtaagtttttcgggtcagttggtttgctacgttccgcttccgatagtaaatgcggaggaacagaggctacaacgccaattacaggaccatttggcgccataatttgcacacgttgcgcttgtaaaacttgcggattccaaccaccaattgtttggaaacgaatcaaaccattgtctgtaatttgcgttaccataaagccaacttcatccatatgggctgcaactaatacgcgcggaccatcagttgctccgtgtcgcacgccaaaaatgccacctaagccatcttggataatttcatcggaaaccggttcaagttcttttcgcataaatgctcgaattctatgttcatcacccgaagtaccttga

SEQ ID NO: 375 - DNA, 501 bp, Listeria innocua
atgatgaactattacagcatcgaaaaaggcacaaaagcatatgagtatttagacaaaatttacaatcaagatacagacgcttttttgaatgaagttactgaattgctaggatttgaagcaagaggacatatagctattaacagagcgcctttaattattgataaaaaagcgcttaaagagtttaagccagagtggctgccgaaattcaaaaaatataaaggtgagttgatgactccgaaaacggcattcaaggagctaatcaatgcatatgaagaacttcagcaaaaatacaacatggatatgacattcagaaactttaatataaataacgctttagcaggtaaaacagaagttatctatgactttgataacacaggtttcgtttattttgaatctgatcgaaaaatattaaaagaggattttaaagaaataacggatattgattatattaaaagaaatttagaatgcgcaatttggatgaaagagagggaagacgaatga

SEQ ID NO: 376 - DNA, 501 bp, Listeria innocua
ttggaaatcgaaggtttagaagaatttattgcagaattagatacattcaaaaaagacttgcctaaaaagtttaaagaatggctagaagcttctggaatggcctttcttgatattgtgcaagatgagattatttcatctgagacagttgatactagaagactactaaattcgttttctaaggcagctgctggcaatgtatttattatgtctagttcggggatgtctttagaagttggaacaaatgttgattatgcttggtatgttaatgatggacattttacaattaatcctaattcaggtaaggatagacgctgggttccgggatactggaaaggtgataaattcacgtatgatccaggagcaacaaccggtatgctgttaacaatcaaatggatagatgggacaaattattgggatgtggcaatttcaatatttgaaaagctctttcaaaaaggaatggataaacagctacaggactttatggaccaatgttttaagtga

SEQ ID NO: 377 - DNA, 504 bp, Listeria innocua
gtgaaaaaattcattttaccagtgcgaattctcattatatatccagcaattgctactttaatgttactaattatttacatcgttcaaacaccgactatatgcttaattggtggatttgtaattggatacgctgcaactagttgggcaatcataggtataggtttcacttgtacttccactttccaactatggttaaactgtaaccaagagctcggaaaattatatggcatggctgatccaagtaagattcaatcattctactcactaggtactatgtgtgctattttaattacagctgttctcgtgaaaaaattcattttaccagtgcgaattctcattatatatccagcaattgctactttaatgttactaattatttacatcgttcaaacaccgactatatgcttaattgctggatatataatgagaattcgcactggtaaaatgaattttttcacgagaacagctgtaattaaaatagcacacatagtacctagtgagtag

SEQ ID NO: 378 - DNA, 507 bp, Listeria innocua
ataatatcaactacagcagctagaactagaccaagagacgcccaaatagcaacaccaacatatttaagtacatctttaaatccactacctactggttttaatgcggcaactatctgtttgaacacatctactattttaccgaaagaatttttcacgccatcccacatagttgataaaaagcctttaatattcgcagtgttttctttgaatgatacatacatgccgtatgcaacagctataactgcaccaataactgcgattattactccgaatgcggcggcagctgaacctagagcgactttaagcgccaagaaagagcctttcacagtgttaacaattccaccgagcaacgtgccactgcttgctaagcctctaaatgccattaccaaaccagcaactttagaatatacactactaataatattaaatgctacaaatccagcggcaactttcgccaaaactggcgcccactcgattaaaactggtataaactctttgattttttga

SEQ ID NO: 379 - DNA, 507 bp, Listeria innocua
aaaaagaaggaaatgcaggatttattaacattacgctttttagacacatatgacaatattctctttattggaaatagtggtgttggaaagacccatttagccgtttcaattggattagaatgtatcgatcgtggtttaagttgtttgttcattacgagcactgaattagtgaatcgtttgatccgcgctcacaagcgcggaactagcgaaacgatgctaaaaaaatattcgggttattcggtgttgattatcgacgaagtcggctatttacctttctccaaagaaggttccaacttactttttcagctgattaatatgcggtatgaaagaaaatctacgattgttacaaccaatatcccactatcccagtggtccgaaatatttggaaacaagaagcttaccaacgcgctactggaccggttggtccatcactctaaattgatccaaattacggggccctcttatagaatgaagagttatagcgaaaacaaagaggtgaaatcgtaa

SEQ ID NO: 380 - DNA, 510 bp, Listeria innocua
gaagaggacaaatgcatgatattcaaaacttgcatttgtggaataatagctaagaacattgctggaataattgcaaaatatttagctatgtcattagcaatgctaaacgttgttaacgcacctcttgtaattagtaattgttttcctatttctacaacgtccaaaattttagttggatccgagtctaagtcaaccatgttggcagcttcttttgcagcggttgtcccactattcattgcgatcccaacatcagcttgggcaagagctggagcatcattggtcccatctcctgtcatagcaacaacctttgacttactttgtgcgtctttaattactttgattttatcttctggtttacattcggcgataaagctgtctactcctgcttcatgggcaattgttgctgcagttagtgggttatcccctgtacacataattgtttttataccaattgaacgtagcctctcaaatcgttctactaaaccaggtttaattgtatcttttaaataa

SEQ ID NO: 381 - DNA, 513 bp, Listeria innocua
atgaaaattaaagattatgaagataaaatagttaaagatgaagtagaagtagactattatgttccagttactgtatcattttctgaaaatgatgataaatatggactaggagaattttattattatagatttgttaacgaacatgaatcatttgttgaaattaaaatcaattctgttacacggaaagttgtagaagtagttttcacatcaatcaataatattgaagattctaatttaactattgaagagtatacagaaaaaaacccagtgatccaaatagatatttttgaagaaaattcgattataactaaagaatctgggtttaaaatatttagagggaacaaaaaaatatattttaaactggatgaagagaaggtggattctattgtaaaaatgtctagccatgtatctttatttctgaatgaagatagtgagattattggcttggatttttctagcttttcagataatgaatgggcagaacttaatgaaagtataaagtctactacttga

SEQ ID NO: 382 - DNA, 513 bp, Listeria innocua
aaaattgataaagggagaattgagatgaaaaaattatttttgttagcgagtttattacttatttttagttttggtctatcagcatgtgggagtagtaactctgaaaacgagacaagtgattctaaaaaagaagatgtaaaaaaggttgaaaagaaaacaagtgtcgaatttccagacaaagaattaggtcaaggagagattattctgaaaacagaatcgggatcatctgaagatggaaatattccatttatgtataaagaagatgacttattgacgccatctatcggattcgaagcatgggaatttgatggttctaaattaacatatgtttatattgatgatgttcttaatactaaagaacaacttgcggacacacaaacttcattagatttaacaacaagtgagtatgaaacaggagaacacgaagtaaaagtagcccaatttgataatgataaagaaaccgggaaaataatcacatacaagacagcgaaatatgaaataaagaataaataa

SEQ ID NO: 383 - DNA, 516 bp, Listeria innocua
aatctagcagccatttttccaataccaacttcactagttaaaattcccttttcaattaaacactgccttggaaaaacaaataaaccgttcaaatcaccatcaataacaacaatacataaaaaatcagcgctatcattctcatcaaaaggacaattcttaccaagttcatctttctcccaaaaagcaacaaagtaccctgtttttttatctgtttttttcgccaaacgcgtccgaatcgttgtgccatctttagccgtttttacaatcattcctcgatattctttgttttgtagttcttcccgaattatttcaagttcaccaagttcgctttgtaacagctgttcatactccattaactctctccttcagttgcaattgaagaattggataaggcttcccaaaaccgtccaagtcacttctggaagaaaccacaaatccatgcttcaaataaaatctcgtggcattttcattttgttcattcacatccaccaggtttatccgcttattttctattag

SEQ ID NO: 384 - DNA, 516 bp, Listeria innocua
gttcaatttatccgcctcctaaaagtattaacacgtttactatacaccttagagtatactcaaaggcaaacatttggcttttcgattttcaaggtgctattattaagaaaaaaagaggtgattttagtgcaacaaacaattaaagaagcttctgagcacacgggtttaagcgcccatacgattcgctattatgaacgagaaggattaattccatttctagcacgtgataaaaataataaccggattttcgataatgatgccctgcactggcttgaattacttacttgtttacgtgtcactggaatgccacttgcgaaacagaaagaaattgttgaattaactaaatgtggcgacgaaacagtatcagaacgaatcgctgtacttaaagaacatcaacaagatatgtatcgccggcaagctgaactggaccgcgcatttaaaaaaatcgagaaaaaactagcttgctatgaagaattagaaaaagacgtaaagaaaagtgtgaatcagcttagctaa

SEQ ID NO: 385 - DNA, 519 bp, Listeria innocua
atgatgacgatattgctaaacgaaattacaaagggctatcattccgctacaaacgttccggggctattcattccgtggatgtatacggcgaagtggaagtataaaaggaggaataagataatgggcgaagtaatggcaacatatgatgcaaatacagtatcgacaattatcaacggaatttctatttttggtttttctgatggggatatggtttcatgctctaaagattcaaacaatgtagaaattaaatcagacgcacaaggtaattcgtcagcagctgttaataatgacaaaatgggtacaatcaaagttgatttagctcagacatcaccttgttatccaaagctgattgatatagcaaatagacagctcaaagttcctatttacgttattaacggaaaagaaaaaattggtgggtctatggcttttatcgaaaaattaccagacgcaggttttggtaaaagtgttgggacaaggtcatttactttcaaagtactagattatacacatactgcataa

SEQ ID NO: 386 - DNA, 519 bp, Listeria innocua
ctgggcaaaaggcattcagtttacagctttatttgtacaaagttcaccaagttagaagaaaaagaaatgcaaactttttatattccaggaacctacgcagaagcacttacacttgcagcaaaacaagctgaactaaatgagcagttaatgttagaaaatgaagtgaaaacacaaactatagccgaatatgaaccaaaagtgagttattatgatcagattttaaaatctcctggattaataactgttacgcaaattgcagctgactatgacttgaccgcacataagctcaataaaatattatacgaagagcaggtgcagcataaagttggtgggcagtggatattatacaaaaaacatatgaatttaggtttgactaaatcagaaacggtcagcatagttcatagtaatggacgtctaggaacaaaagtaaacaccaagtggacacaaaaagggagattatttatacatgaaattcttgaaaaagttggaattcaggctgttatcgacaaggatatttaa

SEQ ID NO: 387 - DNA, 522 bp, Listeria innocua
aagtatcttaaaacaataaaagttcgtttaggagtgtatatgatggctagtagttttcttgaggaagtagatcggttaataactttaagtggaataacctttcatgctagtggtactggaacacctgaattaattaaaatttaccaagatgctttagggaacgaatttccagagacatataagctttttttagaaaaatatgggacgttaacttttaatggtgtatctttttatggtatctctaaacgaggcttgagtgcagcttccataccagacgtcaaatttgcaacagagcaggcgcgtacatttggggatataaataaagagatgattatgataaaaaattcaggatatggttcgattttctcgatagacacttcaattattgggagtgagggcgagcctgtaatagttgaaactaacttatcattcaaagacaatacagaaaagaaagttgttgctaatagttttggcgaatttttactggaagaaatagaactatctttaactgatttggggtaa

SEQ ID NO: 388 - DNA, 525 bp, Listeria innocua
aaaggagatgacccaatgaaccgtaaacaattagaacaattagaccaaaagtgcctttatgaagtatatgatgacgagcaagaaacaaatgattttcgtgtgggatatatcagagctatttttgattcgttcattatattggaaaaataccatactagagtgggatttgatggttttgcactcgtagcaaatgaagctatttttaaagttcaacaagatactcaatatctgaagccatatcaaaatttaaaccgcccccaggaacaaatacctgaattaagtgaggacggcgacacactattgaattttcttgaatggacgaaaaagaacaacaaattagtggaaataatgactgtctgggatgagctaattatcgggacaatagaaacgattgaagagaatttagtgatgcttaataccgttgcaccagaagaatttcaatctgacgggaaatgctttatagaatgcgacaatattgttgatatttgtattgatacagcgcgactgaaatttattactacttaa

SEQ ID NO: 389 - DNA, 525 bp, Listeria innocua
atggcagaaaaagatggtattaatacaaaagattttctaatcggtggtttaattggtgcaatcgttggttcagccgcagcacttctatttgcacctaaatcaggtaaagaactacgcgaagatttaaatacacaggtagatacaattaaagaaaaaggcaaccaatggaaagacgttgcttatgaaaaaggtatcgaaatcagtggtgtagcaaaaggaacaaaagataaattagtagattccgctggcgggtttgttgatgttgttaaagacaaatcaggcaaattagctgatacagtttctaaacaaagtaaagctgtgaaagaagttgtttcacaaaataaagaagaaaaccaagaagctgctaaaaaagcggcagaaacagtaaaaaatgaagcgaaagatgctgcaagcgatgtagaaaaagcagcagataaagcaaaaaaagaagcaaaaaaatcattagatgatggcaaagatgaagcgaaaaaaattgcttctgatgtgaaaaaagaagtaaaataa

SEQ ID NO: 390 - DNA, 525 bp, Listeria innocua
atgcagcatgaacaactaatcattatggaaaaaggcctgctaatacaaaaaagcgaagaagataagaagcttacttttcaacgagtattcgcggatcaacggattatttttacgacaggtggaagtcttacattaggtgctctagaagatacggtttatagcgttatccctacagacgaattgtttgagaaattggatgagcatcaattgttacctaatttctttttacaaatagctgaagattttgaggtaagtatcgaatggcaaagaaagttaatgtcggcttatccagaggaacgggtcagaatggttttgagaaaagtaattgaacgatacaaactagatcccgtgcacaatccagtatttccaagatggcttaaaatttatgttctagcaaagttcgcaaaatgttccgtctcaacaacttctatgatagtaaatgatttagctgagaagggtgaaattaatgttaaaatgactccttggatattaatgcaggattcaccagcatattgtgtctcttaa

SEQ ID NO: 391 - DNA, 525 bp, Listeria innocua
agcatgagagcgattggatttagaggtaaacgaatagacaacagagaatggatttacggtaatttaatgcaatttgaggatagcgctactttcatttttgcagatgaacgaaaaggcgctagcacattaacttatgcacattttattattaataacatgcacgcgatagacgaaaaaacacttggaagctgtataggtcgtgaagatgaagacgaaaaaactatttttgaaaatgacattgtgcaagtagttttagaacactggccaatgggatactaccaagaagtagaatacattggagtggttaaatatgacacggatatatgtgcgtattatcttgatttgattaagcctcctgctgttagtggcgaaacgataccggatgaaatcgacggaattaaaattacaagagaagactcggaagatttcgatacaagattctacttcgatgctagcgttgattcagcagctatgacagtgataggcaacatacacgaaaattcggaaatattggaggaacagtaa

SEQ ID NO: 392 - DNA, 525 bp, Listeria innocua
gtgacagtaattaaatcttcaattaacgcatcaaaagttatgcgttatgtggatgatattcctcaaaaacaattagcggatttacttttgacaagtagacctaatgtaagccatatgcaaacaggtagaagaaggatgcagcaagatattgcaacttcagcattaaataatgtacaaagtaatttattcaaattagcactatcgcatgaatttactgaattaattccagatgtttttgatggtcctgcaattaataataattcgttatcatatctcgttatgtatgaacaagaagctaacgagtttagtgcgaatatcgatgaggtaatgaaaatttttgtaaagccagcgagccaattaactcaaagcgaacggctaactgcaagagacagtttaaaagaattacttgatgcactcggttggggttataaccttttatttcatgcaagtgatcatttaaatatcgatgtgtatcaattaatgagtgaacaagatgagagttggaaacaaaaaaagtggatttga

SEQ ID NO: 393 - DNA, 525 bp, Listeria innocua
atatatatcgatgctactctcgatttccgcaattatggtattatccgccgttattgcctacctgatttctggaattgtctttgggtacggtggctgggatgcaccagttctcaccgggtttggtgtgaaagatggcgcgataacgacaaccaatgtgtaccagcttccggtttggcaattactgctcatggagttcggactcgcatggtttgtcagtgttgtggtcggcgtgttgacgatgtttgtatccgtgctagtccgctctacagccgccgtgatgggaattatgcttgcttcactcattaccggaacgattttaaccaatctcgtcagctcttggccaagcgcaaaatatctatttatggtcaatttacaactaacgaattacttgaacggctccagtccacccgtcgaaggaatgacattgaatttctcgatgcttgtgttaacagcgtggatggtagtcgctttcatcttatcctattttattttcacaaaacgagatgtgtattaaagagcgcttaa

SEQ ID NO: 394 - DNA, 528 bp, Listeria innocua
ttgcaaatcggtctttttggtgaagatgattcttttattcaaatgattgctggtgttcacgaattcggtttaaccatacgcccgaaaggcaagtatctaaccataccaacgccagaagctggtgataggagagcgcgagatattcctggtctatttaaaccaaaaggtaaaaatattcttgctgtggcaggtcctgatggtaaattgacggtcatgttctatttaaagaccgaagttaatattccggaacgttcttttttgaggtccacatttgatgagaaaagcaataaatggggagagttgtttgagggatggatagatgacgttattcatggaaagttaagcgccgagcaggtatataatcgattaggcgccaaaattgtggacgatatacaaatgaaaattgttgagattcaaactccggccaagtcagcagcgactttggccagaaaccccagaaaaaataatcctttaattgtcaccggtaaaatgaaaaatagtgttacttggaaggtgatgaagtcataa

SEQ ID NO: 395 - DNA, 528 bp, Listeria innocua
atgacaatatctgattggatacaaatcttaagcattattgctacgttaattatttctatcgtatcaatcgtaattgcttcaaaatctttaaagttaacaaaaacatcaatagaaagtgctaatcgtccctatgttacatgttatttagatatggttactgttggtcatttccagaaatacttaatcattaaaaattttgggtcatcgccagcaattatcaaagacataagttttattggagaacccgcttttaaaaatagggctgacttagactcattgaatgaaacaacaatagctcccaaccaaaaatttattattctctttgacaaaaaagcacctgacaaatccataatatcggttattattagttaccaagatttacttgggaatttttataaagaagtatttcaattaaatccaaatttctctaaagatatagtatacgcgtcagcaagaaactcaaaagatagtgaagaaagttatattcttaaaaatactcttcatgaatatactaaaagcaatctttaa

SEQ ID NO: 396 - DNA, 528 bp, Listeria innocua
cgaggtggcggaatgagcaaaacaaacgacacgagaagagtggaagaagcgctttggaaagctcatgcaaagcaaggggttttcggtgcatttgaagtaacgattggttggttcggcaaagaaatagtggactttatagcatacaaaacgactggtgagtttctctgctatgaaatcaaagtaagcctttcagactttaaaagtaaagcaagcttatcgtttcacggagattttaactactatgttattccagagcatctgcttgaagttttgagagatcacacagcaaaatcctttaacagtttaaacttcaagttatttgacactcgtttgaaaaatagcggtattggtcttattacagttacagaaaaaggcgaattgaattacattgttaaagcgaaaagaaaacatgtaaatatggggactaaagcaaccttattggaaagcatgacacgctcacttaacagagaagtgaagaagttctacgaaaaaagtccgtactggataacggaagaggtggcagaatga

SEQ ID NO: 397 - DNA, 528 bp, Listeria innocua
gtgaatcgtattgttcctaaagatcgatttaactttgatgatgctacaaaaattgagcgtattcgttggttagggaaattaggacctactacgattaatttacctgcgaaaaaaatacaagaaattgaaatttttagtgttgatatgatcgactttgatttaagtgttattaaagagattgtttctaaaataccacaagagattctattcattatcaatgatgagattctcataatgtactatcaaggatactgtatttctaaaagagtagagaatcatcttcaaattaaaggattatctattgatgaagttcgtgataattttattcgtcaattgttagatcttaaggatatctctaaaccattaaagcaacaagttgctaacataaagataatcaatgaattggaatttgaaatagatcgaatcaatacacagattaaaagatctatccaaactaataaaaaacaagcgttggctagagaaagatatacaatagaacagaacttagccaaattaaggggagaataa

SEQ ID NO: 398 - DNA, 534 bp, Listeria innocua
ttgaaatttaagatgaaaatatttattgccggtccaagagctattaaagctttgaatggtaatgttaagaagcgtattgagaatattattaatcagaatttcaatataattgttggggatgcaaatggtgttgataagcaggtgcaacagttttgttttgagcatcaatatacttctgttacagtatttgcttcaaatggaaaagcgagaaataatgttggagaatgggaagttaataatgttgaagtggatccaacagtgaaaggttttgatttttatgcagcaaaagatttagcaatggtaaaatctgcagattatggatttatgatttggaatggtaaaagtaaaggaactcttaataatatatataatttagtaaagttgaataaaagagtgttagtgtatttaacaattactaaagaattttatgtcattaaatctttagaagaaattgagcttttgaaaagcgaaccgttatttttgaataaaagtgttaataaggaacctgattttgaacaaattaaactgttttga

SEQ ID NO: 399 - DNA, 534 bp, Listeria innocua
atgaaaacattagttattatcgcacatccgaatatcgaaaattcacgcgtaaatagagtatggaaagaagctcttttaaaaagtacagaagagttggcaattcatgaattatatgaagtttatcctaactgggatattgatgtagcctttgaacaacaacaattgcaaaactacgataaagtcattatccaatttccattttattggtacagctacccgccgttattaaaaaaatggttcgatgatgtcttttcgtatggctgggcttacggctcaaaaggggacaagatggctgggaaaaagcttgctcttgcagtttcaattggcgataaaaaatataattataaagaagatgcaccaattgactattcactcgatacattactcacaccatttcgagcaacaataaaccacattcgagctgactatagaggggctcacacgatatatggcagctcctttgaagtcacagatgaagaaatagtagaaaatgcgtatgtgtatgcaaacaagtttattaaaacgttaaattag

SEQ ID NO: 400 - DNA, 543 bp, Listeria innocua
gtgaaactaaccgaaaaacaaaaacgatttgcagatgaatatataaaatgcggtaatgctacagaagccgctcgtcttgctggttatagctcgaaaacggctaatcgtatagcgaccgaaaacctgtcaaaaccagttattaaaggctatatagacaaggttttaagcgaactcgaagaaaagcgagtgatgggctacacagaggcaatgcaattattcaccgaaatagctcgaggtgaaatggaagaagaagtaattgtttcgaatggtgatggtttttccgtcgttactaagagtgctgacatcaatcaacgagtatcagcgctaaaagagattgttaaacgccacgttgctggcggtagagacaaattacaagaagagcttattcaagcgcaaattgataagttaagagcagatacaaaacaagaaggtaatcaaggaacaactactatcatcatgtcaaatgttgacgaaatgcaagcctaccttgataaaaaggcaggtggcgacgatgaacgcgatgatacacaaacaactagttga

SEQ ID NO: 401 - DNA, 546 bp, Listeria innocua
cgaaacccaacaccttgtacaaatccagttactctcaaaatcgctgtatctctagccatgacgaaaccaactccttttatttttccttactaccagtgtatctttttttgttgttactttcaaaaatttgcattccagtatttcaaaggagcttatgctataatatgtgtattatatttagtgttgggagtttttgatatgacaaaatggaatgtctatctaactaaaggagaatacgagccttggtggttttttgaggaatgggaaacttctattcaagcagactttactttttcagaaaaagaagctgcgtttgcgaagtaccaagaattagcagaaggtttactgagaaattaccctaaccatcaaacaaagaaagattgtttgttagcggcttggaatgaggaagaagtagaatattgcgaagactgtgaagacgatattcaaacttttcatggacttattttattttttaatggagaagtatatcaaccaacttctgaagagaaagaaaccatttttaaaaacgttttaacttttgcttaa

SEQ ID NO: 402 - DNA, 549 bp, Listeria innocua
ctctttttggatttccgtggaacgttctgcttcgatggacacccgaaagctgtcctcataccgctgtacaaagccaatcacatagcgcatgtgcgccagtaccatttcttccagcacaacagcacggatgaaatgggatgtacacgggtcaaccgctttttgcgaagcagaacaccggaaatggtcatgccttgtctcaaagtatctggttgtgcagtaatacagcttgctcccgcaatcagcacaatgggcaatgccgctgaacatattggttttaccagtcttagatggcctacgcttgttctaacgcagctgctggacggtatcccatacatcctgttcaatgataggctgatgggtgttttcaaataccatttggttttctttcgggttcttccgctgtttcttattccgaaaggattccttgtaggttttaaaattcaccgtatgccccagatactctttccgttcaaggatatgagccacggtactgtcacaccatttacatcgatcagcgggaacatcagcaggtgcgcttctgccgtttga

SEQ ID NO: 403 - DNA, 549 bp, Listeria innocua
atgatgagtgaaaagttaaagacaatcaaagagcttgcggatgaaataggtgtttcaaagcaagctgtatggcaaaaaataaaaaaagaatcgtcaatagatttacgtcaacttacgtcaaaaaaaggaaataccgtttacgttgacgttgacggtcaaaaagttattaagagtgctttttttaacaaaacgtcaactaaaaaacgtcaacaaaaactttttgttgacgacaacgtgaataattcagttgatgacaatccagaggggaatgaagagattttatttttaaggaatctagtgtccgaactccaatcagaaaaaaaagaccttcataagctattagaccaacaacaacgtctagccttacaagataaaaaattacttgaagaatataaagaagaaatcaaggaattaaaatctttgatggtaccagtacgaaaagatgataaagatcctatggtacgaaaatctaaagacatagataatacaaaagaagaacttcatacaaaaaataaaaaatggtggcattttggaaggaatgtaaaatga

SEQ ID NO: 404 - DNA, 552 bp, Listeria innocua
ttgaaaattggatatgcacgtgtatcgactggtttgcaaaatttagatcttcaagtagatagtttagaaaaacatggctgtgagaaaatttttcatgatcatattagtggcgcaaaaagtaaacgccctggattggaagctgcgatcgatttttgtcgatccggagacacgatcgtggtttggcgcttggatcgtcttggaagaaacatggaagatctgattcgcgtagtaaatcaattaaataataatggaattagttttcatagcttgcaagaaaacatcacgatgaataaatcaagttccactgggcagcttatctttcatttgttcgctgctttcgcagagtttgaacgtaacctgattttagagcgttctgcagcaggtagggaagctgctcgggctagaggtcgatttggtggccggccggaaaaactaacagcagaagatctagctttaatgcgaactctcattgataatggaactcccattaaaacaattgctgcacgctggaatgtttctagaacaacgatttatcgatatctcaacaaataa

SEQ ID NO: 405 - DNA, 561 bp, Listeria innocua
agaaaaagtaaaagctacctccttttcatcaaggaagtagctttttttaatgaagttttagtgaactttttgattttaccatttggtcaaaggcgatttcatggtacactagtaaggagaataattatacagatggaggatttaatgaatagacaaacagaatttattttgcttataataggcgcttcttttagtatcatcactttttttgcagcagcattatatgcactggtttttggatttagcgcaattgttttatcgggttcaccaatgacttatggtggttctgaagaaatgattatgtcttggatatttactttcttttctattattgctgtgatttttacagtagcatcagctgtttttggatttattggagcttttaaaattaaaaataacagctctaaagtaaaaacaattgctgtttgttttatcatattaggaggattgcaagttttttcaatacaaggtattctatttttaatcgcaggaattttaactcttacaaaaaaggaatacaaaacaaattttagagaaaatgaggggataaaatgggaatag

SEQ ID NO: 406 - DNA, 561 bp, Listeria innocua
gtgcgacttggaatcagtaaaaactcggtgtggacagaagatgaggatatttatttagagtattttgtttatgaaaacgacgacaatattagcaaagctgccgaatttttaggacgtacaaaagatgcagttataaacagactagcgaagttaagaaaaagagattcttcagtttcttttattaggcgtccgtggaccaaaaaagaagatgagatactaaaaaataattatattattatgtcgaatgaccaattagctgaacgattaagaagaacaaaagcctctgtagcggcaagaaaggtactgttaggactgacaaacaaacacatgtctaaaaaagatgacaaaatgattcgtcatcttggaaatcaagggtacacaatcaaagagatttcagcagaaatgaatttgccttattgtttaattaaaaactatataagaaatcacagaatcaattatagaagggaatcaaaaaacgagatgaacggttggcgaaaagaagcagatgcgacatattcgcattatattaactctaaaaaaatcaaggaggaacaagcatga

SEQ ID NO: 407 - DNA, 561 bp, Listeria innocua
acccatttcccaattcgctgtcctagctcacttccggcgatacctccgataattgatccaataacaccaccaattgctgtgccaatccctggaataattgaaccgatagcagctcctccagcagctcctgcagccatacctcccaaaccgcctccaaaatctccgaccttttcgccagcattttctttatttatgccaatgagagaggtagccgataatgctgtgccaagcacaggaattcttttggctactgaacctaagccttttaatcccttgccaagtgctccagttttatccataaacttacctaatttagatatagaaccaggtaacccgccttctgaatatcgtcctactcttgtggttttcgtagggtctactttcatagtagcaggaaatattttacccattcctttttttcctaggcctttaatgcccttgcccgctattttactaatcggttttaaaccagcagccataatcagccgaattcccttgaagcgcaaagcaaatcctaataacaatccgtcagctaataaagttccccatatgttcccttga

SEQ ID NO: 408 - DNA, 564 bp, Listeria innocua
atgaacaaaaaaaatcaaatggaacaaaagagagtatttttagagcgagtagaaaataaagatgaggatttaaatatttcaaattatagggttgattcggatgattatttagagatagttaaattggctattgaagaggaattagttttaggcatatgtataaagtatgcttctaataagggaatagtaatacattctaatgctcatttgagttcaaaaggaattgaatatttagataatcctgatttagtggagacagaaagtaaagtaaacgttgctccttctcaagtaattaatatttatggtggagaccaaaggggcgctggttttggaatgaatgccactattaataataattttgataattctcttgaggaacttggtgcttttatttctagactttctgaaaatgagcaaaaagaagcgaatgaaatattagatgcaattaagaatggggatattaagccaggtatgctttctaggttctctactttccttgagagccatcctaatttaggcgcttatactggaaaagctattgtttgggcactaacaaaattataa

SEQ ID NO: 409 - DNA, 567 bp, Listeria innocua
gtggaaattaaactagtagtagatgtagatgaattatctggccaaaacgaagaacttatgaagctagtaggtagagaagtaaatacttcactcgaaagcaaccaaatatcttaccgtgaaaaggttgacccagaaacacgagagccagttcttaaatatatggtccataaggatggaactgtggcgatgtactcacaagaaaaacttgatttagaactagaagaattacccgcagaagaacgttcaagcgtaattaataaatccgaaattgatgaatatattcttgcttgtgaaggaatcgcgatgacaatacctggtgggatttttgaagggaaagaagtacttcaaaaattatcagagggtgaagacatagaggatttggctaggttttatggaactccggttaaagaaatgcaagacactttagatgaatatcgtaaattcgtagctgccaaagcaaaagcatggcaagactggaaaaataactctgaacaaacagctgatagtgaagaacaagaatctgaaaatgatggtcaagcaactttagagtttgaaaccgaagaataa

SEQ ID NO: 410 - DNA, 567 bp, Listeria innocua
aaaggaggaaatatgaagaattatttacaacgcaagtttgacatccaacattttgctgaaggtggagacgataagaaattttcccaagcagagctggatgagattgtaaaaaatcgtgtagcagctgaaaaacggaaatttagtggagagattgaaaccatcaaaagcgcgcatgaggatgaaatcaggaagctaaaccaccaaatcaatcagcttaacgatcaagtgggcgaacatgattcatctgaaaaggcattgaaaaaacttcaaaaagagaaagacgaggcactatcaaagctggatgaatatgttcagaaagaacaaaccgcagagtggcacaacaagctaaaagaaagcggcgtaaaagaagaacgctatgaagcgtttacgaagctttttggggatgaagagcgaaatgacgacaacttagcgaaattcgcagagcaatatcctgaatggattgcaaaatctgatgatggtgacacgcctccaccaatcggggcaggactaggcaatgcaagtgagccaagtgctacagacccattcattcaagcattaaattcataa

SEQ ID NO: 411 - DNA, 570 bp, Listeria innocua
aaattcgagggaggtttaatcatggagaaaaaagtcttaaagttttttactgtagataatatggaaaaagaagaagcctatttaaacgatatggctcaaaaaggctggttatttaaagaatataaatcttttaggtaccattttgaaaaaggggaaccgaacaaatatcgctatgccattgattataaagtgaatcaaggcgacgaagcctcgtataaagcactctttgctgatgctggttgggataatgtattctgctatccagtattaaacggtaattggatgtatttccgaaaactacaggccgaagaggcaggaagtgaaacgatattctcagatgaagtatcatatattcatttatatagaagtattcggaaacgctggacgatttttggcatattaatgagtattcttttattgctggatttatttttcctaaacaatgctggaagttatcaagtaattactattttcatttttattctatttattattctcatcggtttgtacggaaagatgtttatccaattaacgaggaaaataaataaatttgcgaacaaaaatctataa

SEQ ID NO: 412 - DNA, 573 bp, Listeria innocua
aatgggacattgttattctcctcgtgtagtttcttccattctacactaaataatcagttaaataaaactttgcaacagaacccaattttccaagttgggaaagcgaccttgctacgtgtgagtgacgtcatgaaattaaaaaaaacagatgtctttaatcttgatggaacagtcaaacaaactgcatttattcatgatcaaaaaacaggtaagaaaaatacgttatatttgaaacctgtccaacaagatttaatgctttatcatgcatggctcatccaacaaaatatgaattcagagtggttatttccttcaacttctcgtcctgatcgtcctattaccgagaaacagttttataagattatggcacgagttggtgatcttttaggaattaactatctaggaacgcataccatgcgtaaaacaggcgcttatcgggtctatacgcagtcaaactataatattggtttagtgatgcatttattaaaccattcaagtgaagctatgaccttaacgtatcttggattagatcaagccagtcgagagaatatgttagaccaaatagattttggataa

SEQ ID NO: 413 - DNA, 573 bp, Listeria innocua
gtttatgtatcacgcggaacaaaaatgatacatcggaaaggagagcatgtgacagtaataaaatcttcaattaatgcatccaaaataatgaaatatactggcgaactacctcaaaaacaattggcagacttacttttaacaagtagacctaatgtaagtcatatacaaacaggtaggcgaaagatgcagcaagatatagccattacagcattaaataatgtacagagtaatttattcaaattagcgctatcgcatgaatttactgaattggttccagacgttttttccggacaatacgtgaatcagaatccattaagtttccttgtaatgtatgaacaggaagccaacgaatttagtgcaaatattgatgaggtaatgaaaattcttgttaaaccagctaatcagctaacaacaaatgaacgtgtatcagctagaaataatttaaaagaacttattgatgtattgggctggggctataatcttttattttttgcaagtgattatttaaatattgatgcttataaattaattagtgaacaagatgagtgttggaaacaaaaaaaatggatttga

SEQ ID NO: 414 - DNA, 576 bp, Listeria innocua
actcctaaggaggaaccaaaaatgtccacaaaattcatgtatgaaagattactaaaatgccaagaagcaaataaactagtagccatctatgcgtcacgcgaagacgaatatttcgaggcgggctacattgaagcagttacagcgagtgatgttatgtttcgctcgagacgttcggacggttacgaagagggacatgttgttcttccgttagaattagtgtaccgaatagaaattgacacggcacatttaaaaacagccgaactactcgcaaaacatcttaatcaacaaatcagctcaggattatttgagaaagcaccaaacaaaaagcattctcttttcgaaattgccgctgattatgtataccaaagtaaagagataatctttattgacatcataggcgacgagacgccagtaattggaatgatcgctgaaaatgaatatgaaggattagaaattactttagtggatgacgaaggtcgattagatggaacttgttggataaagaaagaagatattctagccctgcgtttcggcggcagtgtagaacaagatttgatgaacaaactaaaaaaataa

SEQ ID NO: 415 - DNA, 576 bp, Listeria innocua
atgggagttataaatcttactggtaattgggatgaagggtatgctttagatcatcatgtattatcaagtacatgtttaggtgagaatgagtatgggaatttgatttttgacactactagaagtgaattaggacaatgtttatatgaattaaagtatcaacaaaaaagagataaaattactgatattggtgaaattattgaaccacttttgaaagaaattgatttagaaaataaggtagattacattattcctgtaccttcttcaacacaaagagattttcagcctgtcgatgttatatgtgaaaaagtatcagaaattattaataaagatatttgttgtggggttttgaataaaaatagtagtaatcaatcgaaaaatttaacattagaagataagaaaaagttggtaggtacaattgaaagaaagaaaatgtttcttgttgaagctaatgttttgttggtcgatgatttatatcaatctggtcagacattgactgaatgtgtaaatgttttaagaaacgataaaaatataaaaaatatatatgttttatgtatgactaaaactaagaataagtga

SEQ ID NO: 416 - DNA, 579 bp, Listeria innocua
atggaaggacaagaaaataaagtattattcggacttgaaaatgtacattacgcaacatacagtgaaaccgatggggtaatcacatacgatactcctaaaccattaccgggcggagtagaaatttccgtagaaccacaaggagatatgattaaattttatgcggacaacattgtttattatcaagcgccaaataaccaaggatacgaaggaacattgacaattgcaagtattcccgaaggttttgcaacagattgcttaggggaagaactggacactgtggatggcgtacttaccgaaaaatcggatgctaaaccgaaaccattcgctttgttatttgaatttgatggtgatgtaaaatcagttcgtcaagttctgtacaattgtactgctagcagaccaaccgttgcatcttctactaaaactgattctgtagaacctaacacgaatgagctttcattttcagcaggaccacgcgcaacagataaagcagttaaaacaaaaacagcggcgggagtacctgatgaaatttacaacaattggtataaagcagtttatgaaaaaacaccagcgggagcctag

SEQ ID NO: 417 - DNA, 579 bp, Listeria innocua
tctaatttatatttaaagggagagttttttatgaagaagattttgttaagcgggttaattatttttactggtgtgattttgatcagttgcggagatcaaaaagaaactgaatcaactacaacaaaagataacgcagatgaacaaaaaattacaactgaagatattcaagttccagatgatgtaaaaaaagttgcaagtcaactaggagaagataagattcctacagaagatttgaaagtaacacaagataattattacatcgatggagaaaaaacaaatgttaatctagtaaaattgttaaacagtgaatctacatcaagtataaacgcaatattaaatagtgataacaaagcagcaaaagaatacaaatttaacggtagcaattcaggaactctcatgctattgctcgcagccgtaaacagcaaacttgatactcaagtctcgaaagaaatagtaaatgctaatgatactaatgaaagtgttgagaaagaactcagttcagacacaagcaatgtattattcaaatatgacccagcgagcgatgatcattctatgcatgctactattactttaaaataa

SEQ ID NO: 418 - DNA, 582 bp, Listeria innocua
ttattgaaagatggtgacagaatgtatatgcaagaaaggcgaacattaagacaaaacaaaatgattcatgctttgattagtgacatagtaaagcacacctataacgattttgaagctacaaagccgaggagtttcagcaatgattgtcaagttgtcaaagaaactttaaaagtggcgtatgcagttgaagcgaatttaccgggtgatttcagtacagcgaaattatcgaaaatacaagcccgtgacttcataagttccattatagagttttgttttcaatttgatataccgttatcatcgccaggactgcaaatgacggatgatatcaatagatacctgttcttatgtatcaaatacagaaaatgcgctgtaacaggtcatagaggcgaaatacatcatgtagatgccattggccaaggtagagatagaagaaattatgatcacagtaaatcaagactgatttgtttatctcgagaaatgcacacagaagctcaccaaatcggttggctaacgtttataagtaaataccacgttgatggaataattttaagtccggatgctgtaaaagaattaaatatataa

SEQ ID NO: 419 - DNA, 582 bp, Listeria innocua
ccgacttttgtcgaacctgtaaacgttaatttgcggacatcatcactatctgttaaagtttcaccgatttctttcgagcttcccatgacaatattagcaacaccttttggtaagccagcttcttcaaaaatttcaaagatagctaaagccgaaagcggggtatctccagatggttttaacacgatggtattacctgtagctagcgctggtgcgagttttcgtgtcaccattccacccgggaaattccacggagtaattgctgctactacgccaattggttgttttttaacaataaacgcgtggttgtttggagctgggattgtttcaccgtatagtcttcttgcttcttcagctgcgaatcggaagttttccgcgccggttaaaacttctccttttgattcttttaatggtttaccttgttctaaggtcataatttttgctaaagtatctgctcgttcttccattaaatcagcaatattatgcaagagtttaacgcggtcagctagttccattttcgcccaatcaggaaaagcatcttttgcagctttaatcgcttgttttgtttctttaggtcctgcttga

SEQ ID NO: 420 - DNA, 582 bp, Listeria innocua
gtaatgtttgcatcagatgcttttatagtttctaaagcaggaagactctccgataagtcaggcatctcgccaatattattactccaaatagctaattctgttgcgtttgtaaaaacttcattattcaatacattcaaatcttccccagttaaatttaaccctggaaatggtaggattgtgattgtatctaaatcttcttgcgtgataatatcatttacagaatctttatccaattcttcagcaatcgcctcagcaattgcttcaactggaaatgcctcaatgattggagctggcaaaggaactgtatccgcttgcacttttattgttggtgaaagtaaaatacaacaacttacaatgaacaacaatccaattatctttttcatctcttactcctttcaaagcaccaccctcttcacctcgaaaagggtggcaatgtgtttattatttaattacaacatgatcaaagttaattcccgctgtatcgcctgcttcaaaatcaaagacaacttggttaataccatcttgcaaggttactggcacttccactacgtcccaagtatcccagtcagccgttttcggtaa

SEQ ID NO: 421 - DNA, 585 bp, Listeria innocua
gtcgccagtttatccaaatccgctgcaaattcctcactcgacttcattttcccatcaatcgccagcgctatcacgtgggcatcatccggaatcttcgctaaaatccgcacaccttctttatccttcacttgtttcatttccgcatcactcaacacttctggtgccttttcatctggaacttcgacaattgacactttagcatatgcgctcagtcgctttaaatattcagcaatcccctggactagatatttttcttttaatttaccgactgtcacaatttggatattcatttacgtcaccctcatctttattaatacttttatcatacctcaaagagcacccgcaacactagccaaaatgaaaaaagaaattaccacaaaaaaacttactccacaggttatcccgcccttatacacaacttatccacaaaaactatccacatatccacaagccgattctctattttgtgtccgaacgtatattccatacaatatatatgataccccattttcactatccacagcttatccacaagcaaaaatacttgttattttgtatcgaaagtacattttgaaaacaagctaa

SEQ ID NO: 422 - DNA, 585 bp, Listeria innocua
atgactaatagaaatggagaacgtcaaatagtcaatagacgagcagaacttaatacaaatgaaacagatgaaagcgaaaaagtcattgaaggctatttcgctgtttttaattctgaaacagaattattccccggcgcatttgaagaaatattacccggtgcatttgataatacgttagaaaatgatgtcagagctttaattaaccatgatacggcacttgtgctgggacgaaatgtatctaagactctctctcttcgtgtagatgataaaggactttggggtcagataaaaattaaccctttggactccgatgcaattaatctatacgaacgagtaaaaagaggcgatgtgagccagtgtagttttggtttcaacatcataaaagaacaagaagaatggcgagacgatggttcagtcaaatggtcgttagaagaagtagaactacatgaagtttctgtttgtacatttccggcttattcggatacaggtgttgaagcaagacaaaatgatgtcaaaaggcatgagaaaagaaaactggaagcaaaaaaaaatcaattaaaggagagattgaaattatggcattaa

SEQ ID NO: 423 - DNA, 585 bp, Listeria innocua
tgtatctatgcgaaaatgaaaatgcatatcgccgggcaattttccggtaatttagaaatagaaatgagcgagattattttgcgaaatagaaaacctaaccgtaagattggcaaatggatagcgattattctcggcataattattgtgcttatcgtggcggcttttctgtactttagacaggcagaaaaaccagtaaccaacgcagaaacagaagctttagaccgaataagtggccaagttgatttaaagaccacagataaattttatttatacaatggtccgaaagaagtttattatgtcttaactggcaaaaacagtaaagataagaaaatcattgtctgggttccaaagaaaaaatccgacaaagtatatgttaaattcgcatctgatggtattacagaaagtcaagcacgcgacaaagtagtaaaagaaaagaatccagcaaaaattttgcatgttactttaggcatggaaaaagaaacacctatttgggaagtagcgtatctagacaaaaacgacaagctaaattactttgacattaactttgaaacaggtgaatggtacagagaaattgagaatttgtaa

SEQ ID NO: 424 - DNA, 585 bp, Listeria innocua
tttgaggtgattagaatgtatgaagcgttaaaaaacaaattgccagagattatttctggaataagagagattgacggtttacttaaagctgaatcagaacagcttcaaatctcggaggataacatattggacttgattgatcaggctcactttcaatcagctacatgggcaataggaagattagaagacatctttaatgttagcggttcggtagatgatagtttagaagttcggcgcaaacgaatagcggataaacaagcgacgaatattgtcgctagcaggaatgttttagagaatctggttaatcaatatttaaaaaaagatagtgcaaaaatagaattattgcatgagttatatcactttgttgttagctataacttggatgatttgcagttcttttccgaaataacttcgatgattgagaaaacgaaacctgcgcatcttggatattcaatgcgaagcgtagtaattgaaaacgtaacatttgatgagaaagtaatcgcaaacaatcgacgatatagacgagtaagagagattaaatttggttacccgcttttatttgaaaataatgaggtgatactatga

SEQ ID NO: 425 - DNA, 591 bp, Listeria innocua
gtgcgtgtttttgccaatgttactaagtggttgtatcaatacgacgaaacagaagaattaacgatttttggtgcgaaacaacagcctttaaaaagtagcgaactaatgttgattacagatgtattgggacacgatattaattctctggcaactttaaaactaatttatgctgatttagaacagcaacttaatgaaaagccggaagtaaaatcaatgattgataagctgactgcgacgattagcgagttgattggttatgagcttctggagcatgaactggatttagaggaagatgaaattacagtcattgaattattcaaagctttgggtatcaagatagagacaaaaagtgataccgtttttgaaaaattaattgaaatagtacaagtctataaatacttatcaaagaaaaaattgttggtttttattaatgtatgtgcctatttaacagaagatgagttactagagctaaggcgctatgtctcgttaaaccaagtaaaagttttatttgttgaacctcgaaaaacagaaggattttcgcaggttattctagattcagattattttttacaagttgaaaaaggaatgtag

SEQ ID NO: 426 - DNA, 591 bp, Listeria innocua
gcgagaatatccgttttaaagggtgatgacatgtataaaacagaaaaacgaacattacggcaaaacaaaatgattcatgctttgattagtgacatcgtaaagcacacttataacgattttgaagcgacaaaaccgagaagcttcagcaatgattgtcaagttgtcaaagaaactttaaaagtggcgtatgcagttgaagcgaatttaccgggtgatttcagtacagcgaagttatcaaaaatacaagctcgcgacttcataagttccattatagagttttgctttcaatttgatataccgttatccgcttcaggactgcaaatgacggatgatatcaatagatatttgttcttatgtatcaaatacagaaaatgtgctataacggggcgcagaggcgaaatacaccatgttgattccttaggcgctggaagagatagaagaaattatgatcacagtaaatcaagattaatctgtttatctcgagaaatgcacacagaagcacatcagattggatggttaacgtttaaaaacaaataccacgttgatggaataattttaagtccggatgctgtaaaagaattaaatatataa

SEQ ID NO: 427 - DNA, 594 bp, Listeria innocua
gaaatttttctcggatgggagtttcaaatgatggatagaaggattaaaaaaacaaagcaagccttaaaccaagctttatttactcttcttgatgaaagaccttttcaacagattacgattacggatattgttacagtagcagatgttaaccgaggcacgttctataaacattaccgtgacaaagaagaacttttagatagcatcattgatgaagtgctggctgatttacaaaaagcgtatcaagacccttatacacataagacgcctttttccattcaaacacttacaccttccatgataaaaatttttgatcatgtttatggtcatcaagctttttatacacaagttataaaatcgacaatccgtcccagttttcaaaatcaagtttgtgacgttattcgagaactgattttgaatgactttgactactcagttgacagttcgagtatagagcccatgttacttgcgtcttatcaagcacatgcgattttcggcatgattgttttttgggcagaagaaagttttgctcattcgccggcgtttatgtcagagcaacttcttcatattattcaggctaaaaacaaaatcgtataa

SEQ ID NO: 428 - DNA, 594 bp, Listeria innocua
tcattggggagagtgacgagaatgcaagaattaattaatgagtacagaggagctttacaggaagtgaacgaagtaaaagctaatttgcaaaccaaaattgacgcaaaaaaacgtcctccgcaagcagcggggcaaaaaagaactattcaagaagttccggaaaaggcgattatgtcgaaattaaacagtattatccgcagcttagagtattcgattgagtggatggaattaggacatgaaccagcgccacggagagctattcacagacgttctggacttcaaagggaagtatgtgttacagatattgaaactatgcgtcaatggttcgtatatgagcatggtatcgcatatgactttgaagataatgagccaaagatttcggaatgggacaaaattcggatggaagacgcaatgtccacgatgtcaacacaagaaaagaaagtatttttgttaaaacatgaaaaaaatttatcgtattcacaaattagcgatgagatggagataagcgttcgttctgtacgatcttatctacatcgtggggaagaaaaaatacagaatcaaattgacggtagcttattttgcatggcaatttag

SEQ ID NO: 429 - DNA, 600 bp, Listeria innocua
agatacgtacatggagaagtatctttgtgctttaaaaatctaacaacaaacagagaggacgagagcaacatgaagattgatacacaaaaaatcgttaatttcgcgattgaaggggtgggaaaattcctgcaagaaaaccctgagttaacatattatgcttttgcgttcgattgtaatgctgaatatgcggaaatcaatttatgcgtaaatacggaagaagcttttgctgaaatactggcatattatcaaagtggcaagtatggtgaaaactatcaaacggaagaaaatattcaagtcttgaaatacaatacaggcgactggaaataccaatgttttgatacattttatgtttttagtgaagaagaactgagcgccatatttaataaaatataccctaatgaagtcgatgatgattatcaagcatggaaagcatttgtaaatgagctgctagatgcttttacagaaagtataattcaattttcggagacaaaaaccttccaaaaaatcaataaaacagcggattttaaatttttctgtatagatcatgacgaagaattagcggattcaatgacgcgaatgcaactttttcaaaaaaaataa

SEQ ID NO: 430 - DNA, 600 bp, Listeria innocua
atagctaggaacttcctaaaaaggaagttcttttttttgtgccaaattataaaaggagtggtaaatacaatgaaatatgaagaagaaaaacatccattatttaaccaagaagcattggatcaatatgtagaagacacttcccaacattatacaaatgatataaaagaagcgatgcatttatggccaaatggtcaaatgacgagttccacctatgagggagtaaggggagatgatcacaatgtaattacgaattattttaataacatcgatatgccagaacttgcacgtataagacgaagtgaagtaatggaagttgcggctgaaggtgtgggagttttgattgtagttccagagacagaaaaaatattgaaagcgaaaaatcaagtccttactgataaacaaattcaagttgtgtgtaaaaataacttcgagttggactacttcagtgaaggtatcgtgcttacaaaagaaaaaatggaggcttatggtgtgacggaagcacagatacaaaatcttgcagctaaaaatcaagcagctaaggagaataaagccttgcaattaggagaggtagaaaaaagtatagaggatctagaaagataa

SEQ ID NO: 431 - DNA, 600 bp, Listeria innocua
atgaaaattgcttatgctcgtgtttcaactttagaacaaaatttaacacgacaaatcgaaacactcaaaagttttggtgctgaaaaaatttttacggaacaaaagtcaggagcttctattaaaaatagaaaagcatttcaagaagctttgcaatttgttcgaagtggtgacacttttatggtagaagcgattgatcgattgggtcgtaattatgatgaaatcatccaaaccgtttattttctaaaagaaaaagaggtcaaactggttattacgagtctgcctattatggctgaagcaataggaaatccattattggataagtttattaaagacttgattatccagatattagccatgattgccgagcaagaacgagcagagagtaagagacggcaggcacaaggcattcacagtgccaagcaaaaaggaatttacaaaggaagacctattctatattcgcctacttcaaaagatccacagaaacgagttatctatcagagagtcattgacatgttaagtaaaggagagtctatttcaaaaatagctgaagaaagtggtattacaagacaaaccgtatatcgaattaaaaattcgaactaa

SEQ ID NO: 432 - DNA, 603 bp, Listeria innocua
gcttatgtagtgattttgggttggaaagaggttggccttatgagcaaattaactagtgatgaagtcgaatttaaaataaaaaaacttatcgatttagaaaaaaatttaccgaaacaaatattttctaatccctcaaaatacaatttttattttgaagaaccagaggctatttatatggatacgaatgaatttgtccatatgattaaacaaattgtggaaattacacaggatgagaaagcatatattagtgaaattttgaaagaagataaatttttacaaaagagcaaaactatctttaatttaaaggaagtaatagactttacacaggaagagggtagtatagtagaaaatttggattttgaaaatataaccgagacaacgatatttttatattgctatatgtattttccttctgagcaactctttcttttcgttaatgaatattcagacacagcccttttagcgattgataaaaaacttgatattgatattccttggtatgatgtagaaacatttttgactgtggagaatctggggatgaaagataggctatacaggaagttcaggaagcgtttagttaataattataaaaaacatgaataa

SEQ ID NO: 433 - DNA, 603 bp, Listeria innocua
aaggctcaacaaacgaaaacaaatggagaacaggaggatcacatgataagcggattttttgatacactgctacaaattattgctcttctgtccgcgttttttcttattgttttgctccttcttactggtattcgatattttctatcaaaagatgaagttccattagaaaaaattcaacgttaccaattgtggcataaccgctaccaatttgatgcagaggtgacagcctttcttgtcgttattacggcgacacttctagtatgtttatctgcagtacaaataaccgccattccgttccaatttacattattaatgttttggagtagctggctgtttcatccattttcttattggaaaaaaacgcgtacgccacaaaaactcaaaaaagaaattatgcagctactgggcttagttttaattacagctttgtacttcgctggatactttgcacttaagtcaatgtatttagtacttgtgcaagtagcagaagccccttggcatatccaactcggcgtaagaagttatttaattatatgtagtttacttgtagccagtggagcactaattgtatggcaacgaatttacgctaatttactgaaatag

SEQ ID NO: 434 - DNA, 603 bp, Listeria innocua
ccgattctccctaaacctataattcctagagtcttaccgcttaattccgtacctaaaaagaatgtcggcgcccaccctttaaattgctcaggtgtttcacgacataaacggtcacctgctgaaattcttcgcgccacatctaaaatcaatccgagagttaattccgctgtcgcttccgtggatacatccggtgtgttagttaccgcgatgcccagctcttgcgctttttttacatcaatattgtcaaaaccagcgccaatattcgctacgattttaagatttttagcagattccagtacttttgctgtaattggtgaagaaagtgggcaaatgattgcttccacatccgtaacgttttttattagctcagactccgtaatattttctttgcctttgtacgtttttacatcccatttatctagagcttccatcgtttctggtagtaattttcctgctacaaatacgcttgctgtcatctctttcactcctcaagtgccatttttacccttatttcattgtaatccgttttttatgaaaggtaaacgattttacgcaccttttcctggcaaaatacgatataatggaagcggaagcgaggtttga

SEQ ID NO: 435 - DNA, 606 bp, Listeria innocua
aaaaagactcgtctaaaaatagacgggtctttttttatggataagagggtgctgcaaggaatgaacgataaaccatacaagtatcaagtagtacggttgaaaaaagaattttttcagtctaatccccatttcattaatatgcttgatccaggaaatccagaaaaacaaatgcggcgtacttatttatatctagatattcaaaaggaccactatcattacttaattcctttcagaagtcatttgaatcatcgaaatggtgtagcgacaccgtctaaagatcgacctaaagctggactagattatagtcatacactcattgtcaaagatagtacacatattcagacagctttcatctctaatgaccagtatcgggaagtgaaaaataaaattaggcctatttatacccggacatcgagatatatttcagattttatgaatgcctacaaaaaagggatcgtgctcgatcttccgaagtatcagaactctactttgataaactttgtcggttatttggaaaaagaatggaccaaacaagttccgctacaagacaggaaacaaacacagaaagtaaaagaaaataatagacctaaaaaatatcgtttttaa

SEQ ID NO: 436 - DNA, 615 bp, Listeria innocua
ataaagtttgaccgtggcgcattaaatataatgtctttttcatctaaattcctccgaatctatatcttctctttagtttatcaccctggagtagctccaagtcaagtatttatcttcttaatttttcctctttcacgcagtatctgctataataaatacaccaaaatgaatagaactatagcgaataaaaatcgaggaggaattcaaatgacgttaaatgtttacttgaattttagaacacaatccagagatgctatcgcgttttatgaagaaatttttggaacaaagtgtacagatttgatgacatatggggaaatcgagtccgctgaagaacctatagaagattcgctaaaagatttagtaatgaatgctagtttagtactcgatggagtaaaagtcatgttttccgatgtgccgaagtctatgccacttacatttggagacaatatcacactcgttatcgatacaacggacgaaataaaactgacaaaacaattccatcaacttgcggaaggcggcaatattattatgccactcggaaaaacattttggtcagaaaaatatggtcaagttactgataagtttggtattggttggcagcttaatttatcctaa

SEQ ID NO: 437 - DNA, 615 bp, Listeria innocua
gtgagcatagttggattgacgggttgtactaataataaaaatataaatgaaaaacaaatagtaggaaaagaaatcgaaaaagttgaacaaaaaagtagtatagtttcttgtgatggaaagtatctggatcttgcagaaaatattgaagaactagaagaaagttctcctattattgttactgtaacgaaacgctctgaaaaaaaatctattacaaaagaatcaaaaaatagcaatgtgcctacagaattttatactatgagtgaagtagttataaataatatagaaaaagatgaaacgaagaccttagaagaaaataaaacgattaaggtattagaagatagtgttgaaaatgttaaaatcgatggacaagaatacgatttaacgattgatgggtataaaaatatgaaagaagacgaagaatatacgctatttataaggataagtacatgtgcatatgattatgtacttacaaatgctatgttaagtaaatatcctgatcctgagttgagtgaaagtgagctgttccttgaaaatgaggaaaacaaggaagaagcgatagatatgaaagatacgtataaggatatatataaggaagttctaagtgattataactaa

SEQ ID NO: 438 - DNA, 630 bp, Listeria innocua
ctattgaaaaaaataagctggatgattatcatgctgattatcgttgctatatcagtaggctattattttataaaagaaaatgagaaaaaaacaccacaagtaattaattacaaaacagtcgaagcgaataaaacagacttaagcgtctatgtttccgcagaaggtcatatcgtaaaaacagtaaatgaatggccagattataaagattttgcggtacaaattatggtggacgaactagaaatcaatcaaataaaagaaaaacaagcagcgaatgtccacgttgaagccgtagataataagatttacaaaggcaaagtttctgatatagatgaaaaaggcatcataaacggctcagtaacatcatataaagttacgattgatttggaaaatgatgatgatttgaaagaaaatatgtcagtaagtgctgacgtgctcgtggcattagaaaaaatgattctgacaatcccgatagaagcagtccacacagataaacaagacaaaaattatgtttatattgttgatgaaaataagcaaaaaaagaaaatctggattgaaacaggaaaagataatacaaaatctatccaagtagtaaaaggacttacagaaggacaacctgtgattattccttaa

SEQ ID NO: 439 - DNA, 630 bp, Listeria innocua
atgagatttaaagaaggcgaaaacgtacacgtaattgtaggcaatgaattgttaagtggttggtacaacggtaaagagtttggaacaggcaactctttagtgaaagtttctaaggacaagataatagctactaaagattgttttattgccaaagaaaaggaagcagagttggtagtagttccgcaattagtaggtgattttttggaaaatcattctaaagaagatggtcatacacttcatgatttattgtgcgatttattaacttctagagattcgctagatgaaaatgtctacgactggatcatggaaaacaatagtgaaaatggtgaattgcttgcacgcgcatggcttgacggctacgaagtcgagaaagaaccgctttattatgtgaagttaccgatttcaaagcggaatgaagctacagacgaattagaagtaattaacatgtgtcttttgttaaatatacaatcacacgaaacatgtatttctggaaattacagatgggttgataagctaaaaagaacgggttggagaaccaaattgacagaagctcaaataaaagatatgcccgaaggtgacgcttattggcagtttgctgttcctgttagagatttggagggtgaagcatga

SEQ ID NO: 440 - DNA, 630 bp, Listeria innocua
agggagagaaatgattttatgaaaaagccttttttaaaacatgtagtagcaccgataattgttggactattggtaataacgccgattacgcatgtatctgcagcagtaaggaatgttgatacaactccagttattacgcaaaaagaagttgaaagtggtatacaagataacaacaatgaattaccgaacgaatttattgtcagagatcaagtcaacccaagtgaaccagttaatcaagaaagacagctattaaaaagtgcaagtctaggttatgagaaatggaccaaagtatctacaacaagaaaagtttcaaaaggatttatcgcatggcatcctggatggaaaaattatcaatataatgtttctgcttattattttagtaaagcaacaatgaatgtgagcgcgagtattggttatggaaaattcagtatgtctgtatcaaaagcaggctcaaacggacaaattattaaagcgaatccaaaaaagtggacaagacctgcaatatatgggaatgtagatgttacgaagtatactgttaaaaaatataacggcgctggaatttacacaggatcgacaacaaaatacgcaagtactgctacaagtacttatgtccaaagtcgtaataaataa

SEQ ID NO: 441 - DNA, 630 bp, Listeria innocua
atgtttttgcagttatgtaaatatcaaaaattaaatccatttcttaacgaagcctacctagttaaatttaaaaacacaaaaggaccagataaacccgcacaaataattgtttctaaagaagcatttatgaagcgtgctgaaacacatgaacaatatgacggatttgaagcaggaattatcgtcgagcgtaatggtgaagttgttgaaatagaaggagcagtttctctagataaagacaaattactagggggctgggcaaaggtttttagaaaagacagatctagaccagttagtgtaagaatcagtgaaagagagtttaataaaagacaatcaacgtggaatgctatgcctcttacgatgatgcgtaaaaccgcagttgttaatgcaatgagagaagcatttccggataacttaggcgccatgtatacagaggaagaacaagggtcgctacaaaacaatgagacaagtgttcaagaagagattaaacaaaatgctaatacagaaatgctagatataccagcacagcaaattgaagtgccagattttaaagaaataagagagccagagcatgtggaaatgccaccgatatatgatgagcagccatctacaccgccagctagaccttattaa

SEQ ID NO: 442 - DNA, 633 bp, Listeria innocua
ttgaaatattattttgcaaatgccaacgaagaacaatttgggcaggagatttaccatgttttttcgctaaatcaatcagaatttgctcttgtaaaacgccacctcggccaagcgggctccaagcttgatgaacgatatgcaactcctctaaataacgatgtaacagctgatttggaaagtgtggatgtgtttctagttggtcaactactggaagaacattggcacttgtacgaagccggtctaaatggtgcgcttcaaaattactcacgccaatcgcgcgaacaagcccttcgtcatataatttttccacagcacgccaagtttcgaaaaaagtatcttgtttcggccagtggactaaatataaatcaacttggtctaattgtagttttttctgagatttttcaaaagcacggagcgtttcatcgtaaccttgctccgtattccacatttttgtcgttacaaaaaactcgtcccgctttaagccacttgatgcaaaaaagtcaccgagttctttttcgttatggtaaaatgaagccgtatcaaacaagcgataaccaacatctaccgcagtttctagtgcagtacgcatacgctgttcgtccgttagtttgtagaccccaaaaccatgtctag

SEQ ID NO: 443 - DNA, 633 bp, Listeria innocua
ttaggaggtattttaaatatgataaaaaaactagtagattttttaggtgaagatagatacatcgttgattctgataaagatagaaaaaaaatagaagtaagagaacgagcaaatggtattgtaaatcaagatattatctttgttttagcctgcaatgaattaaaatacgagctattcaaattgtctagaggtactaaaacaaaaattatgacattacatgataaagaagtagccatcttttattttggaataatgattaaaatgagccgatttaaaacgatttgtcctagaccggaacttaagaacactatttccaacgagatagaggcaaagaactgtctgtcaagatttctggattctaacttgttcgaaatagaaaattataagaaagatgccatttgccttattaacgaaaaaaatacttatgtagtgggttattgtgatatagatatgatttttcatacaataagtaatgataactctagtttgacaatgggagctaaagttctagctaatttcacctggaaatatatgtattttaaacaaatgattaaagaatatgccatagagttagatcagaatcaagtggattataaggctattttacgtaatttgttgaatcttaaaaattag

SEQ ID NO: 444 - DNA, 636 bp, Listeria innocua
aaaagaataatcattaacaagaacaaatttgtggatactcaaatttgttctttgtgctatttttacatcatgataaacagaggtgatttaatgacaacaattccactctcaatcccaatgactatcttatttgtagttgtttttgaactagtatacttaggctttaaaaaattcaatatttcaaaatctactttgggtacctacatgtttgtagcgtacttggctattttaacagaagtagttttattgccgtttaatctaacagctgccggagaaacctatccattagaggcttacttacaaataattcccttccaaaccatactattttatcttaaaaacatcccaaatctacacctaatgatccagtttttaggtaatgtagtcctacttgttccatttgctatttatattaatcggtttaaaaatatttctgttttaaaaaatatagttttagctttgggaatttctttaattatcgaaattagtcaaggaatcttaaatttaatcacacaatatccgaataatattactgatatagatgatgttattttaaacgtttcagggtatgtactcgcttggctcattttttcatcatttaaatcggataataaccgccctaaacctgtttcctaa

SEQ ID NO: 445 - DNA, 639 bp, Listeria innocua
atgtttacaatttatgtttacgttcttgatactctagcagattgggagataggctatgtaaattcggagctcaattctcgtcgtttttttaaaaaagacgcaaatcgcgtatcgctcaaaacagttagttattcgaaagagcctattaaaacaatgggtgggatgacgatagtgcctgattgtgtaattgatgacattgttatgagtgaaacaagtgtattgttattgccaggagctgacacatggaacaacctagagcataaagcaattatcaaaaaagcaagtgagcttctcgctttaaatgctacggtagctgcaatttgtggagctacagttgcacttgcgaatcatggattattggataatcgtccacatacaagtaatggagcaggatttttagaaatgttctcttctagttataaagggcaaaattcatatataaatgagctttctgtatgggataacaatctgattacagcgagttctgctggagccttgttatgggccaagcaaattattgcgcatttggacgtttttgagtcaaacacacttgagtcttggtatgcctatttcaatactggtgaccctaaacacttctatgcactcatggaaagtttgccagataacaatgatcactaa

SEQ ID NO: 446 - DNA, 639 bp, Listeria innocua
atggaaaaaattttttatttcattcggaagccgatagcaataacacttgtattagtcgtgatttgtggattaatatatcccctagttctaatgggtgtaagtaaagtggtttttccagaacaagcaaatggaagcttagtacgtataaatgacagcgtagttggctccaaattgattggtcaatcattcagtggcgaaggatttttgcacagtagaccatcagcggtcaactataacacatatacagtgcaagagaaaaaagattataaatataatggtgtagcatcgggttctagtaattacgctatgacaaatccagatttaacaaaaagaacaaacaaagatataaaaacgtttttaagggaaaatccgactatcaaaaaaaatgagattcctacagatttggtaactagctcaggttcaggtcttgatcctcatattagtccacaagcagctgccattcagataccctctgtttcaaaaaaaacaggtatttcagaaaagaaattgaaaaaaatagtaagagatagcactgaggaaaagtttataggcatatttggagaaagaacggttaatgttttagaggtcaatgtagatattgtaaaagcaaaaaaactcggtaaatttggttcaaagtaa

SEQ ID NO: 447 - DNA, 642 bp, Listeria innocua
atgtccgttaaagattttttagggaaattaacagatgcttttacaaagtcagaaaagagtaacatagggaaattatttattattgtagatcagcaaatttccgcattaactacggctcttgaaaaaacagaggcgtggcgagatattgataatgcgcaagggaaggtactgaataaccttggtgaaaatgttggccagaacagaggacgagctactgatgaggtatatcgtgttttaatccgtggaaaagttgcaagaaacgcaagtgacggaaccacaaataaaatcatccatgcaatcgcaaaatcattagattgcaattataaagatattcaaataatcaatgctaacgattctaattcatcagatgaacatgagccggcagcgataattattaaaaagattcctctttctgctctgaatgcagtcggcttaagtactaatcaatttttacagatagtaaacagtctgaaatctggtggtgttagagtagcatacatcaatttagaaggttctttttcttttgcaaaaggagcaacggaagagataagcgacgacggtttttcggagcttgatcaaattctgggaggaactttaggtggtttatttacaccagcagatgactttaagttaccaatttaa

SEQ ID NO: 448 - DNA, 648 bp, Listeria innocua
ttggcggggactaagccgccggccgattggtttaactggtattttaatagcacatatacagcattgaaggagctacaagaacttgctgcattaaatgcagatttaataaatcatacaggaaatacaaataatccacacagtgtaacaaaagctcaacttggtttaagtgatgtagaaaattttggaattgcatctctggatgaagctaaagcgggtattgccagtaacaaactaatgactcctgcgagtgtgttagcagcaataaaagagcgatttaatacgcaaaatatccttttcgaaggtgcagcctggccttccggaaatacgtacaaattcgccaacagtcaaaaagtttctgatcaaaatttaggcttgattttcatttggagtgattatgacgtaatacctggatcagcaagtgttgcaaataattataactttgactttacatttatccctaaattttttgttgataagcatgccggagcaaacataaatgtgccagtcgctacaaatttcaatgctcaagtcgctcaaatcacaattaaaacattatatcttacagatacaacttttgctgggcacgatttaaactcaagtggcttaaatgcgaatgatgctattttacgctatatcataggagtgtga

SEQ ID NO: 449 - DNA, 651 bp, Listeria innocua
cgtaacattttgtacacaaatatgcgttcacaaatactaatattacactttctgtttccaatttatttaaaaatttatcaaattcagcttaaaaaacaagcttttttattggaaaaaagtagtgcgcttaccatcattccttcgccctatttatgctatactgttgatattgacagaaaaaggggtatatttatgaacaatgagcaaaacatgaatcaacaaatcgctttattttacttcggctataaagcatttacagagaccgctgatttaattattgccaaacattcactaaaaagattacatcatcgcattttgttctttactgcacggatgcctggacttacgattaacgaacttttaacctttttagaaatatcgaaacaagccttacaccagccacttgcagagttaaaagatcgcgaacttcttacaattgaacaaggcactcgcgacaaacgccaacgctgtattttcttgaccacagcgggtaaagaattagaaaacgaactcggtgctgcacagcgaaaacagatggcagaaatattcgctaattcctctgatactgatggcttacattttaccgaagtgatggaaggctacgcaaaaaatcgacctggtgcagctttaataaaagactttaaggagtga

SEQ ID NO: 450 - DNA, 654 bp, Listeria innocua
atccataaaggagtaaagatgatgaacatttccagcatatacaataaaattgaaacagagttttctattataaatgatgcaaatagcctaatttctattgctgttcgaggaataaatcactatccagagaattttgttaaagtaatattgaacaagcggagtggttactttgacttaatgaatatggtaagaggaaaagaatatacggtggcttcgttttcagaagaggatagggcgataatagcagtatacatttatggaaagaataaactggagtttaaagactataattcgaatattaaagatgagattgataaggcgcagtcacttgaagaaattaaaacaatttttatgcttgtttttggagagcgatactactctttttttgataggagaaaaggtagaatcgtgttagaaaaagaaaataatgacaggtacaatgttttgtattacgggaaagataaatccgtaatatatattactaaatcaagaaaattaaacatcgcggctaaagttttatgtaactatagtttagatttaaaacatttttatgaaataattgaaaaacttgagctagaggaagattttaagtttgtagaagaattaaaaaagctgtatttatttggtcgcagtgactgtaattcaatagattag

SEQ ID NO: 451 - DNA, 657 bp, Listeria innocua
acttcccttttaaatctttataatggcgacgactatttacaaaaaactgacccgatgacagttgttacttccgccatggttgctgcaacactagatttacctatcgacaaaaatttaggttatgcgtggattgttccttacaaaggcagagcacagtttcagcttggttataaaggatacatccagttagcactacgcacaggacaatataaaagcattaatgttatcgaagtgcgcgaaggtgagctactgaaatggaaccgacttactgaagaaatcgaactagatttagacaacaatacaagtgaaaaagttgttggctactgtggctatttccagttaattaatggctttgaaaaaacggtctattggactcgtaaagaaatagaagcgcataaacagaaatttagtaaatcggattttggatggaaaaaagactacgatgcaatggctaaaaaaactgttcttagaaacatgttaagcaagtgggggattttatccattgatatgcaaacagcggttacagaggacgaagcagagcctagagaacgaaaagacgttacagacgatgaatcaataccggacataatagatgcgcctgtaacgccgtctgacacgttagaagctggctcggtagttcaagggtcaatgatctaa

SEQ ID NO: 452 - DNA, 660 bp, Listeria innocua
aaaatgcctttaacaaccattgacatttaccaactctctcaaaaactcaaacataatctggaggacatcaacatgaaaaaagttctaatgccacttatgcttctcgcagttttattctatgggtgtacatcacaaaacgaaggagtaacgaaagaaactgccatttcgaagacgtttattatacgggcggactacgctattccagcaaatttggatgaactagtagcgaacagtgattcgattgttaaagtgaaatttctacagaataaagacatcggtaaaaatggaaatacgattagtgaagtagagattttgaaaaactataaaggtaattttaaaaaaggcgaaaaagtagatatttcggaaccgtggtatttaagtaatgataaatatgtcgcggttgaaaactatattgcacttgaaaaaaatgaagaatataccttgtttctaaacgagggtgacgataaagtaagttctatagttagcatgggttatggtaaattcagtgaaaagctccaagaaaaacaaggcgttctggcagattttgacaaacttggcgaagttcaaaaatacgattttatttccgaaagtaaggatgaagtaaagaattaccaagcaatcaaacaacaagttttcgaaaaatatcaagattcaaagtaa

SEQ ID NO: 453 - DNA, 660 bp, Listeria innocua
gctaaaatttattttaaaaacactattaggggtgtttttactatctctttctatgtatctttttttagctcaattcagcaaattagttggctagaaaatagtagtatggaagatagaacacggtactttttacaaaggaaatttaatgatgattggaaagatatctccccgaacttagcatttgatttcaatgttgaaagtggtcgaaataaattaatgacagcgcattttgatatatccgcgcaagtcgaaaatagaaaagatgatttacacacatttaaaactaaaaagaaaagtgagttcagtaaacttattacatttgatatcgaagtaattaaaaatgtaaaagcaagtactaaaattgaaaagaagcagacagtatatatacatccattacctgtaaaagagaacaatgaaatttatacacttcagttttctaataatatgtatcaacccaatcgaaaaatggaaaaaggattagacatacggtcatcagatgtggttgatagcgtaatttcttctcagaaaaagtatcaacttttacttgagcagatcacaacaaaagaattatcaagcaaaaaactaacaaagaatattatacttttacttagcattttggttttgggagcttatgcatatttaataattattaaaaagtag

SEQ ID NO: 454 - DNA, 660 bp, Listeria innocua
ttgtatggatgcggagaacctgaactagatattagcaaggatcccggaaaaggatattatctacaatacaaaggaaccacttctgatgaggcaaagataactttaaaagatgaaagcggagaaacaaaaaaacttgatgtagagaaaaatagttttactgctctagtgcctagactaacttctaaggcaatctacactgtaatagctaaagataaagataaagagacagaaactaagttagtagttcctaaacaaaaaaaacttgtttcttatgaagatttaaaaggacagtttaattatatttatgaaactgaagacaagttatctatttctcttcctgattctataaacagtaatgaagaaataacaccgggatttaaaattatgtctgatggtaataacgtaatgtcaattttattaacatacagttctgaggataatattggtatcactgattataacgattttacctattcaattgctgctattatgatgtcgttagattcggaaaatagtttagataaagttcttgatgctttaaataacagtatggataatcaaaaggaaaataaagtcacagttaatgatattacttatcaattttctacaattaacgctggaacaacaaatataacaactttagagattttcccaaactaa

SEQ ID NO: 455 - DNA, 663 bp, Listeria innocua
agtttagaaatgaggcgttcaaggttggaaaaagggatgacgaacattaaaagaaatatttataaattacttttatttttacttagtttgctagtagcttttattgtatatttccgtatattttataatatcttacccatgtactttggcaatatggagagcttgaataaaaatgttttagcttttgggattgtggtattcacactatacattttactcaaaatggtttttaagcttcaaaataaatgggatggatatttattactcttattgtatttattcgttttaactatcggcttattaagacctgatgatagtgtatctttagagtcctattttaatgtcaatgtgatgcttattttggaagatttacgcgttaatgaagcttcgtggtccgtacttttaattaatttagtgttattcactcctatgtattttctgctaagctttgttccatttttggatgattttctaaagcgctttattgccttttttactttgattttagtaatcgaaagcttgcaatctatattaaaagtggggatgtttgatgtaaccgatttgctattatatatcatcggatttttcgttggattcggagtttactgttgtataaaaaaggtatttagagcacaaaagcccagaaactcgagccaattttaa

SEQ ID NO: 456 - DNA, 666 bp, Listeria innocua
atcgggatgttcgccatcgagagcgtgtcaatatcgcgaaaaatagtacgtttagagacctcaaacatcgtagccatttcagaagcactgactagctcgcgttggaggagcagcatgataattccgatgagtcgctcgattttcatttttttctccttttttcgaaatgatgacagacagttgtcatcattcgcgtgttatagttacatcatatcaaagttaagtaactttttggagggaaatattatggcatttgaaattgttgaattgaaaaaagaaacatttactggaaacaaagtagaaatccctgaatttgatccacaaaaaggctttggcccaatgagcgaaattaaagaatcagcctacacaaaatttgcaaaaaacgaaaaagactacgttggcattaacgcaagtcttgacggcttacaatattacatcgtggcaagcgcgaacggcgaaaacggcgacacaaccttcgacatcccagcaggcaaatacgcaaaattcgtaacaagcgaaacagaccgcccagctctagacgccttcatcggcgcagcatacggcgaagtgagccaaagcgacacagttggtattgcaggatcgtttaatttggaagatcttagagaagcggattttacgctttatattccggttgttagtaagtaa

SEQ ID NO: 457 - DNA, 669 bp, Listeria innocua
atccttttaagaaagtccttattttcaagtgttaagctagatgtaagatttgaaaaggaggacaccaggatgaaaaaatacttcataattcttgttttaccaatcatttctttaattgctgcagtaactatgtatttttcctggttccaaggatggctttatttttatttaaagcacgtaatggcgacagtaagtcatatgggctacattacggttggcataacggcgattttactctattttgtcgcagttcaattagtaaactggaaaataaataaagcattactcgttttttgctatataatttatttcagtattcttgtttgtttattattcggaaaagcttccgatactcaaggattttcgagtgatacttttggttttattgatacattcttggctggaaacttgcgtgttatcattgtaggaaatgtactcgcttttgttccaattggttttttattaaagaaattaggattttttactgcattactttcagcaggaatgttgatttttgcagtagaagggatgcagtatataatgcatgtggggttctttgatactggagatgtattcttaaatgtttgtggcattatgctaggatacattcttatccgttttttgtccccaagaaaatttaaacgattcaaagtaaaaccgactagctaa

SEQ ID NO: 458 - DNA, 669 bp, Listeria innocua
gctgccctaatacgggcagcttttttgtttactatatttaaaccttgtatattgatagccaaaaaaactacccgccactattttgagcgagtagttttttgttattattttttacgagcaattagaacgcctaatcctaaaactaagaatcctactgctactccagttacaggtaaagaatcacctgtttttggtaaacttgctttgctggctgttactaatgttgagttaccagagttagcttttttactagctttcggagtagaagaacttgaatcttctgatgttgaattagctggatcagttgagtccattgaacccgttgagtcaatggatgttccaggatcttctgctggcgctggatcgtttgatggatcagggtcagatgcagggtctggtgttggtgttggatctggtgacggtgttggatccggtgtcggcgttggatctggtgctggcgccggtgttggatctacaactttaacagtaactttaaatggtgttgctttttgtttcgctgttcccgcatttagtgtaactgtatattcaccagctgttgttaaatcaacaactgtatcaaagtctgtcgtaatcgcagcactattgttcgttacagcattaatatccgctaaaaattcagcttctgtttttgcgtcattcatattgtaa

SEQ ID NO: 459 - DNA, 672 bp, Listeria innocua
atgtctgtattaatgtgttgtgaaaatgtatctaaaacttattcaggaaatttacagcctacattagttaatattaatttaacaattaaaaaaaataatttatattttataaaaggaccatctggaagtggaaaaacaacattacttaatatactgagtcttatagatgcacactcttctggaataatgaagttcaataattttgatattagttctatgaatacaaaagcaaaaaaccaaatacttttaaatgacataggaatgatttttcagaaatacaatctattatcaccgttaaatgtgattgagaatatcatgatatccagactatatgcagatttttctaaaaaagattgtattataagtaaagcaaagcaagtgataaagttattacatttagaaggtttagaggaacgaaaaatcaatcaactatctggtggacaacaacaacgtgtggcaatagctcgagttttaatgcaagagccagaactcttgctagccgatgaaccgacagcaaatgttgacaaggaaacagaagcaatcataatggatatttttagtcagtatcgagaaaagggagcgttaataatagtttctcataatgatagttatgctgatattgtggatgcatcctacgagttaaataaaggtaggatatcgagctatgaataa

SEQ ID NO: 460 - DNA, 675 bp, Listeria innocua
aggtggatcgagcgaaagcgagtcatctattcgaaaaactgttcgagcggaaatggaaaaattattcgaaaaacttgttggaatttatactcctggagaggtgtgatattaatggtagcaacgttaggttcagtaaaattagtaaatacaaatgaaaacgagtcttctccgtttacaattacggataatcctgttgaaacaggtgcaaatgtttctgatcacgttcaacgtgaaacgaaaacactagaaattagtggctttttgcttggagctactgctgaaagagattacgctactttaaaagactatgctgagaaaggtactatagttacatttcggggacgtgtatatttcaaaaacgtactaattagtaatctatcaaaaagctataatacaataaaaaatggtttcgaaattacgatatcgctcagagatttaaggcgcgcatcgacgccctgggtgcgaaagaaaaagaaaagttcaggaaaaaaacaaccagtgaaaccaaaaaagcaaccggtcaaaaaaacaacagcagtctacgtgacagttaaatcaggggactgttattggaagtggtggaagcgatatggtacaagtatcgctcagcttaggaaatggaataagtggccagaccgtagaattccgaatggtgcgagagcgagggttaagtga

SEQ ID NO: 461 - DNA, 675 bp, Listeria innocua
aaaatgaaaaaaattttactgggcgggataatagtttgttttggagtactaatgattggctgtggttcaacaactgattcagaaacaactacaaaagataacgaagacgaacaaaaatatagtaagccagaatctaagaaagatgaaaattatattaaggatggtcccttaaccaaagttaatcaatggaaaaatgacgatggggaaaaaataaaattactgaaaattattacgccaaatacattgtttgatttagatccaatacaaatgaggattttagatataaaattgcttgagcattatgatttgaatgcagatgtgaaaaaagagtatcaagaattaactggaaaagaacaagagaactatctaagcatacaaatcagcttaaaaacagaggatactgatcctaataaagaaattatgtttcacggaatagatactataattacgaacactaaacaacaaatagatgtttctaacgagagttggactagcctggatgttatgggcgttggtactttcaagggaaatgttgaaaaaactggttatcttgttgttcctttttacggaaaagccgatgaactaaaaaacttaacaatcatatctagtaaagtttgggatgataaagaacccactttatatcacgattctgaaaaaaaagaattcaacttttaa

SEQ ID NO: 462 - DNA, 675 bp, Listeria innocua
gcatccgttacagttactgaaacatctttgaaaatagaaggcttgctaactgtcttaactttaactgtgatagcactcgttgtttttgcaactcctgttaaagttccatcactagctactgttgcttttgcttcatcagatgaagtgaatgttacatcttgtggagctcctgatggcagtactcctgctgtaattttaatagtttctccaacttttacagttttagaggcgctatctaccgttacgcttgttggctcaatggtaggcgccggcgtaaaaaccggcgtaccatttgaattctgtgtggcagaaaatgaaccaatatcgttcgcaccaccaccaccgaaatcattaatcccgattggtccagtgatttcatacttagagcctgctgggaatttaaccacaattgttttttcagcttcagacccaactttatcccaagtttcacgtaattcattttgccctggatctgattcattgtatttcccatccaaacctaactccatagcagcacctgtttttaccgcacgttcaaatacctcaccaattgttgtatattgttccacatttgagttcagtgaaatgtctaaagtttctaagtctttgatcgaaacaccatctccgctttcccctgaatctttaaccgaaatttctaattgtttaactgcataa

SEQ ID NO: 463 - DNA, 678 bp, Listeria innocua
aatggagagaataatattttggaagatattagtttgaacatacataacctaaaaaagaaatacgacgacaagaccataataaataatttgagtattacaattaattttaatcgtaaaataactttaataacgggaatgaatggttctgggaaatcaacattagcaaaaataatagcgggaattattttacctgacgaaggaatattacaaatttcaaatcataccaatttttcaaaatggacaaagagaactacgtactatttatcaagtgcagaacgaggcatgttttataaattgaacggcagacaaaatattgaatatttaacatcattaaaaggtacaaataaaaacgatgtgttaaaaaaactatctacttactgtgagaaattaaattgcaaagatattttagaaatgccagcagaaaagctatctacaggtcaaaaaaagaaagtatttatcttgtctgcgttatgttcgaactgtcagctattattattggatgaacctacaaacgggctggatgatgagagtttttatgcatttattgaaattctagctaaattaaggctagaaaaaaagatagtattaatttctcatgataaaagatttttagatatgccgaatatagagagaataatttttgaaaaaaacggtgagatttattgggaaggatgttag

SEQ ID NO: 464 - DNA, 681 bp, Listeria innocua
atgtcccattttaaaggtaaacaattcaaacaggatatcatcatggtagccgtgggctactacttaagatacaatttgagctatcgtgatgtttcagaaatccttaatgagcgtggaatcaaggtttgtcacacaactgtttatcgatgggtacaagaatatggttcgattatttattgcctatggaagaaaagaaataagtctgctagcgattcttggagaatggatgaaacatatattaaagtaaaaggaaaatggcattatttgtatcgtgccatcgattctacaggtttgacattagatatttggttgcgaaagaatcgggataaacaggcggcctatgctttctttaaacgattaatcaagcaatttggagaacctagagtttttgtaacggacaaagctccttcgctaagcagtgcgttcaatcgacttaaatctgaaggtttattttctaacactgaacatcgaacgagtaaatatttgaataatatcattgaacaagatcataggcctatcaagaaaaggcacaaattatatcagtccataaggactgcctcatccacaatcaaaggaattgaaactatacatgctttatacaaaactagccaaagagacttttctctctttggcttttcagtgattcatgaaataaataatctaatgggtgttccagcttaa

SEQ ID NO: 465 - DNA, 681 bp, Listeria innocua
atgtcccattttaaaggtaaacaattcaaacaggatatcatcatggtagccgtgggctactacttaagatacaatttgagctatcgtgatgtttcagaaatccttaatgagcgtggaatcaaggtttgtcacacaactgtttatcgatgggtacaagaatatggttcgattatttattgcctatggaagaaaagaaataagtctgctagcgattcttggagaatggatgaaacatatattaaagtaaaaggaaaatggcattatttgtatcgtgccatcgattctacaggtttgacattagatatttggtttcgaaagaatcgggataaacaggcggcctatgctttctttaaacgattaatcaagcaatttggagaacctagagtttttgtaacggacaaagctccttcgctaagcagtgcgttcaatcgacttaaatctgaaggtttattttctaacactgaacatcgaacgagtaaatatttgaataatatcattgaacaagatcataggcctatcaagaaaaggcacaaattatatcagtccataaggactgcctcatccacaatcaaaggaattgaaactatacatgctttatacaaaactagccaaagagacttttctctctttggcttttcagtgattcatgaaataaataatctaatgggtgttccagcttaa

SEQ ID NO: 466 - DNA, 681 bp, Listeria innocua
atgaatcattttaaaggcaaacaattcaaaaaagacgtcattattgtcgctgttggttactacctgcgttacaatctaagctatcgtgaagttcaggaattgttatatgatcgtggaataaatgtttgtcatactacgatttatcgttgggtgcaagagtacagcaaagtcctctattatctttggaagaagaaaaatagacaatccttctattcatggaaaatggacgaaacctatatcaaaattaagggacgttggcattatctttatcgtgcaattgatgcggacggcttaaccttagatatctggttacgaaagaaacgggatacgcaagcagcctatgctttcttaaaacgactccataaacagtttggtgagccgaaagcaattgtgaccgataaagcaccttctcttggctccgcctttagaaagttacagagtgtgggtttatatactaagacagagcaccgaactgtgaagtatcttaacaatttaatagaacaagaccatcgacctattaaacgacgaaataaattttatcaaagtctccgtacagcctcttccacgattaagggcatggagaccattcgaggaatatataaaaagaaccgaagaaatggaacgctcttcggcttttcggtgtctactgaaatcaaggtattaatgggaataacagcctaa

SEQ ID NO: 467 - DNA, 681 bp, Listeria innocua; identical to SEQ ID NO: 464

SEQ ID NO: 468 - DNA, 681 bp, Listeria innocua
atgcgaaaaaattggacggatgaggaaatcagagttttacagaataattacgaatacgtagacactgagataatagctaattttttaaatcgctcatatcattcaataaaaaacaaagcgacgcgacttggaataagtaaaaactcggagtggacagaggatgaggatatttatttaaagtattttgtttatgaaaacgacgacgatattagcaaagctgcagaatttttaggacgtacaaaagatgcagttataaacagactagtgaagttaagaaaaagagattcttcagtttcttttattaggcgtccgtggacagaaaaagaagatgagatactaaaaaaaaattatattattatgtcaaatgcccaattcgctgaacgattaagaagaacgaaagcctctgtagcaggaagaaaggtactgttaggactgacaaacaaacacatgtctaaagaagatgacaaaataattcgtcatcttggaaatcaagggtacacaatcaaagagatctcagcagaaatgaatttgtcttattgcttagttaaaaactatataagaaatcaccgaatcaattatagaagggaatcaaaaaacgggatgaacggttggcgaaaagaggcagatgcgacatattcgctttatattaacgctaaaaaaatcaaggagggccaagcatga

SEQ ID NO: 469 - DNA, 684 bp, Listeria innocua
gagtgcagaggaagctttgaaaatagtggagggataacaatgtttaactggtttcggaaatttataaacaaatggaaatttaatcaagggatgtacattgaaactatgagtcttgatgcgacaatcccattaaataaggaggataaacaaatgaaaatatatcacacagaaacacaagaagattttgatgctttattggaagaattgaaaaatgaagggtatagctggtttttcggagaggttattccgtcatatgactcggaactttgggaacggtataagcaagatactgttgtgcatatagaggaagaaggagtaagttgggggagtctttcttatgctaaatatttacaccccaacacaccaattgaaaaatacaaagtgaaacaagacgaagttgcaaagtggttcggtggcgctacaaatgccatgaaagcattttcatccaatggagtatctatgaaaaacgaaaataacgacaaagtaaataatcctgcacattacacagcaggcggtattgaaacgcttgactacattaaagctaaagtaaatgattatccgtcatatgctgtaggaaacatacttaaatatgtctcaagatacgagcacaagaatggcattgaggatttaaaaaaagcgcaattttatttaaataatttgattgaatggatggagagtgattga

SEQ ID NO: 470 - DNA, 684 bp, Listeria innocua
atggctaaaaaaagtgtctatcagttctggataaatcaagggaaaaccaagacaaggctccccgttcttcctgaaaaattagaggtttcaattaatgggaaaaacgataatttcgatatcgctagcttaggcgaagtgacaataattcaaaaaccaggtgctaaaacatttgctttctcggcattttttcccaaaaattttggtccgtattgcgaatttaaaccagcactaaatgcaaagcaatatatagatagaattgaaaattggatgagcaatatgactccgattcaattcattgtcacgggggctggaattaacttcacttgttctatagaatcatttaattattacgaaaaggctggagaagtaggcgactggtatttcgatattactttaaaaatatataaaaaagtaactatcaaaaaaatacaaataaaaaagaaacaagttgcaaaatctagaccagttgcaaaatctagaccagttgctaaaaagaaagttaaaacttatatagtaagacaaggtgatacgttgtgggatttaagtaaaaaattttacgggagaaacgcggattggcgcaagatttggaataaaaataaggcattgttagtaaaaagagataaacgtaatttaaggcagccaggtcactggatatatccggggcaaaaattaattattccgtga

SEQ ID NO: 471 - DNA, 687 bp, Listeria innocua
atgacgatgaatcattttaaaggaaagcaatttcagcaggatgtgattattgtagccgtgggctactatcttcgttataaccttagctatcgtgaagttcaagaaatcttatatgatcgtggcattaacgtttctcatacgacgatttatcgttgggtgcaagaatatggcaaactactctatcaaatttggaaaaagaaaaataaaaaatccttttattcatggaaaatggatgaaacgtacatcaaaattaaaggaaaatggcattatttgtatcgagccatcgatgcagatggtttaaccttggatatttggttacgtaaaaaacgggatacacaagcagcctatgcttttcttaagcggttagtgaagcagtttgatgaaccgaaggttgtagtcacagataaagccccctctattacaagtgcctttaagaaactaaaagaatacggcttttatcaagggacagaacatcgtaccattaaatacctgaataatttgattgaacaagaccatcgtccagtaaagagacgcaataaattctatcgaagtttacgcactgcctcacccacgattaaaggcatggaagccatccgaggattatataagaaaacccgaaaagatggcactctcttcgggttttcggtctgtactgaaatcaaggtattattgggaatcccagcttaa

SEQ ID NO: 472 - DNA, 687 bp, Listeria innocua
atgacgatgaatcattttaaaggaaagcaatttcagcaggatgtgattattgtagccgtgggctactatcttcgttataaccttagctatcgtgaagttcaagaaatcttatatgatcgtggcattaacgtttctcatacgacgatttatcgttgggtgcaagaatatggcaaactactctatcaaatttggaaaaagaaaaataaaaaatccttttattcatggaaaatggatgaaacgtacatcaaaattaaaggaaaatggcattatttgtatcgagccatcgatgcagatggtttaaccttggatatttggttacgtaaaaaacgggacacacaagcagcctatgcttttcttaagcggttagtgaagcagtttgatgaaccgaaggttgtagtcacagataaagccccctctattacaagtgcctttaagaaactaaaagaatacggcttttatcaagggacagaacatcgtaccattaaatacctgaataatttgattgaacaagaccatcgtccagtaaagagacgcaataaattctatcgaagtttacgcactgcctctaccacgattaaaggcatggaagccattcgaggattatataagaaaacccgaaaagaaggcactctcttcgggttttcggtctgtactgaaatcaaggtattattgggaatcccagcttaa

SEQ ID NO: 473 - DNA, 687 bp, Listeria innocua
atggcaacttatgcagttaaacaattagaaatttcggttaaagattcaggggaaagcggagatggtgtttcgatcaaagacttagaaactttagacatttcactgaactcaaatgtggaacaatatacaacaattggtgaggtatttgaacgtgcggtaaaaacaggtgctgctatggagttaggtttggatgggaaatacaatgaatcagatccagggcaaaatgaattacgtgaaacttgggataaagttgggtctgaagctgaaaaaacaattgtggttaaattcccagcaggctctaagtatgaaatcactggaccaatcgggattaatgatttcggtggtggtggtgcgaacgatattggttcattttctgccacacagaattcaaatggtacgccggtttttacgccggcgcctaccattgagccaacaagcgtaacggtagatagcgcctctaaaactgtaaaagttggagaaactattaaaattacagcaggagtactgccatcaggagctccacaagatgtaacattcacttcatctgatgaagcaaaagcaacagtagctagtgatggaactttaacaggagttgcaaaaacaacgagtgctatcacagttaaagttaagacagttagcaagccttctattttcaaagatgtttcagtaactgtaacggatgcttaa

SEQ ID NO: 474 - DNA, 687 bp, Listeria innocua; identical to SEQ ID NO: 472

SEQ ID NO: 475 - DNA, 687 bp, Listeria innocua; identical to SEQ ID NO: 472

SEQ ID NO: 476 - DNA, 690 bp, Listeria innocua
ttggaatttattcaatcagaaaaaatgaaaaggtcggagtattttaatattatgatttatgcaaaaccgggagcagggaaaacaacgacgattaagtatttagaaggaaaaacattaatgttggattgtgatggtacgtcgaaagtattaagtggattacctaatatcacgattgcgacattagatcctcgaaatcccgtacaagatatggctgatttttatggatatgcgaaggcacatgcagaggaatatgacaatgtagtaattgataatttaagccattatcaaaaattatggttaatgtttaatgggagaaatacaaaatcaggtcaaccagaactacaacactatggaatatttgacacacatttaatagatttgatttccgtgtttaataatttaccaaacacaaatatagtatatacagcttgggaaaacacgcgtcaaatacagatggaaagtgggcaactgtataatcaatttttgcctgacattagagaaaaggtagttaatcacgttatgggaattgttcctatagtcgcaagattaataagaaatcctgaaacaggtcagaggggtttcttactcacagaaaacaatggtaattttgcaaaaaatcagctagataatagagagtttgccttgcaagaagacctattccaaataggtgatgttgatgttaaagcttag

SEQ ID NO: 477 - DNA, 693 bp, Listeria innocua
acgagaacgagcttatttaacaggtggggaaaaagaatgacgactattcaaacgttattccgtgctaatcgttctgtagcagattcgaagccaatggaagcatacatgaaaaaccaattcccatttttaggaattagagccactgaacgaaaaaaattagtagcagattttttaagagaaaatggtatgccggatgatttactgagacttgttgtggaattatttgcagaagaagagcgtgaacttcaatacgcggcaattgatttattaagtcgctatggtaaaaaacaagccagtgaagcaattgaaatctatgagcaattagttacgacgaaatcatggtgggatacggtagatggcttagctggaacggtcgtaagtaatcatttcaaactatatcccgatttaatccctatctataatgaagcatggataaacggagataatatttggctagctcggacggccattttatttcaattaaaatataaagaagaaacaaatgctgaactcttatttgcaaattgtgaaaaatggctaggttctaaagagtttttcattcagaaggcaatcggttgggcgcttagacaatatgcgaaagtagatagtgaggcagttcgcgtttttgtaaacagccatacgcttgcgccacttagtcgtagagaagcgcttaaacatatcggggaggcgtga

SEQ ID NO: 478 - DNA, 699 bp, Listeria innocua
atgtggcttgattcagataagacaatgccacttgtggaaattgccagtaagttaaattgtaaaccatcacagattaggaaatggaaatcggaagataactggagtgataacgccaatagtaacgttacgaatcaaaaggagcgttactattcaatgaaagggaacgggaatgctaagaacaataaaggcggcgccgctcctaaaggtaatcaaaacgcacgtacacatggattgtactctaaatatcttccggatgacacaatagaaattattagtatgatggatcaacaagaaccaactgatttaatttggggacagatacaaattcaatacgccgctattatccgagcacagaaaattatgtgggtagaaaacaccgaggatgaaacgagagttcaaacacaagttggattcggggaaagtggttctgataaatatgagtatcaattcgcttgggacaaacaggcgaattttttaaatgcacaaagtcgtgcgatgtctacactaagtgggttgattaagcaatttattgcgattgctgatgagcatgatgaacgcaaggctaagcttaatcaaattattgcatcaacagataatatacaggcccgcacagctcttattaaaggcgctgaaaaagatactacattgcttaataaactattagatgttgccaaaggaggaaacggagaccttgagtaa

SEQ ID NO: 479 - DNA, 705 bp, Listeria innocua
aatggcaatcaagggctatttttaaagagctttacacagagaggggagtcatttatgccaaaaattgctaaaagtgatcgattggagaatgttgcttttgagtacattaagaacaaaattacaacgggggagtatcctaccgggtacagagtagtagaagcgaaattgtctcaagaattaaacatgagcagaacaccaattagaagggcgattattaatctttgccattctggttttttagttcatcagtataatcgtggtgccttcgttcaaaacacagaggtaacaattactgagtttttttcgagaatgaaattggtcgaacttttagtgtatgaaagcacggaaaaattagctttacgggaagattatattgttgtagatgacatcatagaaatagcagaaaaagtaattcaatatgaaaaaaatagagaatatgagttaatgcggggtgcttttgaagattttattagcacgtttatcggtaagttgaacaatgattactttaatagagtaattcaagatttatggaatgaaataaatgacaacgcaaccaaagaagtaagacttattattgtttctgcgagtgatcgaattgcggaagaattagcgcacatgattgaaattttaaaatcatggaattacgaacaattaaaaaaatgttttcaacacataatgaacgcaatgattttaattgctttttaa

SEQ ID NO: 480 - DNA, 705 bp, Listeria innocua
ctatgtaaccagttcgcggccgcagattggtacatacaaaagggagataacgggatgatagctttatttgtactagctggtttgtttatttttaccggtattattattttagctgtatcacaattacctggcatggcattaattgaatttgcatttgcagctcttttcatctggcttgctttaagaataaagagaaaaaaagccacccatgaaaaattcgatgtaaaagaaattccgagtaactcgcctcaaattaagttaaattttaatttagcacaacaggatttaaatttcgctataaagaaagcggttggaacaacttataacatggttcaactaattccatcaaatcagataatttttttatccaaagatggtcttgtgacaaatgatgagttttactttgttgattataagtggctaggtgcgacgtacaacactcacactaaaactaatagcaaagctgggaaaactattgctggaggagtagttgggggaatagtcggcggaggcgcaggaacagtagtaggtgcattggcaggaagtagcggtaaaacaaacagcacttctacgcaaattgaaaataaatcaaaagcaattttttacttttacaataaaacaaaagatattgatttagtaacagaattaaacattacatcaaaagatatagttaaactcgaaagatttgtcaaatatgtaaaataa

SEQ ID NO: 481 - DNA, 714 bp, Listeria innocua
gtgacattaacaacggaaacaattaataatttaatcggaataaaagaatcatatcaagcatctgatgcgctaatgaaaattttgtttgatagagaaaaacgagaagagatatttaaacagtttttacaacatgatacgcatttagaaaaagattggtttcacgtctattttgaagaagagcatgcgaataaaaagaaatatgcacaagattttacaccaactgaattaagtagtgttgcatcgcaattagtaagaggattaacagacagtcagggaggaacaagactagatgttgccgctggtacgggtagtttaacgatttgcaaatggtatgaagattgcctaaaatattcgccgtttgattatctaccatctatgtatttgtatcaatgtgaagaattatcagatcgtgcgttacctttccttcttttcaatttattaattagaggaatgaacgcaacagttattcacggtgatgcgctaacaagagaagcgaaacaagtgtatttcattcaaaacgataaagacgatttattaaattttagttctttcaacatcatgatccacagtgaaacagtagagaaggaatttaatattcataaatggctagaaccagttatcgaacatatagaaagccctctttcagtagctgatagatatttaaatgagttagaaatagaggacgaagaagcatcacaattgaaacttttttag

SEQ ID NO: 482 - DNA, 714 bp, Listeria innocua; identical to SEQ ID NO: 481

SEQ ID NO: 483 - DNA, 717 bp, Listeria innocua
ttccatttagcccacgcaatgaaaagatccatgagccattgcttgattccttcccatgcatctgaaaaaatttgcttaacattttcccataaatcactgaaaaagtctgctatcgtttcccaaacgcctttcaaccaatcgacaatagcgccccagttttttataattagaatgacggcggctattgctgcggctattgcagcaatgacggcaatcacagtacccacaacgcttcctaatattacaaacgcagcaattactggagccaatgcagatacaattgacataataactgtaaacacccctgtcattattcctacaaattccatgactttcttcgaaaacgggcttaattcatcaaaccatttttttaaatctttaattacacttacaactttcgggactattgtattagctagttccaataaatattctcctattggcgcgagtgccgtttgtaattcatgccacattttagttaagtcttgtttgctatttgtctctgtcaatttttctgatgcgccttttacatcatcatatttcccttgtactgcacctagctcaccatttaaatcgcccatcgcagttaaaacttttacagtattgtcttctccgagagacccaaatattgctgatacaatagatgccctttcttgttcatctccaactttatttatttcagtagccaaattagcgaaaatttcattgttatcgtag

SEQ ID NO: 484 - DNA, 723 bp, Listeria innocua
atggcagaaatagcaattgatgtttcgaatttagatgtaaaaatcggcaagaaaccaattttatcagatatgtctctcgaaatagagaagggcgaaatattcggcttaatcggtccgtctggcgctggtaaaacaactcttgttaaaacaatcatcggtatggaaaaagcaacaagtggccaaaccaaagtattaggaaatgtaatgccgaacttgccggtaattagcaaaatcggttatatggctcaatcagatgcactgtatactgatttaacagccaaagagaacctagatttttttgcttcactttattctattaagggcgctgctaaaaaagaccgaatcaactatgcgacgaacctggttaatttacaaaccgatttaacaaaaaaagtgaataatttttcaggtggaatgaaacgcaggttgtctctcgctatttctgtccttgcagatcctgatgttttaatattagatgagccaacagtcggaattgatccagaactaagaaaaaccatttgggaagaactggacgatcttaaagcaaacggcaaatgtatccttgtgacgacgcacgtgatggatgaagccgaaaaatgcgatagacttgcaatgataagaaatggaaaaataatcgccatagggaccccacaagagctctcaagtaaaacttcatctggcaaactagaagatgcctttttagagtttggagggaaggactaa

SEQ ID NO: 485 - DNA, 723 bp, Listeria innocua
atgaataaaaatgcaagtatactagttgtggaagacgataaagcaatcagaaaattaattacaactacgcttgaaacccgaaattataatttttatacggcggatacaggtaacgctgcattaattcaagtaacaagtagacaaccagatattattattctcgatttagggctaccagacatggacggtacaactattatccagcgagtaagagaatggtcgcaagttcccattattgtcgtaagcgcacgaagcgaagatagcgataaaatagttgcgttagacatgggggcagacgacttcttaacaaaaccatttagtgtggaggaattgttggcccggattcgtgtaagtttaaggcgtagagcttatacaaattccgaattgagtactcaaaatgtctttattaatggagatcttaaaattaattatactttacgcgctgtttatttagcggaaatagagatacatttgactcccattgaatataaattagtaagcttattagcgaaaaacgttggaagggtcctgactcataattacattacacaccagatatggggggactattcgaatgatatcccagcattacgtgtatttatggctaatttacgaaaaaagattgagaaaaaatcggctcaacagcgttacattcaaacccatgttggcataggctatcgaatgctacaggtttctgacaataaggaaaatgagacgatctag

SEQ ID NO: 486 - DNA, 729 bp, Listeria innocua
tgtaagatgcatttgaaaattgcgatatgtgatgatgacaaggtagtctgtgcccaaattgaaagtatgattctacaatatgcgcaagaatctgggtttgatgtcaccattcatatattttatgatggaagttcactaatggaagggattcaaaatgatgataattttgatttaatctatcttgatattgaaatggatggaatcaatggtgtagatgttggtatgacaattagggacaaattaagggatcataagatgcaaattgtttatgtttctggaaaaggacaatatgatcgtcaattatttgatgttcagccattattatttattccaaaacctattgaggaaagtaaactagtaaaatctatcaatttggcaagggaaaaattggcattaacaccaaagttatatcactataaaaaacggaaagaatattttagtgtttggatggaagatatcatctattttgagaattctggtaggaatgtgaaaatcatgacaattgatggcacggatctatttgttggaaatattaaagacatagccaaagaagttctcccatacggatttattcaaattagtcaatcgattattgtaaactataactttgtgagtaaatattctcgtgaggagattattttaataaacaaagaaaaaattgcaattccaaaaaataaaaggaatggcgtaaaggaacaatttttaagagaaagtgataagcatttataa

SEQ ID NO: 487 - DNA, 747 bp, Listeria innocua
ctaatagctaacaccacttcaccttgttgcaataattcaatcgtatccacactaaatgccgaaaaagtcgtgaatgcgccaataaacccagtcccaattccgtttaaaagcaccaatgaaatacgcgatttttccgccaaaaaaggcattatgaaagctaataaaaaacaacctattagattaactgctaaagtcgcagaaggaaaatctccgccgccaagccataaattcatcgcataccggcacattccgcctaacgcaccaaaaatccccacatataaaaaatacatctttaaaaaccccacttcacaaaaaaactaccctgaaatatttacatttcgggcagtcgcctttgtcctatttcttctatactataacgcaaaacattccaattattcaactcactggaagtcgaaggatggtcttcattttttccggatttgcttttcgcggatcactcaaatagatttcatgatgtttccgaatagctccggtgtcgttccgaagcccttctgtttccataaattgatgcatttccgccacagtatgcacttcctcgctgaatggccccacatgcatcatttgcacacattccccttcctcaaaacgaaccaatttcacgcgactcgtatcaacgtcaggctttttcttccttgcaacctctttcgcccactccaacacttcttcggtaacaaagtccggttgtctaagaatcgatgtccaaagccacgcatctctgtcctttaa

SEQ ID NO: 488 - DNA, 747 bp, Listeria innocua
atgaagctaattatcaacgcagatgactttgggttcacaagagctatcaattatggaattattgatgcgcataatttaggtgtattaacttctacaacgttaatggttactatgccagcttttgaacatgcggtagatttatcaaaaaaaacacctacgctcggaattggcttgcatcttaatttgacgcttggtaaacctctaacaaatggagcaactttagtgaatgaagacggcgaattaataaagcctaaatttactactcctgaatatccttacaacgaagaagaggtttaccaagagtttaaagcacaatatcatcgttttacggagtttatgaagaaaaagccaagccacttggatagccatttattttcaacagatatttatccagtcgttacgagtgccgcgaaaaggctagcagaagaaattgggataccacttagaaatcatgatacaaaaggttttgaacatgtcgaatttatgtgggaaaagccgcttgaaatcccgtacggtgaatatgataacttagactatatttatgacaatgcagcttctattttgtgttatgattatgttgaaatcatgacacatcctggttatctagatacttttattctggaaaattcaacattctctacgccacgcgcgaatgaattagaaagtttaatttcaccgagaatgcgccagtttttaaacgaaaataatgtagaattaatttcctatcatgatattccaaaaaaatga

SEQ ID NO: 489 - DNA, 750 bp, Listeria innocua
atggctattgcaaaagaaaagacaatgaacattttagcaagcgtgaaagacatggatagaacgcaatggttgctgactcggcgcctaggcattggcggaagcgatgcgggaatcatcatggggttaaatcagtacaaaacagcatttgagctgtggctagataagacagaccaagttttaccagatgaatcagcgggagaagccgcatactggggcaatcaaatggaagaagttgtcgcaaaagaattcgaaaagcgaactggcaagaaagtaagacgtagcaacatgatgtatcaacatccagagcatgattttatgttggcaaacgttgataggtttgtggttggtgaagacgctattttggaatgtaaaacagcatcagcatacttagcaaaggaatgggaagctgacgaagtaccagcgacttatctagtgcaaatacaacactatttagcggtcacaggtaaaagcaaagcctatgtagctgttctaattggaggaaataaatttatttggaaagaaattgaacgcgatgacgagttaatcaatcaaataattgcttttgagttagatttttgggaaacgaacgtaaaaggacatgtagcgccggcgctagacggttcaagtgccgcagaaaaatatttaaaagatcgttttgctaagtcagaagctaaacaagttattttatcaaaaaaatacaacgaatttttggctgaaagagcaaatttagaacgcgatataaagctttaa

SEQ ID NO: 490 - DNA, 756 bp, Listeria innocua
aacaagcgtaggccatctaagactggtaaaaccaatatgttcagcggcattgcccattgtgctgattgcgggagcaagctgtattactgcacaaccagatactttgagacaaggcatgaccatttccggtgttctgcttcgcaaaaagcggttgacccgtgtacatcccatttcatccgtgctgttgtgctggaagaaatggtactggcgcacatgcgctatgtgattggctttgtacagcggtatgaggacagctttcgggtgtccatcgaagcagaacgttccacggaaatccaaaaagagttaagtgccaagcggaaacaaatagcacagtctcagaagcgtgtagatgatctggatgtattattccgtaaagtctatgaggacaacgctagtgggaagctgacggatgaacgcttcatgcagttgtcaagaggatatgatctggaacagaaaacactgcggcaaatgattacaatgctagaaaaagagattgatcagcaggaacaaaagaccacacaggtagaagatttcattgccaagtgcaagcggtactctagcctagaaacattgacccctgccatcctcaatgaccttgtgatcaaggtatttgtggaagcaccggacaaaagcactggcaagcgcagacaggggattcatatcagttacaatcttgtggggatactgccaccactggaacgcttccagcctgttgtagttgagcgaccaaacaaagaaaaagcagaaacggcgtag

SEQ ID NO: 491 - DNA, 759 bp, Listeria innocua
catgggcggtgtgacaatatgagagatggagaatttatttttaacggtataaatttttatgaaaataatgtatacattcaagaacgaccggaaattccgcgagctgaaagaaatgaaacacttgtagaaattccgggaagattcctcccattgacgaattgggacgggacttactcacctgtcgaatttacattatcattattcttgaaagcgcaaaatacagaaactgctattgatgagtattatcaaatcacttctaaactgcaagactcagtgaaccatctagcgaaattctatttcgatgaaaactattattattctgtaaaattcacagaaataactttatcctatcaaacaagttatatcgaaggtgtacctttcacagcaaaagtcacttgctcgcctctaaaaaatgatttgtcaggtatctatcctactataattgaaaacggcgctaaaatttataaaatgaattctttcatttctcaaccgctcattgaattttcaggttcgggagatattactatcaatgtgaacggaaatgaatttatatttaaaaacttacttcaaggaaattacggaatagatagtgaagtgagagaagtatatcaattgatagataatgcttatgtgtcaataaacaataaatattatagtaaaaatgcgtttccgttttttgatttagaagaaaatacaatttcttggagcggaaatgtttcgaaagtgcaggtgacgacaagatggtcgagcgtaatttaa

SEQ ID NO: 492 - DNA, 765 bp, Listeria innocua
atgcatacaaaccaacggtttcctaacgaatatttacaagatgtattggtacgtttagcccaccattccagtgcgattgaagggaatacgatatcgctcgccgacacggtatctattatcttgcataataaagtgacggggaaagaaagttacgatcttcgggaaatttatgaagtgaaaaatcatgaacaagcctttgcttatgtgatggaagagatagaagcattacgaccgatcagtgttccaacaatcaaacagatccatgcgtatttaacggatcgactgcagtatgatcatggcgagttcaaagcgagtgccaatgcgatacttggtgcagatttccagacggcgagtccacaagagacccccttactcgtgcaacaatgggtagataatgtcaattaccgtttaggaacgcatgaagaaagtttggagaaagaaccttcgaaagacgataagctagaaactattttggagagtcacattgcctttgaacgtatccacccattcagcgacggaaacgggcgaactggacggatggtcatgaattacctattgatggaaaatgattttccaccattgattatcaagtcagaagaaaaggcggtctacatgacgtatctagccaatcaagatgtttcgggcttccatacatttgcaaaacaaaagctggctcaagaaaaagaacgggtagatcagtttagatctacggaaaaagaacaaatccagttgccaaaaaagcaaaaggatgatttagaacgataa

SEQ ID NO: 493 - DNA, 765 bp, Listeria innocua
tctgggtcttctgcttctgggtcagcaagctttggtaaatcgtctaaagaattcagcccgaatgcatccaaaaactcacttgtagtcacgtatagttttgcacgtcctgccccgtccacgcgacctttatcagtaactaatccttttgcaacaagcgttctaatcggtccatctgtttgcacaccgcgaacttcatctacttccattcgggtcacaggctggcgatacgcaatgattgccaacgtttctaaggatgcttgtgataaaactgtattgctcggaacttccactaatttccgtaaaaattccgcatgtgcttttttcgtagctaattggaaagttccagcaagctctagtaaaatcagccctctgtcctcatttccattatatcgttcacttaaaagctctaataaattgagtgcttcaatatgcgtgatttccatgacttccgttaattgttctgttgaaagacctgcatcccccgctgcaaaaagcaagctctctaatacgcctaattgttcttctctgttcacgatagttcttcccctttaccttgcacatataaatctgcaaaacttgctgattgctctacttcgactaattttcgtttcattaactccagtagagctaaaaaagtcacgacaagttgttcttttgtctgttcttcaaatagttcatcgaaacgtaaacggtgatttgtttgttgatgtagttttccgagtacggaattcattctatcatcaatcgaaatttcttgagttgtaa

SEQ ID NO: 494 - DNA, 768 bp, Listeria innocua
atgaataatttagcagtattagataaaaataatacattaaacagtcgtgaagttgctgaaatggtagaaaaaaggcactctgatttactacgtgatatcgaaacttatattagatatatcaatcaaaacgcaaaactgcgttctgatgattttttcagtgaatctacttatcaagctggcaccgggaaagattataagtgctatgaaatcacaaaaatgggctgtgaaatgatagccaataaattaactggggcaaaaggcattcagtttacagctttatttgtacaaaagttcaacaagttagaagaaaaagaaatgcaaactttttatattccaggaacctacgcagaagcacttacacttgcagcaaaacaagctgaactaaatgagcagttaatgttagaaaatgaagtgaaaacacaaactatagccgaatatgaaccaaaagtgagttattatgatcagattttaaaatctcctggattaataactgttacgcaaattgcagctgactatgacttgaccgcacataagctcaataaaatattatacgaagagcaggtgcagcataaagttggtgggcagtggatattatacaaaaaacatatgaatttaggtttgactaaatcagaaacggtcagcatagttcatagtaatggacgtctaggaacaaaagtaaacaccaagtggacacaaaaagggagattatttatacatgaaattcttgaaaatgtcggaattcaggctgttatcgacaaggatatttaa

SEQ ID NO: 495 - DNA, 771 bp, Listeria innocua
atgacaaatttaaaactcttcaattttgaaggaagcaaagtaagaactgtaattcttgatgaagaaccgttctttgtaggcattgatgttgcatcaatattaggttactccaatcctcaaaaagctatgagggatcattgtaaaaaacctgctgaatcattggtgaacgattcgttaggtagaccacgaagaacactggtattaagcgaatctgatgtttatagattagttctaagatcagatttaccaagtgcagaaaaatttgaaaattggttaatggatgaagtcttaccgtccattcgtaaacacggcgcatacatgacagatgacacaatcgagaaggcaattactgatccagactttttaatcagactggcaacgaaccttaaagaagaaaagtccaagcgattagaggctgagcaaaaaatagaagcgcaacgcccgaaagtattatttgcagacgctgtaagcgatacagagggaaccattttaatccgtgatcttgctaagttgatccaacaaaacggtgtagacattggggaaaagcgcttgtttgaatggttacgccagaacggctatctcatttcaagaagaggaacggactacaatcgtccgacgcagaaaagcatggagcttggacttttcaagattaaagaaactgcaattatgagatcaagtggggcacatacagcgatcacagcaaaagtgactggtaaaggtcaactgtactttgtaaataagtttttagaacaatcattagtagcaaattga

SEQ ID NO: 496 - DNA, 771 bp, Listeria innocua
gagagccagagcatgtggaaatgccaccgatatatgatgagcagccatctacaccgccagctagaccttattaatatggaaattaagacaattgcgagtggaagcaaagggaacgcctacgttattagtagcgggcgctcccaactactaattgaatgtggagtaaacttcgacaaaataagaaaagcactaaattttgatttatcggcagtggaagcctgtttaatcagccacgagcatggagatcacgtcgctggcgtcaaaaagatgttacgcacatccagcattaagatatacgcatcagaaggcaccttgtctgctttaaatgttccggacagtcgacaattcattttaaaagaaaaagacgctcaaaacatcggagaatggattattttaccgtttcaaactgaacatgatgcaaaagagccgcttggttttatgattcaacgccataatgaaagactacttttcattacagacagttattttgtaagatacaaattcaaaaacatcaactatttaatgattgagtgtaactattcagcagatattttagaagaaaatgtaataaataaagttatacatcaagttcaaaaaaagcgtgttttacaatcgcatttcagcttagaaaatgtaaaagagtttttgaacgcaaatgacttatcgcaactaagagaaattcacttgctacacatttcagagagaaatggtgatcctgaacgatttaaaaaagaaattcaagctatgaccggcgttccggtttatgtatag

SEQ ID NO: 497 - DNA, 774 bp, Listeria innocua
aattttagttttatgttctcgattattgccctattcctttattggctggatgacgaaaaaaatgttatagaaaaggaggatatcaccttgcatttactcatcataaatggcagtcctcgcaaaagtggtgctaccgcaaaaattttaacctatatccatgaaaaactctgcacaatggattcggaacttgaaataacgcacattgatttaagcaattataatttaaaattgtgtgtgggttgcatgggctgctataaaactggatattgctttattcaagatgatggagtggaaagattacgcagtctcatcgatcaatgcgatggcttgattcttggaagtccaacctataccagcaatgtatccgggtatttaaaaattctaatgtatcgtgggtattttatttttgaacaacttcttagaaataaaccatgtttctctgttatcacttatgagaatgcgggtggaaaaaaggcacaaaaaattctaaatgaatttatacactattctggtggctcggttagcggacattatagaaaaaagctgaatcacggttcagaggtattaaacaaggcaactgaaaaaaccatagatagaaaatgtgcacagtatttggtcagagcaaaaagaacaatgtctttatctgttcttgaaattgtgatgagagctattgtttttcatgtaggacttcgcagacatgcaatgaaaaatccagttcgctataaagcagttattgatcgttggaataacaaaggctatacccagacgagatag

SEQ ID NO: 498 - DNA, 774 bp, Listeria innocua
atgtcaaatttacaaatcttcaactttgaaggaaatgaagtaagaacagtatttattgaaaacgagcctcattttatcggcaaagacgtggcaaaagtattgggatattcaaatagccgcgatgcattaaaacgccatgttttccttaaaaacaagggggtcgtgaaacacgactcccttggaggaagccaaaatttaaccgctataaatgaagcgggtctatatcagttgatttttaaatcaaaactagaatctgctgaaagatttcaagactgggttacttcggaagtattgccatctgtccgtaagcatggtgcttacatgacaaatgacacaatagaaaaagcaatcactgaccctgattttctaatcaaactagcaacaaatttaaaagaagaaaaaacgaagcggatagaagcggaacaaaggttagaaatacaaaagccgaaagtgatgtttgctgaagctgtaagcgatgcaagaggaaccattttaataagagatttagctaagctaatccaacaaaacggcatcgatattggggagaaaagactatttgaatggatgcgccaaagaggatatctcatttcgagaaaaggcacggattacaatcgccctacgcaaaaaagtatggaactgggactgtttaagattaaagaaacagcgattataagatcaagcggagcgcaaacagcaattacagcaaaagttacaggcaaaggacaactttactttgtaaataagttcttagaacaatcattaaaaacaatttaa

SEQ ID NO: 499 - DNA, 777 bp, Listeria innocua
tgcggctttttcaaaaacgaccgatccattttatcccaagggagagttaattgtgagaaatcatacagcaagttttgtagcaaaagatgtaaagatagcattggtaaaaagggaataaatgcacttgccaccaaaacactaaacacattaccaaaattggaactagctgtcattttcaagtattttaaaatattaccaaatacgttacgcccttccataaccgcatcatttaataccgttaaacttttttccagtaaaattaccgagcttgcgtcttttgttatatctgccgctgtatcaacagaaataccaacatccgctttcctaagtgctggtgcgtcattaatcccgtctccaaggaagccaacagtatgtcctgcttttttcagcaaaccaatgatacgcgatttttgcattggggttaatttcgcaaaaatgtggtatttccgtaattcgcgcgtgagttcttcatcagataagtcttcaatatccccgccaagtaaaaatccattcgctggtatgcctacttcctcacaaatccgtttcgtaacgatttcgttatctcctgtcaaaaccttcacgttaatttggttcttaaatagctgtgtaattgcttctttcgtcgatgcttttactgggtcgcggaaacctaagaatcctgcaataatcatctgttcttcatcttttttagtgaatgattcgccggcttttccagttttatacgctactgcaattactcgaattcctgagcgattcatttctgcacacatttcttga

SEQ ID NO: 500 - DNA, 780 bp, Listeria innocua
gcagggcctattaaaaatgaaagtcgaggggactatatgaatttagttaggtgttgggaatgcgagcaatatatttcgcaggaagcttccgtacatttcagagatttgtctggcggtagaaacttatgcgttgaatgccaacataagtatcgaaaaaaaatagaagaaaagaaaaaagaatatattgcgcacaaaatcgaagcaacacttgaaagagcaatacatcttatagaaatgcaagaatgctgtagtatgaaaatggatgaataccttgacccatataatacagtagcccaattttatagaaatgacagtagcaagtttgattctgcccatgaagtaatggcttgtatcgaattgttaagaagtcagattaaagtaaaaacacaacaaagaatagggcgcaaacgagtagattttattttgccagacatgaaggttgtattagagattgatggagggcaccatcgttttaggattggtaaagattcagaacgagatgtgtttatccttaatactttgaataaatctgaacacggttgggaaattattagaataccaactagatttattgaacaaaatattagacgtcttgttccttctattaaagcattatataaagaacgtcaagaactaagaaacaaacataatgggttcattccgtcttattactcaagaacaaataagatgtctcacatatcagcgattaaaggtgttgcttcagataatgaaatcgaagcaatggaacatgaactgttagacggaactgagcatctataa

SEQ ID NO: 501 - DNA, 783 bp, Listeria innocua
caagggcctcccaaggtggtagagatgatgaaaaatgtgagttatgaagaagcacgagatacaatcagttccaaagaaatagaacagattaatacaatgaaagaacatacatctagctatataggtaagataatggtgagtattttattcgccttattactatgtttaccagcaatcaattattatccaatatacccagcagtagcttgtattcttataggtagcctgttaattagatatgttgcgttacaaccaattttcaaagtaacaaactataacttggtattatatttagtatggcaaactgctgcaatcttttttatgattgtttttttacgagtagaggcagatagatatcacttgattccgttagtttatattattttgggctacggaggttctattttattaattcgggctcgagtaaatacatatgtgaaagagatatttgaaacgacagctaaatctggaaaaaaagtgttttcaaacataattactaaaattttaggagcttttctggttcttgctgtaattgctgttttattttatcgtggaaataaatggtggcttatgaatatggataccgcagtaggaaattcaagttttttagaatatgttgtgtggggaatcggtttgttcattttgcttattggctttactttgttgccaacattgctattttcgccatctcaatatgtaaaagcaagattgattgggaaatatgcagaggaatttcgaaaagcttatagatttacggagaaagaatggtacggagaaaaatag

SEQ ID NO: 502 - DNA, 786 bp, Listeria innocua
gttgaagcaagcggaggagcaaaaatgagaactgtcttaataacaggcactaccagtggtataggctatgcactaagtgagctttttgctaaaaaagagtgtcatgtcattttggtatcacggaatgctatgaagctatccgcacaaaaacaaaagctggaaaacggaaataaccgtattgataccattacatgtgaccttgaacagactaatgctgctgaaataatatataaatctattaagcagaacggatggcaagttgacatattggtaaataatgctggctttaatgaagcagggttattttctgaaacagatgccacatgcgaacaaggcatgataaatttacatatcaattttgtaaccgatatgatgaagttgtttattcctgaaatgattcagaatagtcatggacatatattaaatgttggttcaaccggctcctacattgcttgccctaaagatgctgtctatgctgcttcaaaagcgtatatccttcatctttcaaaagcggttcatgctgaattaaaaggcacaggtgtcacagtaacaacgctttgccccggctcaacacgcactgaatttgcacataaagcaaaaatagaacacacattattatttaagatattcgttatgtctccccataaggttgcgttgtccggcttgcgtgctatggaaaagggcaagtctgtcataataccaggtctttataataaaattttagttttatgttctcgattattgccctattcctttattggctggatgacgaaaaaaatgttatag

SEQ ID NO: 503 - DNA, 789 bp, Listeria innocua
agggggtggatgaaactgactaattatcaagaaattaatcaagatttcaacataattgattcaaaagcactttttatatcagatggggaaaaggtgctttttgcagaaaatgaaaaccagctttttactgctgcaagtgtcatcaaactaccgatttatttatattttttcgaaaaaattgccaaaaaagagttagacttacaaacggatttccaaattccaagcgaaaaagtagtagctggagcaggaatcatccaaatacttccgcaaaaaagaatttggacactggaagaattactgcatttaatgatagctgtttcggacaatacagctaccaaccaattaatcgagctagcaactatcaccaaactacaatcatggttacgtgaaaacaactgggaagatggaattcagctggaacggcaaatgatggatttcacgaccgtaaagcaaaataaaatcagcgctaaggcagccgtgaccattttccaaaaaataatgatgcttagtgaagcttatccagacttaaaagaaactatccggcgtccgctactaaatcagcaatttcgatccaacctagtgggcacgttggaagaagccggaatttcggggcttcaaatgttaaataaaacgggcgaactaaaaaatatccagcatgatgtggccgtttttgagtataaaggaaagaccagatttgcagccgcactgacgaataacacgggattagaagcgaatgcgacagcttggatgcagacagtcggcaaacaattattttctgagatgacataa

SEQ ID NO: 504 - DNA, 795 bp, Listeria innocua
aattacaagattacaaacaaaaaggagattttcatgggagacataaatattcagcagatgatttttcaatttattggaggacttggaatttttcttttcggtataaaatatatgggggacgggctgcaaatggcagccggcgacagactccgtgatattttagataagtatacaacgaatccttttatgggtgtacttgccggaattttagttactgtattaattcaaagtagctcaggtacaactgttttgacggtcgggttagtaagtgccgggtttatgaccttaaaacaagcaattggtgttatcatgggggcgaacattggaacaaccgtaaccgcctttattattggtattaagttatccgagtattctttaccaataattgctgtaggagcagtacttttattcttctttaaaaatcataaagtaaaaaatattggacaagtattctttggatttggtgcgttattttatggactggatttgatgggacaagggatgaagcctcttgctagcatggaagctttccatgagttaactgcgcaaatgagtacgaatccattcttaggtttgttaatcggaacgatctttaccgcggtagtgcagcttcaagtgcgactatcgggatattacaagagctatatgggcaaggtgcaattgaccttcaagccgcattaccagttttatttggagataatattggtacaacgatcacagcggttcttgctgccattggagctagtgttgctgctaaacgtgcagcagcgactcatgttattttcaacttattag

SEQ ID NO: 505 - DNA, 798 bp, Listeria innocua
ttggcaggaatgaagaacaaagaaatagtagaaaaatatggcatatctccgaataccttgaaggcgtggattagaagatatggttggaaagatgaaaaagaaaagggtgcatccaaaacaaaaaaaatgggcgcaccctttggaaatgtaaacgcaaaagggaattcgggcggtggggcacctttaggcaataaaaacgcgataggtaactctggcgggggtgcaccctttggtaataagaatgcactttttacaggagagttcgaaattattgatcctgattactttagcgatgaagaaaaaaaaatatacaattctctgacagaccaccccctagcccacgctaataatatcattaaagatgaatatattcggaaaagaagaatgatgaaacgactaaacgaattagaaaataatttgtcggagtctgaaaaagagataaaaaaagcttacttaaaacaagatataagaaaagttattgaaagagacggacagaaagcaattatgacagttcctgagctagtacttgttgaacaaaaagaagaaactaaacgtaagatagatgatgttttacggctagaagaatctattacaagacaaaacggtgttttacttagagcattgagagacaagtctgcaataattgctcagctatctatgctaccgctcaatcaagaaaaaacacaaaaagaaatcgaaatgctagaactcgaaatacaagagcttaaaggtatagacttagaaaaaccgcttgaaattagagtctcaagggcggtgaagaaacttggtagaagctaa

SEQ ID NO: 506 - DNA, 801 bp, Listeria innocua
tctccggttattcatagaatcgttatacatgaaggcgtgaatagggagaaaaagcggcatacactgattaaccctatagttttttccagtgtagaatctagtcaggatgcctttaagcaagccgcgcattatttaaatcaggtatacaatttaaaagataccattgtggttacgaacagtgatggcggcagtggctatgaagcagataaatttgaatccatggatggttatagtaagcagcacgagcattttagagacttatttcatgtgcacaaaaagataaaagaacgtttatcctttgataagccaatggccaagcaggtggagaaagctatctatcaatatgattgggatagaattgaaacactttgtgccaccattgaaagtcgtctgattgatcttcccgaagtcattatagaagatcgattggaacagattagaaagctcaaaaattacttatctcggaactgggtttatatcaaaccgtttaagaagcgtgaattatcgattgatagaggcacaggggctggagagacgggtcatcgtctgtatacatatcgcatgaagagacaaggccgaagctggacaaaaaaaggagctagccacgttgtggcaattctcactgcagagaaaaatgggcttttacagacagctttaacagctgaaataacagataaagtcgaatcactaggtgaagagattaaaggagctgtccgtcaagcgttaaagaaaatagattctacggccaaacaatccaaacgggttctatcgtcaattatggtccgaaaagcagctttatag

SEQ ID NO: 507 - DNA, 807 bp, Listeria innocua
ttgattcatactaaaatgctaggaggaattgctatgaaaaaatatgttgtcatcacaggcgcgagttccggcatcggctatgctaccgctaaacagtttgcaaaacgcaaaaaaaatctaatcttaattgccagaagagtagctaatttggtgaagttgaaaaacgagattgagaaggaagtacccgaagttgaagtcctaatcaaagcgattgatttaacaaaaatagaccgtttagagaaattattttctgaattggacctttatttcattgaaacgtgggtaaataatgctggtctaggatattatagtgaagttaaaaaccagaacctaactaagactttacagcttcttcatttgaatattgaagcattaacagttttatcggtcttgtatgttagaaagtatcatgaccaatcaggtacacaactaattaatgtttcttcagcaggtggctatacgatggttcctactgcaacaacttattgtgctagtaaattctatgttagttcctttactgaagcactaagtttggaattacgagaaagcggttctccacttcaagcaaaagtattagcaccagctgccaccaaaaccgaatttgggcaaaaagcaaatgatgtaagcgaatatgactatgacaaaaaatttaataattatcatacaagtgatgaaatggcccaatttttactagatttgtatgacagcgataaaatagtgggcatgattgataggacaacattctccctaactttaactgaaaatttgttttcttacgcaaaccaagcctcatctaatcaaaaataa

SEQ ID NO: 508 - DNA, 810 bp, Listeria innocua
aaagcagcgttggaattatcaataaatattctaaatattattgggattcttttagaaataggagtttcaatatatattattatttcagaaaagaagaagagcaagaatcgaaatagtgaagctgaaaatgatttgattcaacaaacgaataatattataaataatacgcaaggagataatgcgtcatttaattatactaacgttcttatgcaatcaaaatatcaagaaagagcgtatcgagaaatattaaatgatttaggagataaaaaagaaaacaagcagaaatctaaatatggaaaaaagtgttcatatttaagaaaagttattaatattgtctgtttgggaataggtggtttttgggcattttattattttgatttaatgaaaataacatctttcaatacctatctattaaatgtgttatttcaaaccatttatacattagccacttttattttgattttttcactttccaattttgttaaattatttctaattcattttaaagagtataattatatagttttacggaaaatccagttattcttaacaactctttttgcactgctaggtgctactatttggctatattttgattggagagcgaatttcagaccattatttaatatgtacactgaaagttcgtattatactttaggtattataatgcttggattagtattttatgtattccatcaaatggcacaaagttttttattaaataatatttgggttcctaaaaaagcagttaaaatattatttgtatctttaatttttagtttaatagcatctatttgtttatttatatga

SEQ ID NO: 509 - DNA, 816 bp, Listeria innocua
atggcaactaacgatgaattaaaaaatcaattagcaaataaacaaaatggagggcaagtagcaagcgcacaatcattagacttaaaaggtttgctagaagcaccgacaatgcgcaagaaattcgaaaaggtactagataaaaaagcgcctcaatttttaacttcccttttaaatctttataatggcgacgactatttacaaaaaactgacccgatgacagttgttacttccgccatggttgctgcaacactagatttacctatcgacaaaaatttaggttatgcgtggattgttccttacaaaggcagagcacagtttcagcttggttataaaggatacatccagttagcactacgcacaggacaatataaaagcattaatgttatcgaagtgcgcgaaggtgagctactgaaatggaaccgacttactgaagaaatcgaactagatttagacaacaatacaagtgaaaaagttgttggctactgtggctatttccagttaattaatggctttgaaaaaacggtctattggactcgtaaagaaatagaagcgcataaacagaaatttagtaaatcggattttggatggaaaaaagactacgatgcaatggctaaaaaaactgttcttagaaacatgttaagcaagtgggggattttatccattgatatgcaaacagcggttacagaggacgaagcagagcctagagaacgaaaagacgttacagaagatgaatcaataccagatatcatagatgcgcccataactccgtctgacacgttagaagctggttcggaggttcaagggtcaatgatctaa

SEQ ID NO: 510 - DNA, 819 bp, Listeria innocua
atgaaactttggatttccgtagatatggaagggataaatggccttcctgatgatacttttgttgattctagtatgcgaaattatactagaggacaaaaaataatgacagaagaaactaactgggtagtagaagaagctttaaaagcaggatatgatgatgttatcgtgaatgatagtcattcaaaaatgaataatatattgatagaagatttacacgaagaagcaagactcatcactggtgacgtaaaacctttttcgatggtgcaagggttagattcaagcgcggatgcggctgtttttatcggttatcattcgcgcgctggtcaaccaggcgtaatgagccactcgatgatctcaggcgttcgtaatttttatattaatgacgtggtaattggcgaatttggcttaaatgcatatgttgcgggagcatacggagtcccggttattctcgtttctggcgatgattatattgcccgcgaggcgaaagaactcatacctggaattgagacagctgttgtaaaagaagcggtatcccgttcgtccgcagtagctttctctaagtcaaaagcagagaaaatcatccgcgaaaaagtggcgctttcgttaaatcataaacaagccgctgtactggtaccgccagaaaaaacagtattaaaaatagagttctgtaattacggtcaagcggagtgggcagcgcttgtaccaagaactaaaatcattgatgaaactaccgttgtgttcgaagcggaagatatattagaagcgtaccaagcgatggttgcaatgacggagcttgctatgaagtgcgccttttcataa

SEQ ID NO: 511 - DNA, 822 bp, Listeria innocua
atggccattgattcatatattccaacaacatggaatgacgaaagatttgtatatcctgaggattttaccaaatgggagcaacaatttaaaaaaatcgtagatgaaataaatcgtcatacaggtacaaaaaacgatcataatataacaaaagcagatgtcgggctcagtaatgtaaacaattttggcatagcctcgttagaagaagctcaaatgggttctaattcccaaaaatacatgactcctttacttacatcagaagcaatatcgcaattacaatcacttaaatcgataaatggtcgaacaggtgatgttttgctgtccaaaggagatgtgcagttatctaatgttgagaactatgggattgcatctacaaatgaagccaaagcaggtatcgcgacagacaaattaatgactccagctaatgtacttgaatctattaaagagcagtttaatacacaaaatattctttttgaaggggcagcgtggccagcgcctagcacttataaatttgctggcggccaaaaagtttcggatcaaaagctaggactgatatttatttggagtgattatgatgttgttccagggcaagcaaacgtagcaaataattataactttgactttacattcattcctaaatttttcatcaataaacattctggtgcaaacgtaaatgtccctgttgctacaaatttcaatgctcaagtcgctcaaatcacaattaaaacattatatctcactgatacaactttcgcggggcacgatttaaactcaagtggcttaaatgcaaatgatgctattcttagatatattttaggagtgtga

SEQ ID NO: 512 - DNA, 825 bp, Listeria innocua
ttgagatatcattttacttctttgaactttgcaacagaaccagaaaatcaacaactcaaaaaatggattttagagatttatagccaagccaaaaagcgctttggcgctgctaagattcaagttgttttaaagcgtgattatggcgtatccattagtttaggtcgggtttatcgcctacttcgtcaacttcaattgcctaaaatgtccaccgtaaaaccaagctatcaaaagagaaaagtggatgaagcacctcatgactcttgtcctaatcatttaaagcaagcgtttaatccacctgcacctaatcaggtttggacaaccgatttttcttacatccctgtaggaaaaaaaggctttgtttatttatgcattgtcatgaacttattctcacgaaaaatcattgcctggcaagtcgcccataagatcaatacagatttagctcttcaaacactggaagttgcctataaacaacggcgaccgtctcaaactgtcatgattcacagtgaccgagggtcacaatatacagccaaagcgtatcgcagatggttagacgagcatgatctgctcgcctcttattccaaaaaggcttatccttgggataacgctgtcaccgaagccttctttaagtatatgaaaaaagaagaactagatcggcgagctttttcttccattcaagatgtgcaattagcttgttttgaatatattgaaagcttttataatcggcaccgtcctcactcgactattaacatgctaactcctgaagaaaaagaaaattttttatttcagcaatcagtaaatgattcttttttgtgtctactttattga

SEQ ID NO: 513 - DNA, 825 bp, Listeria innocua
atgtatggactaatatttgagcgacaagatggaacaaagtacatcactagagaaaataaagtcgatgtgaaagaatttaatgttcctggtcccaacttcacaactgaaagagtatccatggaaacatttgacggcgagatagacatgggtagtgttttagcaaagcgggatataacttttcaactaatcttagtatgtagtaattacgctgaatacatcttaaaaagaaacgaattcattaaatttataagtgggaaagaagaaatttatgtcatcgatgaaaggcatgaaacggttcgttggccagtaaaagtagagtctttaaatattcagcaaaagggaggagcaccaatctgtgatatcgcgggaacttttgtttgcgcgcaaggtctttctgaaagtgtaggttctactttagatgggtttaaatttagcaatagaaaatggagcctaggacaaaatttaccatcgtctgaaacagcagaatatgtttttgatacaaacaaatttaaggtatataacgcttcagatatagcaattaatccagaaagatacccttttataattcgctataaaggggcatcagagggactaaggataaataataaaactactggtcaagtatggtcttacaaaggaataacaaagcgtacggatgaattggaaattaatcaagtttactctttgcttaatggagccggtatatatggcgacactgaaaaatcaacaattggtttagcccccggatggaatgagattgaaatcatggggagtacgggtcctttagaaatatcgttcgattttcgtttttattattacatgtaa

SEQ ID NO: 514 - DNA, 828 bp, Listeria innocua
tttttgaaaaaaacggtgagatttattgggaaggatgttagtatgatggattattttggggcttgtataggaacacttaaagcaaatattcttattctttttaagtacaagaaaaaccttgtttcggaattaataatgtttactggtgtatatctggcaatattaatgttaaatgatagcagttcagtaactaagttttatggtgcttctgcaattcaggggcctattcttttattaattggatatatgttttgggcattttctgatatggcattatcgagtacggccaactggattagtacggatgccaagatgggactgctggaacccaaagtccaaagtatattaccttatcctgtacaatcatttttgttacttttaatcagtattttagaaacaattatcattcttttggtagttgtccttatttccattttcgctgacaaaattagttggtcgcaagttccattcatttttttatccgtcatcatccttttgccgtctgttataggaatgtttggaatgggtctggtattcggcggttatgcggttaaagagaagagtttaggaaatttcgtaaacttgtttgcgggcgccttaatcattttttccaatacatttatcgtgggtctaccaaaaatcatttatatcataccatttacttcgggcgtggattttacgagtaatctgtatgtttctggcaaagtcgatttaggtctcctaagtataaatttatttattaatacaatttggcttattgtaggactgatattctttaattattcgttaaaaaaagaaagaactgttggtagttttgatactttttaa

SEQ ID NO: 515 - DNA, 828 bp, Listeria innocua
ttgaacaaaaaaacagatttatatttaatgcaagcgaataaaattatcaagttaaacgaaaaacataactttgaaataagtgaagtaagtcgcgctagtcctcaaattatcaataattatactagctatgagtttagcgacggcaatcgttcgagtgatagtaatttcgatagcttcgatattgaatttacttgcagattcaaaacaaatggcaatatcgactatcacgttcgacttgatgaattattcgaggatatttttattagaaaagaatactacattttccatacgaaaaccccgggaaaaaaatattgcgttcatccagcacctttcgatattgataggaaaggtgctgggcatgcgcagtttacgttaagatttgaagttttcaaaggttttagcgaatcgttaggcactagcctttcgccttttgctttcagcgagggcatttggcaagcgggacaaggcattgtatcacaaaattataagtataagcacacatcaaacagatttattgtgtataacgcggggagctttgatattgaccctagaatgcacgatttaagaattactattaagaattgtcgaagtgacggcttactaacaattaacaataaaagcactggtgaaaaattcgtattcaatgagaaaatctacgcttatgacacaatcgaactggacggcagtaacatcttgaaaaacggagtgcgttgcgggcggaaaactaatctcggtcttatttcgttattatccggcggaaatgaaatcgaaatcgagaatgtaagcaatatcgaaacaacgtgggattttccgtttttatataaatga

SEQ ID NO: 516 - DNA, 831 bp, Listeria innocua
gtgacaccaaatcaagaagaaacattacaagttaaaatagagaaccagtcagacgaaaatcaaaaatttaaagtgattgtcaacacagcttcaacgaatcaaaatgggattatcgattacagtttacatgatgttgaaaaagattcttcaatgaaatattctattcaagatcttattacaagtgatttaccaatagttgaggtagcggcaaatagtgagcaaatcgtttctctcaagttgaaaataccagaagaatcatttaaaggtgtccttcttggtggaattacaattgaaccttttcaagatgaaactaagcaagaacaagtaaacaatgtatacacccgtacttttgcgattcaaatatctgaaaatgacgaaccaattccggctaagttagaagctggagaagtttctctttctcagattaattatcacaatgtagtcagtttattaattaaaaataaagcaccaactattattacttcagttgaagcaaacattaaagttactaaaaaaggccagacagagccactgttaaatgaagtgaaaaaagatatgagtattgcaccaaattctcaatttttccttcctgttgagtggaaagatcttttttcagctggtgaatacgagtatgaagtaacattgcatagtcatcagcaagattggaatttcaaaaaagcgtttagtgtgaaagacaaggaagcaaaaaaattaaatgatttatcaattgatgaaaaatcagatagcggaacatatatttacccaatccttgtatttattaaagtagctgttattttaatagctttgtatttgttcaagaaaaaaagatga

SEQ ID NO: 517 - DNA, 837 bp, Listeria innocua
gatttacgagggattttgcaagcgtttttaataatttttgagtggaaagcgtgtaatttgttctccatagagaaacaccattatttgatgggtggtagtataaatttagttcttaacgagcccaacaataagctaattaaacagttcatcttagaagaggagtggattttagtggaagaattatttacatacaaagaatttatcaaaatgatgcaaaattatggaattagacataaaaaacgcaaattaagacgtaatgaaaatgtaatgaccaattcttcaagtccgaatagtgtcattttattaataaaaggttatatatgcagttacacatgcgagtcgcctgaaacactattatctgtttttgagccaggcgtatttctaagttattcgattttagaagatttgccaccgcttgtaacgaatattgcgctttcagaagagtgcattgtgtatgagtatgaaaaagaagacatcgaatatgcattatcgctcttcccagaaaactttggctttcaatatttctttttaaaaaagattggacgtcatttatactataaggctttacttaatgccaaagatcaccaagaaaaattatattatacgattaagtatttaggaaaactcattggtgaaaaggatggaaaaggcaatattgtcttaccaccagaaattacaatcaaaatcttaattgaatacagcaccttatcaaaagcggctttttatagacagcgtatccgtctaatagaagaagaaattttaaagccacataaaaaaactttcttagtcccgaagaaagtagtaaaacactatgaaaaacagctaactagtatttaa

SEQ ID NO: 518 - DNA, 840 bp, Listeria innocua
ttttccaacgttagaaggcgaggtcgatgtttaatgcaatggatgcgagaagtattcgtgtatatcgataatggatcagaatatgcgacgattcgagaaataaatgaagcaagtggtagcttgaaacttaattttagtatacctttctcagatgaaccaaagccttcagagtgcgaagttattatttataatttagcaccttcatctgtaaataaaataaaaaaaggttctgctatatctgttacagcaggatataagggtgatataggtttattatctcgcggaaaaatctcaaaagtatctactgtaccgagtggaacagacaaattaacgacaatcaaattcactgaaggtgtagattatgaagacaaaaaagatgtaaatattacctttaaaaaagggtcgtccgcaaaatcaattattcaaagagtcgcttctaaagcaggaattaaaatataccaaataaatcttccggcaaataaaatttataaatctggatataccgctgacggtgatgctctatcaattattgaagagattgttaaagactgtaaagctgcaatttattatcgacgtggtaacttgattattagatcaattaaaacaggtgatgatgagcgattcttgttaaattctgggacggggctgatatcttccccagaacgactggaaaatgacgactattccggttggagctttcagtcattgctacagcatcgaattgctacagcatcaattattactttaaaatctaaaacagctaatgggacttttagggttaaaaatgggacacatagttatgatggttctacttttacaactcagtgtgaggtggtctaa

SEQ ID NO: 519 - DNA, 840 bp, Listeria innocua
atagaaatggcaaaagtggcaatttttggaggacataacggaacttatgaacaaggtgcgaatggcaatggacttactgaaaaagcagtggcgaaagaaggcgcgcaaatcgcgacagcatatgctaaaagttgcggtcatgatgtaataaatggtttcggcaaatctttatcagagcgggttaaatacgcaaacagtgagaacgttgtcgcagtattggaactacatgcaaattctggaggtggtcaaggaaccgaaacactattttgcgctggtattgcatcagcccagcaagatgcgattgcagttgcgaaagccggatcaataaaaggcctaaaaaatcgaggcgcaaaagcagacacttctacaagacacgggagactagccattgtacgcgatacaaaagcgcaagcattactacatgagctgttcttcattgattcagctagtgatgtagcgatttggaaaagcaataaaaaagccattatagaatcgatcacaaaagaatggttaaaaagacgaggcttaaattctgttccgaagacaacaacgtctaagcccgctcctattaaaccaacgacaccttctaagccggcaacatcaaataacacttataagaataaaaaactagtttctaaagctgctagtttgagattttatagtaagccttcttgggcagataaagatgtggcgggcactgttaataagggtattggcttcccaacagtagttgaaaaagttaaagttggcacggcttatcaatacaaagttaaaaattcaaaaggcgctactttttacatcactgcaagtgataaatatgtagagcttaaaaacaaataa

SEQ ID NO: 520 - DNA, 843 bp, Listeria innocua
cgacgttcagaggttgcaacgagcatcgactggatgattgataatgttagcggaatctcaattcggaatgtcgaaccagcattttcacttgattctacgctgatttttccgccgattttaagaatcgtattacggacaacatctagccccacgcctcgaccagacaaatcggatacttggtctgcggtactgaaaccggaatcaaataataaatcaaaaatttccgagtccgtcattttcgttgattctgctcttgtaacgacatttttcgcaatcgctttttccaagactttgcgtttattgattcccgcaccgtcatcgacaatctcaatcacaacattgttcccactatggaaagcttttaggttaattgtggcggtttcattttttccatttttacgtctaacttccactgtttctgcgccgtggtctactgaattacgaattaagtggacaagtgggtcaccaatttcatcaatgacgattttgtcgacttccgtatcagcgccttcaatgactaaatcgattttctttcctaattctttggcaagcgtacgtaccatttttggaaagcggttgaaaacactgtctaccggtaccatccgcatgttgagtaaaccattttggatttcttttgagatggagctgaatcgccctagatgctccatcaattctttgttattcgttttttctgcgatttcatcaattctcgcccgttcaatgacgctttcttcaaaaacgttcattagcttttcgattttttcaagttgtacacgaatggttttattttctaatcgtttggttgtttgttttgcggcttttttgattggttcaataatctga

SEQ ID NO: 521 - DNA, 846 bp, Listeria innocua
atgaaacaaaaaaatataataattgaagatgaggcatttgcaattagttttttaaaaaaggttcaatattatagactaagtggatactggttatcatattttgaagatagagaaaaagatattttgaaacctggaataacatttgaaaaaatttcttcagtttatttatttgataaagaattaagaaatattttattgtctatgctagatacgattgaaacggaatttaaatctgttcttgcttatgatttttcgcataattgcggcccgttagcttacaaatatgctaataattttaataaaccagaatactacgcaaaatggcttaataaattttatagtagcataagttattctgatactaatagagaactttatattgaatggtataaaaaagaatataacgggaaatttcctttttggattgtagtagaagtttgcaatttcaatgatatttctaagttttatagtaatttacatattaaaattaaaaagaaaatggttaaaatttatggatatgatgcagaatatattcaaagttggttacacacagttgtgttaatacgaaatatatgcgcccataatgggaggctctataatagaacgataacagtatcgccaaaattacctaatgggacggctaaactaaatataaagagaatatttattgttatatttatattcaaatttttgtgcgttgatcaaacagagtgggaaatatttgtaaataaaatagaagaattaatacaaaaataccaagaggttattgaactagaaatgattggttttcctgaaacgtggaaagaaatgttaattgacagagtggtagttaattcgaataactag

SEQ ID NO: 522 - DNA, 846 bp, Listeria innocua
ttgaagaagaaaaagcgattcaaacagaagttgctcatcgcaagtcttgtaatcggattagtagctgtactttcgggttgtggctattcaactgatccaattacaaaagattcaactggattttggagtcactacatcgtgtttccgttatcttgggttattacatggttttccgatttattcgggggaaattatgcagtcggaattattgtcgttacaattttaattcgactactaattatgcctttaatgatcaaacagctgaaaagccaaaaagctatgaccagcttacaaccgaaaatcaaagaactacaagaaaaatactcgtctaaagataatgaaacaaaacaaaaattacaacaagaaacaatgcgcctatatcaagaaaatagtgtaaatccaatgatgggttgtttaccattattgatacaaatgcctattttactaggattttaccaagcgattagtagaactgctgaaattaaaacagatacattcttatggatgcaactaggaaatccggatccatattatatcttgccaatcgtagcagcactaacaacattcttatcatcaaaaatttctatgatggggcaaacacagcaaaataaatcaatcgctacttggataccatcttctttttcaattacttttaccatagctagtcttgaaccaattccgaaaataccttttttaccttcgtctagaacttctacttcgaccttgtcgcgtgttgtttctaaagtcgctaatgcattttggattgcctcttcaacatttgagccttgcgcagttatatctctcactttcttttcttacctccttttttggaagctttcatgttag

SEQ ID NO: 523 - DNA, 855 bp, Listeria innocua
gcattgctcgcttgtgattttgattttagccagtccattcgcgtttcttctggaaaagaaaatggtccgccgagcacttctgttgttgctaaatctccccacaaccattcaatgaaaggaaagtcagctgttgtaggttgttgtaatgtgatttccatgaagttcctccttgtttacttggtagttaaaagttcactaatgaacttgatgattatattttacaatgttatcattaaattcaacataaattcaatcaagcaggtgttcatcatgatatattacaaagacaaacttaaaacaatcggaacagctttaacttctttatcttttattttcttgtttggcttattaactttattgtcaatagaaaaaccagaatcattttactatggtcttattactctattttttataggatatttaattgttaaacttctactcccgccaaaagaatggatccaggtcacaaagaatgcttttattattcacacacgcaacaaaacaaaaacgattcatcttgcaaatgtgaaaagaataagttataacttccaaccttttcgtaggttcttgaagtatcaagttccagaaacgatggaactattctttcaaacagaaaacaaaatggagaaaatcgactgtgcctttatcggccgaaataatttcgttgagttaattaaccaatttgatgccaaattagcttcattaagcgaagatattattgaacatgatcatcgctatccccttgatcttgtatatggagtatttatttttggtatcgtcatgctcttcttgattttcattcttttgtttggacgagaatttctatttgagcaaattgggaaagtttttgtatag

SEQ ID NO: 524 - DNA, 858 bp, Listeria innocua
atgagtttattagtagcaacagttatagggctattatttacctttggcagtgaagattcgtataaaacgactgtaggtgctgattctggtggccaaacagtgactctagcaactgtgaattgggagtctgaaatagcttcaacaaatgtcctggcacaggtgctaaaagaagcagggttcaacgtacaaattacaacagtagacccggccatcatgtttagttcggttgcagaagggcagttggatgctatggtcggcggttgggtgcctacaacgcaccaggcctatgcagagaaatatggtgactcgatggttgatttaggggctaacctagaaggtgctatttcagcattaactgttccaacatatatggaagatatcaattcgattaccgacctcacggatgaaaatgattcaactattacagcaattgaaccaggggcaggtgttaccaacagtgcccaaaatgctgttaaggagtatgacaatctatccgattgggaggtttctgtgagttcaacaggtgctatgattgctgaattagatcaggctatcaataatgaagaggatatagttgtggttggttggaagccgcattggatgttcatggattatgatcttaagatgcttgacgatccagaaaatgtctttggtggctacgaggaaattcattcatacgcaagagaagggctaaaggaagataatccagaagcctataagattattgataacttctactgggaagttgaagatatgtcttctgttatggaagaattagcgacagatgtagaaccagaagaagcagcagataattggattgaagccaatcgtgaaatagttgatggttggttagagtaa

SEQ ID NO: 525 - DNA, 864 bp, Listeria innocua
atgaaaatgaatgaactcaactttattgaaactaaagaatacaagaaatttgccgaattttgtagagcatgcatgaaatataaatatattggcatatgttatggcaatccaggtgtcgggaagaccatttcagcaaagcattatgcaaactggcatagattagaaactattttaactagaaaaggtaatagactcaatccggaattagtcatagataagttaaaagggataaaaaccaatactctatttgtgacagcacctgccactaaacccagttcattgagttctcaattaagcagtcttgcaatagatatagcacacgtaaatgagataatttcaagtacagaaaataaagtaatccctaaaactgatagaatagattacatggcaactagtatagatcgaatcgtggaaaatatattttatgcggttgatttaataattattgatgaaatagatcgtttgaagatccaaacgttggatcttctaagagacatttatgatcaaaatgatgtcggtatggtctttataggaatgcaaggaattgaaaaaagactatctaaatatcctcaattatactctagaattggatttgcacatgagtttaaaaagttaagttcttcagaaataaagcatatattagaatatagatgccaagatataggtctagcaattgattatgaaaattttgaagattatgatgctattaatcgcattattaagctaactaatggcaatttccgattactccaacgcttatttactcaaattgatagaataatggaaatcaataatcttgagaagatatcttcagatgtagttcaagctgctagagagtccctaattattggatttactgaataa

SEQ ID NO: 526 - DNA, 867 bp, Listeria innocua
ggaggaaaaatggatagtatcatttcaaatgagatttttcaaactataaaaagtgaaaatgttcaagaatatttaaatgacattttgattttgatgaatgaggttgataatcataactttaaaatgaaaaaacataaagatatttgggaagttgaaattaatggtgaatttttttatgagtggttatatagtaaaactccagctgagctagtagatttgaaaacagaattttataggcgtatggagagagtaagtgatattgatttagatgagtataaagcttttgagtcttttctaaatgaatctaatcctaagtataaggactatgataatcaatttttatttatcaagaaagataacatcaaagaaatacatgtactatcatctttaaaaagattttattctctaagaagatggtatttggagaaatgtggaaatcaaaaaaatttttataatgatttaccattattattccctaacatttattttcatgagaatgttaaatcaacattaagaaccttgaataatgactttaatttaattcttcccgaaattgtggaacatttatctgctttagaattatttcatcacttgaaattagcgaaagatggagattcaaatattgagaaatgtcaaaagtttgaaaagttttctcaaattagctgtagtcctgaaagtaaaagagcgacagcagaaaaactttcttttaaagatgaccggggagagaaaataaattgtgaatgtcacactaaattcaaaaaaattgcaagagacaaaacaaaacaagataggatttatttttcttttgggcagaaaggttatcaagaagaagcaattattgtttatcatataggaaaacatatttaa

SEQ ID NO: 527 - DNA, 870 bp, Listeria innocua
atggcattaacagaggcatggctaattgaaaaagcaaatcgcaaattgaatgctgggggaatgtataaaattacatcggataaaacacgaaatgtaattaaaaaaatggcaaaagaaggtatttatctttgtgttgcgcaaggttaccgctcaacagcggaacaaaatgcgctatatgcacaagggagaaccaaacctggagcaattgttactaatgccaagggcgggcaatctaatcacaactacggggtagctgttgacttgtgcttgtatacaaatgacggaaaagatgttatttgggagtcaacaacttcccggtggaaaaaggttgttgctgctatgaaagcagaagggtttaaatggggcggagactggaaaagttttaaagactatccgcattttgaactatgtgatgctgtaagtggtgagaaaatccctgctgcaacacaaaacactaatacaaattcaaatcgttacgagggtaaagtcattgatagcgcaccactgctaccgaaaatggactttaaatcatcaccattccgcatgtataaggtaggaactgagttcttagtatatgatcataatcaatattggtacaagacgtacatcaacgacaaattatactacatgtataagagcttttgcgatgtcgtagctaaaaaagatgcgaaaggccgcataaaagttcgaattaaaagcgcgaaagaccttcgtattccagtgtggaataacacaaaattgaattctgggaaaattaaatggtatgcacctaatacgaaattagcatggtacaacaacgggaaaggatacctagagctttggtatccgtcagacggctggtattacacagcaaactacttcctaaaataa

SEQ ID NO: 528 - DNA, 870 bp, Listeria innocua
atgaaaaaacggataattattcttgcagtattagtggtacttcttatcggtggcgttgtaattggagtttatgcaaatggaaacaccgcaaaagataatgaagataaaaaaacaacagcaaaaaaagccacatctacaccaaaagatacaaacaaaacagttgatactgagaaaaaagatacagtaaaagactctgtaacagatgataaaggtgtagtaactaaaggtagctcagatattgaaaaaaatgcaccgacaaaaagcagtggtaattcaacagaatcaaataaaaacactccttcaacaccagcgttttctctatctaccagtggatttaaaacatctaatgtagcatctgtacttggcggaacagtgacaacaacttatttgtccagtagtccgtcatttcaaaaaatctttcaaaatttaaccattgatgttaaccagtacaaagtagaacatgttgttggagcaaacaaatcagtaagtgcgagcaatccagaaagttatttagcaaataaaaatggttacgttattacattagatatttctatcaaaaacacatcttcgaaagataaaatgtataaagccgatcaaattacccttgtaggagcaaatgaatttgtaggaggaagtttagataactttgtaccttctaatttccatcttatcggaagtaaatctgatcccaataacttcgcagccggtaaaacagcgcgtggtctattaactttcacaatgactgaagctgtctataatgatctagcagctgactcgaaactcggtgtaccaaaccctgataaatttgattcaactgtttcagaagcaaaagctggcgacgacgttgttgtttcctttccagtaaaatag

SEQ ID NO: 529 - DNA, 873 bp, Listeria innocua
atggctattaactatgtagacaagtacggtaaggagctcgaccagaaattagtcttcggcacttacacaaatgaattagaaacacctaaccttttatggttagacgcaaaaacatttaaattacaaacaatttcaacaactggattaaaaccgcacactagaaacaaaggatataacgaaggttcagcatcaaatacgaatactccatacactattacgtttgatagagatgtagagttttttgtagatgttatggatgtagatgaaacaggccaagcgttaacagctgccaacgtaacaaaagagtttaatgcggaacacgctgcaccagaagttgatgcatatcgtttttctaagttagcaacagcggctaaaaccaatgggcactctgctgcagaaacaatcactgaagaaaatgtctttcgtacacttaaagcagctattcgaaaagttaaaaaatatggtacacaaaatcttgttatgtatgtgtcaccagacgtaatggctgcattagaactaagtaaagactttactagaacaatctctaatcaaaatattgggccttctagcttagaaacacgcatcacaggaattgatggagttaaacttgttgaagttgaagcagaagatcgtttctatgatacttttgatttcacggatggttataaaccagcagctggagctaagaaacttaattatttactaattaataaaggttctgttatcggcgggactaaacatgcttctatttaccttcacgcaccaggttcggtcggacaaggtgacggatggttatatcaatatcgtgtataccatgatatttttgtaaaagaacaacaaaaagacggggttatcgcctctacagtggcttaa

SEQ ID NO: 530 - DNA, 882 bp, Listeria innocua
atgaagaaatggttgtttgtttttttatgtgtttgttttcttagccaatgtttaagcagaacagtatttgcggaagagtctgatcaaaagattgcctatttataccaaaaagggatagcagagggaaagatagcgagtaaacaatatccttatgatgcgtttaaagaaaattatgaaacaaaccaggttacctattcagcactgaaagatgaatttaatacaagtgattcttatgacgaatggttttctgaaagttataattatggtgcttttcctgatggagaggggcatgcgaattctgagttgaaaatagaacaacgaagtactacttctaacggaaacaggttgaaagcagcaatccaaaaaggagacatactaatagttggtggtggagtcgggcatgcagcaattgcaacaactgataattatattttagaaatgtctgggagccaaaattttgcaagttggttcataggtgggatttcaaataataaccaccaattcacaaaacaaaactggatttttggtacatccaatgaacaaggtgcttcatctgctccacacattgcgaaatggattcaattatggcgaatgccaaaccaagcgatggctaagcagtgtgcagactatgcagacgccaaattttggagtagtacacatagttatactaaaaatcgccatattacttataggcttacttctggaacactcacaacggatcctaattactgctcgaaaatggtattccaatccttttactttggaagcggatctgcaaatgtaatacaaggattttctgcggctttaacaagtattcttccaaacgctttacctaatctatttacgaataattttaaaccttataaagttggaacctattaa

SEQ ID NO: 531 - DNA, 885 bp, Listeria innocua
gtaagtcccgtcccaattcgtcaatgggaggaatcttcccggaatttctacaagtgtttcatttctttcagctcgcggaatttccggtcgttcttgaatgtatacattattttcataaaaatttataccgttaaaaataaattctccatctctcatattgtcacaccgcccatgctactatctttccgtcttgtttgttcaacaagaattttttgcatttctttcttcattaaattaatcattgacttgtccacattgccattcacattgatagtcaaatcgtatgtgtctccaccactttgcggcattgtgtcagcaatcattttccctatcgtgcctaaattttttgcgtttaacggcaacacagcttcttttccagcttctccgccgaccatggcagaacttccattcatgccaaacatggtaggttttgttaaaattccaccttttgcgtaccaatctacatctatgcctgacgggaattttatctccttaccgaagaccttttttgtgcttgtttttaaactgaaatgtggtaagtcgggcattgatggtttaggaatttttaaaatcaggtttttgaaaaatcctttaattttatcaacaattcttttcacactgtcttttgctttttcaatcggatcaatgattgatttttttattgaatcaaatttttctttaactgccctttttgcgtcatcaaatttttctttaatagaagaaaccagattactgattttctctcttactttattgtacgcttcgacgatagggtcaatcattctttgtttcaacgctgcccatgcagcttttgtaatagctttagcaaactcccatttttcttttatccaatttgctaaatcagtaaatttttgcctaacgtag

SEQ ID NO: 532 - DNA, 885 bp, Listeria innocua
ataatggagttaaaaccaccgctgaagcagatgaacaagaaaaaaactggaatggtggtgctaaaaagaatgcgcgagcagaaccagcaaaacaagaaattaaaatcagcgaccaatataatttcggagctacaagaacggattgatagacatacgcttaccgaagcagatgagcaaaaaatccgaaaacagattgcaaaagaagatgccgagctggcagctaaagcacttgactctgatagaaatcaccagttaaacaaaatattttctaatagcatgattaataaaaagcttgaaaatgcgagttttgaaaactatcacgcagagaacgaagagaatgcaaaagctctagcagtttgtagacggtttgtagaaacgtttaatcttaatcagcctagaagcttgctactaacaggtgcatatggtgttggcaaaagtcatttagcggcttccattatgcgagatattagtgaaatagatattgtactaaaaagagacaatgaacgtgatgtcgtgttaaagacgagaaaaccaacgatgatttttattaacacgcctaagttattaacaaaaattagatcatcttttagtaagacgagtgagtttactgaagcagatttgttaaatgaaatcgaaagcgtagacctcctggtcttagatgattttggaagtgaaatcaaagaagcaaataacgattttgcagtacaaaagattttcgaaattgtagaaggccgtgttgggaaacacactgtttatactacgaactttaacgtagatgaactttttaatttctatggagaacgtaattttagcagaattatggaagatggaaatttaattcaaatgtcaggagaaaattatagattgcgaggatttaaaaaatga

SEQ ID NO: 533 - DNA, 894 bp, Listeria innocua
atgggttacaaggaatacactactctcgaagaattgaaagatacgtttgcagataatacagaagtctatgcgaaagcaaaagcagtgtttcttcaaaaagatagacccgacacagtggcagtcatcacttacgaggatacgaaattactagaagccgctgaagcgtacttcttgaagtcgtggcattttgctttgcttgcagagtttaaagctgcggatgctcttgcgttatcaaacttgatcgaagaacagaaatttaaatttgcggtgttccaagttacagctgtcgctgatattacaccacttgcaaaaaacacacgtactatagcaattgttcacagcaaaactggagaaaaactagatgcagcgctaattgggaatgtagcaagtttgccggttggttccgcaacatggaaaggccgtcatggacttgcaggaatcacatcagaagagcttaaagtatctgaaattgatgcaattcaaaaagctggaggcatgtgctatatcgaaaaagcaggtattgcacaaactagtgaaggaaaaactgtttcaggcgaattcatcgactccattcatggcgatgattggatcaaagcaacaattgaaactcgtcttcagaagctgcttacagaaacagacaaacttacttttgatgcacgaggtattgcgctgcttcaaagtgagttgactactgtcttaaatgaaggttttgcgaacggaatcattgatagtaatgatgagacgggggagcccaatttttctattactgcgcttcaacgttcagatttaaatgatgacgatattgctaaacgaaattacaaagggctatcattccgctacaaacgttccggggctattcattccgtggatgtatacggcgaagtggaagtataa

SEQ ID NO: 534 - DNA, 894 bp, Listeria innocua
ggaggaatagagatgtcgagtaataatattaattcaattatcagcaagatacagcaaaaaaatactgctactgttataactgttggaaattataaaggaggagcaggtaaaacaacaaacgttgtattacttgcatataagttggcaaagaaaggcttaaaagtatgtgtattagacttggaccctcaaagtaatgctaccaaaagtttattgctaacaaaatccagtttatatcaagatgaagttgtaactatagaaaagacattaatgacaggaatctctgaaaaaaatcttgatggccttgaagtgaaaattatggataacctttacctcttaccttcgtatattgattttgaagatttccccaaatatctatataaaaatacgagcaatcaaagagaagaagactattatttaaaaaatatctttacccctttacaaggtaagtacgatattgtactaatagatgttcctccaatgtctaaagcagtcacaagaaatgcagtcatatgttctgattatgttttaatttcattacagactcatgaaagatctttgagtggtgctgaaagttatgtagaagaattaaataaacttcataatgaatacgacttggatttagaggttgtgggcgttttacctgtgatccataagaataatggttcagtagatcaatatgtaatggaagtcgcaaaagaaacatttggtgaggacaatctctttgaaaacgttgttccccaaatggagagaattaaaaggtttgatgtcaacggtattacagataaagatcgtcatgatcaaaaagtactaaatttgtatgataaagtttcagatgaacttttagatagaattaattactttgaagaagaaaaagaaggtgctattaatggataa

SEQ ID NO: 535 - DNA, 900 bp, Listeria innocua
atgggttttaatccagatactacgacaatgcaaaatgcaaaaacaggttctattccgattaacatttcggaaaaaattgttacaggggtaaaaaatggttcggcggcgatgaaattagctaaagctgttccaatgaacaaaccggaggaagagtttactttcatgagtggtgttggtgctttttgggtagatgaagcagaacgtattcaaacaagcaaaccgacgtttactaaagcaaaaatgcgatctaaaaaaatggctgttattattccaacgaccagggaaaatctaaactatagcgtaactaacttctttagtcttatgcaagaagaaattgcagaagcgttttataagaaattcgaccaagctgttttcactggtgtagagagtccttacaactggaacattcttaaatcggctacagatgcaggtcatttagtagaggaaactgttaataagtatgacgatttaaacgaggctattggtttaattgaagctgaggacttagaaccgaacggaattgcaacgattcgtaagcaacgcgttaaatatcgcagtactaaagatggtaatggtatgccaatttttaacactgcaacttcgtctggtgtagatgatgttttaggccttccagtagcatatacccctaaatatacatttggtggtaaagatatttcggaattagttggtgactggaatcaagcgtactacggcatcttgcgcggcattgagtatgatgttttaacggaagcgactctgacaactgttaaagatgaaaaaggtgaaccaattaacctagctgaacgtgatatggctgcattgaaagctacttttgaacttggattcatggttgttaaagatgaagccttttctgttgttcaaccaaaagcgggaaactaa

SEQ ID NO: 536 - DNA, 903 bp, Listeria innocua
acatatttccctaattctttacctaatgcagttccagcaaaagcgccaattgccccaccaatagctgtacctactccaggagcaatcatagttcctattgcagcaccaccagccataccacctaaagaaccaccaaagccaccagttttttcacctgcattatttttgttcataccaatcaactcagtagcgcttaatcctacacctaaaacacctacaccgctagccaacttaccgaatttacccatgcctttgagtcctgcagtagctttgctgaaaagtttaactttcccttttccttttcccccaggcaatacaactccgccaccgccattgctggttgttcctatagttgacatcgcaacatttgcttctgtcgcaccagccgcagcgctcggtccaatgttcaatagtttgctgttcatttttccaatagcaactgttactttatcgatagtatttttaactaacttaaaccctaaaaatccggctacaccaacagtcgcatacttagcaatccttttcatgctgtccggattttcacgcgtaaacttagtaactgctttaaaagcgggaataacagtagtgtttaatactatgcctaatcctttaaatgctaaaactccaccctcgatgaaaccgggtcccatacttttcgctaattctttcgcacttgggataaggtcttttttgaagaaatctccaactgtttcgaatacctcgaaagccggcttgaatttctccttcatcccctttacagctccaggaatatcagaaagttttttcgtgaaatcactcgcttgtataattagcggtgtaatgattggtagcaagaactgtccagcatttgatgctagctcttttactgattcagaaaatactcggcttgcgtttgcagcttga

SEQ ID NO: 537 - DNA, 906 bp, Listeria innocua
atgcaaggaaaaattacagcaacaattgaagcacgtgacttacaagctattgacaatgttatttatgaaccgaaacaagaagaattaaccgcacggagcgtattcccgcaaaaattcgatgtgaacgaaggtgcagaatcgtattcatttgatgttatgacacgttccggagctgctaaaataattgcgaacggagcagatgaccttccacttgttgatgtggacatggtacgtaagtccgtacctatctattctatcggtattggattgtcctatacaatccaagatttgcgtgctgctcgtatgcaaggaactacagtagacgctgcaaaagcgacaacagttcgcagagctattgcagaaaaagaaaactctattgcttttagaggagaaaagaaatatgcaatcaaaggggcatttgaagctacaggcattcagattgatgtatctccgacaactggtgtaggaaatgtttccaaatgggaaaagaaaactgcagaacagattattgatgaaattggcgaagctcatactaaaattactgttttaccagggtatggtacagcttcactaaaactatgcttaccaccgaaacagttcgaattaattaataaaaaacgttacagtaacgaagattctcgctctgtactgaaagttctacaggacaatgcttggttttctgctattgttcgtgtgccggacttagttggtattggtactgcaagttctgatagttttgcggttattcatgactcgaacgaaacagcggagttaattattccgatggatattacacgtcatccagaagaatattctttcccgcgcactaaagttccgtttgaagagcgtacagctggagtagtggttcgattcccagccgctattgttcgtgtcgatggtatttaa

SEQ ID NO: 538 - DNA, 906 bp, Listeria innocua
atgaaaaagagaatgtattgtttagtgatgcttcttgcgttcgtgttgttggttagtttatcaaatcaacaagtagcagcatcagaaacgggaaatgatgataaagaaattcaaacattgtatcaaaaagcgattaatgaaaagaaagtagatcctaataagtatacctttgaggcctttcaagaaaattacaacttgggaaaaatggattattatgcgatgaaagatattatcggatcaggactagattataataattggtttggagagattatgaattatggtgcttttccggacggtgaaggccattctccttcagaagctaagtcaaataacatgttgcgtagtcaaacatcaaatggcaataaattagaaaaggcgattaaaaaaggtgatatattgattgttaaaagtagctcctttggacatgcggcaattgctactagtaacaagtatattttagaaatgagtggtggaggaaatccttcgaaatgggcaactacggggattaaaaataataatcaccaattgaataagcataaatggatttttggaggtaaggaacaggattatataaaaaaaccgactatcaattattggatacaactatggcgtgttcctcaatcgagtattgctaataaagccgctagctatgcagacaagacctattggaatagtaaccataaatacgaaaagaataaacatattacctataatttaagatcggggactctaacaagaaaccccaattattgttcaaagatggtatatcaagcatattactatggaacaggtaatgcaaatgttattgaaacagcaacaactggaatgacattcgtttccccagcagctattccaaatacatttactggaaaatatgctcctaaaaaggttggaacatattga

SEQ ID NO: 539 - DNA, 909 bp, Listeria innocua
ataagacttctaaaagcaatatctgttagtgcagatattgcttttttgttatgttataatgaaggaaaaatgaaagtaggtaagtccatgaaacaactttttgagatacttcctagtgagtgggcagaaaaattttcaaaaacaatgaaagaacgtattgagttaagctttacaaatgaagacgtgatttctttaatagaaagtaaggttggtgggagaggatatttgccgaaagaacaaggttatccagtgaatgaaggaggagaaccacttttctttttagcgcaaataaattttgcggaaatgccgcaaatcgagaattatccaaaatcaggaatacttgctttttatgttgattatcatgatgacttatacggtcttaattttgatgatcagacagaacaaaatggttttcgggtgtttttctttgagaatatagacagagagagcatgactgcagaagaacaagctgtttattttgaaggtattgataaatcagccctttatactgtggtcaaaggggagtataaacttgctggtcgagtaacgaaagagcttttgatgaatgatattctagagtttgagaaagaatttggcagtggtttttatgacatcatggagcaaatttttggtgatgatgaagacaaagcgaatgagctatttgaccttgcaacatatagtagtcaaattggtggttttccgttcttcacccaagaagatccgcgaatgcgtacagaaaattcgtatcacgacacattgctgtttcaattagatagtgagtacagtgaagagccaggtgcccaaataaatatcatgtggggcatgagtggagtcggcaacttctttattaataaacaggatttaattaatcgggatttttccaatgttatttttaactgggattgttaa

SEQ ID NO: 540 - DNA, 912 bp, Listeria innocua
atgtcacatgggtgggttaaattgcatagagatttgaaagaaaagcctatatggagaagctctacacccgagcaaaaaaccatccttgtgactttgttaatgatggcaaatcacaaggaaaacgagtgggagtggatggggaaacctttcaaagcaaaaccaggtgaattcgtcacaagtattaagtcaattacagaggaatgcggcaaagggatctcttcgcaaaatgtcaggacagctctaaaaagatttgaaaattacggatttctaacaaaggaatcaacaaaggtaaacacccttataaacatagtgaactggggcgtttatcaagaatcggaaaataaatctaacacacttgctaacaaacagctaacaaacgactcacaaacagctaacaaacagctaacaactaacaagaatgtaagaactaaagaatgtaataaaaacaacaacaacagcgatttaaatttcaaggatttttgggaacaaaatggattcggaatgatgctaccgattgagcaagaaaaactacttgcatgggtagatgatttttctggtaatcgagaaatagtttttaaggcattggaagttacttctgaacaaggagcgaataaacgtaattatgcatacgttaataaaattcttagaaactgggaagaaagaggatttaaaacggttgctgatgtgaatgcggcagaagaggaaaggcgaatgcaaaatgaacagaagtataacaagcccgcttacggcaaatacaacaagaatcagaaacaagaagtcttgccggattggtttgatagcgaggtaaaaccgcaagtatcgacatcagaatcagaatcaagcgaagacttagaaaagaaagtcgctgaaattaaagcgaaattagcggctagaagcgaggtgcaggcgtga

SEQ ID NO: 541 - DNA, 921 bp, Listeria innocua
aaacaaactcaacacaagacaggtggtgacagtgatatggcaaggaaacgcgacccacgaagaattgaagcgaaaaatatgtggcttgaatccggcggaaaaatgaaactggttgatattgcaaataaactaggctgctcttctaatcagatacggaagtggaaatcaacagaaaaatggtccatcgatgacgaaatagagagcgttcctaaatcgaatagtaacgttactaatgaaaaggaacgttaccataagttaaaagggaacagcaacgcaatcggtaatcgcggaggtgcaccaccagggaatggtaatgcggttggtaacgttggcggtagcgcaccaattggcaataagaacgctgttaccacaggggagtttgaaacgttgtcctgggagtttttaacagaaagagagcagcagttgtatgagagcatggacggcaatttagtaactcacattaaccaaactatccgtgagttagaaattagaaaacggcgtatgatggaacgcatcgcaaacattgaaaaatcaatgtctgatattgaaagaagcacgcttaaacagctaagagaaaaggagtacattggtgagaagaatggaaaaaaggttgttcttcacagacaagagctagtaaccgttgaggagcgcgaaaaggtaactgctaaaatcgaccgaatactaagtcttgaaaactcgttgaataacgtcactaaccaactaatcagagcaattaaacaacaaagcgacctagaacaagccgaattaaaaaaaggtcttatacgctctcaaacgagcctaaatcgcgagaagctatataaaccagatgaagcaaataaaagtaccgcagtaaataagcctgacttctcgggaatgagtacagaggagttgaggagttatgcagcaagccttagaaaatga

SEQ ID NO: 542 - DNA, 924 bp, Listeria innocua
aaatacataatttcagttttatgttcactatattcacccccaaaaaacattataattattttactacattggaggagagctattataaaaacatatggagctgctattcgtcaaatcagaaaaaataaatcactttctcaatcgtatgtatctaataacattcttgctcgcactactatctcgaaaatcgaaaataacaatattataccaaccatcactacaatagagaatatcgtcattaaattagatgtaaccatagatgaacttcggtatattaaaaatgattataaattaaacactcgagaagatattattgcagactttttcaaactcgtttctaatacacaaacagaactaatattgaaaattataaatagatgcgataattatttagataatcattttaaagacaatttattagaagatattagaatcgtgttaaaggcatcacttcttttaacaaacaatgaagttgaaaaagcacaaaagcttgttaagccaatctggaagcgattagaaaaaattgataatttctcactgattgagatacgcctcgtgtgtaatattctattttatttcccgctggatgtaatcgaaaaatttgtcccccgattattaacaatgattgataaatataatgctttagataaatctttaaatccgctaaaattagctctgcttatcaatactgccactatttttatgcaacataattctaccattacaacaagtagtttaaacgctgctattattattgctaaagaaattaaccgctttgatttattagctagcgcatattatttacaaggtgttaacactaatgattatagcttaataactaaggcgaaaaatattctccttactatcgataaagaagctattctattacaatttgaaaaagaatatttcccagatttacgttga

SEQ ID NO: 543 - DNA, 930 bp, Listeria innocua
cagaagaagatgggattggcattccagcttattaaagaaagtagggataatatgaacaaattagttagtcaaagtaatgcatttctttggaggaaaaatgaaatgaacccggttttagccaatattttagaggctagaaaagaaactgacttggttcaaattaaccaagaagatgcgatgaaattatatgaggatagccttgttgactcagatttgctttataacgactttgtaattgtcgacgaaatcgagggcgactgggcaaaagtagtcgttccttcccaacaaagttttcaagatgagcgcggttatcctggttggatgcttctttctgacttagaagatacagataaaactagcgatactggtgagaaaatcgcagttgttgtgccaaaagcagaaattacatacgaaaatggggaaacgcgcactgtttcatttggcacacttttcaccaaaatcgctgaaactgatgatagctacacgattgaaacacctcatggattagcgaccgttttacgaactcaagtagatttacaacataaacaaggcgacaacattggcatcactgtggtgcaaatggcgatgcaattccttgacttaccatacgtttgggcgggaattagcagtgctggttttgactgttcaggatttgcgtttactctttaccggacatgtggaaaatatatcggccgcgatgccacagagcaatctttcagaggggaaaaaattgattacgcaaacgctgaaccaggagatttgctgttttttgcttatgaggaaggcaaaggggaagtccatcacgtgggagtttacatcggaaatgacgagatgattcattcgcaaacaccaggatccaaagtaattttaactaaaatcgcaggcagtaagtacgaaccagaactttgtgtgacctcaagacatcgataa

SEQ ID NO: 544 - DNA, 930 bp, Listeria innocua
atgaacaatgaaactattatcgaaaaagcatcaatgacattaagcgatttatcagctggcggtcgaatgaatccggcacaagcgagcaaatttattcgtatggttcaagatacacctacaattttaaaagatgcacgtttagttcagatggagtcagatagacaaattattgaaaaaattggcttcggtcaacgtataatgcgtgctgcaagtgaaggtgttgggttaacagaggcagatcgtacaaagccatcaactagtaaagtaacgcttaatgctaaagaagtaatcgctgagataaacttaacatatgatactttagaaaataacattgaaaaacgtaatttaaaagacacgattatgcaaatgttagcagaacgtgcagcggtagatattgaggaacttatggttaatggtgatacaagtaatactacggatagctatcttgctcaattggatggtattcgtaaattggcaacatctcacttggttaataatagttcgggagaaatttccagaacggcatttaaaaatgcgaagaaaattattccggctaaatatttacgttcaccgcaagactttcgatactatacttctccaagcgtagaaacagaatggattgataaattaggcgaccgtcaaacttctcttggggatagtgctgtagaaggtaaaactgctcgtccttttggcattccaattcaatcttgcgcaaatctacaaccatatggcgatggtgcaggtaatgatgtttcagacattattctaactcacccaaaaaatattattttaggaatgtcacggaatattagtattgaggtagataaagatatccgttctcgtcaattcattattgttttaacggctaaattagatacagtgttcgaagaagaagatgcagtttctaaaattactaaggttttggagtga

SEQ ID NO: 545 - DNA, 933 bp, Listeria innocua
atgaaagttgataggcttatgagcattgttttaattctccttgataaagaacgtattagcgcacaagagttagctgatagatttgaagtttcgcttcgtacaatttatcgtgacatagacgcgattgacttggctggtgtacctattcgttcaacaccgggcgtaggtggcgggtttgaaattatgcctgactacaagatggatagcaaggttttttcaacagcagacctttccgctattcttatgggcctttcaagtctttctaacatggtacgcggagatgaactgataaatgctcttgcaaaaataaaaagttttatcccagctgatagagcaaaagaaatcgagctaaaagcgaaccaaatttatatagatttaagccagtggacgggaaataacaacatacaaccacatgtagaaattatcaaagtggctttgcaggaaaacaagttactaacctttgaatatatagctcaccaaggaaataagaccgtaagaatagttgaaccatatcagcttgtaatgaaaagcagccactggtatttgtatgggtattgccaaaataggaatgattttcgtttattcaggttatctcgtatgtctggtctgcaaatacttgaggacacttttacactgcgagattttcaaaagccacagttagaaatggaagatattgtagcaattatgcagatagaaattaaaattcgtattcatcaatccattatcgatagagtgcttgattattgctcttatgaaaatttttatcccgatggtgaggagcattacattgtcagttttccttttatagaaaacgagtatcactatgatattctcttgagttttggcgataaatgcgaatgtttagagccattacatgttcgtgaaaaaatgaagcgtagaatttatgatatagtctcaatttacgaaagttaa

SEQ ID NO: 546 - DNA, 933 bp, Listeria innocua
atgtctagtggttggataaaaatttatcgttctctacaagaacattggatttgggagaatgaaaaatatttaaaatggtggttggatttgctccttttagccaatcaccaagatagggatattttgataaacggagagttaataacgataaaaagaggacaaaaacatacatctgaattatggctttcaaatcgatggaatgcggacagaaaacaggttcgaaagttcttagaactattgaaaaaaaatgacatgataacgataactaaaagtagacaaaaagggacaacgtacgaaatcagtaattacaacgactttcaaggcatttctgaggaaataagaacaacgaaagggacaacgattgacacaacggaagatacaacgaaagaacatcaaatggtacaacgaaagggacataaacaagaattaaagaacttaagaattaaagaattaaagaaagatattaacaacaacagcgatttaaatttcaaggatttttgggaacaaaacggattcggaatgatgcttccagttgaactagaaaaactgcttgcttgggtagatgattttgcaggtaatcgagaaattgtcatgaaggctttggaagttacatcagagcaaggagctaacaaacgaaattacgcttacgttaataagattcttaaaaactgggaaagcagaggatttaaaacaatagctgatgttgatgcagcggaaaaacaacgacagatagagttagagcaaaaatataacaagcccacttacaacaaatacaacaaaccagttaaacaagaaatattgccagattggttcgacaaggctcagaaacaaacgaaacaagaaacttcaacaacagaatcaagcgaagacttagaaaagaaagtcgctgaaattaaagcgaaattagcggctaggagcgaggtgcaggcgtga

SEQ ID NO: 547 - DNA, 945 bp, Listeria innocua
atggctaagaagaaaaaagaaatactattttgtgattattatgaggactgggttgagacttacaaggtaggagctattgaagacgttacgctaaacaaatattatgtggcagcaagacaactacgcgatatttgcccaaaattattgatgtctgattttagcaggaaagattatcaattaatcatgaatgaatatggaaaaacacatgaaaagcaaaccgctaaagatttccaccatcacataaaagcagctattttagatgcttaccacgatgggttactgaaaagcgatccaacttatagggcggttatcaaaggaaaagaaccaggtaaaaagaaagttaaatttctccagaaagaagaattgagaaccttattgcaatctttggatttacaaagtggcattaataatgattggtttctcctgctgattgcaaaaacaggtatgcgttatgcggaggcattggcgctaactccatcggattttgactgggtaaatgccactgtaacaattgataaatcttgggattataaaactcacagagggtttaaaaaaactaaatcgacggcttccgatagagaaatagctattgattggcaaatcgttgggcagttcaaaccattaattcaagatttgccagctaatgacccgatttttatagagaagacagaacgaggaacatataaaaaacagtataactcaacaatgaacaattatttagaagcgaaatgtaagacattaactataacagtgataagtttacacgcccttcgacacacacatgcaagcgtactgcttgctgaaggtgtttcgattcatacgatttcagcgcgattagggcatgccgatgtaggtgtcacgcaagaaatatacgcacatgttttagacgagttgcaaaagaaagatgatcaaaaaatgatgtctgttttaatgcaaattgcgtag

SEQ ID NO: 548 - DNA, 948 bp, Listeria innocua
aatcgaaggggtggagtaagaatgactacagttaacggggtactctttaggcaaaatttagtctcaagttcaaagtataacatcaaagcacctaatactatgaagcccaaaaaagtcactattcacaatacgtataataatgcttcatcgcaaaacgagaccgattactgtaagaacaacaataatgaagttagtttccacgtcgcagttgatgataaagaagctattcaagtcgtgcctttcaatcgtaatgcctggcactgcggagatggtgccaatggtttcggtaacagaaatacaatcggtgtagagacgtgttacagtaagtctggaggagctaaatatatagcagctgaaaaaaatactattaaatatgtcgctggattgtgcgtgcaacaagatattatcgcctcaaaagatactattaaaaaacatcaagactggtccggtaagtattgtccacatcgtatccttgatgataaacgatggccagcagtgcaacaagcaattatagatgagtacaatcgtattacatctaaaaatccgaataggcacagcggacaggtcgttggcagtgcgccactattgccgaagacggattttaaatcaaatccggcgcggatgtataaatcgggaactgagttcttagtatatgagcacaatcagtattggtacaagacttatattgatgacaaattatactacatgtataagagtttttgcgatgttgtagctaaaaaagacgcaaaaggtcgcatcaaagttcgaattaaaagcgcgaaagatctacgcattccagtttggaataacacaaaattaaactcaggtaaaatcaaatggtatgcgcctaatacgaaattatcttggtacaataacggtaaaggttatttggaactctggtacgaaaaagacggctggtactacacagcgaattacttcttgaaataa

SEQ ID NO: 549 - DNA, 954 bp, Listeria innocua
ataatgtcagtactacaatataattatatcaataaaaatcaattttcacgcccaggatataagttgcttagagtaagtaagattgttatgcactatactgcaaaccctggggcaagcgcagataatcacagacgatattttagagatttaaaagagcgttacgcttctgcacatatttttattgatgataatgaagctatttgtattatccctctaaatgaagttgcataccatgcaaacgaaagaagttgcaaattaacagctcttcaagcaagtacaagttactatcgcggcggaaatgcgaatttaacctcaattggtattgaaatgtgcttagataaaaacgggaatatcactgcagcaacatttaatcgatcagttgatgtagctgcagagctatgcaaaacatacgatttaacggctagtgacattatccgtcattacgatgtaaccggaaaaaattgtcctgcgccttgggttgcgaaaccttccgaattaacacgtttcagaaacgcagtcaatgcaaaattgaaaggtgcatcacaaaataaaaacagacatgatggaaaagttgttgacagtgcgccattgcttccaaaaatggactttaaatcgtcgccattccgcatgtataaatcgggaactgagttcttagtatacgaacataatcaatattggtacaagacgtacatcaacgacaaattatactacatgtataagagcttttgcgatgttgtagctaaaaaagatgcgaaaggtcgcatcaaagttagaattaaaagcgcaaaagatttacgcattccggtttggaataatacgaagttgagttcgggcaaaattaaatggtatgcacctaatacgaaattagcatggtacaacaacggaaaaggatacttagagctttggtatccatctgatggctggtattacacagctaactatttcttgaaataa

SEQ ID NO: 550 - DNA, 960 bp, Listeria innocua
ttcatctattattatcttaggaggttttttatgaaagcgagaaagagaaaagaacaaacatttcatgagtattttaaagaatgggtagatctttataaagttggagcaatacgttcaattaccctgcagaaatactatgtaacagaacaaaaaattcaagaacttgtaccagatttaaaaataaaggatctagatcgttatacttatcaacaactgctaaatagttatgcagttactcatgagaaacaaactaccatggatttccatcatcatctgaaaggggctattttagatgctgtagatgaaggtgtgatcagtcaaaatcccacaaggaaaattgtgattaaaggaaaaacacctcgacctaaaaaagcaaaatttttaaatcaatttgaagtacaagccttattaaaagaattaaatttaaaggaggatataaattgggattggtttattctattaatcattaaaactgggcttcgattttcagaagcattagctctaaccccttcagacttcgatttttccaaacaaaaaattattattaacaaaacctgggattacaaaatggttactggttcttttcagccgacaaaaaacgaatcttccaatagaaagattcaaattgattggcaattagcaatgcaattttcccagttaattaaaatgaaagatccagataaaccgatttttgttaaaagcagagtattcaattctacaattaataatcgtttaaaggtgttgtgtgaaaacgcaaatataccaactatcacagttcatagtttacgacatacccatgcttctttactgttatttgctggagtttcaattgcaagcgttgcgaataggttagggcattcaagtatgactactactcaggaaacataccttcatattattcaggaattggaaaatcaagataatgataaaattatacgccatttatcaatgttaatgtga

SEQ ID NO: 551 - DNA, 960 bp, Listeria innocua
atggctattgcaaaagaaaagacaatgaacattttagcaagcgtgaaagacatggatagaacacaatggttgctgactcggcgcttaggtatcggcggaagcgatgcgggaatcatcatgggtttaaatcaatacaaaacagctttcgagttgtggttagacaagaccgaccaggttccgcccggtgaaatggcaggagaagcagcatactggggaactcaaatggaagaagttgtcgcaaaagaattcgaaaagcgaactggcaagaaagtaagacgtagcaacatgatgtatcaacatccagagcatgattttatgttggcaaacgttgataggtttgtggttggtgaagacgctattttggaatgtaaaacagcatcagcatacttagcaaaggaatgggaagctgacgaagtaccagcgacttatctagtgcaaatacaacactatttagcggtcacaggtaaaagcaaagcctatgtagctgttctaattggaggaaataaatttatttggaaagaaattgaacgcgatgacgagttaatcaatcaaataattgcttttgagttagatttttgggaaacgaacgtaaaaggacatgtagcgccggcgctagacggttcaagtgccgcagaaaaatatttaaaagatcgttttgctaagtcagaagctaaacaagttattttatcaaaaaaatacaacgaatttttggctgaaagagcaaatttagaacgcgatataaagcttttagagacacgaaagaaagaaattgataataatatcaagaatgatttaaaagaagctgaaacagccatcgcagacgaatttacgattacttggaagcctgttattacttcaagagtagacactaaacgtttaaaagaagaacatccagacatttacaaaaaattacgtaaagaaactagttatagaaaatttgcagtgaaggagaataaataa

SEQ ID NO: 552 - DNA, 966 bp, Listeria innocua
ggagtgagcagtataaataagttgtttattatagggaacgggtttgatttagcgcatggagttccatctacttttaatcattttaaagagtatcttagatgtacatatttatatgaacacgatgtatatcctagtctgtggttacctgcttctacagattacgatggtgagatatgttataaaattgaagattgtgcacaaataattgattttatgatttgtgatagttgtttaaggattggttctgaagacgaaggagagaactggagtgattttgaaagagctattgggcgttttgattattctttgctagaagaggatatagaaattcaatatgataaggaaggggatataaatccttttcatacgggaaataattatgaagatgcatataatgatttaagtaatgtaatgttaaaattacctgagcttttctctgaatggataaataatatccctattctggaaaattgcttttctgtgttcaatttagataactattattctattttagaattaattgacaaagaacatgatgtttttctaacttttaattatacagagactctggaaaatctatatgaggcagagaatgttacgcacatacatggaaatcaaacttcccctgtgttaggtcacaataatacctcacgaatagaggaacaaagttatcatcaagatacctatataaatactatgaatgaaactttaaagaaaccaacagatagaattattgaagaaaaatcgtatttttttaagaacttagagggagaaattgattctatttattcatacggtttttcttttggagaagtcgatttgatttatcttaaggaaatatttaaacatttaaattctaaaaatatgatatggtatctccatagttatgacagacaacaacataatgagtttaaactgaaaataaaaaaatgcggatttttaggttctttttctgaatttaattga

SEQ ID NO: 553 - DNA, 966 bp, Listeria innocua
aacttttttaggagggagaacatgactaagaagcaaaaagaaatactattttgtgactactttgaagagtgggtcgaagtgtataaagtgggagcaattgcaaaaataacactagctaaatactataatgcagcaaaacaacttcgagatttatgcccaaaactttttatctcagattttgacagacgagaatatcaacgaattattaatgtttatgctgaaacacatgagaaacagaccgtaaaagactttcatcatcatgtgaaagcgtgcattaaagatttgtttcacgatggattaatagataaagacccaacatatcgagtggttatcaaaggcgcagaaccgacacgagcgaaaaaacggaaattcttacagaaagaggagttatcgaagttattacaatcactcgatatgagccaaattggatttggatggttcgtaatgctcgtagctaagaccggaatgcgctatgcagaagctttagctatcactccagcagattttgattggacagcacagactatatctatcaacaaaacatgggattacaaatataacaagggatttgctaaaacgaaaacattgtcgtcagtaaggaccattaaaattgattggcagattgtcggacagttcaaaccgcttataaaagattttccagaagacgaacccattttcgttgaaaaatttggagacggcacttacaaacgtcaattcaattcaaccatcaacaattttttagctgttaaatgcaatgaaacaggcattacacagattagctttcacgcattacggcatacgcatgcaagtgtattgttggcagaaggtgtttcgattcatacgatttcagcacgattaggacatgctgacgtaggtgtcacacaagaaacttatgcgcatgtgttagacgaattacaaaagaaagatgatcaaaaaatgttatctgttttgatgcagattgcttag

SEQ ID NO: 554 - DNA, 966 bp, Listeria innocua
aacttttttaggagggagaacatggctaagaagcaaaaagaaatactattttgtgactactttgaagagtgggtcgaagtgtataaagtgggagcaattgcaaaaataacactagctaaatactataatgcagcaaaacaacttcgagatttatgcccaaaactttttatctcagattttgacagacgagaatatcaacgaattattaatgtttatgctgaaacacatgagaaacagaccgtaaaagactttcatcatcatgtgaaagcgtgcattaaagatttgtttcacgatggattaatagataaagacccaacgtatcgagtggttatcaaaggcgcagaaccgacacgagcgaaaaaacggaaattcttacagaaagaggagttatcgaagttattacaatcactcgatatgagccaaattggatttggatggttcgtaatgctcgcagctaagaccggaatgcgctatgcagaagctttagctatcactccagcggattttgattggacagcacagactatatctatcaacaaaacatgggattacaaatataacaagggatttgctaaaacgaaaacattatcgtcagtaaggaccattaaaattgattggcagattgtcggacagttcaaaccgcttataaaagattttccagaagacgaacccattttcgttgaaaaatttggagacggcacttacaaacgtcaattcaattcaaccatcaacaattttttagctgttaaatgcaatgaaacaggcattacacagattagctttcacgcattacggcatacgcatgcaagtgtattgttggcagaaggtgtttcgattcatacgatttcagcacgattaggacatgctgacgtaggtgtcacacaagaaacttatgcgcatgtgttagacgaattacaaaagaaagatgatcaaaaaatgttatctgttttgatgcagattgcttag

SEQ ID NO: 555 - DNA, 972 bp, Listeria innocua
gtgaataacacgcctatgttgcctccagaaaaaattttaataattgatgaattagtaaagaagaagtactcaaatattagaggactatctatttttcaaaatgaaaatcacgtactagaaacctattatggtcgtaacactaaaaatgataaatttaacgttgcttccataactaaaagcgtcatatccttattaattggaattgcgatcgataaaggttatattcgaagtgtaaacgaaaaagtgatagatttttttcctgaatataaatttactgataacaatgttttaaggaatcagataactattaaaaaccttttaacaatgacggctccatttccttttccaaatatgcgagaacctttaacaagactatgtcggcagaatgattgggtggagtatgcgcttcaaataatggggacaggcgggagaattggaacatttaaatattctacaagcggtgcccatttgttatcagcaattcttacaaaagcaacaaaaatgagtgcacgcgaatttgcaaataaacacctttttgaaccattatcgattgaaacagttcctaatttcccgatgaaatttgatatagatcatgtctttgggaggaaaatgaaaggttgggtttctgaccctttaggaaataattcgggtggttgggggctaacactaactttaaatgaaatgtcaaaacttggacaactatgcctccaggaaggatatttcaatggaaagcaaattattagtaaagaatggctagaagagtctacccgccaagtaaaaaatagttacggatattatggatacctgtggtgggttagagataataaagacgaatatatggcagtgggttcaggtggaaatattatttatataaataaaaataaacggatagtaattgcaattgcttcaactatcatttcgaaacccgcagatagacaagaattaattgataagatactatcaatactatag

SEQ ID NO: 556 - DNA, 972 bp, Listeria innocua
aaaagaaattcaagctatgaccggcgttccggtttatgtataggtggtgatgatatggcaaggcctttaaaagaggggttagattattttccgttagatgtagatgctgattatgatgataaatttcaattaatcgaaacgctacatggaccgactggttttgcaataatgatcaagttatttatgaagatttatagtcaaaacttttactataagtggacagaaacagaacaaatactgttcgcgaaaagagttaatgttgacattaacacactgaaaacagtagttaatgactgcattaagtacgatttgttcgacaataacctttttagtgagtttcaaatattgacaagcctaggggttcaagagagatatttcactgcaattggtcgaagaaaaaaacaaatagtagtactagagtacttgttactagataggccagaagtaataaatttatgtcctaaaatcgtttttgcaaacattaatgttgtaaatgatgacattaacgcggaacaagaagagttaatgccagcattaagtgcacaaactaaaggaaaggaaagtaaagtaaatgaaagtaaagcagtagtaagcgaacaagaaaaactccctgaaaaaattgtaaaagaaaaaccaactactactgcttataaattttgggaagaaaatgttgcaattaccggattatcggaattcgatagagaattgctaaaaaaacttatttctctagggggcaatgagttaacggtacatgctatgaagaaggcaattgaactgaacagacgcagaatgaaaactgttgatactgttttgcggggttggttagataatggagttaaaaccaccgctgaagcagatgaacaagaaaaaaactggaatggtggtgctaaaaagaatgcgcgagcagaaccagcaaaacaagaaattaaaatcagcgaccaatataatttcggagctacaagaacggattga

SEQ ID NO: 557 - DNA, 975 bp, Listeria innocua
ttgttgtttcatatgtttttaaaataccctataatgaagttatggcttcataaaaaggagtgttatgttgtgacaacgagcaaatatgaaaacgaatattggaaacatattttcgccttacaagattatattgaagctcatccagcagagaatttcacatccgaacaattagcaaaaattgctggattatccaaataccactttcatagaatttttaaagcgttaacaaatgagtcgatatttcaatatacaacaagaataaaaatggaatgggcgcttggcttactaatgaatcgaaaggatttaacaataaccgatgtagcatatgaacttggcttcagcgattcttccgttttttctagggcattcaagaaatatttcgatgtgtctcctatagaaattagaaaacaaaatagcaacaattgcaaagagaattttcttacttcccgctataataagcctgtagatgaaaaacaatataatattccaggcaaagtaaccattactacgctacagaatatacctgtcatctataagagaatagtaggttcttacaaggaattagaactcaccaaccctttgagtgaactctttcaatatggaatggagcatgatttacttgataaagattcatcgtttccgttgacaatttaccatagccatcccgatataacaacagctgataatcagagagctagtagttgtattattattaaacaaaatgttaagcagttagacagtgaggaaatcgggcttatggagataccttctgggttatacggagtcattcattttgaaatacgtcaaaaagagtatccagatgcttgggattttgtttacggaaattggcttccttctagtggttatttgccagcaaactcatttccatttgaagtatatttaaacaatccactggaagacccacttcaaaaacatattgtggatatctatattcctattgaaccaataaactaa

SEQ ID NO: 558 - DNA, 978 bp, Listeria innocua
atgatagaaatttttttaataacgtcgactcattggattctattaccagtagaggaggttactctaagtggaaaaagatatcaagctcctcgaaaactagactttaaattgttttatccttatggaacagatcatcaaaagcaaaatgtcgaggaaggaaacacaattttatttagatggaaagggaaagagctttttagaggtattgtttttacaagaaacattactaaaaatgctattgttaccgtaacagcatatgataaaatgcaatatcttttgttgaataaagatgtttacgtttttaataacaaaagactagatcagatagtggcaaggctactatctgatttttcattgccaaaaggaacaattacaaacactggttatatgataaaatcgcttgtcttttcgaacgttacttctctttacgacattattttgaaagctattagtgaaacttataaacagagtggtagaacatatcgtatttatgcaaacaccggtaagctgtatcttgaaaagtggaatgaaccttcaacaatgtttttattagaagatacaaatacagtgacagactttaatgtgaatttttctattgatgatatagctactcgggtaaaagttattttgacgaaggataaaaaaacgctctatggctatgctagtgatagctctgggagaagtaaatatgggttgattcagcatgcagagtcatcgagtgataatttgaatcaagcacaattgaataaaagagcttctcaaatacttagccaaaaaaaaggacgaaaaaaagaagtgacaattgatgcgttgggtgaccctgcgattgtaagtggcatagcgattatggtcaatttaaaaagaataagtattaatcaaaaattttatgtggatagcgattcgcacacattcaaagggaatttgcatactatgtcgctcacgttaattgaagagaataaaattccggaggttcaatga

SEQ ID NO: 559 - DNA, 987 bp, Listeria innocua
accgtttggctaatttacttgtgctattttaaaacaggaggaaaaacgttgaactatcaagttgatgaaaatggaaaaattatgaaccagcagcctgaacaaatcaccgccctgtattgccgtctatctcgtgatgacgaacttcaaggcgatagcaacagcattgtgaatcagaaatcaattctctcaaagtacgcagaagaacaccgcttactcaacactcgcttctttattgatgatggggtatcaggaactacctttgaccgtcccggactgaatgaaatgcttgctctaattgatgaggaaaaagtatctactgtaatagtcaaggacatgagcaggctcggcagggattatttgaaggttggtctgcttaccgaaatccaactaccggaaaaaggtgttcggtttatcgctatcaatgatggcgttgacagtaatcaaggcgtcagtgagttcatcgcattccgcaatgtgattaatgaatggtacgccaaagataccagtaagaaaatcaaagctgtgtttacagcaaaaggacaatccggcaaaccgcttagcaccttcccgccttatggatatatcaaagacccagaggacaaaaatcgctggattgtagatgaagctgccgccgaggttgttcgtgagatattccggctttgcatggagggtaacggccccactaaaattgctcggatattatctgagcgcagggtgctgataccgtctgcttatgcaaagtcaaacggcagaagcgcacctgctgatgttcccgctgatcgatgtaaatggtgtgacagtaccgtggctcatatccttgaacggaaagagtatctggggcatacggtgaattttaaaacctacaaggaatcctttcggaataagaaacagcggaagaacccgaaagaaaaccaaatggtatttgaaaacacccatcagcctatcattgaacaggatgtatgggataccgtccagcagctgcgttag

SEQ ID NO: 560 - DNA, 987 bp, Listeria innocua
atgaacttatccgattatacgcctacattcgcggtagttttaccgggaacaaacgattatgttattgacgatttacattttgatactagcagattgagcgaaggatatttcgagtatactttcgtaaaagaagcgttttccgttccgggcgtatatgatacagcccgttttattttacaaaaagcggataaaacggaactaagcggaatgcctcgcttcacatattacgtagagaaagacccgcttcaaggtaaagttattgctgagagttatataagtgatttcgagcgattagaaagtttgattgctgatgttgaaacagaaattacaggtttgcacgatgaggtgacaagtgagagtgtgcggctagataatgaaatagctggacttgacgcaaaaattgacacagaaacgagtaaactacagacagaagcgaataatctacaaacgcaatttgatagctttaatccgtcacaatttgcacaaaaaacagacgtaaatgtgcatgtaaataatgcggatattcatgtcaccgcagcagataaaactaactggaattcaaaagaaacagcatctagcgcacaggctaaagcagataaagcacttgctgatgcaaaaacttttttcgaactagctagtgcggtgcaaagcgttactttgacgccaaaaaacggatttgttgcaagtcagcctttagtcgctcgatacattaagtttggcaaccggtttctagttattgttagcggaattgtaggaaaagggaccgggaacgggacaggtatatgtgcaacattgccaacttttttagctcctgatgcgagctggaataaactttattccgctgcacagcagagtacagcagcaagtaatcaagcgaatatatatctaagtgtgagtgctgatataaatattgttggtgttggctcggtagacgtgaacactggacttgacggcataatttatttaactaaagaggtgacaacatga

SEQ ID NO: 561 - DNA, 996 bp, Listeria innocua
gtgagagtggaaaaaccatttttaaccgttgtggtgccttgttataatgaagaagaggtattaagcgagagcgtaacacaactaacaaatattataaaaaaattagtgatgaatgattctattagtaacaatagtcaaatcatgtttgttgatgatggaagtaaggatcgaacttgggaacttataaagcaatattctgaatcacatgagcatgtatcacggctaaagttgagtcgtaattatgggcatcaaggtgcattattagcacgattaacagctgcacatgaacattcagactgtgttgaccctatcgacgctgatttacaagatgacgtaaatgcaattattgaatttatggaaaaatatcatgaaggtttcgatgtggtttatggtgtgagagataaacgcgatacagatacttttttcaaaagaaattctgctctaactttttataagattatgagtaagttaggtgttaatatggttcctaatcatgaggactatagattacttagcaaacgcgcattaacagaatttttacgctataaagaagaaaatatgtttattagaggtattgtaccattacttggatttaaatctaccaaagtttattataatagaaatgaacgctttgctggagaatcgaaatatccattaaagaaaatgttattatttgctgttgatggtattacttcttttagtgtggcgccaattcgcttattgctagtgattggttctattactttcttagtaggtgtagttttaggtatttatgcaattgttcaaaaaataatcgggggcgtagttcctggttggacctctttaattgtttctatttggttactcggcggggtacaattaattggtatgggcgttttgggcgaatatattggaaaaattttccgacaagtaaaagaacgtcctcgttttacaattgaagataatgtctttgaaatgaaatgcgagaaaaataaaaacaacgagagtttggtgtaa

SEQ ID NO: 562 - DNA, 996 bp, Listeria innocua
agaagcatgaggacagtagaagatatcttatatgataagcaatctgctattttcttattggccgaattgtatgagacgcacgaaaaagaacacgaagatcataaagaagggacgctgataacttgcgagatatgtcgacaaattgaaacgtgttcgatactgatccggaggttggaacaggagctgcttcaaaaaaaggatgagatacgggcagaagaaaagagacatgcgaaagatctcttaaaatggcattatatcaagtatccgttaaatgcgactaatttagaacgaatcttacattggcaaaagatgtttagtaaacggatgtttgatgagttgacgagaatgggttggtctgtagaggagatacagcgaaggtatgatatcccagactttttctttaagcgctggctgtttaagaaaggtctatatgccgtggtcccattaatacttaaggtaagaacaattgacgatcgaatattcatttataaagtttttcaagaagcagatctgaatttgcttttgacattggatgatattgtgatgaagtcttatgatcgaattgaaagagaagactggaaacatgtgtatttctggcaccatggcgcttaccatcacttagagcaaatcattgtccagagtgagtttggaaaggttggcgaaacggtttatcacgctgaagagcaattaggctgcaagaaaaaggcgacggatcaagttattttttatgatggatttaaccaggaagcagtcgcctatttttgtgaagaaaatgagatgaaacgcttagccaaggggaatcgactccttataaacacccgatatggtacaattacgctttttccaggggaatatgtagtgaaagaaattacaggtcgttttgtgaagtattcagctaaccaattttcgcagttgtatgagattgttgatacagttcggcctatggggcttgtgagtgaaacttctagttataatgaatatacaaataaaatataa

SEQ ID NO: 563 - DNA, 1002 bp, Listeria innocua
ttgaatgcaatggatgcaaatgctagtgtgacagaggtatatccattgccagccagaataattgatgtttttccagatgaaaacttagcgaaagatatggtagaaaacttgcacaaaagtgatgttacagacgtcattacgcaagatgatataaatgcagcgacatcattaggattgggctattttacaaattacttaacagacgaaactttagaaatgctaggaaatgcttattttaccaatgtaaataatattatgatttatcctacccaaacaaagttcactaaatttccggatttaccgactttacctctattagatactttaagagcagaagtaagtataacaagtgaaataccacctgaaaatattaccgtaccagattatcaaaattatccagaattaaagtatcttaattttggtagtagaactattgtggggagcttgcctgacttttctaatattcctaaactagaaacgttgttgctaaatgaatgtggccttgcttcagaagatgtacctgattttacaaacttgaaaaatttacaggaagtaaactttgagtcgaatcaattcacaacagaaatgacagatttcactcatttggatagtttggtaagtatggatttgagctataattatttaaacatactaccacctactattgttgataaaataactgtactaggccaaattggaactttaccagatcaaacggttgcttatggggaagatgcatatatcacactaccaatttatacacaactgtatgatttaaaggatattaatggtgttcaagaggtatggattcgaaattcagatgatgataaagtgtttgattcatttaaagtaaattatgatgaggacaaggcgcaaattattgttcctacaagtaatcttgataaaggcgagtacacgattggtattgattttaatggaatagagccctatattgaagaaggcgaagttatgaaatactcactgaaattaactatcaattaa

SEQ ID NO: 564 - DNA, 1014 bp, Listeria innocua
gtggaatcaaaaaggagattttatagttttatgtgtgttcataatagcatgatttcagatgaaaagacaatactttgcgataaaaaagcgaacggaaaagtgcaaccttggcgtgagaaaaaaacagcgaatgtgaattattttgagctactgcaaattttgaaatttaagaaagcagaacgagtatcgcaatgtggcgaaattttagaatttgatgtgacacaagaaggacgtatgaagttagcaaaaacatggttctgtaaatcaccgttatgtccaatgtgtaactggaggaaaacgatgaaacgaagtgtacaaacaacgaaaattgtagaagaagttattcgacaaaaaccgagggcaagatggctctttttaacactttctgtaaagaacgtttttgatggtgatcaattagataaaagtttgaaagaaatggcgattggttttaatcgtttgatgaagtacaaaaaggtagcaaaaaatatgattgggtttatgcgttcaacggaaataacagtgaatgaaaaagatggttcatataatcaacatatgcacgttttattatgtgtagaatcaacttattttaagaatgatgataactatttatcacaagaagattggacaaaactttggcaaaaagcaatgaaattagattacacaccagttgttcatattgaagctgtaaaaaacaaaaagcgaaataaaaaaagtgagtacacagcgattcaagcagcagtacaagaaactgcgaaatattccgtaaaagattccgattatttaacaggaaatgtagtgaatgatttggaagttgtgaaagacttggaaaaaggtttatttcgtaaacgaatgattgcgtatggtggtttgttaaaacaagttcataaagagttgaatttagacgatatagaagatggcgatttagtgcgagttgatgaagattcggatacagaagaaaaagcctattcgattgtggcacagtggaactggaatttgaaaaattattatatatga

SEQ ID NO: 565 - DNA, 1014 bp, Listeria innocua
actttattccgaagtccaaatggaatctggcgaactgctaactgtcaaacaagttcgcgaacttcaaaaacagaaagccttgctagaagaagaaaatttaatcttaaaaaaagcgattgccatcttcacgccacactcgagcaacgattaaaggctatttctctgttagctaccgatcattctattgtaagaatctgccaagtattgcgagtgaaccgcagtacctattacaaatttttatccaaaatcccttcggctcgttccgtggaaaaccaacaaatcaaacggattattttacaaatttataccgagacaaagtttagactcggcgcagccaagataaaaatagttttacagcgtgattatggtatttccattagtatcggaagagtgtatcgactaatgaaaaccatggatcttcctaaaatgtctaccgtaaaaccaagattccgttatcaaaaaccgacggtttcttctacttgtccaaatctgttgaaacagcaatttcattccaagcaacccaatcgtatttgggtcagcgacatttcgtatattcctgtaaaaaaaggatttgtttatctttgtgtaattcttgacatcttctctcgaaaagtgattgcttggaatgtctatgcctctatgactgcaaaattagtttgtgatacggtagagcgagccgttcattctagaaatcctgtgcagtcggttattcttcactctgatcgtggttcccaatatttgtctcaagaattacggcaggtccaagaaaaatacaaccttatcccttcctattctaaacttgcttacccgtgggataatgccgtcacagaatctttctttaaatacatgaagaaagaagaacttaatcgtcgaaatttttcctctttggaagaagtaaaattagcttgttttgagtatattgaaggattctataattcaaaaagaccacattctgcaaacaacttcttatcacctaatttaaaagaacttgcttttctaattgattcttcataa

SEQ ID NO: 566 - DNA, 1014 bp, Listeria innocua
atgttagaagttacagatttatatggtaatagtgaacctcttactaatcatagtattttagaaaataatttcgaaataaatacagtacctgatttaaattttacagtgtatagaaagtataacgaaagagcattcgatatgatcacagaaaaatgtgtgattactgaagtggaaagcaaagaaatgtatagaattgagatgttttcatgcattggttcaggagacacgattggctataatgtacaatgtcttcacattgtaaaggatctaaataataagttactcacttctgaacttaagggaagccaaacaataaagtcgtgtatggactttattgttagtgggacaaaattcacctatgaaattttggactctttttcttcttttgattttgaaagccttggaaatgattttgctttgaatgttcttttaaataatattttagtgaattttaaagcagaattcgaagtgacaaattatcatattgttattcggaaaaaaataggcattgagaatgcatttatatttgtagatgggtttaatataaataaactttcatttacaaatgacagtacaaacctagcaactagaatatctggagatggtaaatcgggagataatggtaatcctattgttacaactacgtatacgagtccgaacgctgatatttatggcattattgacgctgctaagtatagtgatgattctactactacagcaaatttaaaagcaagattaaaagaaacattgcaagatgttccggatatttctattactcttgactatgtgcaatttactaaagggaatattcataagaaaaaagtggagcgtgtcgggctaggaaatgcaggatatgttcgcggaaaaaatattgatgtctatagtagaattcaaaagataacgctttatcctcaatcaactaaaacaccagttgtatcaataaatagtgtgaaagggacattatcgaaaacattggcacatttaaaagaagtaaagaagggggttaaaaaatga

SEQ ID NO: 567 - DNA, 1026 bp, Listeria innocua
atggatttaaaaaaatggcaagacccactcatgaactcagaactacagcaaaactataacgataatttagtaaaactagctggaagccttgaaaaagctaatcaagatatgacacatgttaatcagcgcatatctaacttagttattaaatccggcgggaatgaatcgaacgaagtagtagacgcacgcgtttcttctctggttccagaaactgaattcacaacattaaacgatagaataaattacgcggaaaatgctttaataacaggtgtcggaaagctttcaacgaatgtttttgatctaatggataaatacaacgatatagatactattttaaagcgtttatatggcttagatagcagcaatattgaaatatttgtggatgatgcaagaggcgatgatattgcaggaactggtgaaattgatgcaccttttaaaacgataaataaagcagtaatgactttgccccgtgtattgaatagtaactctgtgaatatctggattgttcctggtcggtataatgaagatgtcgttattccgccaatcatgggaggggacatctacattaggtctacaaactttgaaacagtagaccctaccagtagcaccggatgccaagttcgaagtatttctgcgacaggaagtaacggctatttatatattgctggtttagaagaaacgaacacggcaggcacaacgaaaaactacttcattaaagcgacgcgatgcggatttgtaaggattacaaaatgccgaatggccttcaatactaaggcaatagacccgttcactgcggtttttattgatgcttgttctgctgatgtcaacggctgttattttgcctcacaaaatgttgatgttcgcggttataacactgctagagtcgaggttcagaatatcgtccatggcgcaaaaagtgcgattggtttgtatcctcaaagcgccgatattttcaatctcaatagcgggacttgggaagctgatacgcctacgaaactgagtggcgggggagtggttagaacatga

SEQ ID NO: 568 - DNA, 1026 bp, Listeria innocua
gaaagtgaaggatatatgagtatagtaatagaacaactcgttgtaaaggaatctagtggtaaatggggaagtcctcatcttttagaacaaataaaaaataatatttctatgtcaaacgctgattttttaattatttgttcaaaacctgaagaaaacatcctttcacaaattcaagactatattgctcgcttccccgaaaacatggttggagcagatattcatttatttagtcaaaatcctgtatttttacaacatcttcgtaaattaccaaatgaagatagttacgaaatgactgacacacttcaattcttagttgaattaacaccaaagccaactagtacgtatttagaacgtgatcctcatatgctcctagaagaaatgggacaataccaattatataatgtatcctttttgaaaaattattttgaggagaggataaacgaaacaactttgattgatatttttcatcaggcaaaaatggtttggaagcacagtgttttagaagaaacaaaaataaacgaggctaaaaatcaagttgcaaataattatagaataacagatatggttgattgctgggaattttatcgaaagttagaaaataactacacaagtttaagactggaacttcttgattttgataagaacttgtttaattatttgattcgtactaaattaggtccaactttccaaaagcaattaatgtctggaaatcttaccgaggcaaccgaggcaattgaggcccttactgtttttctagaagataatgataagcatcttgtaagtgaacttgtttccttaggatatttctatctacaagtaccagtgaaagaatatcctgagtggggtaataataaagcgtttagtaatgcgtatttaaaattcttaaatgtactttttgaaaaaatgcattatcaaacaaagcaatataatttaagattttatcgacgcgctacaaacgctgtctataaagcagttggtttaaattctttaaaaccgattgctaagtgttacaaactttatttttaa

SEQ ID NO: 569 - DNA, 1029 bp, Listeria innocua
atgagagatttaaatagattagacgatttattgcaaggatatgaatttatgaaaaagataaatgataactgggaaataatcgagaatggattaaatttatctgattatgaaatagaacatctgcgaaaaagaattacaaatttggttattgcatccggtggtaattctagcaatgaagttgttgatttaagggtttctaagttacagaataaaatatttgaattagcgaaagatagattagatagtgacttagattctcttgcagatagtttaaagaacatgatgacgagaataacgagtattgaactaacaaatgagcaagtattatatatgctaaatcgtctgtatggtctggatgctggttcaattgaggtctatgtggattccgtttcaggggatgatactgcagggactggagaaaaaaataagccatttaaaacaattaacaaagctaccatgaatttcccacgtgtatttaatagtaatacattacgcttgtggattaatcctggacgctatgatgaagatgtgattataccgccattatcaggtgtgacattatatattctatcttctaattatgaaacagttgatcctgcggctggtcctactacttgtcaaatcagaagtatttcagtatctgatacatctggatatatttatattgctggaatagaacaaacaaatactgcaggaacaacgaaaaactattttatcaaggctatacgctgcggatttgtaaggattacaaaatgcagaatggctttcaatactaaagcgatagacccgtttacagccgtattcatagatgcttgttctgctgacgttaacggttgttacttcgcttcgcaaaacgtcgatgttcgcggttataacactgcaagagttgaagtgcaaaacaccacacatggagcaaaaagcgcaatcggtttgtatcctcaaagtgccgatattttcaatctcaatagcggtacctgggaagctgacacgcctacgaaactgagcggcgggggagtggttagaacatga

SEQ ID NO: 570 - DNA, 1044 bp, Listeria innocua
atgagtcatcaccatgcaccagtggatttcgaaaaagaagcatctatcttacgaaaccactttaataatgccgaaatagacttacttttgctgataaagaagcatgttatgtatggcgctaagaatccaacaaaatggaaattcattcagcagtcgcgtttgataaggtttaaaagagaattgaaagcacatataagtcttttcaaagacgaaacgagaaataaaatagataaactaacgtatcgtgtttatcttgattgcgtgaatgaatacgaggacgaaatggaagccagatatcaaactaagaaagaggttgatatacaaaatgacgactatttatctgaaagtgatgcacttatccaaatttcggaagatatggctaattattggcaaaaaatcgcgccctccaagtacaaacaagtggttaaggaaacaaaagatagcaatggagttttaaaatatgctatcgcaacatcacttattaatgttttaggtgatggcataagaaatgttatagatcagtctggaagaaagtaccggccaggagcttacatggaaatggcttcaagaggtgctttttttaatgttggtttgaatgccatgaaacgtgttcttggaagatatgagcacgaattagttcaagtatcagctcacgtgagaagttgtccgcgttgtgctccttggcaaggagaggtgctatcagttaactatgaaagcaatgaatataaaacgttacaagaagcagaaaatgatggcttgtttcatccaaattgccaccattttttatattcgtatttcgaaggtgacgaaacagacgagcctatcccatatgatgaagaagaatacgaagcgcaaagtaagcaacggtactacgagcgcggcattcgtgattggaaaacaaaagatatacttgcagaaggtccctctaaacaatatacagctggaaaagtaaaacaatgggaagaagctttgcaagagcatctaaataacaatcgcttcttagagagagaatcggatagagaaattataaaagcgtctaaatga

SEQ ID NO: 571 - DNA, 1056 bp, Listeria innocua
tataatatggatgaaatctgtgacaatttttatgattttgatgctttttattggaattttatgcaatgccttagtagaacgtacaaaaaaatagttttttttaccacccccctcgtgtgcgcaacctcaaaatatgcctataataaatcgttagacaaaaaaagggagagggagttttttatgacgggatttgggacaatactgtttctagtaggtattggtgtgttgatttatgggcttataagttttagaaagaaaaaatggccacgtagaaaaacgcaaattgtaattattagttcgattttagctatttttattggctctgctattgtgccaagcgagaaagaggaagcatccacagagaaacctaagcaagaagaaaaaacaaagaaagttacagttgaaccacttttaaaagcagaaaagacctttaaaacaacggatgacggagctattgttgtcgaaggaaaaacaaaccctggcgctgaagtaacgttagattttgttgataatccagatgcaactgcaaccgcagacgaggacggaaaattcagccttcgtgtaaatgaacttgaccgggcccaagatgctgttctttctattactattgatggaaaaacgaaagaacaaacactatcattagaaatgagccccggttacacgaaaaagcttgctgataaagctgaagccgagcgtgttgctgctgaaaaagctgaggcagagcgagtagaacgtgaacgagttgccgcagaagaaaaacgaattgcagatgaaaaagctgccgctgaaaaaagaactgccgatgcaaaagccgctgccgaaaaagctgccgccgaaaagaaagctgctgaggcaaaacgagctgaagcaaaacgctctgctccgaaaccagatacaagtaataaacaaggcgaaatggtttatatcactgcaactggcaaaaaataccattacgaccaaaactgtcgtggtttaaacaactcaaacggcgaaacagctgtaaccattgcagaagctaaatctagaaacttatcactatgtaaattcgagcaataa

SEQ ID NO: 572 - DNA, 1056 bp, Listeria innocua
aaggcggatggagtacctgataaattaggcgaattactaaaaagcattaatgatgaagaaatgctaaatttaacaggattctcagcacttgaaatagatgaattaattaaagaattcgaattacctccagctactgtggataaagtaaaagaaaacccgttagactcgaatctgttcgagtcttttttgtttcctcctttttcgtatttagattcaaaaacaaagaggtggagggataggaaggaccaatggaaaaatttagggattagaagcgaattaggtcgagaaggtaatctcacgtttgcatctagcttgcggtcagcaagtttgacaggaacgagtattttcgaccccgtactttgcgagttggcttacagatggtttactcctggagaatctgccaaaatatacgatccattcgctggcggctctgttcggggtattgtggcaaaagtgcttggccacgaatatactggaattgatttaagaaaagaacaagtagaagctaaccgcattaatgctaaagaaatcggattagatggcattaattggattaccgataatagcttaaacgcggataaacatattgaagataactcgatggacttattatttacatgcccaccttactttgatttagaagtatattcagataataaagaagacattagcaacatggaatacgaggaatttattaaagtgtactccgagatattggcgaagggtgcgaataaattaaaagataatcgatttgccattgtggttatttcagatgtacgagataaagcaggtttttatagagatttgacaggtcttactaaatcggtatttgagaagaatggtatttacttctataatgacttgattttgttaaactcactaggctcaggagcattaagagctcgcagaaatatgcgtaacaggaagttagtccgtattcaccagaatgttttagtgttttataaaggaaatcctgatgagatacaagaacatttccccattttagaggtactggaagataatttagaagaagcgcttgaatctatcgacatttaa

SEQ ID NO: 573 - DNA, 1056 bp, Listeria innocua
atgttgattgtggcaggtgtaacaaaaaaattatcattattagatcgttatttaaccctctggatttttcttgcaatgggctttggtattggattaggttattttgtaccagaggttgtaacaggaataaataaactggaagttggaacaacttctatacctattgcgataggcttgatattaatgatgtatccaccgttagctaaggtgaaatatgaagagatgtggcgtgtctttaaagattggaaggttttattattatcacttttccaaaactggattgtcggtcccattttaatgtttattttagcggttgtctttttacatgattatcctgagtatatggtggggttaattatgattggtctggctcgttgtattgcaatggtgattgtgtggagtaacttagctcaagcggacaatgagtatacggcaggattagtggcgttcaattccatttttcaaattatcttttattcagtgtttgcctatatttttgtgacagttattccgggatggttaggcttagaaacgcatgctgtttcaattggaatgggtgagattgcaacaagtgttttcatttatttaggtattcctttcattgcaggctttttatctcgttggattctaataaagaaaaaaggaaagaaatggtatgaagaaaaattcattcctaaaattagtccaattacattggttgccttattatttacaattgttgtgatgttctccgttaaaggagaaaaagtcattgaacttccaatggatgtagtaaggattgccattccattactcatttattttgtccttatgttctttgtttcattctttatttctaaacgtatgggaaccagttatccaattgcagcttcattatcgtttaccgcagcgagcaataattttgaattagcaattgcggtagcagttggcgtatttggtattaattcaggggaagcctttgcagcagtaattggtccactagtggaagttccggttttgattggtttagtaaatgtagcattgaaatttaagcaaaaatattttaagcaaacttaa

SEQ ID NO: 574 - DNA, 1056 bp, Listeria innocua
  misc-feature (1)..(end): n can be any nucleotide a,g,c or t/u
atgaaaacaattaaattgctaaagcttcaattagaaaattttaaaggtatcaaggaactggaaattgatttcgaaaacagtacatctatctatggcgcaaatgcctcggggaaaaccactatcatagatgcatttacgtggcttttattcgataaagatagcacaaataaaaaagactttgctattaaaacattagatatggaaggtaaagttattcacaagttgaatcatgttgtaaccgcagtgattgatgttgatggcgaacaagttgagttgtctaaaaagtacatggagaagtggacaaaatcaagaggaaaactagaacaagagttaacaagtcatactacagaatattatatcgacgagatcaaaaagaaagcgaatgaatataagtcatttattagcgagctactagacgaggaacttttcaaactaattactaaccctctttattttaatgagcaatttgactggaaaaaaagacgtgcaatgctaattaaaattgcaggtgatgtaacagacgcagaagtaacgagtgcagatgattcactgaaagatttaagcatctttcttggaaagcactcgattgaagataaattaattcagattaatgaacagcgcaagaacttgcgtaaaagattagaacttatccccgaacttgtaaatgaagctactaaagctaaacaagatgtaaccggcttaaatccaagcgatattaaaggtgaattatcagtaattgaagaacagattcaatttatcgaacaagaaaaaaatgttctgaaaaacggtggtatacaaactgagcttaataagcaaaaagcgaacattgaactggaacttacaaaaatcaaagcaaatgagcaaaaagaaacacaagaactattaatgagtaaaaaagaagaaattttcgaagaaagaaatgaacttatagatgtaaataaccggattggtgaatctacttttcttattcagcgtaaacaaggagaaattgcaactaagcagcatgaatttactgaatnngttacgcnggnnnggnnnngnngnnnnncnnnncng

SEQ ID NO: 575 - DNA, 1062 bp, Listeria innocua
atgactgaaactgaaaacgttattcacaaaaacggcatatatgattttaacgtcacaacgcaagaagataaaccacttcaaaaagctgttttttatacgcaagatacaggcgggacagctagacttatttttaatatagataaagataatcaagatttaggattatcgtctgctgctgaattagagcttgctatgattttagcgaaaggaacagagtcagagagcaagtatcttgtgaaaccaacaatcatcgatggagtgcgaggaattgcagaatacgcacttacagactctcaaatagcgcacgatggaaatgctattgctgaattgtatataaaatacaaaaatagccaagggatgcgtgtgtataaattcagttttgagataaaaaaagcattaatagatagcgactttttcccggtaaaagaatactatgttgaacgttgggatgattatgaaaaaatattcgacgaatcgttcgagagattaaatactaaattagataatgtcgataaaaaagcggatgatttaacaatacaatttgatgctatgcagcccgcacaattcgcacaaaaaacagacttaaatacacatgtaaataatgcggatattcatgtcaccgcagcagataaaactaactggaattcaaaagaaacagcatctagcgcacaggctaaagcagataaagcacttgctgatgcaaaaacttttttcgaactagctagtgcggtgcaaagcgttactttgacgccaaaaaacggatttgttgcaagtcagcctttagtcgctcgatacattaagtttggcaaccggtttctagttattgttagcggaattgtaggaaaagggaccgggaacgggacaggtatatgtgcaacattgccaacttttttagctcctgatgcgagctggaataaactttattccgctgcacagcagagtacagcagcaagtaatcaagcgaatatatatctaagtgtgagtgctgatataaatattgttggtgttggctcggtagacgtgaacactggacttgacggcataatttatttaactaaagag

SEQ ID NO: 576 - DNA, 1065 bp, Listeria innocua
atgatgatggaaaaagaagaacaaaaaggattgggaatatttgaaaaatatttaacgctttgggtggctttgtgtatggttacgggtgttttaattgggaaatatttgccagctatcccagcaactttagggaaattcgagtattatcaagtatctattccaacagcaatcttaatttggttgatgatctatccgatgatgttgaaaatagattttactagtattgtcaatgcagctaaaaaacctaaaggtctgattgtaacctgtacagtgaattggttaattaagccatttacgatgtatgccatttcagcatttttctttttcgttgtatttaaagggattatcccaaatgatttagccaaagaatatgttgcaggagcagtattgttaggtgcggcaccctgtactgcaatggtctttgtttggagttacttaaccaaaggagatccagcttatacattagttcaagttgcgattaatgatttaattattttagtgttgtatgcgccaatcgttgctattttattaggtgttggaaatgtagctgttccaattaatacattgattttgtcgactgttttattcgtagtgattccacttcttttaggtgttgtcactcgaacagtcatcataaaaaataaaggacttcattattttgaaacagtatttctaaaaaaatttgataaggttacgattattgggctgctcttaacgctagtgattattttttcttttcaaggtgaaagaatcttgaataatccactgcacattcttttgattgcaattccgctaaccattcaaacactattgatttttgctattgcgtatacatgggcgcgcttttggaagttgcctcattcgattgctgctccggcaggcatggttggagctagtaatttctttgaattatctgtagcagtagccatctcactatttggtttacagtcaggggcaacattagcaacagtagtgggcgtattagttgaagtaccagtcatgttgctattagttaaagttgcgaatagtacagttggatggtttcaaaaaaatgagttatcttaa

SEQ ID NO: 577 - DNA, 1068 bp, Listeria innocua
atgactgaaaacgttattcataaaaatggtgtatatgattttaacgtcacaacgcaagaagataaaccacttcaaaaatctgttttttatacgcaagattctggcggaacagctagacttatttttaatatagataaagataatcaagatttagtattatcgtctgctgctgaattagagcttgcaatgattttagcgaaaggaacagagtcagagagtaagtatcttgtgaaaccaactattattgatggtgttaggggaattgcagaatactcacttacagactctcaaatagcacacgctggcaatgctattgctgaattgtatataaaatacaaaaacagtcaagcgatgcgggtatataaattcagttttgagataaaaaaagcattaatagatagcgactttttcccagtatcagaattttatgtggagcgctgggatgattacgaaaaaatattcgatgaatcgttcgagagattaaacactaaattagatgacgttgataaaaaagcagatgatttaaaaacacaatttgatgatatgcagccatcgcaattcgcacaaaaaacagacttaaatgcacatgtaaataatgcggatattcatgtcaccgcagcagataaaacgaactggaattcaaaagaaacagcatctagcgcacaggctaaagcagataaagcacttgctgatgcaaaaacttttttcgaactagctagtgcggtgcaaagcgttactttgacgccaaaaaacggatttgttgcaagtcagcctttagtcgctcgatacattaagtttggcaaccggtttctagttattgttagcggaattgtaggaaaagggaccgggaacgggacaggtatatgtgcaacattgccaacttttttagctcctgatgcgagctggaataaactttattccgctgcacagcagagtacagcagcaagtaatcaagcgaatatatatctaagtgtgagtgctgatataaatattgttggtgttggctcggtagacgtgaacactggacttgacggcataatttatttaactaaagaggtgacaacatga

SEQ ID NO: 578 - DNA, 1071 bp, Listeria innocua
cttaaaatggaggcaagggtgattatgacaaataaaacattggtttgtgaattcttatacatagaaaaggaaatgaccccaagtgagttctttttaaagaattttgatctgcaaaagacggtggaaagtcatcaccaagatgggataatcgatatttctttaccatctctcaaatttaattataataaccaaagttataaattgttatataatgaaatagaacttaataataatgtttatagtatatccatctctcttctttatgaaaataataaagaaaaacatgcaattatcttagataaagtgatgggatttataaataatagaagaaatcacaattttaatttaatattcaccagaaatgatagtttaaagtatttttcaataagattatataaactactctatgattttgaaacaaacttacgatcattggtcaaaatcatgttgattcctgataataaacaagaatggcataaagtgataactagtaaagtagacgtaacaacaaagttgagtaagacagctaaaatcgaaaaaataattgaggaattaagtatcactgatttagagttaatgttatttgacaagacgtttccaaagggatcaaatttatttgaagatgaactatctagaaagcaagtagaaaaattaactaggcaagaaataattaacgttattaatattaatagaccagcctctttatgggatacatactttagtcattatattgagtacgatgtaatgaatgccatgaaggtaattaaaactactagaaataatgcggctcattacagagaatttgatagtgaacaatataaagaaacacttaaagtacttaataaggtaaatcctttgataaaaaatactattaaagaattgcaatctttggattccgatgtattaataaaaatatcccaagctatggaggaaaaagtcgcgaatgtgtttgaagagatttctaaaaacacaattaatcttactaaggatttgaaaaaagcattattaaatgacctttcgaacgatttgaatcctttaaaaagtatggtaatccctatgaaggatatttaa

SEQ ID NO: 579 - DNA, 1077 bp, Listeria innocua
ttgaaaatcacaaaaattaaaacacacattttaccgattcagctaagtgctacttttaagacggcgcttagggaagttagtcatgtgaacgtggtacgagtttatattcattttgataacgggattataggtattggagaagctgctccaacgcatgtaataacaggggatacggaagtcagcattttgagtgcaataaatgatattttcggtccttttttaattaatcgcgaactagacgaagaacttacaattttagatgaaatgaaatctttattagtacataattcaagtccaaaagccgccattgatattgctttacatgatgcgctggcaaaagctcattcaaagccattatatgaattcctcggcggtggcttagcggggcttgaaacagattataccattagcattgggacgccagaaaaaatggttcgagatgcagaaaccaaagtagcagaaggatttcagtcccttaaagttaaattaggtcttgatccagttgaaatagaagtagcaaaaatcaggcaaatgaatgatgcgttaggcgggaagattccttttagaattgatgcaaaccaaggatggactgcggatgaagccattcaaatcctaaatgagtggcaagatattccaattgacttcatcgaacaaccagtaaaaagttgggattttaccggtatggcaaaagtgactgcgaacactagttttccaatcatggctgatgaaagtttatttggctttcacgatgctaaacgacttttagacgaaaaatgctgtaatttgcttaatattaaattgatgaaaagtgcaggaatcaaagaagcgcaagcgatacatgatttagcgggcagttataatgtggactgtatgattggtacgatgattgaaggatatgcaagtttatcagccgcagctcatttcgcggcagcttccaaacaagtgaagttttatgatttagatgtgccgtttatgtgggatttacatggtaaaaacatcgctgatattggtcttgaaattggccgtggacaagtgcttttaacagaagaagatgggattggcattccagcttattaa

SEQ ID NO: 580 - DNA, 1086 bp, Listeria innocua
ttggtcaattttgaggaaatgacattcgaaaatataatggagtcaatgttagatgcagttccagcaacattagataagcgtgaaggaagcatgatttggaattctttagcaccggcagcatctcaaatcgcattactatacacgtggttagagaatgcttttgaattagtattttatgataccgctccagatgaattcttagatagagctgctgcaccatatggtgttatacggaagcctgcggtcgctacacaaaggattattaaaggtatagacgaaaatgataataaaatagaaatacctgaagggtcgcgtttttttgtagaatcggaaaatatatacttcaaagtgacttcttcgacgattctagaacaagtagtagaatgtgaagtggctgggacaaaaggaaatgctgatttttccaatgatacaatattgtctttagataatatttatgggctagcgaaagtagaaataggcgatattttaattccagggtctgatgaagaagagttggaaacttttcgaaagagatttttcacgaaaattcaaaaggatgctttctcgggaaacaagaaccactataagttatgggcagaagaagttttaggagttggaaaagcaaaaatttatcctttgggatacggggagggtacagtaaaaatcgttataactgatactaatttacacccagctagcccaaccttggttgaacaagtaagaaattatattgaccccttaccacaaaaaggtgagggggtagcgcctattggggctaaagtttttattgaaagcgccgcatggaaaacgattaatatatctgggcaactagttctgaaagacggtaagtctgtcaacgatgttatagaagaaataacaatggatattaacaagctatttaagagcataacctttccggaagatgaattgacatctgttaaactcgcagttattagcaatatcatattctctgctccgtcggtgctagataactttaatataaagcttaataacgaagcagctaatattattcttgctgaaaatgaagtgccacaattaggcgctttttcttttgaactaatttga

SEQ ID NO: 581 - DNA, 1092 bp, Listeria innocua
gatgacatgaaaaaatttattctagcaagtcttgcatgtacgaccttgattagttttagtcctttagcagagcaagtcgaagtaaatgctgctacaacaaacattgcaactgccccagaaaaaaatttacaagaagctcctccagccacggttgatcaaattttcccagatgatgctctagcttttaaagtcgcacaggaactaggtgtttcccaggatacagtcgtcacccaagaacaactagatactattaaaacaatggtctatatagctttcggcgtggaagatttaacagggatggaatatttacacaacttaaaacttgtagatttaagccaaaataacattagtaacttagataatctcgctaatttaacagaactagaaatagtatcacttaactacaatcaaattacagatattactccgctaatgaacttacctaagttaaataacttagaattaggtgttaaccagatctccaccttaccatccttcgaaaatttaactaatttaaaaatattaaatctaagtagcaatcaactaaaagatatttcggcgctaaaagatactcctctattaactaatttatctatttcagcaaataatatatcagacatcagtgtcctttcagaattcgataatctccaagttttttatgccgacagcaatcaactgacatctattgagccattaagaaataaaacacaactagaatacttcaatgctaattttaatcaaattaaagatgttacacctctcagtaccattccaacaattaagtcaataaaaattgaagaaaatcagattagtgatttcagctcattggcaggtcatcgcttagaattgtttgaagctgctggacaaaatgtataccttccagatgttgcgctcggtgattccactaatattgtaattaaagataacttcggagtaacattacatgattgggtttggtacactccaggaacttactcaaatgatacacttacttgggaaaatgcaggcgataattccgcttactttttaaataaacaatatccaactatcccttctgtcacagtaactgtctatcaaacagtcactccataa

SEQ ID NO: 582 - DNA, 1095 bp, Listeria innocua
atggggagagaattagttaatgcaaagataaattatgtttcatatgttgataaagcggcaaataaaaaacagtttttcttaacaaaatcaaatgaacaacctaatatacagaagcaggttgagctatttgttaataaagaggactctaaacaattagtttatggtttagtttatgagccggatgttgaagatgctcacggtgatttcatgaaagcagaggaaatcgaaaaagcagcacatcaatttatgaaagatgcacgtaacatcgataagcaacacgatttcaatgcgggagttggtgaagtggttgaaagttatattgctcctactgattttagtattagtgaccaagttattacaaaaggtagttgggttatggctacaaaggcttctgatgcgatttgggaatctattaaaaaaggcgaaataaccggttatagcatggctggaattgcagaagttgtagagcaatcagaagagcgtgcggatatcaccaaagatgaaaaaggcttttttaaattaatgaaggagtttttcactaaagggaatgttcgagatggttacgagaaaggtaaatcaacacaaaacgtccgcgcggctttgaacgtgtttgaaaacgagatttggaatgcacaaagccataatagtgttgatttccaaaaaattaatgatgctattgcagattttcaatcaatcattaatgaaattgagggtagtggaactgaagctgctttaaaagcattcaaaaaagaaggagaagtggaagatatgaacaaagaagaattagagaaaatcattgagtcagcgttaaaaccggttattgagcgcttggactcgattgacaaagtaaaggacgaagataaggtactaactgaagaagaaaagaaaaatttaaaagaagaagatgcaaagaagaaagaaaaagaagttaaaaaagaagatttagcagaaatcatcaaagaaacaatcggaaaaagtattgagccaattaacgaccgtttgcaaaaagtggaaaatgcacgggggacttctaatcaggttgaaggagaacaaattcaaaaagaaaataaatccgtttgggacggactactttaa

SEQ ID NO: 583 - DNA, 1107 bp, Listeria innocua
ttgaccgacatggaaattaaagcaactgaactttatggagaagacgtcaatttgagtgcacattcggcgttaggtgtttttttaagaatcattgcctggttcttagcactatcaaatgaattagctgaacgtgtttataactctggttttatcggtacagctggtggagtgcaattggaccggttaggcagtaataatagtattatgcgtgatcctgcaatgcctgcagtagttgttttggaaatagaaggaaatcctggttatgttattgaagaaggagtccagtttaaaactaataatgacatagtttttgaaatgattgatgtgatcattcttgatgaaaatggccgtggttcaggacaagcaatatctcaaatttattcggataaagctaatgtagctgcaaatacaataacagtagttgctgagccgagtgaggatattttaaaagttaataacccactgggagctactggtggatcgaagaaagaaaatgacactacttatagagcaaggattaaagtagcgatgcaagcaagtcctggtcctccaatcaatggaattataacagcactaaaccaagttccaggtgttcgaagtgtttcagtagtcgagaataatagcatgaccgtagattcatcaaataatcctgcaaagtctgtgcatatttatgcctttggaggaattgaagaagaaattggggaagcgatttttaacagcgtggcagctggtgttcaaacagttggtaatattgctgtcaaagtcaaagatttatcagattttgagcatgtagtttattacgatagggctactgcactacaaatttatgcaggtattgatgttattgtaaactcaaaatttgaagaaagcggcgaaaatgatattaagcaagcggtgcttaattatataaattctttaaacatgggagaatcagtaatacattcatatatttatcctgaattatacaaaatagctggtataaagattgcaagtgtaaaaatcggaaaaagtgcagatactttagcttcatcagatgtggtggctaacattgatgaagctgcttctattcgctgggaagatattgaggtgacaataaatgtccgttaa

SEQ ID NO: 584 - DNA, 1110 bp, Listeria innocua
atgaaggtgcaacgatttgataaatcatttattacagattcaaatatgcaagttactaaagaaggttacttaactgttaaggcaccagtcactcgaccaggggtatttccttatcaacgagcggacggcagtattcagctggaagctaaattacccgaaaacctttttgctagcgaaactattcaatcgctcaatgcaaagccagttactaatgaccatccgaatgaaccagttaatgcaagcaatcatcaaaagtatgcaaaaggaacaacgcatacagacgcgtgcgtaagtgataataagctatttgtatcttttactattacagactctaagacaatacaagctgttcaagacggtaaacgcgaactgtcccttggctttgaatcggaagtagtaaaagaaagtggtacttatgcaggcgaaaggtacgatgccgtgcaaaaatctgtattagttaatcatttagcaattgtagatgaaggacgcgtgggtcctgaaattgcaatacgaggcgactcagctgcttttatgattgattcaaaaaacacgaaaaaacaaggaggaaacaaaatgccagtactcaagattgatagcaaagaatatgaagtcgattcagttgttaagtcacgatttgacgcattagaagcaaaactggatgcagcaaatgctaaagcagctaaagttgatgcattagagggagaacgtgacggattaaaaacaaagttagataaagcggaaagtgatctggaagaagctaacaaaaatacaatgacgaaggaagatattgaaaatgcggtcacagaacgagctgcattattagattctgctaaagtgatgcttggtgattcatttgatttcaaagggaaaactgctcgtgaaattaaagaagctgctattaaaacatcgaatgattcatttgattctaaagacaaatcagatgaatatgttaatgctttttatgatgcaatgacagtcacagcagatgctaaaggatatactgcagatgctaactttaataaaggcaaacctgatccaaaagagttagaagaaattgaaaagaaaaaagcagcgcgacaaaattttggtaagaaaggagataacaaataa

SEQ ID NO: 585 - DNA, 1110 bp, Listeria innocua
atgaaacaaatttctagtttagaaattaatggactgaaaagttatacagaaaaaactgagattaaattaagtcaattaaatgtattttcaggagttaactctgttggaaaatcaacagctattcagtcaatatcgttaataaaatcactttatgatagttatattaataagaataagattattagcgaagcgttcttaaataatgagatgtttggtttagaattaggaacatatgaaaagataatcactggaaataataattattttgaaataggaataaataataaattgatacaaatagaagctaaagaaggggatgctctaaaagtacaagcaaatatgaaagaggtaacagaagaaataaaagttaatctatttcatggtcatttttactacttagctgcggaaagatttggtcctagaaactatcaagttatagatagctacggcatagacaattgtggaatcaaaggggaaaatgcatttcatattttaaataaatattcagaaaatattatagctgatgatttattgtttcagggtacagcgaataaagcagaaaaatcgttaaagaaacaaactgaaaagtggctgaatactttttttgatggagttgaatttagttctactttggaaaatgctttaagattggtaaaattagaggtgaaacaaagcaatcaagatatgggatatgtttctttaagtaatgttggctttggtttatcatatgttttaccaatattattaacatgtttaacttctaaagaagattctttgataattatagaaaatcctgaagcacatttgcatcctaaaggacagtctttattaggtcaatttttagctcaggtaagttcaagtaagaggcaagttgttgtggaaactcatagcgaacacattataaatggcatgaggcttttttgtttgaaaaatagtatttctccaaatgaattgacaataaacttcttttctataaaaagctcaaaaacaaatgtaaagaagatatcgttaaatgaaagaatggagcttttggaatggccagatgatttttttgatcaacaagaaaatgatttaaggcatatgagagaaataaggaggaaaaatggatag

SEQ ID NO: 586 - DNA, 1119 bp, Listeria innocua
agaaagatatacaatagaacagaacttagccaaattaaggggagaataaagatgtctgatagaccagaaaaaattaatttatctgatgttcactcacgtcaagtagatactgacctgttgaatgaattacgtgatttatttgtcaaagcagaagaacaaaaagaacgttacgattttacgtggaatggcaaagcaaaagcctattttgaagctgcagctccaacgactaaaacactgcgtgcacaaccggaagaaagtgtgaactttgaaggatctgagaatctatttattacgggagataatctcgaagcattaaagcttttacaggaatcttatcttggaaaaatagacatgatttatatcgatcctccatataacacaggtaaggactttgtttatcaggataacttcaaaaaaacgaaaaaagagaatgacttatcagaaggaattctagatgaagaaggcgatcgattagtaaaaaatgaaaaatcaaatggtcgctaccattccgattggttaactatgatatatcctcgtcttaaattagcccgaaatctattatctgatagtggaattatttttgttagtattgatgaaaatgaaattgctaaccttgaactattattgacagaaatttttggtgagaataatcttgcaggaaccattgtctgggataagcgtaaccctaaaggagattcaaaaggagtgtctatgcaacatgaatatattgttgcagctgcaaaaaacataaatattttttctgaattcaaggaattcaaaaggcctaaaaaaaatgctgaaattattctgaataagtctaaagaaatttttaaaaaaattaatgataaattcactttaagtgatgccaatgaagaatatcgtaaatggataaattcaaaaaaagatttaagcggtggtgaaaaagcatattctaaacttgacgaaaaaggaaatgtatatcgagaagttagcatggcagcaccagataaacctgaaaaaaggtctcatcgtccgcttactcatccattaacaggaaaacagacatcagttccagcgaaaggatggagatacatagacaaaacggttctgttgcaaagttttaaatctactatcaaataa

SEQ ID NO: 587 - DNA, 1125 bp, Listeria innocua
atgactaaaaaaggaaagcgttatgggatacgagttcgttataagcaaggtaatgattatcctgaaataaataaatctggttttgagacaattgcagctgcaaaagtttataaaaacaacattgaaaatttgaaagctaataaaaaagaatatgtttttacaaatgaaaaattaacattaaatacttggtttgcttcttacatggaaatgtttaaaaagaaaaacaaaagtaaagacacaatagcgaataaatatagtatttataataatcacttagaaatcccttttggtaattactatttaactgatataagtttagatatttacgaagactttttgcgcgaaaaaattaaaaatggatacgcaaacaactcagtcaaagcgatgcataaattaatgaaaagcattttaaacgctgctgttagatatgagaaactagaaaaaaacagacttcaatttgctgaaatagagcaattagaagaaaatgaagttattgagcttaaggtattagaaacagatgagtttaatgtatttatatcagcttgtagagcattttttactaaatatgattttacaatgatttatcttgcagtttgggggatgcgtcgcggtgaagttatgggggtaaaacttaaaaatcttacttttgatgatgctaaacaacaagtacgtattacactagattccactcgaacccttcgtactcccgagggaaaaggtacgaaaacaccagctggtagaagaatattactaatagacggcgaaggttatcgactacttaaatattcggtagaaaaagcggttagcattgctaaagaccatggatctgttttgcaccaggatgattttatttttagaaacccaacttctaatcgtccttgggcggttacgcgtatgaatgatttactacgaaaattagaaaaagaatacgacataaaagtttaccctcatctattacgccataactttaatactcaggcattattggctggagctaatagcaatgatttacgaaaatttattggccacaaaaacagtagcatgactgatcattattcacatgcgacagacgagggacgagaaaaattaatgaatacgatgaaagacagattgtcaggaatctag

SEQ ID NO: 588 - DNA, 1131 bp, Listeria innocua
atgtatatgcttgctgttaaaataattggattcttggcgagccttttaccagttcagcaaaaagttgtttttcttataagttttgaagaaaatcccactgcgattattaagcaaatgaaactgtccaatgtcaccccgaaaacaattgtcttctatgatcctagagtagacgtatcaaagttatctttagactttataaaagtaaaaccgaagacactgcaacaatttattccattaatgtttcacctcaatacggcaaaagtagttgtcacagataattattttgtggaattagctggcttgaaattacgaaatggcgtaaattgtatccaagtttggcacgcaaacggtgcgcttaagaaatttggctgggaagataaagcagcgcaaaaaaggtcagatcgggataagaaaagatttcaagaagtatataaacgttttacaaaagtacttgttggttctgatgaaatggcatcaattttcaaaaaatcatttttactagatgaatcgaacatgttgaaacttggtgttccacggactgattatttcttcaaagaagcgcagttacaagaaaattatcagtggtcatacgagcatttacatttaacaaacagaataaaattactatatgcgccgacttttcgggataatgagttgggaatggcaaagttacatttagatattgcggaaatgaaacaagccttaggaaatgaatatcaattgattttaaaattacatccttctattagtaatgatttagagaaactagatgatgattttgtcatttatgtggataaagaaacgccgattgaaacgttactaccagttgtggatattttgattactgattattcttccattccgtttgagtttgctttacttcaaaaaccaatgattttctttacgtatgatttaacggaatataataatgctagaggactttcagatggctttttagaaaccattcccggtccgcatgtttttacaacgactgagctaattgaagtaatacaaaataatacgtttgatttggaaaaagttcggttatttgctgagaaatggaataaatattcggatggattttcaagtgagcgttttgtatcctttttaaaagaacagcttgaaaagtag

SEQ ID NO: 589 - DNA, 1152 bp, Listeria innocua
gctcaaaaagtacaaaaaggtgaaaaagtaacagttaatttaaaaacaagtgtaaatggttggtatcaagtaacttatggtggtaaaaaaggttacatgatcttaaatgataactatttagtcgaaaaagcgcttaatatgaaaacctattatgcggtgagtagcttaaatttacgtagtgaggcgaaatgggatagtagcataagtcaagtggttccagaaggtagagctgtcaaagtcgaaatggacacgaatgttggcaattggtttaaagtaacctatgacaataaaacaggttatatgccactaaatgatttatatttatctgaaaccgctgtgttaaaaacctattatgcaaaagataatttaaacttacgtagcgaagcaaaatgggatagtgaagttactcaaaaagtagaaaaaggtgaaaaagtaacagtcaattcgaaaacaagtatcgatggctggtatgaagtaacatacggtggtaagaaaggctatatgattttaaataataattatcttgtagcagaaccactagatttgaaaacatattacgcagttaacacattaaatttacgtagtgaatctaaatgggacagcagcataagccaagtggtacctgaaggcgctaaagtaaaagttgaaatgaacacaagtgatggtaattggtacaaagtaacttatcaaaataaaacaggttatatgccgctaaatgatttatatttatctgaaactgctgtgttaaaaacttattatgcaaaagataatttaaacttacgtagcgaagcaaaatgggatagtgaaatttctcaagtagtagaaaaaggtgaaaaagtaactattaattcgaaaacaagtataaatggttggcatgaagtaacttacggtggtaaaaaaggttatatgattttaagtgataactatttagtcgaaaaaccattgaacttgaaaacgtattatgcagtaggagatttaaatttacgtggtgaatctaaatgggatagcgacatagttcaagttattcctgcgggtactccggtaaaagtagaaatggatacaaatgatggtatttggtacaaagtaacgtatcaaagtaaaacaggctatatgccactaacagatgattatttaactttaacagcaaaataa

SEQ ID NO: 590 - DNA, 1155 bp, Listeria innocua
atggaaaaaatttatttagcgattgctcttgtattaggtgtgtcgcaaatttttggggtattggcaagtcgaatgggcttacctaaaatagttggggagttattagtaggtgtagtattaggtcctagtttgttaaacatcgttcaacccggggagtttttacatatcttttccgagataggtgtattgttactgatgtttattgccggtatggaaacggattttaaaaaattgaaggccaatttaaagccgagcattattgttgctttatttggtgttataattccattggttgcttttttactatttggaaaatatcttcatatggagactatggagtcattttttgtcggaattattttctcggcaacttcagttagtattactgtaaaaatattcatggatagcgatatacttcaaacaaaagtggcagccattgttttaggcgcagcggttattgatgatattttggcggtcttgttgataagcgcttataaatcagtagatcagttagcgactgcaaatatcttttttatgttatgggatttgcttctttctaaaatacttttctttatcatgctttatttattctataaatttgcattaccatggataaaacgatacacggagaaatggacgtggtcctttttaccagttactatcacactaattatctgcttcttttggggatactttgcagaattaatgggattaagtgctgttttgggttcattcttttttggattaatgttggcaatctctggaaccaagcagcgcgtagagaaagaaatcgatctgattgccaattccattttcattccactatttttaacttccatcggagcagcgatcacattaagtgatatttggggaaatgtaggtccgatagcacttggtacattgctggcgattattacaaaactcggaagttgttatattgctgctagagcaagtaagttaagtcgtccggattcatttttgattggtagtggtatgatgtctagaggggaaatggcgttagtcacacttaatattgggatatcgctacatttcataggtgaagactattactctatattcgttgcgatcattgtgatgacgactattttgtcgcccttgtttattaagcttgctttgccaaagagttctcattaa

SEQ ID NO: 591 - DNA, 1161 bp, Listeria innocua
atgactagtataccaaaaaatgaacaaaatcagaagcaggtgcaaatcttgaacgaattatcaaaacgaaaagtagtggagcataattctttaattaccagcattgcctgcattgccaaaatggataaaaccccactcaaaatgtttgagttagccgtatcgtgcattgataccgaagaaccgcctaaagatcatacagtctatctctcaaaagaagaactttttgcgttttttaaagtttctgataatgacaaacatagtcgtttcaagcaggcagttgagaatatgcagaaacaagcttttttcaaaattaaagaaaaaaaagaacatgggtttgagtttgaaaatatcgtccctattccctatgtaaagtggaccgattatcatgatgaagttactattcgatttagtcctgaaatcatgccttatctaatcaatcttaaaaagaatttcacacaacatgccttgtccgatatttcagaactcaatagtaaacattctatcatcttgtatcgttggttatccatgaattataaccaatacgagcattatagttataagggtggacggagagaagaacaagtggaagcctaccgcaatccttcaatttcaatccgagaattacgagaaatgacggatatagtcaatgaatataaactttttgcagatttagaaaaatggatattaaaaaaacctttggaagaaatcaatgatcatacttcttttaccgtgacgtatgacaaagtcaaaaaggggcgctcgattgattctatcgtctttcatattacgaaaaaacgtcgagcagacgataacagctacaagttggaagataaagtctaccaagaagataaagcacgtaaagcagaaaccgaagacatgctgacggtacaagccctaaaaagtccgtataccaagttgcttatggaacatttcttattgtcttatctagacttgacggatactaaaattctttcaggcttacaagcacacgtgtaccctctctatgacgaacttaaagacttacgaggtttgaatggtgtcaaagaccacctaagttatgtctctagcaagcgtgaagaatattctaagcacaatatcgctaagtacctcaaaaaagcaatcgagcaatacctatcaaccgttaaaaggcaggacttatga

SEQ ID NO: 592 - DNA, 1173 bp, Listeria innocua
acaggggggagtatcctgatgaagtttgtacaaaaaatatattatttcctatttaagctagtaggatttttacctcgaagaaaagaattagtgatgtttgaaagcttttctgggaagcaatatagttgtaatccacgtgctatttttgaatatatggaagagcataatccagaatacgagttgttgtggagtgtaaatccgaagtatgttgatttgtttgaagcgcacggggtaccgtatgttaagcgtttttctgttaattggttgtttaaaatgggcttagctaaattttggatttctaatagtagactgccgcttgagctaccaaaaccgaaaaaaactatttatgtacaaacgtggcacggaacgcctttgaaaaaactaggtgtcgacatcgatgaagtacatatgcctggccaaacaaccgaacaatacaaggctgattttgtgaaagaggcgcagaagtgggattatttaatttcacctaatgcgtattctagtacgattttcagacgtgcatttggtttcactggggaaatgattgagtctggctatccgagaaatgatattttatttagtgcggataaagagttgaaaatcgctaatatcaaaatggccttaaatattccagaagataagaaagttattttatatgcgccaacttggcgtgataatgatttttacgaaatcggaaaatataagtttgatttaaagattgatattgccaaaatgcaagaaaaatttggcgatgaagtcgttctgttagttcggatgcattatctcgtagcagaacattttgatttcacgcagtatggcgattttgtacgagatgcttcaaaacacgaagatattagagatttgtatttagtgagcgatttattaattaccgattattcttccgtattttttgattatgctaatttaaaaagaccaatgttgttctatacgtatgatttggctgaatatcgcgatacacttagaggcttttactttgattttgaacaaaatgccccaggaccacttgttgaaatgaatgatgctttaatggcagaaatagaaatcatgcttgaaaatcctcctcaaattgcagaaagctttttagaacaattctgtacttgggaagacgggcacgcagcagagaaaacagtgaaaaaagtttttgctgaaaaatag

SEQ ID NO: 593 - DNA, 1176 bp, Listeria innocua
atcagagaggtgatagtattaatgaaaataaaaaaaatgaaaaatggtaaatatactgttcgtttgcgtattaaagttgatggagagtggaaagaaaaacgtttgacagatacaagtgaaacaaatttgatgtacaaagcatcaaaattattaaaacaagttgaacatgatagtaattcactaaaagaatggaatttcaaagaattctattcgctatttatgaaaactttcaaagaaaataaaagtagtcaatcaacaattaacttgtatgacttagcttataatcagttcgttaattatttcgacgaaaaaataaagttaaattcaattgacgctgttcaatatcagcaatttattaatcatttagcattagattacgctgtcgctactatagataccagacaccgcaaaattagagcgattttcaataaagccgtccatttaggttacatgaaaaaaaaccctgctctgggcgctcacataagcggtcatgatatagcaaaaacaaaagcgcaatatttagaaacagataaagtacatctattattagaagagcttgcaaaacttcattctatatcaagagcagttatttttttagcagttcaaacaggaatgcgatttgaagaaattattgcactgacaaaaaaagatattaattttactaaacgttctatatcagtgaataaggcatgggattataaatacactaacacgtttacggacactaaaacaaaaaagtcacgagtaatctatattgataattcaactgttcaatatttacagtcttaccttgcttggcatgctgattatatgaaagagcatgcaattgaaaatccggtgatgttgttattcattacttatcacaataaacctgttgacaacgcttcatgtaacaaagcactgaagaaaatatgtactacaattaattctgaaacagtaacattacacaagcttcgacacacgcacacaggtctatgtgtagaggctggtatggatattatttatgtagctgacaggcttggtcatgatgatattaatacaacattaaaatattatagtcatctgagttctaatttacgacaacaaaatcaatctaaagtagatgcttttttcacactaaaaacagatgaaaataccacaaaatttgccacaaatgccacaaaaacaacggaataa

SEQ ID NO: 594 - DNA, 1176 bp, Listeria innocua
gaggtaatctatgtgagaaaaaaattaattgaacagattttaatatcaccttcacctttttctattttcgaagaaaactataatgaattgagaaatactagatttttattatttgataacaactcaaataattttggaaaaaaatttcaaaaaatggaatttaataactttacaatttctccattagcagagtatcacaatacaatggttcttgatcaatatactgtaaaagaatcaagggaattagaagtagttcattgtgtagattttgattcaaacattattagtaacttaagaaaactttttttccatactaattacagtaacgaatacttaataaaattacttttatatgtgaaaaaagaacgtatacagcctaattgttcgccctatttaatagaatgtgccgcaaataattttaatttggataaacaagatatttatgaaagtttattatccttctcactattggaaaatacgaatattgaacaattgataactaaccatctaaataaagaaccctcatcaacagattatttagacacagatgaaagatggcgatctttaattgaactaaaaaaatatgcaactaaagaatatatcccaagatactattatatctattgtttattattgaagatgtattttcttaagttctcttctaaaaaatctgcaaaaaacaaactcattcaattattagatagtattaatacagaactatttagttattgggaaaatgaacttgtaatttgctacttatcattaaaagaagactctaaaactgattcgttttttggttctgtaaagcccaatacaaaagatatgttaataaaaatccaaggaatggcttgggatttatttcatttgcgatgtgctcatgaacatatggcagagcgtaataattattcaaaacgtatttttttacattcatttagctcagaggataaaggattaaactcaattattagattaaatccaataaaaagaattgcattcgatggtaaggatgtttatactcaccatagatataccatatttaatatgtgtcctgaagtagatgtatatacgattctaaatgaatacacacatcatagaaacaaaatgtgcaaagaaacaaattaccaagaactatccaaaaaattagagtttgaactcctacatctatcatcacgatag

SEQ ID NO: 595 - DNA, 1179 bp, Listeria innocua
atggaacaaattatgaatatttttcaaagcattaaattagctctaaaacaactactatccgccaaatttcgaacatttttaacaatgcttggaattattattggtgttttttctgttatattacttgtttcaattggcgaggcgatttcaaaaaatgtttctagccaattaggagatatggggagtaatctggtatctgttagcttttattcggataatccaaacgagaaattcacctataaagaagcgaatggccttttgaatgaggatgaaattggttcgccggaagtaatgaagaccaaagaagtaagaacgaatgtaaagacagcgagtagccaagtaactggagtaaatgaagattatgcgactataaaaaacttagaacttacatcaggtcgattttgttctaatgtagatgttcgatttgcccaaaaagtgactgtcatcggttcagaaattgctaaaaagtattttaaaaatcaaaatccagtaggaaaacatatccaaattgccggcgctagatatttagtaattggtgttttaaaagaaaaaggcgagagtttattcgggtcagcggacaagaaactttttattccggtcacttccgcagaacgactttttaaaacggattctgtagatttatactatattcaaactaaaaatacagaacaagtgccagacgttgtgaagcggacaaaacagcgactaagccaactttttccaaataataaagaggcgtatacggttgtcaatcagcaacaggcacttgatacatttgacagtattactagcacgcttaccattggtttaggcgcgattgctggaatttctttactcgttggcgggattggaatcatgaatattatgctcgtctcggtttcagaacgaacgcgagaaattggtattagaaaagcaatcggtgcaggtagtggggatattttgaggcaatttttgattgaagcgattgtgcttagtttgttaggcggaggtatcggtattttactcggaattttttccgcacaaatagttacagccgcatctagttttgacatgcatgtttctgctacaacgattcttttagcagttggattttcgatgtttattggaattgtgtttggtgtagtgccagcgcagaaagcttcgaaaaaaatgccgatagatgcgttacgagcagattaa

SEQ ID NO: 596 - DNA, 1188 bp, Listeria innocua
atggttgtctttaactttattccgagtatggttgcagatgcggctagtacttccgagagcaatttgacttataaagatgtacgaaatggcttttactttgttggatatgaagatgtgcaacttgaaaaaggtaaaagttataaatatacagtagcttatgaagcaaatgttgacatgcaagcgactaatactgttacaggtcaatcagcaaaagcaggactatttataccaaattcgtctggcgtagaacttgatagtaacaatgtgactactacacagaataacgtagtggatgtagcaaatgacggaaataaagtatttacacatatatttgaatttacagtaaaagaagatacaaaagcagatattggtacttatttaggagcaggatctgtcattccaacgactccggatgcaacaattatttggaaaaacgtatccgtaacaaatgaaaccccagcagaacaagcagaagctccagttattaatgcagaagataaaacaatcgaacaaaacgaaacttttgacgcattaaatgaagtaactgcaacagataaaaaagatggcgatcttactaaaagcatcaaagtaactaaaaacacagttgatacgacaaaaagtggcgaatatgacgttgactatagtgtgacaaactcaagcaaactcacaactacaaaaagcgttaaagtaaccgttactccagtagaaacaaaaacaaacacagctccagttattgatgcaaaagatcaaacaatcaaagttggtgacctatttaattcgttaaaaggagttacggcaacggataaagaagacggcgacttaacagcgaaaattaaagtaacaaaagacaccgtgaacaatgcggaaaaaggcgtttaccaagtaacttatacagttacagattccggtaatctatcagcctctcttacaatcaaagtgactgttactcaagatggaaaattaattgttaatccaagcgatccgacaaatccagctgatccatccaatccagaagtaacaaaaactcctgtagaatttgaaagagcttcagttgatccaacaacgactaaagtaaatgtgaacaaaattccaaaaactggtgatagctcgatgatatgggtagtcttagcaggactaggcttaactaccattggcatcagctcttatcgcaaaaaagcaaatagataa

SEQ ID NO: 597 - DNA, 1188 bp, Listeria innocua
attaaaaattgtaaatctattgaattccataaactagtttggagggaaaatatgaaaaaatattattgtatgtatttgattgttttagtattgttatctggctgtacaacaactccagtaaaggaaaatacgagtaatcaatcaatcagtaatataaaagtagaaaatataaaagacattattccaatcagcaaagaaatagtcaaggatcaaaaaattaaagtaaagtcctatattcttaatgcccaaactggagagcgtattaatacagatattttatttgatgaagttccgaatcttttccaaatgcatggatacgatatttactcttcagcatatcaatattataaagatcgtcttgttattggctgtcaatctggcggagggaaaagttatgtttataaaatatctgacgacgggcagttgactgtagacacagtcaactataatatactttattatgatgaaaataaaagattatatatagcacaaacagatgaaggatatgtaacattaaatgaaaaatatgcagtgaatgaagaatttccagtacttaaagatagcaatattactactaaagaccagaggtttatcttgcaagcctatggtgttaatgaaatttactatttaggaagatatggtgaaaagacttaccaattaatgaaatataattcaaatgaaaagaagttagttaaagtttatgatttggtagaagaattaaaacaacagggcattgattttgaggaaggatcagaaattaatccaaaaatgactctgtataaagaaggtcaaaaatcatatatttctatctcagtagatcgaatatggaatggaaaagatgactttaaagaaattaataaaaatatcctaataaatattactaataatgtagccatatttgataatgcttttgaggaggatgattctgcatatcctgaactagatttttcaagaaatgtaatgcaaagttctgataaaatatctattttcaaattaaatgaaggaaaaataataagagtgaatgactacaatgcagaagatataattaatgatggagataatcatattaactatatctatcgtatggatgataaggaaattataatgaatgtgccatcaggagttgttaaatataatattgctgaagataaaagtgaacaactatatgtagataggcttgaagaatga

SEQ ID NO: 598 - DNA, 1188 bp, Listeria innocua
atggcattaaaacaattaatgattcaaaaaaaattagattcaaaacgcggtgaattagaggaattagaaactcgttctaaatcttttaaagaacaagaaggcgtattaactcgcgcacttgaagaagcaaaaacagaagaagaagttgagacagttgaaaaaagtgtcgatgaattagaaaccgaaaaagaaaaattagaaaaagagcgtgacgaattaacagcaaaaattgaagagttagaaaaagaacttgaagaagcaaatgacaaacctaacgcttctaaagacgaagaaaaaggagagggcgaagaacgcatgggaaaatataaagataaagaagtacgtagtgcagtaaatacatttattcgaacaaagggtcaaacaagagctggattagtatctactgatgcaggggttatcattccagaagaaattatttattcacctgaaaaagaagttaagactgtcactaatttagctgaattagtatctaaaacaaaagttagcaccgcttccggtaaatatccgattttaaaacgtgctactgctcgattaaattctgtacctgaattagaagccaatcctcaattagcaaaacctgaatttgagcaaattaattgggaagttgtaacttatcgtggtgctattccgatttctcaagaatcaattgacgacgcagcagttgacttggttagtatcgtatctgaaaacgcacaagaacaaaaaatcaatacaacaaattatgctatttcagaagtattaaaaacattcaccgctaaagctgtaacagatacagatgatattaaacaaattttaaatgtgacattagaccctgcgtatgaacgtaatgcggtcgtatctcaaagcttcttgcaatgggtcgatactttgaaagactctgacggtcaatatattttacatcgtgatattacttcgccgtctggaacttctttgttcggaatcaaattagaggttgttaatgacgaacttctaggactagcaggagaagcacatgcattcttaggcgatttaaaacgtgctgttctatttgcggatcgtgtagacattaccgcgcgttgggtagataacgaaatttacggtcaatatctacaagttggcactcgctttgatgtaaaacaagcagattccaatgctgggtacttcttaacatttacacaaggagcgtga

SEQ ID NO: 599 - DNA, 1194 bp, Listeria innocua
atgaaaaaattagaaaaaagcgtgccagtaatccggtttaaaggcttttctgaagcttgggaacagcgtaagttgagggatattgctaattatcgaaatggaaaagctcacgaacaagttgaagatgaagatgggaaatatacaattatcaattcaaaatttatttcaactaatggaaaagttcaacgatatacaaatgaacaagttgaaccaatctttgatggagagattgccatggtgttaagtgacttgccaaatggtaaagcactggcaaaactctttcttgtgaaagaagatggtaaatatactttaaatcaacgaattgctggtattactccaaatgaaaatattgatccaatatttttgaatttcagaatgaatcgaaataattattttctaaaattcgatagtggtgttactcaaacaaatctatcaaaatcacaagttgaaaattttattgctttatatccaacttttgatgagcaatacaagattggtctattttttactcagttagatgacactatcgctcttcatcagcgtaagttagatactttaaagctgatgaagaaaggactcttacagcaaatgttcccaaaacgtggggagaatattcctaagattcggtttgatgattttgatgatatttgggaacagcgtatactcggagaatttctcaaagaaagtaagattaaaggttcaaatggtagtcttgcgaagaaattgaccgtaaaactttggcgaaaaggagtagttcctaaagaagagatttatacaggcagttctgctactcagtactatattcgaaaaacgggacaattcatatatggaaagttagactttttgaatcaagcatttggtattataccacttgagttggatggctatgaatcaactcttgattctccagcatttgatattgaagaaagcataaatgaaacatttttattagagtacgtatcattggcacgcttttacaaatatcaaggaaatattgctaatggttctagaagagcaaagagaattcatactgatactttttttgaaatgcctattcctttgcccaatagtaatgaacaacaaaaaattggaactttttcccgacaaattgacgacttaattgcccttcagcaaaataaacttgagaaactctcttctctaaaaagattctatctaaagaacatgtttatataa

SEQ ID NO: 600 - DNA, 1203 bp, Listeria innocua
atgtttaaacgacctaattatctcaagcaacttattcaattcaaggattccgatttcataaaagttattacaggtgtgcgtcgttctgggaaatcggtattattaatgctttataaagagtatttattgaaagaaggcataccggaaaatcatattatacacataaatttcgagagctttgaatatcaaacaataacaacagaagaaaaatttcgtcaaaaattagacgaattgttgcccaaagatgataaaaaggtttacttactatttgatgaaatccaaatggtcgaaggttggcagcgcgttgttaatggtattcgtgtgagcttcaatagtgatattatcatcactggatcaaacgctaatatgctttccggtgaaatagctacccttctaagcggtcgttacatcgaaatccccatttacccattttcattttctgagtttttacatgtaaaaggtattgaagctgattctcgaaaagtagacagcgcttataatgaatacgaaaaatacggcggctttccgagtgttgttattgccgaagaatctatcaaagatactatcttatccggaatttttgacactattgttttgaatgatgttgcattaagagcgggggtaaaagatgctaccgctttaaaatccatcattcgatttttagcagataatgttggccaattagttaatgcctcgaaaattgtaaacaccttaaaaagtgagggcgttgacacaactgtccatactgtaaatcgttatttggatttactagagaatggttatttattttatagagcaaaacaatatgatattcgtgggcgagaatatctgagaactaacggaaaatattttataatagacaccggtttaagaagaaatgcggttggtagaaaagatgggaactatagtaatcgcttagagaatatcgtttatatagaattattacgtagaggctatacagtagacgttggtaaacttgatagtaaagaaatagattttgttgctagaaagctagacgaaacattatacatccaagtagcttatgaatttccaaataacaggcatgaaacagataatcttttaaatattaaggataattataaaaagattgttgtcactggtagatattatgaaacaactcaaatagatggaattccaattatttatattgttgactggttattatcagaggaattcaaataa

SEQ ID NO: 601 - DNA, 1206 bp, Listeria innocua
attcgaattgagggaggtgaacaaatgaattggagaattaaagttccgtggaaaaagaaaaggtctcaagattttggctttgtttggaatggagagtcttataattttgcattgaatagcggatatactaagctttccgataatgcagaggtgaaaattgccgtcgataaaatagcagacttagtctcgaatatgacagtgcatttgatggaaaatacagaaaagggagatattagaattagagacgaattgtctcgaaagattgatattaatccgtactccctgatgactcgaaagacatggatttataatatcgtatctaatttattactttacggtgatggaaatgcgattgttttaccggagataaaaaacggactgattagtgaattaaaaccgcttgacccatctttagttgacttcgatgtaagagatgattcgtacaagattcattataaaaacaaaacatacaatcccgacgaagtggtccatttcgctattaatccagactcggaatatccgtttatcggaacaggttacagggtagctttaaaatcacttgtggataatttaaatcaggcaacagcaacgaagaaggcatttatgagcagtaaatttatgccgaacttaattgtaaaagtagatgcaaatgcagcagaattgtcatcagaaaaaggcaaaaacaaaattgaagatatgtatttgcagcgaacggaagaaggaaaaccttggataattccggcggatttaatagaaatagaacaagttaaacctttaagtttaaatgacattgctattaatgaagcagtaaatattgataagaaaacggtggcgggactcttaggagtacctgctttttttgttggtgtaggagagtttgacaaaaacgagtttaataattttattaatacacgaatcatgtcaatcgcaatgattatctcgcaaacgttgactagagatttattaatcagtccaacacgatttttcaaactaaatcctcgaagtttgtattcatatgacattacggaattagtcgcagcaggtgggcaaatggtggatagaatcgcaatggatagaaacgaacttcgcgattggattggcatggcaccacgtgaggatatggaggaattacttgcattagaaaactttattccttctgaaaagctaggaagtcaaaacaagcttaaaggaggtgatgatgaatga

SEQ ID NO: 602 - DNA, 1221 bp, Listeria innocua
aagaggcagcttgtgttgcctcttttttatgtattttatcactactttaacttaccatttcgagcttgggaacagcgtaagttgagggatattgctaattatcgaaatggaaaagctcacgaacaagttgaagatgaagatgggaaatatacaattatcaattcaaaatttatttcaactaatggaaaagttcaacgatatacaaatgaacaagttgaaccaatctttgatggagagattgccatggtgttaagtgacttgccaaatggtaaagcactggcaaaactctttcttgtgaaagaagatggtaaatatactttaaatcaacgaattgctggtattactccaaatgaaaatattgatccaatatttttgaatttcagaatgaatcgaaataattattttctaaaattcgatagtggtgttactcaaacaaatctatcaaaatcacaagttgaaaattttattgctttatatccaacttttgatgagcaatacaagattggtctattttttactcagttagatgacactatcgctcttcatcagcgtaagttagatgctttaaagctgatgaagaaagcattctcgcaacaaatattcccagagaataataggaagaagcctaagatccgatttactagtttttacgaagaatgggaacagcgtaagataggagaatatggttatttctattatggaaagagtgctccgaaatggtctgtggctcaagatgcaactacaccatgtgtaaggtatggggaattgtatacaaagtttggaccggaaattgacattgtacactcctatacaaatattgataaaagcaacttaaaatttagttctggaaatgaagtgctagttccacgagttggtgaaaatcccttggattttgccaactgtagctggctttcgatttccaatgttgctatcggcgaaatgatatcggtttataatacagagcaatatcctttgtttattgcatactattttagaagtaaaatgaagtacgaatttgcaaaaagagttgaaggtggaaatgtatccaatctttattattcgtatcttgaggatattttaatatcagtaccatcaatagaggagcaaaagaaaatagctgaatttctgaataaaatagatattactattaatcttcttcaaaataaactaggtagaattaaagaattaaaaaaagcttatctacaaaatatgtttatataa

SEQ ID NO: 603 - DNA, 1227 bp, Listeria innocua
atgagaaaagatgtcttagaaggagtgttactacacattatgaatgaaattcatcctaatttcgcagcccttgccaaacaatataattgtgattatcgaacggttaaacgctattatgaagctggattgacgggggatttagataagcttagagagagaaaaccttcggtccctcctttgcttcatggttttgaagaaattattcgtgataaattagaattaaattgttcggcagcttctatcttttatttcttaggtaaaaaagattataaagggagttatacaacgattaaacgttattgtcgtaaataccgggaagaaaaagtacaaaaagcaacgattcgcattgagaccacacccggtctttctgctcaagtagattggaaagaaaacgttaaaatggttagccgagacggtgaagtgttttatttcaatatttttctctatattcttggttactcaagaatgaagtacttagagctcacttttgatcgaacacaaccgacggtttttcagtgtttagtcaatgcctttgaatattgcggaaacggtattcctcaagaaatttggtttgacaatatgaaaaccgttgtcgaccgtagtaagagtcaattcacacaaactgttttcaatgaaaaattccggcaatttgcgaaagatgctggattccatccgattgcttgtcgtccttttagaccccaaacaaaagggaaagtggaagcattagcccgaacagttgagcgtttaatggtctttaattatgaatttacagatgtacaagagttaaaacagatcatatatgaattgatgcaagatctgaatggctccgtctcacaagccatccacaacaaaccgacggttttactaaaggaagagcttcccatactagctcccatccatcgtttagaattgctcagctatgtttctagaaataaacgtctactgagaaaggtatcgatggagtccatggttcaatatcaaaatgctaaatattctgttcctgttaaatatattgggaaagaagtgacgttagatattcgtagggacaatctatttgtttggtatggggataaatgtattcgaacccatcctataagtgaaaaagcgcttaattatcaacgcgaagactcgcttgaaattttgcgttccgatgtatttaaatatttagaagatgaagaattagagcgatttgtcgatgataatttacatgcatatgacgatctataa

SEQ ID NO: 604 - DNA, 1239 bp, Listeria innocua
tgtctactttataaacagtataccattaaaaaaactgtctactttattagtatatatccaactgtagaagttgatgttcatttaacagatggaacgataggaagggcagctgttccttccggtgcttcaactggagatcgagaggcagtggaacttagggatgggggcgatcgtttacagggattaggcgtgaaaaccgcagttcagaatgtaaatttgacattaaatgatgccttagtagggataagtccatttaaccaaagagaaattgatcataaaatgattgaattagacggaacagcgaataaaagcaggctaggagctaatgctatcttaggtgtttcaatggctgtagctcgtgctgcagcaaagtctgaagcagtccccctatatcgctatctgggtggaatcgatttagaacttcctcgtccattttttaatgtcattaatggcggaaagcacgcagattcaggtatagatgtacaagaatttttaatcacacccattgcagcgctctcttttcgagaaggcttagaatccattgcggatgtttaccatacattgaaaaagcttttatcaaaaagaggattggcgacctctgtaggtgatgagggaggatttgccccacgactcgcttctacagaagaagctcttgaagtattggtagaggccataaaaaaagctggatataagcctggagaagatatcgcgattgcgatggatccggcagcaagtgaatttagtgaaaataacacttattactttgaggggaaacaactatcatctgaagaaatgatccactactacgagcatctcgtacaagagtttccgattatttcgattgaagatggattgtctgaacatgattgggagggctttaaattaatgacggagaaattaggaaataaagtccaattggttggggatgacatttttgttacaaatccaattatttttcagcaaggaatagataaagggattggaaatgcgatcctcataaagctaaatcaaatcgggacagtaacagaaaccattgatacgataaatttagctagaaaaaacaattatgcaacgatgatctcccaccgttcaggggagactggggacacctttatcgcggactttgcagttgctatgcatgcagggcaaattaaaacgggttcaattgcacggtcagaacgtgtagagaaatacaatcaatttttacggattgaagaagaacttgcaaaaataaagtaa

SEQ ID NO: 605 - DNA, 1242 bp, Listeria innocua
atagagaggatggaatacatgagatacataatgattgatactaattacttttgtgagaaaaaatttgatacagaaacaatcatattgaaagacttcaaaaaaatgattgaagagcaattaggtacatttttgtataatgatattttaattggagaatatgaaagtaacttagaaaaattaacaaacagtaccagagaagcgtttaaagcatttttacgtaataaaagcactttaaatgatgttatacctatgtttgggaaaaaaagacttgaacaaaaagttgcagaatatgaagaaaaatatttaaaaccttatgcagatagattttttgattatatcgagatgattaacggaatagatataatgattaaggatatagatattgaagtactttttgataaatattttaatggagaaccaccttttgaagctaataaaaataaaaaaagtgaatttccagatgctataattttcgaaagtgtgctaaattggacagaaaaagaatcaaaatttaataagtttacagatttgttatactttgttacaaaggataacggcttaaaagaagcatttgctcctactttggttcatgttgtagaagatttaagggattgcttaattagttcactagcagaagaggtagaaagaaatatcagtgaaaatattgaaagtgatgaatttaattgcgcgttaaatgatttgttagaagaaaatataaaagattttcttatggaaggatatctagatcttgataatggagaaatagaagcagaggccctgagatataatatagcaggaattggaaatatggactatgatttgttggcagcaaacaaagatgggaaagaattgaaaattataatcgccatctcaaatgtggatctagacttaattgtaaactattccgaagtatacccagaatcaggatactatgatagagagactggcgaggtatttggcttagaggtacatgaaacaaagcgtaatataggggtagaattaaagctagttgtagaattatcaattgatgagacaagtatgctctctaaaagattaatgtgctcaatagcagatatcgagactgaaactaatcctatattaaaggaagatttgtacaattatgaatacgatttaaaatctagcaatgcttctgtgttaattgatatagaagatatacaattaaatattgaagaaatggtaagtccctcagaatatttggaagatcctactatgttattttaa

SEQ ID NO: 606 - DNA, 1254 bp, Listeria innocua
gcttttctttttatcgaaaaaagaacatatgtgcgaaaggagggcttatttatggtaaaaaaagtaaaaggtaggcgttatgagggttctattgaacaacgtagcaaaaattcatggcgtatgcgcgtgactgtaggctatgactacaaaggtacgccgattcgagctgacagaacgacgcgaacaaaaaatgagagggagcgagaaagagagttaagaaatttcatcacagaattagagcaaaatggatatacagctcctgcaagaatgacatttaaagcatttgttgagaatgagtatatgccgaaacatgcacaaaataacctagaagttaaaacctggacagaatactacaaatctatagtagcaagagcttacccagcctttggcggcgttcaaatggataaaataactacacttcatatagttaacttagtcgcaaaattacaaaagcccggcgcaagattagatgttaaacctacagattcagacgaaaagaaaaataagccgctttcgccgcgatctatcagaaatatttattttgcgataaattcagtatttgaaactgcggttgagtggaaagtaatcccaattaaccccgcagagggtgtaaggcttccaaaaacaactaaaagaccgcctactatttatactcctgctgaaattgaattgttaaatgcagctctagtgaaagagccacttagattgcaagtaatgatttatatagcgctgatttcaggttgtagagaagctgaattagcagcattagaagtaaaacacgtgaacttaatagaagatgagctaacattcgaacaaacgctagttgcaaaagcaggagaaggtttacttcttaaagaatcaactaagaatgatgtagctgggatagtttctatacccgcttggttaactaatttaatagaaacatatataagcaatgaagttttagacctaaaaactgaagggaaatgggccaatcacaaatttttattcgccgacatggaaggcaaaccgattaggcctgattcgatttatcagcgttggaaacgatttttagaaagacacaacttgccggtgattcgttttcatgatttgcgtcacacatctgctacacttttattgaacaaaggtagagatataaaaattatccaagagcggcttagacataaatctagtgtgaccacttcaaacatttatgcacatgttttgaaagatacgcacaaagatgcagctagcgattttgagaaccctttttaa

SEQ ID NO: 607 - DNA, 1257 bp, Listeria innocua
gtgcgttgttgctccctgtggctaggcgctggtaaatcagttattttatcagaaataattcgcatgacaacgcgcaataaaaataatgttcttttcctagttcacagaaaagaattgattgaccaaatcagaaatacactcactatgaatgatgttgacatgaaattcgtcaatttggggatggttcaaactgttgttagacgtttagaaaaaacttccgagccagctttaatcattattgatgaaagtcatcatgtgctagcaaacagttataaaaaaataatcaatcacttttctaatgctaaagtggtcggatttacagcaacaccagtgagaataaatgggggtggtttaggagatataaacgatatgttaatcgaaaaggttaatgtgaaatggttaattgaaaatcaattcttagcaccttacaaatattttgctcccgaaatcgttcaaacagaaacattagatatcaaacgaactggtgaatttgacatgacaggacttgatgatcaattcaataaaagaatgatttggggcgatgtcatcaaacattatcaaaagttagcaaacggagaacaagcaatactttatgcctcttctctttatcaaagcgaaaaaatggcaatgagttttgaatcagtaggcattacatccgcacatattgacgggaaaacacctaaatccattcgtgatgacattatacaacgatttcgagaaggcgaaataaaggtgctttgcaacttagatttaattggtgaaggattcgatgttccagactgttctactgtgattatgctaagaccaactcaatctctatccctgtatattcagcaatcaatgcgaggtatgcgataccgaactggtaaaacagctattattattgaccacgttggaaatgtcaatcgctttggtttgccagacatggaacgaaaatggtccttagaagcgaaaaaaggaagtaacagcaacaaagcagaagcacctgtaaaaatttgccctgactgttttatgacagttttatctactaatataaaatgctcgcattgtggacatgaattcaaagtagaagtaaaaccaatgcaagttgatgaggcagcagagctacaagaaataacagaagcagtttttaaagtgaattatagtagtccaagcgaatgtacgaacatgaaagaattatatgaatatgcaaaagaacacaattataaaagaggatgggcattccatcaaggaaaagcaagaggatttatcaaataa

SEQ ID NO: 608 - DNA, 1260 bp, Listeria innocua
aaacacatgatagaatatgatgaaagaatctacaaaaatattgttttgtttagcccatttatcaaaatcggaaaaatccaagatgcatttaaacaaataagcacaaaaaaagaagaagagtattcattgaaaaatacacttaaagagtataatcgaaagtttagagaaaaaaacaataaatcctatgattatgcttcaaaaagtctagctgccatggtaaaaaatgaaattttaactattgagcaaattgacgaaatactatttattattactgaagattctttgtttaattcttacatttataagttatcaagtgagcaattaaaaactaacggggaaagattaatcaattggaaacttccaaataccattgaaatacttgaaaatataggaatatctacaaagaaggattttaaggtatgtgggtataaactagttgaaggaactcctggtaccgtggaatcattgagactattattaattgatagtcaaatacttcaaagatatgataaagaagaggatgaaacttataattttatttttccaactttagtagaatatgatttcagaagacaactgttgcatattcgtacacaagagattaataatattattaatacagaagacaaatttagaactgcatctgggcgcataaaaaatactcttacttttattgattcttttaagaatcctataaaatataaacatgtaagtaattttaaagaaaaactatttaatattgaagaaaatttactaaaagaggtaagaaataaagttaataaagaactagattcttttaaagagcctattaatgttttctgtaaatcaatagatgcaaaatataaaaataaaagtgagaatatttctacagctgactatgttaaaacatctattcaaaccattatagccatgaatatagttcggaatcctttaggcgatattactagtattaagtttagaaataaatcaacagatgatgagagcagctatagtgaagttagcatccgagataaaaagaaccattgtatctctgttgataacctttattggctaaacctagctgtattgttagatgtaaaatctgtagagtctatgaaattagttctttacaaggataatctcacatcacttgtaaacttagattattcattaggtacaggtaatattaaacttttaaaaaatacagctggtgaagatggaacaatgcctagtcaagtgaaatacgattcagttctagacgaactagttaaatttatctaa

SEQ ID NO: 609 - DNA, 1287 bp, Listeria innocua
ataaaggtaggatatcgagctatgaataataacaaattcgttttttggaatttttggaaaaattataaaaaaactagtaagcaatggttgtcaacgggagttgttactttttgcgggcttttactaataaacgtgactattttaattgtttttattggaaatacatatattaatgtaaattttactgaaaataattctctaaaatggatagaggttcagagtgatgggccttcgattccattaagacaaatatcaagaaatagagataatacgattacactattaccaaagtatgaaccctttatgagtggtgtaacgttcgaaaattatgatgaaaaaggaaatgttaaaatgtctatggatgttaatagtatttttgttccttatgaatctcttgaattttttggcataaacataaaagatattgataaaatacagtgggatgagggaaaagtaattttagtttccccaattgatgcaaaaagtaatgggctgttagatggacagaaattgtctgttccgtttgataaaacagcattcaataatgaatttgatttaagtgatactgaattagaagattatatagctaaaataaatgaaaataaaattgaggtaacagttaaaattcgagaaattacaactttgcctcaatatgaaaattattctttacttcctattcaattattagtcaatcaacacagtaaggttaattctataagtgaagacgaatttatttcgaatgctaaattaacagatgggttttacatcatagtaaagaaattcgaagatgtagataaaattgctaatgaatacaaagcaagaggttattctcttaaatatgcattagagtcgtttcaaaatctatccgaaatattatccaatgtaaagttagtaagtaattattttataatactagtgtcaattataattagtataacttttattaataattgctctcaaatattatatcatcgaaaacatgaaataggattacaacaagcgctaggaattagtaaaaggagcttgatttggagtactctaatagaattcgtttttcaaagtattatagtaatgattatcattcttccaacgattatttttgaatggtttgttgttaaaagtatgttaactaataacatagtggagattaatggtttagaaacagtacttgttgtttggggaataaattggattattatattagcaatttctttaataggagctacgttcccattaatgggaacgtttaaattaaaaattgtaaatctattgaattccataaactag

SEQ ID NO: 610 - DNA, 1296 bp, Listeria innocua
atagtaacgcagctcgtggatttattacgacggatgttggggatgcggatgctgacgccgatgctgacgccgatgcggatgctgatgccgacgctgatgccgacgccgacgctgatgcggatgcggatgccgatgcggatgcggatgcggatgctgacgccgatgcggatgcggatgctgacgccgatgcggatgcggatgcggatgcggatgccgacgccgatgcggatgcggatgctgacgccgacgcagatgccgacgccgatgcggatgctgacgctgatgcggatgcggatgccgacgccgatgctgacgccgatgcggatgccgatgctgacgctgacgctgacgccgatgcggatgccgatgctgacgctgacgccgatgcggatgcggatgctgacgccgatgcggatgctgacgccgatgcggatgctgatgccgacgctgacgccgatgctgacgccgatgcagatgcggatgcggatgccgatgcagatgcggatgctgatgccgacgcggatgctgacgctgacgccgatgcagatgccgatgcggatgccgatgcggatgctgacgccgatgcggatgctgatgctgacgccgatgcggatgctgacgccgatgcagatgcggatgccgacgccgatgcggatgcggatgcggatgcggatgctgacgccgatgccgatgctgacgctgatgccgacgccgatgcagatgcggatgcggatgctgatgccgacgctgatgcggatgctgacgctgatgccgacgccgacgctgatgcggatgcggatgcggatgcggatgctgacgctgatgccgatgctgacgctgatgcggatgccgatgcggatgcggatgctgacgccgacgctgatgcggatgctgacgccgatgccgacgccgatgccgatgctgacgccgatgccgatgcggatgcggatgccgacgctgatgcggatgccgacgctgatgctgatgctgacgccgatgccgacgctgatgcggatgcggatgcggatgccgacgctgatgcggatgctgacgccgacgctgatgccgatgcagatgccgatgcagatgccgacgctgacgccgacgctgatgcggatgctgacgctgatgcggatgcagatgcggatgccgacgctgatgccgacgctgatgccgatgcagatgccgatgcagatgccgacgctgacgccgacgctgatgctgacgccgatgcggacgcggatgcagatgccgatgccgatgccgatgccgacgctgatgccgatgccgacgtag

SEQ ID NO: 611 - DNA, 1302 bp, Listeria innocua
atgaaagcattagaacgatttctgtcaaaatggctattaccatttgcaaaagtattagaaagtaacacccagatgaaggcaatacgtcaaggaatgatggcacttgttccaataactttagttggtgcagtcccggtattgttccagcaattaggaggaatcccaaaactacctagttggattgctgctgttgctgaatatattaataacattacctccccgattcattttgctacctttggattgatgtctgtctatgtagcgattttcgtagcatattattatgcaaaagaacgcaatttgtgggatattggggcgattgtaacagccttaatgagttttgttgtagtagcagtaagaccacttgaagctggcggaagtgatgtaacttatcttgccggcgaaggtatttttgtagctttagtaattagtttattatctgtagaaattctacacatttttaaaaataaattgaaattcacgattaatttaggtcagggtgttccaacgccgattttacgatcttttgaaaatttatggccgattttattctcggttttaatcgtagcgattttaagctttggggttgaatcaattagcggtattcgcgtagttgagcttattcaaacgttattctcaccactgacttcgcttgtaaacacgctacctggaattatgttgattatctttatccagcaattattatggtggtttggtattcacggatattctgtaatggcgccggtttggttaagtgtagctttccaaaacgtagacgcgaatgcagcagcacttgcaaaaggagagccactttcttccatgcttattttcactccagactttatgtggagtatcgttggggtaacaggagcaggagtaacaggcgcgctcgttgttattatgatgttttctaaatctaaacgttataagacgcttggtagattggcattaattccaacatttttcagtattaatgaacctgtaatgtttggtgttccgattgttttaaacccgagattctttattccaatgatggttgcgccacaaattgcagcattaattggttggttctcaatcaagctaggtcttatgaatccatttacgatggtttctccatatgtaccagttccaatcggtgccattgttgcatcttttgactggagatacattattgtacttggacttatcttgatttgttcagcgctcatttactatccattctttaaaattgctgaaaaagaagcgcttgtacaagaaaatagcggggaccaagaagctagtctagatgattttgatttttag

SEQ ID NO: 612 - DNA, 1308 bp, Listeria innocua
atgcaaaaacaaattattactatcgccggtggtggaagtacttatacgccaggaattattcaagcagtgcttaatggacaagaaagacttccagtaagtgaaatccgtttatacgatattgaagcatctagaaatgaaaacatgtttttaattctgcaatatatgctagaacaacaaggcttttcaagtattaagctagttcagacaacaaacccagaagaagcctttactggcgctaattttatcttctcacaaattcgtgttggtggacttaaaatgcgtgaaaaagatgagaaaatcccacttaaacatggcttagtcggccaagaaacatgtggacttggcggattttcatatggacttcgcagcattggcccacttttagaattagttggctttattcaaaaatacgctccagaagcttggattttaaattatacgaatccggaaacaattatttctgaagcggtacgtagacaattcccgggcattcgaatgattaatgtttgtgatatgacaattggtattgaagacacgctagcgaaaaattacggatatgaccgcgataattgggttgcaacttactacggtttgaatcactttggttggtatacaaaaatttatgataaatcattgaaacgtgatattatgccagagcttttagagaaattaaaagttcaagaaattaaagaagaagatccaagttggaaccgcgcatttaatatgattcgcttcatggtgcaaaacttcccagataacttaccaaataattatttagaatattatttgtatccggatatgtacgtagattatgcagatccaaactatacgcgtgctaacacagtaatggacggtcgcgagcaaaaaactcaagaaatggccgataaaatccgtaataaagaaaaagaagatgtgcttgatttctactttggcgtgcatggcttatatattgttgatattgctacgtctctattaaatgacgagaaaagtcgctttatgttgatagttgaaaataaaggttctattccaaacttacgcagtgatgcggttgttgaagtaccagcttatgttggggcgaccggtgtagaagctattgccttacctgcgattggagatttccataagggcttaatggaagcacaagttgcagcagaaaaattactcgtagatgcttactttgaaaattcttatcaaaaagcattacaagcatttacacttaatcaatcagttccaaatgcaacagtagctaaaaaagtgttggatgaaatgattattgaaaataaagcattttggccagttttaaaataa

SEQ ID NO: 613 - DNA, 1311 bp, Listeria innocua
cagttggtttttcaactaggaaatctctccagtcgatatctacgtcggcatcggcatcagcgtcggcatcggcatcggcatcggcatctgcatccgcgtccgcatcggcgtcagcatcagcgtcggcgtcagcgtcggcatctgcatcggcatctgcatcggcatcagcgtcggcatcagcgtcggcatccgcatctgcatccgcatcagcgtcagcatccgcatcagcgtcggcgtcagcgtcggcatctgcatcggcatctgcatcggcatcagcgtcggcgtcagcatccgcatcagcgtcggcatccgcatccgcatccgcatcagcgtcggcatcggcgtcagcatcagcatcagcgtcggcatccgcatcagcgtcggcatccgcatccgcatcggcatcggcgtcagcatcggcatcggcgtcggcatcggcgtcagcatccgcatcagcgtcggcgtcagcatccgcatccgcatcggcatccgcatcagcgtcagcatcggcatcagcgtcagcatccgcatccgcatccgcatccgcatcagcgtcggcgtcggcatcagcgtcagcatccgcatcagcgtcggcatcagcatccgcatccgcatctgcatcggcgtcggcatcagcgtcagcatcggcatcggcgtcagcatccgcatccgcatccgcatccgcatcggcgtcggcatccgcatctgcatcggcgtcagcatccgcatcggcgtcagcatcagcatccgcatcggcgtcagcatccgcatcggcatccgcatcggcatctgcatcggcgtcagcgtcagcatccgcgtcggcatcagcatccgcatctgcatcggcatccgcatccgcatctgcatcggcgtcagcatcggcgtcagcgtcggcatcagcatccgcatcggcgtcagcatccgcatcggcgtcagcatccgcatccgcatcggcgtcagcgtcagcatcggcatccgcatcggcgtcagcgtcagcgtcagcatcggcatccgcatcggcgtcagcatcggcgtcggcatccgcatccgcatcagcgtcagcatccgcatcggcgtcggcatctgcgtcggcgtcagcatccgcatccgcatcggcgtcggcatccgcatccgcatccgcatccgcatcggcgtcagcatccgcatccgcatcggcgtcagcatccgcatccgcatccgcatcggcatccgcatccgcatcagcgtcggcgtcggcatcagcgtcggcatcagcatccgcatcggcgtcagcatcggcgtcagcatccgcatccccaacatccgtcgtaa

SEQ ID NO: 614 - DNA, 1335 bp, Listeria innocua
ttggtagaagctaatgtagttgatttagtcgttaaccctcattttgaggagtacgtatttgattggacacaaaaaacatttcttgctgtaggtgcttatggttcgagtaaaagctatgcaacagctgaaaaaattataataaaattatttgaagaaaaacgaaaatgcttagttgttagggatgttcacgaatcgcacaaggattctactttcgctttattaactgaaatccttgaggaaatgggtgttgttgggagaggtaaaaggaaagttgtaattactcaaagtcctatgaaaataaaatttcctaatgggtcatccataatttttaaaggattggataaacctagtaagttaaagtctatagctaatatttctattatttgggtagaagagtgctcagagattagttatgctgcatacaaagaacttttaggacggttaagacatccgtttttaaaaacacatattattttaacttcaaaccctgtcagtatagataattgggtctatttacatttctttgaggacttcataaacaaacgttttatattgagtgattcgttattatatgaaaagcgaattattaaaaagaataatacgtattatcatcatagcgttgctgaagataattattttttaactcaagattatattgatgacttagaagatatgaagaattatgatcctgatttatatcgagttgctcggcaaggcagatttggtgtgcttggtactaaagttcttccgcagttagaagagaaggaccacgactggatgatagaagccatcaataacattaagaatccaattaatcgaaatggaatggattttggttttgttgagtccatgaatgcattactcagtatgacaatagaccctgacaagaaagatttatatattcactttgaatattatgcaaatgggaatacggatgatgtgacggctcaagatataaaggaatttaaagagacaaaagaagtaatttttgctgattccgcagagccgaaaacaattaaatactttagtgataatggatttgttatgtatgcagctcacaaatttccagggtcacgtttacaaaacacaaaaaaggttaaacggttcagacatatttatgtatcaagtaactgtagcaacactataaacgaattaaagcatttaacttttgctaaagataaattaggaaaaactattgaggatgaatttaatattgatccacatacatttagtgcgatttggtatgggctggacggttatgaagtagctgatattaaagacaaaacagaccgtagtaggcgagcaagaagggagcgaagaaaacgtggcaaataa

SEQ ID NO: 615 - DNA, 1338 bp, Listeria innocua
atgaatatccaagaaatagaagtaagcaaaattaatccggctgcatataatccgcgtatagatttacagcccgacgatccagaatatcaaaaattaaaaaaatcaattgaagaatttggctatattgacccactgatttggaatgaaagaactggtaatttagtcggtggccatcagcgttataaaattttactcgagggaaaaccggaaaacttaactgtatcagtagttaacctagatatagatcaagagaaagcattgaatattgcgttaaacaagatagaaggtggatggaatactgataaattaggcgaattactaaaaagcattaatgatgaagaaatgctaaatttaacaggattctcagcacttgaaatagatgaattaattaaagagttcgaattacctccagctactgtggataaagtaaaagaaaacccgttagactcgaatctgttcgagtcttttttgtttccgccgttttcttatttggattcgaaaacaagaagatggagggataggaaggaccaatggaaaaatttagggattagaagcgagctagggagagaaggtaatctcacgtttgcatctagcttacggtcagcaagtttgacaggaacgagtattttcgaccccgtactttgcgagttggcttacagatggtttactcctggagaatctgccaaaatatacgatccattcgctggcggctctgttcggggtattgtggcaaaagtgcttggccacgaatatactggaattgatttaagaaaagaacaagtagaagctaaccgcattaatgctaaagaaatcggattagatggcattaattggattaccgataatagcttaaacgcggataaacatattgaagataactcgatggacttattatttacatgcccaccttactttgatttagaagtatattcagataataaagaagacattagcaacatggaatacgatgaatttattaaagtgtattccgagatattagataagggtgcgaataaattaaaagataatcggtttgctattgtggttatttcagatgtacgagataaagctggtttttatagagatttgaccggtcttactaagtcaatttttgagaagaatggtatttacttctataatgacttgattttgttaaactcactaggttcaggagcattaagagctcgcagaaatatgcgtaacaggaagttagttcggatacatcagaatgttttagtgttttacaaaggaaatcctgatgagatacaagaacatttccccattttagaggtactggaagataatttagaagaagcgcttgaatctatcgacatttaa

SEQ ID NO: 616 - DNA, 1347 bp, Listeria innocua
atgttgccaaaggaggaaacggagaccttgagtaaaattgatgagctagtatttacgccaaagcaacaggatactattacattcccttttcaaaatgtaactcttgaagtcaacgagggaactcctcgatcaggaaaaaccacagcagacatctttaaaatggcttatatatactctatttcagaagaccagaatcatttagtcactgcttacaatcaagaacaagcttttcgactgtttatggacggtgacggctttggattgatgcacatatttggtaatcttgcagaaatgaaacatgatgaacatggcgatcatcttcttatacattctccgaatgggccaaagaaaatttactataaaggcggcgggaagatcaatagtgttggcgctattactggtatgtcactgggaaccgttacatttttagaaattaatttactccataaagattttatcgaagaatgctttcgacgaacttttgcagcaaagaatagatttcatttagcagaattaaatccaccggcacccaatcatccagtgttagaaatcttttcgcagtatgagaagtctgggcgttacaaatggaggcattggaccgctaaagacaatccggctctttcagacgaacgcaagcaagaaatatataacgaggtcaaacattcggcgtatttgttgcaacgtgattggtatgggaaaagagttttaccagcaggcatcatttatgaaacgtttgacgttgaagcgaatcaaattaaaaaaatgcaaggccatccaatcgaaatggtcttttttggtgatggaggtcaacaagatgcgactgtttgcgagtgctatgtaatcacagaacacgaagcggaaggcggatacacttacaacctcaatcaagttgccacctactatcacagcgggcgtgacacagggcaagtgaaagccggctctacttatgccattgagataaaacaatttattcaatggtgtatgaaagagtatgaagtaccagtaaatgagcctgtttttattgaccctgcctgtcgctggctacgtgaagaactggaaaaggttggtgttgatacagcaggagcagacaacaatgctcatgatgtgacaggtaaagcgcaaggtatagaggttggaattgagcggatgcagtcgctattaagcgaaaggcgttatttgcttgttgaacaacctaacgatcaatatgaccattacagttggctacaagaaattggtatgtatgtacgcgacgagaacagcggaaaaccagttgacaagaataatcacgcgatggatacaagtagatacgctacaaactacttttataggaattatgaagatatatag

SEQ ID NO: 617 - DNA, 1356 bp, Listeria innocua
taccggagccgatccatgagtaagattaccgccggtattgttttagcgacgaaatttattgtcccaaacagtccattaaataagtcgaagaaatactggtcaaactatatcaaatatattgatcgtgatgaagccgttcgaaacgagcattacaaagaatttagcatgattggtaatgaagaagagcgtacggaagaggaaaaagaacggaataaaaaatatatcgattatatgggaaatccgaaaaaaacatctggtttatttacagaaggaaaaccgaagttgacacaagctgaaaagaaaaaatataaagatgcgttccaaactgcagaaaaaaataacagcgttatgttccagcatgttatcagttttgataacgagtggttggctaaacaaggtatttatgatccgaagataggaatgcttgacgaaaaaagattgcaacaagtaactagtgcgtcgatgaaaagttttttgcggaaagaaggcatggaaggcagtgcgatttggttagcagcgatccataaaaacacaaaacattttcatgtgcatatctcggttactgaaccaaccccaacacgtaaattttattccaataaaagacggccggagttggaaaaaggaacggacgggaagccagtaagagatggacgtatggcaccagcaactagaagagccgtacgtagtaccgtttatagtgaaatagcacagcgaggaagcatttaccaacggatcgatgattatgcaaaagaacaacttcttacaccacttcatgcgtcgaaggaagtgattcgatcacatgaaaatgaggccttatttcttgagctacatcaaatgtataaaaaacattctggtcagtggaattatggaaatttaaacaaacatccagcaaaaaaagttgtagatcagatcacaacgaattatttaatgcagcatcatccagaagagatgcaagtatttcgtaaagcgtgggaacatgaaggtaacttacaacaagaagcctatggtaaaaaaacagaatttaatattcacacttacttagaaagtaaggatgaaaaattatacaagcagctaggaaatcaagtgctacaagaagttaaaaattatgataagcgtttcaatcattccaaatcagatcatcattatttagatcagcagggaaatttaaaaaaggaagggtctttaactccaaaagataaaattgcccgttatcgccggcgacgggggtcggtgatctatcagttgaaaaagatggattatgaattagataattcgtacaaaaaatggaaaaatgatcgcgcatttgaacaactagagcaggaaatggaaagagaaaaatcaatggacagagagtag

SEQ ID NO: 618 - DNA, 1359 bp, Listeria innocua
atggtcagtggaggaacgtttaatgccggtgtagaaaaaattcgtccaggtatttatacaaattttaaagcagcggcggccgaaagaactaaagcgggcgaaaggggaaccgtagcgttacctttagctgcatcatggggagcagctaaagagtttgtagaaatcaataaagaagaggacgtagagaaaaaattaggcctttctctagcgcatcaaagtttcttgttattacgagaaactttgaaattagcaaaaacagtgctagtataccgtttaaatgatggtattaaagcaactgcaacattggcaactgatgtggtagttacagccaaatatggtgggattgttggtaatagtattacgattaaagtagatgaaaatgtggttgatagttctaaaaaagacgttactacctacttgaatgaagttgctgtagataaacaagtagtcggaacggcatctgaactaatcgattctaactacgtttcctttaaaacgacaagtactagtgagttgcaacaatcatccggaactacgctagttggaggtacagatcaacctgttacaaacttggattacacccaattcctagtgtctgcggaaggtgaatattttgatactatcgcgtttccagtatcatcttcagacgttgctttgaaaacgtcttttgtttcatttgttaagcgtatgagagacgagcaaggcgtgaaaatcaaaggtgtggttgccaacatgcctgctgattacgaagggattatcaatgttcgtaatggggtgacattacgagatggtactattttagagcctcatcaagtagttgcttgggttgctggagctgatgcttctgcctctatgctgaagtctaatacttttgttaaatatgatggggcaattgatgctacacctcgattggccaatgatgaagcagaggaagcattacaaaatggtgaatttgttctgacatttgatgctcgcgacaaagcagtatacgtagaacaggaccttaattcattaactacatttagtaaagaaaaaagctctaaattccgaaagaataagatttcgcgaatcctagatggcattaataatgatacacgcagaaatattttagacgctattaaagaaagaaaagatgctaatacagacattcccgcagatgaaaatggggtgcaatttattctatcgatgcaaacagcatatttaaatgaattgcaggatagtggagcaattacaaattttgactccacagctgatattacagtttcactaaataataatgttgacggattcattgtaaatcaatctatcgagccggttgattcaggcgagaaattctactttactacggaggtgaaataa

SEQ ID NO: 619 - DNA, 1362 bp, Listeria innocua
tttattatagactcaacaaatcctctcccgcaacttctcctatcaatctcctccaacattattataataaaaattttgacaattctaattataaccgctaaattagaagtacaacatattataaaacacaaaaggactggacacatgttaaaaaacaaaaattttagatatttatggttaggtcgtttaatcagtaatgccggggatagcatgtattacattgtattatcttggtatattttaacactcactaataattcgttttgggtaggagtagttaattttgctatttttatacctaacattttttcctttttatttggtcactggatagatacacattccaagaaaagatccttacttttatgcgaattcgggcaattatttgcgattttaattatggttatcagtattttgttggattttcaaagtcctcttttattatgtgttttagcatttttagcttccctttttggtatgaatacatatactatacaagacgcaatgactccgtttatcataaaaaaagaacagctagcaagtgctcaatcatacatgtctgttgcttataatggtactgaatatttatttaatgctctaacaggattcttaatcaatattttttcaacaatcacccttttagttgccaatatatttaccttcttattcgcaatattttctttttcaaaaataaaagaacctacagatgcaaataataaagaacctgaacctttcttaaaaaatgtatttaaaggcttcattgaactatttcaaaataaaaccattttatttatcgctatcggtggaggcatggcaaattttatgttcggcggattgaatgtctaccaagtgttaattgcaaaagagcaaggaagtgccattgtgcttggactattgacatcaacaatggccattggaacattgattggctcaactctcctagccaccttattactgaaattcatggaaatcggaaaagtactaactttatgcacactcatgtttgggctaacaatgttaataagctcttattttgtaaattcttcccttattattcttatctgggggattgcaagtacttttttaggagtcacccatgttgtccaaaaaccttttttccaagtattaattcaaaaagaacatttgggcaaagttttcagcgctctttatagcctaagtgtagccacattaccgataggagcattattatttggttattttagtagtcatagtttaaatagttctatctttcttcttattttcggcggaacctatttacttatcagtttcatatatttcgtaaacaagcatatttttaaattcactatctcagataaaataaaaaaaggacttctatcataa

SEQ ID NO: 620 - DNA, 1362 bp, Listeria innocua
ggcgttttaagcttgtatttgtttactaaaataaggaatagtattagggagagaataataatgatattcaatatgcaaacttttttcgttcatgtttatgttagtggattggagtatttactaatatactttcttttttcacgatataaaccaatgaacccacgagtgtcaaaggagaaactcattctaattttttgcatagctagcctagtacaagcattgtttgattcatttgaatactttaccatcaatgtaatagtttctgcgggattatttctagttggatctttcttcttttttacaaagtggcaggatattttgatgtcttcaatcattgctacagcagtaatcgatattggagaaggtattgctttaatgtcattaacgagtacagcgataggaaggcaagatgtaggagaatttatgttgcaaccttcaaatacaatgctactttttactatttctcgtttgattagtttgggattagtgctgattattttaagatttagaaaaatacgtttaggaaatggcagtttaccaactatttattggacgacatttttatttattacaatgaaagacattttatgggtgttaatcttagcggattcccctgtagaaatatccttctactattgggcagcagttattccactcttaccggtatcctatattttattttattatacacgtcgctcaatagaaaaaatggtgaaaacgcaagtagacagtaaagtgctagatgaaaaaaataaatactatgaacaacagctcgttacaatgaaacaaacacttgagtcacaaagaacagttcggcatgatttaaaaaataagttatcacccctaatttatctagcggaaagtggtaagaccgacgaattggttgagcaggtacaagagcttggtagtttaagtgtacttggtaaaatctatgcagattcagggaatataacgattgactatattattaatctaaaactgcaagccctagcgaataaaggcgtaacaatattttgcgagataaatgtccctaatgatatagatgttgtcccctttgatttatcaacggttttagggaatttaattgataatgcagctgaagcgttagagtatgtgcaaaatgaaaagtggattgggattaaaataagttatcaagttggctttttgatgatacaggtggcaaactcttttgatggaattgtacatttagataataagaaaatcatttctagaaaagaggatactgagaatcatgggattggtttaactagtattaaaaaaattgctggtaaatatgatggggaagtggttgttcaacatgatgataagcaatttgatgtgattgtaaaattattggcttaa

SEQ ID NO: 621 - DNA, 1365 bp, Listeria innocua
atgaaatacgttatagtaggaacttcgcatgctggttttgaagctgtgcaaactctattgaaaaaagactcagatgcagaaatcgttgtatttgaagctggatcaaccgcttctttcttatcatgtggtattcagtcctatctagaagacatttcaaaatctttggatgaattacactacgcaaatgaagcatcatataaagaacaaggcgttgatatccgcatgaacacaagtgtgattgccatcaacccagagacaaaagaaattacaacacgcactactgacggtgtggaagctacagaaagttacgacaaactattgctttctccaggtggtgtaccaggtacaatcccgaatgtagatgaccaacacgaaaacatcttctacttacgtggtagaaactgggcagataaagtgaaaaatcgtatgtcttcagctaaaaaagctgtagttgttggtgctggttacatcggtatcgaagcagcaattgcttacgcacaagctggcatcgacgtaacagtagtcgactttgttgattcaatcttaccaacttaccttgacagtgaattcactagtcttctaacaaaacatatggaagaaaaaggtatgaagattaaaactggcgaaggtgtgaaagaatttaaagtcaacgaaaacaacgaagtaactgctgttgtcactgacaaaggcacttacgaagcagatacagttattatcagtgttggggttcgtccaaacacacaatggttgaaagacactttaacccttgatggtcgcggctttgttgaagtcaacgaacacatggaaacttcagttaaagatgtttacgctgcaggtgatgcaactgctattccttttgcacctacaaacgacaaagcttacattgctttagcaactaacgctcgtcgccaaggtgtcatcatggctcgtcacgcaagtggtgatgcagacgctaaaattggtcgcgtaaacggtacatcaggtcttgctgtatttgactacaaattcgctactactggtatcaaggatgctaacgcaaactcttaccaaggaaatgtgaaatctgtttacaaagaagacttaatccgtccttcatttatgcatgacgaagaaaaagttttaatgaagcttcattacgatgcagataacggtcgtatattaggtgctcaattaatgtcaacttatgacattcttcaagctattaatgctgtatctgttgcgattgaagctgaatggactgtagaccaattagcgcaagctgatttcttcttccaaccagaattcagccgtccttggaacttcttaaatgtcttagcgcaagaagctcaaggtcaaccatacggcgcagacacaatgcttttctaa

SEQ ID NO: 622 - DNA, 1368 bp, Listeria innocua
tttcttatgaagagagaagcacgaaattatattgataataaattaaagccaccaaaagccttttttgactggtgtttctcacaaattccaacttacaaatggtccaacaaaaaagaaactattctagcttccaatcgaaaaaactgcagtgttattgaacagaagttaagaaaaaattctagattgacattttttggtaaattgaacgtgttcggtattgtcttagttacatcgaaaagaattgagatacaaagttacgcgttctggaatcgagtagtggaaggaaaagaaatgattgaatttgatctagtcaattttgaacaatttgctgatggagaacacgtaaaggttgccatcagcgacggcaagatgtggtttggtttaattccaatatatggtgggatgtctggaggtccttactcaatgattcgattgtttgaaaatgactggaaagaaaaaattcgaagtaaatcagagcttaagtacctagaaataccgcacttagactttaaagaaattgaaactatatataaatatagagttgaaattgaatttttgcagaaaattaaagcaagacaattgtccaaggaagttatgtatcccgtaacacaatatacaaatggatcgtttagaaaaacggtagatatgcggacaattaatgcgaagtggttgaaagaaaacaagcctttctttaagaactcggacagaggttttatggaatttgaattagcaagaagaatacagaaacggcgaggaaaggtagtttctggaattgaaaaatatcttgattaccgtgctatcaacaaaatcccagaaggagtaggaatagttcgctttcagaattggatcattaagaataaagtggattttagctactatctggattatctaaacctaatgcgagacttaaatattgcaatcgatagcgaaaacataattatgcctaaaaatttagtaatagctcatgataacgcggtcaaattactgtaccaaatgaaacatgaagttgaagaacaacaatataaaatgagatttgagaagataaaagacttagaaaaaacgatagataattacgcttttattgtccctaaacaagcttctgatttattaacagaaggcaaagcattaagtcattgtgtgggtggtagtaattatattaaacaacacattgaagggaaaacaacgattatttttgttcgtgataagcagtacttagaaaagtcattgtatacacttgaatacaaaaatggccaaatttaccaactgagaggtaagcacaattgtgagccaacccacgatgtgcaagaggctgcaaacaactgggctgcatcagtaaaaagtaaaacaaaggtattacaacatagttga

SEQ ID NO: 623 - DNA, 1377 bp, Listeria innocua
tatgagacaacaagatttacaaaaggagttgttacagtgagccgaattgacatcggagaaatacaaacctttgcgtaccaactacatacagccaatgaagcagcaagaaagagtatcaaagacatcaaaactgccgtgaaaaattataccgaagacggcagtttaaaaggaaaagcagttgatgcatcgaaaaattattaccaaatgacctatttcccattatgtgatgcgataatcgaagccatgaacgaaagcgaagaacgattagcacagtatatagctgattttcacgcccaagtggatggttctgcggatgcgaaaattgatgcggacggtttatacgaactcgggaaaatgattgatcgcatcgaagcgaaaaaaaaagcattagcccagcagatgaatactggaacggaaggacagatgcagagctatcgttcccagctgagtatcgcctacaaacaagaaaatattttagaaaaatacttggcttttgaacaaagccatggcggtttttttgataatttaaccgatttagtccgaggaattcagcagactattcgcgaactccagtcgaacattcaatttaacagtaaaaccggcacctatgatatgagcaagctgaattttaccaccgtaacccggatgcaaaaagccttaggaaaagcgctaaaaagcaacgaaacaacattcaattttgatgaatatcaaaaaacgtaccgtggtcaaatgtgggtgttaatgaaaaatggtatagtagatgttgaagcaacgaacgcgtacaatgccgctgtgcttagcggagaattaccaccagagcctaaccaaggaatagaagatgccaagttattaaaaggaatcatacaatccgtaaaagctagaagggatccactaaccggacaagaaataagcttgttgcaaggaataagtatcatagctggcatcacctttacatacacagctggagcttaccatgggaaaaggcttgcaattcctaaacttaaagatttggtgaggaagaagagtgctagcggttctgcaggtacagtctgggatgacattaagggttcacaacctccaagagaaggaactactattcctaaatcgtttgaaataaatgttaatggagagaagttatgggtgaatcccaatggaaccaaacatatggtagaatactcaactcgaaatttatctcatggacaaaaacttaccgagcaacaattgttaaggagttttcaaggtgctgtagaaaaagctacctctaatgtgataaagtttaatactaaaatagtcatagataattgggaattaatatttagtccggctagagaagcaggacaattaccagttattaaacatgctgtatatctaccttga

SEQ ID NO: 624 - DNA, 1398 bp, Listeria innocua
atgactcgaatagatattgctgaagtaaatcatttttcacatgaattaaaaatagccaatcaacaggctaaaacacaaattacggcaatccaaaatgctatcattgcttatttacaagatgattcgctctccggagaagcaattagtgcgtctaaaggatattatgcagcgacttatttaccgctttgtgcttctatcaaacaagcactacatgtcagcgaggaatctttaaggaaatatattaccgactttcacagtcaagtagatagttctccaagtgcaaaaattgatgcagaaggtctgtatgaattagatcagaaaataaatcgtttagaaaataaattagaacacattcaattagaattaagttcgatgacagcagtttctaggcagggcgaaattaatgcgcttcaaacgcaaatatttgccaattataaaaaagaacaacttttagaaaaatttcttgattttgaacgtgctcatagtcatttttttcaagaattaagtgacttagctcgagcaatcaatcgtggtgtgcgtgatattcaggcgaacatttcttttaatagccaaactgggatgtacaaagtagataaattaaatgcttcaaactttgaacgacttgtggatttatacgcttctcaaaaagcaatagatgacaaagtaaaagctatggaagatattggaatgcttccttatattccagaaggaaatcgtgccggatatgttacaactaatggcaaactaaatacggaagcgacgttagatttagttaaccaacagatgatttattggcaaaatgaaaccggtatgcgcgagttgtttggcgttggagctttttatcgagtagtttatggtttggatgcagttactgctgaaaggattggtggcggacaaaggctagtggatggctcaacggtgtttttacaatatgttggagcttttggagtgagtggtttttatgctgagtttgggcaagtacgaaaacttgattatttgcctacctctggcataaagttaaaaacgagtccatgggagaccacgacggttttagggacttttaaagatgatacaaaatatgttcttgaagaattaggtaatatcaaatcaactgattttagtatgaaaaaaaatcgttttaacttattgaatactcctgatgacctatataagacaccgaatcaattttgggcagaatataatcaaccttggttagataaagtaattgcacgaaatgatgatgttattttatctacagaaccaattgaggataatttgtataggattaatagggaaactggattaaaagaattaactggttttggtaaagaatataattatttacttgaacatggttataaatatgattcaaaatcatctaaaatgattaaaaaatag

SEQ ID NO: 625 - DNA, 1404 bp, Listeria innocua
tgtaaaggtggtgagcggatgtattcaattgataaagcaaaacaagcaaagatagattcaaagatagttaataggaatgatttcatggttggccatggaaaagcaaactctcgtgacaagttaacaaggcaaacaccaggtaacggccaaaaattagatttgaaagcatgtgagaatttatatgcttctaacagtattgctatgaatattgtagatattatctcggaagatatggttcgagcaggttggtctttaaagactgataacaaagaaatgaaaaagaacatcgagtcaaaatggcgtaagttaaaaacaaaggatcgatttcagaagctttatgcagataaacgactttacggcgatggctttctaagtattggcgtagtatcaagtaatagggaacaggcggatttgagcactgctatcgatccaaaaacaattaaaagtattccatatattaatacttttaatacacagaaagtaactcaactctatttgaatcaagatatgtttagtgagcactttggtgaagttgagttttttgaagttaatcgcgtgtcccaactaggagaagaaatattatccggaacgacagcatctacttcagaacaaattcaccgttcgaggataatacacgagcaaggattgcgttttgagggcgaaacaaaaggaaggtccatatttgaatcgctttatgatattattaccgtgatggatacatcgctttggtctgtaggtcaaattttgtatgactttgcttttaaagtgtataaaaccgatgacatagacgctttgaataaggatgataaggcgaatttaacggcaatgctagatttcatgtttcgtactgaggcactcgcaattatcaaaggagatgaacagctgactaaagaatcgacaaatgtgtcaggaatgaaggatttgctcgattatggatgggattatttggcaggagctgttcgaatgcctaaaacagttctaaaaggtcaagaagcaggtactcttacaggtgcgcaatatgatgttatgaactactatgcgcgagtttcgtctatccaggaaaacagacttcgacctcaattggaatatttaacaagattgctgatgtgggcaagtgatgattgtggtccgagtattgatccagattcttttgaatgggctattgaatttaatccgctctggaacttagacagtaagacagatgccgaagttagaaaactaactgcagaagcagatcagatttatattgtaaatggtgtattagaccctgacgaagtgaaagaaacacgttttggacgtttcggattagagaattcttctaaattcagtggtgatagcgcagaaattgataaattagctaagcttgtctatgacgcgtatgcgaagaagaacgcagatggctaa

SEQ ID NO: 626 - DNA, 1437 bp, Listeria innocua
atgagtaataaaaaaattttagctaattactcagaggagcagagattaaaagcattaaaaaaatttcgggtacttcagccatacttaaaaaaagaaattccactttccaaagtaagtgaagaaaatgatatttcaacacgtacacttagaaagtggatttcgaattataaaaaatcgggattggtgggattaattacaaaagaaaggtcggataaaaattcaatgaaaatttctgaagacctttgtaaaatcattaaacacatttacttagaaaataaaaatgtttctataacttccatttataggagaactgtgtcttggtgtaaagaaaataatattcaggagccttcttactatcaggtaaggaaaattattcaattagttcccgataaattgaaagtactagcgcatcagggatctaaaatatatatgaatcattacgaattagttcatattagggaaactacagctcccaatatcatatggcaagctgatcatacattattagacattgaggtattgaatgcgaaaggttatcctgaaaggccttggctaacaataataatggatgactacagtcgagcaattactgggtactttattgcgtttgaatcaccaaactcactacgaacagctctaactctaagacaagcaatatggagaaaagatcaggctgactggcctatttgtggtatccctagaattttttatacagatcacggtagcgattttacttctcaacatcttgaacaggtctctgctgatttgaaaatagaattaaagttttctaaggttggggtgcctagaggtagagggaaaatcgaacggttttttcatactgtaaattctatgttactacaagatcttccaggttatattaagaatcggaaagcaaagtcaatgctaacattggaggagttttccgatattttcagaaattggttgttaagaatataccatcaaaaacagcatagtacaactaaagaaaaacctatagctatgtggaataactatgattttctaccgaatatgccaaactctttggaggatttagatcttcttttaataaaagttaagaaagaacgggtggtacactctgacggtattcacttatttgggatgaagtatgtccacccaactctttcagcttttgttagtgaacctgtggtgattagatatgatcctagagatattagtgatgttagagtcttttataaaaatgtattcctttgtaccgcagtgtctacatcttttgaacaatacgctatcggaattagagaaatagaaaaagaaaggagcaaactgaaaagagagttaaaaagggaactaatcgtctccactaataaagtgatagaaaaattggttgggagacaaaaagagaatagtagtactgttaaaaataatgtatcaagtttgaggaggtatgaaaatgaatga

SEQ ID NO: 627 - DNA, 1449 bp, Listeria innocua
ctaagcttgtctatgacgcgtatgcgaagaagaacgcagatggctaaaagacgcgttcctgcgactcgctatccacataatttagaaaagagttatactaaacagctagtaaaacttagcacggctttgtctgacatgtttttacatgaatttgacacaaatattagtgccattctaaaaacgtctcaaaatcgctctgatgcgttcagagaagatggtataagtgatgccgttcaagctgttttaaataaagtaaaggcgctaagttttggattattcaacccgcgagacaagtattctattgcaagtaaacatgttaaagcaataaatacgactaataaatcacaaataggcaatcaagtgcgctcacaaggaattgagcccacacagtctgaaccatggttaagtgagttcatggacgcttcgattgccgaaaatgtaagttatattggttcaattgcagacgaatttaacgccaaaacagaacaaataattttgcgtggtgtaaaaagtggccaatcattaaaagatatgcgtgatgaactggttacgcaagtaggtacatcaaaaaataaagctgaatttatcgctaatgaccagaccggaacaatctttgggcagatgacagccgagaggcataagaaagcaggcatacccggctttacttggagagattcaggagatgcagcggttagaccatcacaccacgcaagaaatggtaaagtttattcatatgatgatccaactgcaccgattcctggaactgattatagatgtcgttgcactgctggtcctgaatttgatgaatctgtagttaaagctgcaacaaatgagcgtaaacaacaagagctagaagataaagcaacattaaaaaacgcttatagcgaagtagctcaagctgctcaaaaagctccggataatgttaaggacttaataagtagtaacattactgcaaattcttttgagatagtacgagataataatattgcatatgcttatcgcccttcaagcaagaagataattattaatccaagtaataaagctttaaaatattataataaacaagaaatattgcttcacgaatctggtcatttgatagattatgcgaaatataaatcttgggaaaataaaagttttactatttccactcagatagagaagaaagttgcaaagtgggatgagataaatgaattgttcagtcatgaaaaatgggcaaacgatgattactttagcgatatttgttcggcacttacggaaaatagagtaaaaggtaatgcaggacatgccgcttcatattggaaacgaaaagggagcattgaaaaagagatttttgcaaatttatttgctatgctagcaatgaacaaacaagaatcaattgctatggtaaaaaaacaatttccgatgatttacggatcgttcattaaaatgttagaaggtgaattgaagtga

SEQ ID NO: 628 - DNA, 1461 bp, Listeria innocua
atgcagcaagccttagaaaatgacgtaacagaacaagaggccttgttggaagaacttgatatagaacttgctaaacgttcttatcgcgattacgtgacttattcgcactttggagattaccagttatttgaacacactgaattaatatgtgagaagttacaacatattatcgacggtgaacagaaatattacatcttcgaaatgccaccacggcatagtaaatcaatgacaattaccgaaacattcccatcgtacttcttgatgaagaatcctaagaaaagagtcatcacaacatcttattctgacgctttggccaaacaatttgggcgaaaaaacagagataaaataaaaatggcgggtgatcagctttttgatatacacatcaatcccgctaactcaggtgtcacggactggagcattgaccaatatggtggcggcatgtactcaacttccatgctcggtggtgcaacggggcgtggtgctgatttattaattatcgatgacccgattaaaaaccgagaagaagcggaatctaagacaattcgggataagatataccaggagtgggagagcacattctttactcgtttgcataaaggtcatagtgttatcgttattatgactcggtggcatgaagatgacttaataggtagattgttaaaggcaaatacactaccatgggaaagaataagattaccagctattgccgaggaaaatgatttactaggacgtgagattggccaagcgctatgtccggagcttggctataacgaagaatgggctgaaataacgaagaagacagtaggtagtcgaacgtgggcttcactataccaacaaagaccgcgtccggctgaaggggcaatttttaaagaaaaatggttgaggtactatgtccctagtgaagaattcagaaaaaaatataatttaggtgaagacgtggcaatactgccgcgtctttttgataaatcggcacaatcgtgggatatggcatttaaagacacaaaaaaaagtgactttgtcgccggtcatgtatggaatcgtaaaaaagctgatttcttttttattgatcgcatacatgacaggatggggcttccggagactttaaatgctgtaaggcgccttactataaaacatccgttagctattgctaagtacattgaagaaaaagctaatggtccagctgttatgcagacattaaaaggagagataaccggaatgattggcgttgaaccagaaggtgggaaagaaacacgggcgtatgccgttacaccgctttttgagtcaggaaacgtgtattttccacatcctttatacgctccgtggattagtgatgtaatagaagaaatgctggcatttcccaacggggagcatgatgatgacgttgatgctatgacccaggcacttgttaaattaatgataggtcaacaatcgttgttagatagatataaaaacttaatgtaa

SEQ ID NO: 629 - DNA, 1470 bp, Listeria innocua
gaagcaaggcagtcgagaggaaattcggcgttcatatgcgagaccttaacttcccagttttatatggagagggaaaaaagaatgaaatttgcgattataattcctttttacaatgcggaaaaaaggttggctttatcgatagatagtataattaagcagacttacagctttttgaagcatgtggaagttctgcttattaatgatgggagcacggaccgtagtagtgcgattgctcatagctatgccgaaaaatatccgagtaatattcgcgtttttgatgtcccgaatggtggtccttctaaggcgagaaatattggaatacataatgtacaagaagacactgactttgtaggatttttagatgcagatgatctgttatcgccaaatatgctttttagtatggtgaacttcctagaaaaatcagctgttaatatgcttgtcccagctttttattatttagatgattttggaaaaaaacaaaaaatttctccacataaattaaatgaccgtttcacaaatggaaatcgagttgtagcgattgaaaaagaaccgcaagcaattcatttttatattggcggtactttttttcgtttcgaaagtttgaagcaatttgtctttgatgaaacgcttaactttgcggaagatcagcttttaattacgaaatttttgcttgaaaatagaagttacggattgattgccgatgctggttactattactatcgtgatttaaagcaaaaaggttctttagtaagttcagcttggaagcaaccggaaagatatacgccatttttacaaaaggtgtaccaaacttatttaacaaactctaaagaaatttttggcgaagtgattccatatgtgcagtatttaatcgcgtaccatgccaagttgtttttttataaagaaaacatttattttaaagaagtattaaatgagcaggaacaagaaatctttgtgcgtgaattacagaaaatattacaagaagttggtccggagatgattgtagctctggatacaccgcttgttgtaaaagaaatgatgctctctattttgcgaaacggctggccagtacagtttaagacggcagaattagaagaagttccgcttgtcacagtaaaagaaaattaccgtcctggaaaagctgtaacagtggaactcttactagaagaggcgcgggaaactttatcagatggcggagaattctttgctagtacatctgtaggtacggcgcaaacaaaagtggtaaaacgaaaaacagcccaaacaatttgggatattgttgttcgtgaagagggtacacttgaaaaagtggtgacacggttaaaaccatatcaattgaaagtccaagtgttttaccaagacaaaaatcaaaaaataacaatgacagatttaaatgtcatcaagagtgtgttaggaaaattaaaaagaaataaagctttaaagcgaaagtttaaacaggggggagtatcctga

SEQ ID NO: 630 - DNA, 1476 bp, Listeria innocua
cggggtgattgtaaaatgaagatagatgtcagagaattaaatgagatagttagcgagaatatagtaatgcttaagaaagagtatgaaaatttaaatatagcaatgaacgctacaaccaatttcacagtagaaactcaggaattttttaaaggaaaaacagcagatgcaagtcgtgcttatctacaagaggcatataaacctgtacaacaaaaagcgctagaagttaataaattgatgacaaaaatattgagcgaatatattgcagatgccgaggcacagttcggagcaaatggtatgatagatattcaatctattgaaatggaatacaagcgcagttttaatcaagttagtgatgatgaaatgagagaataccgcgatttgaataatcttattcaagaggcaaacgaatttacttactttcagtcgagtaatttaggtttttttgaagaattgcatcatgatgctttaacagaaataacaaatattcgcatgaaactagaagactttgaaaccaaatggaatgttgaacttagtaaagctgaaaaattacaaaaagagcttgattggatgttaacacaagttaatgataataaaataattccaacaagctatcaagccggaacgctcccattcggtaagccatttaaatcacgagatgagtttgatacagtgcaagaatattaccaatatgtcgttgaatgggcagtggcaaatggtaaagcgaaagaaatcattgttgatgggcaaagatattatgagtttaccgatactttttattatgaaaattataataaggaagtcaatggaacattagttatgacagaagtaaatggagaaatgatattatttgtacaacgtaaagatatagagagtgcagtttctgttccttttggagtattttacccagatccatttcaaaggctagcaaatggaggagaaacagatggaactataaaattatatcactggaagagcaaagatataccagaaggactaagtgttccaaacgaagaattaaaggctatggcagatttcttcgcagatacacagaatagttatgatgcaggtatggctatattaaaatatttggctcataacaaaaatcctgaaaagctatcatttacagatacagaattagataaagttgcaacgaattggtctggcggtaaaaatagatttgactttgcaggtgaagttgaggcgcatgctgatatgcttactgattcaatactaacagaacttgccgcgaagccaatggataaaattgatagacctggtaatacagatgaagagaaggagcaaggatattatcacgcagcttcaatagctgatatgcaaaaaggagaagatggaatgatgaacaaaagttttaattcgatttggggttctggccaatattcagcttatcttcaaaaccttatgcatggacaagagaatacgccgaaagctaaaaagagaagtttcccacgccaataa

SEQ ID NO: 631 - DNA, 1494 bp, Listeria innocua
atttttcaaagacgggggaaaaaaatgtttgagaaaataacaattggtataaaagtgaaaaaaaataatcattttgagcaaatagatgttcattttattaaggataactctattgtaaatgatgcagagtattataatcagggaaatgattatatgaataaaagagatgttataattcaagtaaaaatgaaggaacaaacttttaatgttgaaatcgaatttttaggttatatagttgatgaaattgatggaataagacaagaatttgaaaaagcttataatgaaaaaaaaatcaaaatggagtcaatggatgaagatgaggatgaggacgaatatgacaatatagatagtcgcaatgaaattaagccgtatgaccctaatttaatacgggttgaccagaaacaatttactattgaaaattcagtaagtaaaattggtaataaagaaattgatttgaatcctgattttcaaagaaaatttgtttggacggacattacaagaaagtctagattaattgagtcaattcttttaagaatacctcttcctgttttttatttatcagaagatgaggatggagtttatcatgtgttagatggtctccaaagattaacagttttgaactcatatttaaacaatgaatttagattgaaaaacttagagtatttagaagaagagtgtggaggtcgtttttttgcttctgaggaaaaaaaagcattagataatcctgatcgttttctttctaaaaaatatgttagaagaataaaagatactatgttaaattttaacgtggttgattccagaacacctgatcaggcaaaatatgatatatttcgaagaattaatactggtggaaagcccttgaatcgtcaagaaatgagaaatgcaatggcaacattgccgacgcgtaaattattaggaaagctttcaaatttagaaatatttaaaaaagctactggttattctgttaaagacacaagatttgctgatcaagagttaatacttaggtttgttggattctatttgatagatcaaggttaccgaaattctgtcccatacaaaggtgttatggcaacatttttagatgaggtcatagaggtgctaaataaatattattcatataaagatgaatttatagaaagaatatttaatgattttaaaactgcaatggaaaacgcatatttcatgtttggtgataaagcttttaaacgaacacaagtcattaataaagcattatttttagcagtatccagaaactcatataaattccatttcgataataaactaaatatagggagcaacatcaaaaatagagatgctttttttaataataacaataatgttttttggaattctagaattgaaaattatgaaacaaaaagtgatttgataaatgattcgcttagtacaggtactaatgaagtattaaaaatagaacattcttatactattatgcaagacttaatggaggttttaatgaatgaaacaaatttctag

SEQ ID NO: 632 - DNA, 1518 bp, Listeria innocua
atgaacgtaagaactttactagttcgtgttggagtaatattaactatggctttaggaattagtttgtggctaggcacgagtccgggaattgacgcacaagcagcaagccttgcacaaccgacaccgattaatgaagtgtttcctgacactcaaatggctttaacaatggcgaataaactagggaaaacaaaagttactgatcttgtttcgcaaagtgaattggatagcctgaccgaattgagatctaatttaccaatagcttcaattgaaggaattcagtatctgacaaacttaacagaattaaatataagtaatgctgaagtaagtgatataagtgctttgaaagatctaacaaaattaacaaagttagaaatgtatcagaataatattagtgatataaacgttttggaaaacctgacgaacataacagatttagacttacatgataatcagataacggatataagccccgtaagaaatttgactaatttagttgtactaaacttatcttataatcaaataagtgatattagtgcagtgtcaactctaagtaaactaaacgatttagggtttactgataatcaagtaagcgatattagcgcagttgctgggttaaacaatctatctagtttgagtttgggttataaccaaataagcgacataagtatactgacgaacttaaccaatttagatggtctgagtatagaccataatcaaataagtgacttaacgccaatagcgaatttgaccaatttaactttcgtgggtttgcataataatcaaataagcgacttaactccaattgcaaatttaactaatttaacaagaatgtatttatcaggtcagcaaataaccaacaatccaataccttatcacagcaatattgctattcctaacaatgtgaaaaataataaaaatgatgttatcgcaccacttgtaataagtaatgaaggaacctatgacaattctaatgttgtttggaatctagctgattatgttaataaagtgagttatactttttcacaacaggtaacgattggtagtgccacagaaactttcaatgggacagtaacacagccattagagttatatactgtgacttttgatgtggatggagtaacaactaacgagacattagaggcagataccctactaaccgaaccaacaccgccaacaaaagaaggttacacattcacaggctggtatgatgcaaaaacaaacggtactaaatgggattttgaaacggataaaatgccggcgaaagatattaccttatatgctcagtttagtgaggataaaggcccagcagatgatgatactgacaaagatacaccaaatgaccctgctataaacgatggagacgcggtgcattctttggatagttcagaaccacctgctgaggtaaatgtaaatatatcactaccaaaaacaggcgatagtcaaaacccattagttattttcatgggactgtttctgcttggtacagggattatttcgcttcacaaaatacgcaattaa

SEQ ID NO: 633 - DNA, 1521 bp, Listeria innocua
agtgagaaaataaagggatgtgtatctatgataaatagcataaaaaaagatggcgtcaagattggaatttttagttttattgtttttttgttttacttatatctgtcttattgtaccccgttaactcatgatgactggacttggggcatacgacttggaatgaatcgtttttatgatggttttaaagactataatggtcgttattttggtaatatatgtgaattaataattactagagtagattggttccgctttttaatcatgggagtatttggagctgcaatagtagtaataccccttttaattgcaaaagcaacaaagttaactatcgcttttctaagtctattcttgatgctaggtgtttccagtgatatgttttcttctacttttgcgtgggcagctggttttgctaactataatactgcaacgatttgtattttagtatatttactaattgtgaagaatattttttatgaaaaaaatcctagttattcagtttggttggtaatatttgctgttccacttggaattggctctcaattgtttgtagaacatgctacaatttataatgtatttgctggtgcgtttgttataatttatagctttatgaaatttagaaagttcttttatttccatattgtataccttatttcagccctcatcggagcagttataatgttttctaatggtgcctatgtaaaaatatttactggcgcagataattatcgaacaattgatactgatatgggaatttttgaaaaaatttattcaattttctcaactagcatgtataagtttttaattatgaacaatattttattgaactttgcattggctatattttgtattttcttgttagtgaaaattggaactaatctacctatttggaaggtatgggttaaaaacattttcatggtaatactaactatatatcctttctatcgaccacttattgttgatagaatgcagttaagtatttttacggatgtagctaagacttcagaacttgaagcttggatttcattattattttacttaactattctatttactatcattttatttttccgaaagagttctttaaaagtggagctaagtttttatctaatttctgcagtattcgttgcaggaccgttattctttgtaactccttttggatcaagatgttttattatttcctatacattttttgttttatttattatacgacttcttgtttattttgtggatgagggatatgttaatctaaatgctatcagtgttccgattataacgctttctttatctttagtagtcgcgtatggtattatttttgctcaaataaaaatatctgataatgacagaatggatagtattcaaaaacaaattgacgaaggtaaaaaagtggtaactgttaaaccactaaaacatgagaaattcttatggaatagtaggttaatgattcctggattccaagcagataacttcaagattttctttaacttacctaaagatatagaacttaaaaatgcgcctaagtaa

SEQ ID NO: 634 - DNA, 1536 bp, Listeria innocua
tcgtccatggagagggtagttatgcttacgaattatattgaaaaggatatcaagagaaaatgtttgatatgtgatttcttgctgaagaataaacatacgaatttagatgaaatggcggaatatatggggacttcgcgtgtgacggtgcgatcggatattcataggttaaatgaagaattggatggcttgattagtattcaggtgaaagaaaatgcagatgattggatttatcagtgccagctacaatacggagcaagtgagcggcaagttttatataagctttatgataactcgatgtttttgaagtgcttggcgttttttgttacgaatgtggaggagcataagtttaccgattttatggatgaatattttatttctcattcgcatgcatatcggttgaaacataaggtggaggagtttttgagggatattgatttatcacttgaaaataatcggattactggaaaggagtaccgggttcgatatttgattgcgcttcttcaagcagaatatggtgttcgtatttatccgttactggatcatgaaaagaaaatgattgatgattttatggctactttgaatttacggattaatattgatgcagtagcgcataatgcggaaggtcacgagtattttaggtcgcttatttcgatggtttttaaaagggatattccgacgagtgcgattattttggatgaacagtgccagaaatatattgagtcttcaagatttcttgttatggttcgcaaaagttgtaaagaaacgctggaaaaagagcttgacttggtattttcgtataatgattatttgtatttaatgttgatttattattcgactaatttcagtattattgatgcttctatgaaaaaggtggaattggagcaatttaatgaattgatattgaaaaatgctgatttacagtctttaatagatttgtttgaggaatattttgggtcagaagtggttaatcactcgttatttcgggcagcgctttgttattttttgaagaagacgttatttaatttgcaaggtcttattccgagtaatgaacggttgttggataaaaaatatcagccgctttatttggttgtgaaaagtgtgcttgagcgttggaatgaaatcagtgggcatcgtgcaatgttaattgactcgcatattaattatttgacgattcacttatatccgcttatttataaatggaataatccagtgcaaatctgtattttctcgtttaatttgattaattttgagtcatgtaagtttcaggtggagcaggaacttgggcggaaggtgaaggtgcatgagacgatgtttaattcgacgagggagttaaatgaggttttggcggaaatagatgagccgacgattgtgctttgtcacccgaactgcgaaatggaattgaaagaggcggtgcaagagactgttattccggtttcgctggctttttttgaccgggatttaatagatgtggaaaatgcgattcagttgcttagaagaaaagaacatgaaaaaaggctagcctatttgagaggctag

SEQ ID NO: 635 - DNA, 1539 bp, Listeria innocua
aaaaatccaagcgaaccaagaagaacaccaacaaaaaatcaccgcttgcaaaaaaaacatctaccaattagaaaatcaacaacaagatttacaaaaggagttgttacagtgagccgaattgacatcggagaaatacaaacctttgcgcaccaactacatacagctaatgaagccggaagaaaaagcattaaagacatcaaaaaagccgtgaaaaactataccgaagacggcagtttaaaaggaaaagcgatcgatgcatcgaaaaattattaccaaatgacctatttcccattatgcgatgcgataatcgaagccatgaacgaaagtgaagaacggttagctcaatatatagctgatttccacgcccaagtggatggttctgcggatgcgaaaattgatgcggacggtttatacgaactcgggaaaatgattgatcgtattgaagcgaaaaaagaggcactagcccagcggatgaataccggaacagaagggcaaatgcaaagttatcgctcccagctaagcatcgcctacaaacaggaaaatatcttagaaaaatacttggcttttgaacaaagtcatggtggtttttttgataatttaaccgatttagtccgaggaattcagcaaaccattcgcgaactccagtcgaacattcaatttaacagtaaaacgggtacctatgatatgagcaaactgaatttcaccaccgtgacccggatgcaaaacgccttaggaaaagcgctaaaaaacaacgaaaaaacattcaattttgacgaatatcaaaaaacgtaccgtggccaaatgtgggtgttaatgaaaaatggtatagtagacgtagaagcaacgaacgcgtacaatgccgctgtgcttaacggggaattaccacatgaaagcaatgaagcgcaggaagaagccgagttgctgcgggcagttattcaatcggtgaaagaaggaatagacccggttactggacaagagataagtaaagcacaaggatttggtattattagtggtcttattttccgctatactgctggaggttataaagggaagaagattaagattcctaagaatatattagataagataaagaaatcccataagtctaaatcaatcttgacatccgaaatggaagccaaaattttagagggacaacgtaaagggactacaaatggaattaatggtggacattcatccgatattaataacaataacccaaatttcgcaacggaaactgtagaagtaaatcaagatggcactaaagtaataaaattcactaaacaatttccagatggaaatatttcaaaaataaagacgagtacgatttttccggaggattggtcagataaagatattattgattctatactgaaaattagtaattctactgctatcggacaacgaaagattgatgggttaacacttcatagaggtaagattgatggggtggagattgatgtaattaaaaaaggtaatgaaataatttcaggataccctgttggaggcaagccaactccaggatttgagacaataaaatag

SEQ ID NO: 636 - DNA, 1545 bp, Listeria innocua
atggaagaaggtatccaagaactggactctgaccgcgcgatttcctttcaacacaccaactatcgtgggaagtacagcgccatcgaagacgatttgatggtattgtataagtttagttgtcatgcaggggaaaagatggaaaccctggtaaaccaaccgttttatgagaagttggatgcgtttgtggacagcatgcaagatttgagtatttcgacgtattctaccaccaaccggattggtgcgaagtcgaaacaaacctatacaactacatctggcggttcgcaagtcatcgagtccatcaaagaaggtgcgacgatcgaagatttgatgaacgacgataacttctacgcaaaccaaatgcaactacaatatagggactggcaacgagcgaatccaaatcaagaagtgagcgaaaaagactttcaaatggggatgttacatagtcgggcatttgaatataaatcgattaaagatgaacaacaagagaaagagttttgggtcagcattgtggcgaccgtggtgattgtgggtgtcagtattttctgcccacccgccggccttgccttagcggtaggatacgggagtttagaagctggttcggcaatcagcgggaaggactgggtatctggccgagaactaagtgcggaagaacgagcgctccgtggcggtttagcactgctagatatcgttccaggtgtgaaagcattgagcacaggagcgaaagctgccagtgccggctcgaaacttgtccgcgtaggcgataatgttttagcaggtagcaagaacgtcggcaaaggaaccatcgacaatgggattcaagcagggaaacaagcgatggatctccggttggccaatgcgaaaaaagtcagcgaagccgtccaaaagaaactcaccaaagacctcgacgatatcggcacgatgggcaaaactatccaaaacaaaaccaaagaaaccttcacacttccatcgagagagcaactcgcctttgcgggaggaggcagtatcccggaacaaagcgccaccggagccgccgcgatagccgcgaagaaaaagctgaaagatattatgcaaaacatggataatttgaatgtgaagggcggcggagagggtggtacaatagaaaaaatcggtaaaactaatgaactgaaaagcccatcgtcaattgcaaggagttggcaagggggcggtaaatatccaggagtggatgactatgaggacattgtattgaaagtgggggatgtcatttacagaggagagccaaatggatcagaatactttaccactaaggaagtcatagaaaatgctgatattagtgcgactaaaatttttgaaggattacaagtcgaaaaacatcctatttatggctatcggaaaagtatgacagggtataaagtgaatagtgaagttgatgcagcatctggatttacgaaagctaatccacaatttggtgagggtggagcacttcaagtttttgttccaaatgtaaatgaattaatagaaaaaggcattttaatacctattgatgagataaaattaattgattga

SEQ ID NO: 637 - DNA, 1554 bp, Listeria innocua
atgaaaaaaacaatcacaatgtcgctactagtcgtatctctcgtcttaattagttttattagttctccaaacgccaatgcagccgaaaaaagtattttaacatcaccgaaaccaataaatgaggtttttcctgatgaaaatatggctaaagtaatagctgaagtcacttataagagtagttcagcagatgaagtatctcaggcagatttagataacattacaaagttagatggcagcacctctgaccgtatgccggggccaataatttattcgatagagggtgtcgagtatcttcaaaatttatcggaatttaatatttctgggcagtctgtaagtaatatttcaccgttagaaggattatcagagttagaaactgtatatatttctgaaaataatattaatgatttatcaccacttagtaaatctccaaaaataaaaatattagatgcatcgaataataatataagtgatataagcacacttagctcattgccaaatttaaattcggtaagactaaataataatagtataagtaatattagtgtgttaagggatttcccgacaaaccaatttgtttatatttatttggccgataataaaatcaaggatattagcccgctcgctggtaaatcgtttcaacaattaacacttaacaataatgaaataagtgatattagtccattaagtaagatgacactatattcagaggatccattggccgatgatttttatattgatattagcaataaccacattagtgatattagttcgttgaaaaatgctgattttggcaaattagattacttttttgcagaggatcagagtattgtcaatcaacccaaagctttttctacaaatttcacactggaaaataaagtgaaaaatatcaatggaacacttgtgacgccgaagaatattagtaatagcggtagttattcaaatgctatcttatcttggcaacttccaagcttcgtagcaaatctagattattctttttctgagacaactcagattggcaggtcaacaggggaatttagtgggaaggtcacacaatcccttgttggaggatatacagtaacctttgacaatgaaggaacactatctacaaggacttttgctagtgatgaattagtaactgaacccgcaaagcctagcaaaacagggttcacgttcactggttggtacgatgcaaaaactggtggaaagaaatggaacttcgctacagataaaatgccagcaaacaatatgacactatatgctcagtatgaagaacaaacaacagatccagttgatcctgcaagtccagttgccccaacaaaaccaacagatccagttaaaccggatgaaatagtctcctccgagggatcgggtgatatggagattaagggagaacaatctggaactatagcggcatcagaaaacgcaacttctttagatgactcaaaacaacaaagaacactaccaaaaacaggtgatactaacttatacttggtgctgattgggctattatttgttggatttgctagtttattttggaagaaaaaacaaatttaa

SEQ ID NO: 638 - DNA, 1557 bp, Listeria innocua
atgggtgtttggagtgtaatgacacgctttattaaaggttggctaaatggaaaacctaacggcagcgaaccggagttaataccaaaatatctgccgctcattccagataatcaaaaagaatggagcaaagactcctatttaacttcgttgtgggctcaaggatatgtgccaacagtacacgataagttaatgaattccggaacaggcaatgagatagttgttgttgcggctgagtatatatctggaaagcctttaagtattgatgtaacagggggtaatggcagtaaggatgaaaacttaacaaagcaactgaaagaagcattacggattgataattttgatagtaagagtgtgaaaattgttgaattagcaggggggagcggagtatccgctgtaaagattaacattttaaatgggcgaccatctattagcgttcatagctctagccaattttggatagattttaaaaacaatgagccatttcgttttaatttctttgaggaaatacccacaagtaataaagcagatatttattatttagttgaaagcagagaaataaaacaatgggacaaggaagggaaaaaattatctggaggttttgtaacatattctgttattaaaatcgatggcgataaaactactcctatcagtgcggaaagactaccagaacagattacaagctatctgtacacaaatgatattcaattgaatcattctgtatcaattggtttaaagagcttgggcgcttatttaataaataatagcccaagcaatactagatacccacatcttaatcttggggaatcggacttatcacaatgtaccaattatttatttgccgtagattactttttcactgtttatatgcgtgaaggagagaaaacaaaaacaaaaatagcagctagcgaacgaatgtttaggaaaaaagttaataagagcacagataaagaagaatggtccatgaatgtagatgaagactactttatgcagtttaaagggacgttggatgctggtgcgaagttaaatgacatgattcaattcatgcaaggagacttccgagatggtagttatcgcgaaacaatggaatattttgctcagaaagctgtttcgaaatctggttacaatcccgctactttcaatttaggaaaccgagaagtgaaagcgaccgaaatttggagtttgcaggacgcgacagtgcgtaaaattgagaagaaaaaacgccttattcaaaatgtttatgagcaaatgttgtgggactatctatatttattaactagcggtgctaaaaataaagaaaaagcaataatgcgtgatgaaaccagggtaataattgagtttccggacccaatgacggttaatttgaatgaactttctagtactttaaacaatatgaacagcgcattagcgatgagtgtagaagaaaaggtgaaattaatccacccaaaatgggaagatgaagaggttcaagcggaagtaaaacgtatctatttagaaaactcgattggagagtttccggacccagaagcaattgggggaatggaaacgaaaggcgggtga

SEQ ID NO: 639 - DNA, 1560 bp, Listeria innocua
ggatgtggttttttagtgaaaagaatactcattaggtcaggtatgcgccctacaaacgtatacatgcctgaagatatttatttaaaggatcgaacaggatttaataatggtaatctagcttaccaatacagcatttataggactttatggaatgacaatgtagaaatacacgctgatgggttatcttctaatcctaatttagcagaaaaaattaatgaacattacgatttgtacattgtgcctctagctgatgctttccgtgaagattttcgacccgcgctccgtaattatactcagttgattcgtaagctaaaaatcccggttgtagtcacaggggtaggtttacgagcaaactatgaacctcagttagatgaaggtttcacttttgatgaagatgttactaattttgtaaaagcagtccttgaaaaatcggctcaaataggagttcgaggacagattacagcagattatttaaaaaaactcggatttaatgaaggtatagactatcgagtaatcggctgtccttccctttatacatttggtcgagaaataaaaatcagagaactccacttaacagaacaatcctccattgctatcaacgcatctccaacctcttcagatatagctatcgagttcttaaacaacttgattaatacatataaagattaccaatttatccctcaacacctagacgaattccatttaatgtatgctggcggtccagatatctctagtgatatcaatggctacccaacaaatatccaacataagtattatcaagaaggtcgagtaaaatatttcactagcatgcctagttggttcgattttgtgaaaaatattgattttagcattggctctcgcttacatggaaatgtcattccaacaatagtcggaacacctaatatttcatttgtccaagatgctagaatgcgtgaactagcctcctaccatgcgcttcctcacgtcaccatcgatgaattggaaaaaacaagcaacctccaagaattactgactaaagtggacctgaaatcagccgaaaaagtccaagcaaggaattttgataactatattgatttcttagatacaaacggtctcaatcatatctacaaacacgataaaaacagaaaatcagctcctatggatgaacttataaactccattactttcccatcaagtccagaccccatttccatattaaatcctcaagaaatgctaaaccgagtaaaaatctccaccaacttattaaaagaaagacatgattttagcacaagataccgcgtcaacctcgtaaataaccaactcacccaactgaaaaaaacaacttctgagcaaaacaaaaaataccaacagaaaattactgaatcacaagaaaaaaatcaacaattagaaaaacaactgacagatactacacaaaaattacagctgacgctaaagaaaaatcatgaacttacaaataaaatcagacattatcaaggcacattaaaccgaaaatctgtgaaaacgactttaaaagtagcgaattcattagcagctttaaaaaagaaagtttctaaaagctaa

SEQ ID NO: 640 - DNA, 1572 bp, Listeria innocua
caatcatatctagtaaagtttgggatgataaagaacccactttatatcacgattctgaaaaaaaagaattcaacttttaataatgatttgcccttcttgggcttttctttaaaactcaaaacagaacatatgtactctttggaggtgagaaagttcatgactgtagggatttatataagggtttccactgaagaacaagtgaaggaaggcttttctatatcagcacagaaagagaagttaaaagcatattgcacagcgcaaggatgggaagatttcaagttttacgtcgatgaaggtaaatcagcaaaagatatgcaccgccctcttctacaagaaatgatttcacatataaaaaaaggacttatagacacagtcctagtatataaattggatcgtcttactaggtccgttgtagatttgcataatttattaagtatatttgatgaatttaactgtgcatttaaaagcgctactgaagtctacgatacttcttccgctatgggcagattttttattacaataataagttcagttgctcaatttgaaagagagaatacctctgaacgagttagctttgggatggctgagaaagtgcgtcaaggagaatatattcctctcgctcccttcggttatactaaggggactgacggaaaactaatagtaaataaaatagaaaaagaaatatttttacaagtagttgaaatggtttcaaccggttattctttacgacaaacttgtgaatatttaacaaatattggtttgaaaacaaggcgttcaaatgatgtgtggaaagtatctacattaatttggatgttaaaaaatcctgctgtctacggagcgataaaatggaataatgaaatatatgaaaatacacatgagcctctaatcgataaggcaacatttaataaagtagccaaaatactatcaataagaagtaaatcaacaacaagccgtcgtggacacgttcatcacatttttaaaaatagattaatttgtccagcttgtggaaaaagattatctggattaagaacaaaatatataaataaaaataaggaaactttttataacaataactatcgttgtgctacctgcaaagaacatagacgtccagcagtacagataagcgagcaaaaaatagagaaagcatttattgattatatttcaaactatacactcaataaagcaaatatctcttctaaaaaattagataataatttgagaaaacaagaaatgattcaaaaagaaattatttcacttcaaagaaaacgtgaaaagtttcagaaagcatgggctgctgaccttatgaatgatgatgaattttctaaattaatgattgatacaaaaatggagattgatgctgcagaagatagaaaaaaagaatatgacgtatcattatttgtatctcctgaagatattgctaaaagaaataacattcttcgtgaactaaaaataaattggacttcattatctcctactgaaaaaacagattttataagtatgtttattgaaggaattgaatatgtaaaagatgatgaaaataaagcggttataacgaaaataagttttttataa

SEQ ID NO: 641 - DNA, 1575 bp, Listeria innocua
gtggcaaataaaagtagagcgcgagtagtaaaagcagaaaaaaataatacactatcaaaccaaatttccaaagaagatgcatttaatggtatatacggtgatgacagccaagtaattagaccaccatataatttagaagaactatctaaaataacagagaattcgactgtattacaacaatgtattgatgcttatactactaatctctttggctttggcatagatgcagagtccagattagatttaaatagcaaagatatgacaccggaaaagaaagctaaagcagaaagtgaaacaaaaagacttcaagagttcatacgttatgcaaatctcgatgaaggaacagaaactgtgtttcaaaatattatcgaggatcaagagaaaacaggaaatggttatattgaagtgttacgagatggcaaaggtcaacctgtagagttagtacattgtgatagtcaatatattcgagtatgtaaaaaaacagagccagtagaagtgggatacacaatcatggaaaaaggggagccggttaatattttgcggaataagcgattccgtaaatttgtgcaaattattgatgaaaaaaaagtttggtttaaagagtacggtgatccacgaataatggatagtaccaatgggaactatgtggaagaatcagaattagaatcaaaagaatttcgtgatgctacggaaattattcatttcaaaatcgggacctctgcctatggggttcctcgatggattggtaacgtagttagtctttatggcgcaagaaaggcagaggaattaaatctcttgtactttgttaatgggcgtcacgttccagctgctgttgttgttcagggtggcttgctagatgaagatgcatataacaacttagaagagtacatgaaaggtgtctcagggactgaaaatgcctatcaattcttagttttagaagttcaaggggaagagataacaaatgctaatggtgataaaaacttatctgatgtaaaagtagaaataaaatcattggcagatatgattcaaaaggacgcaatgtttttagaatatgatgcaacacacaggaaaaaaatgcgttcttctttccgattgccgccaatttatacaggtgaagcggacgaatataataaggccactgcagaaacagcacggaagacgacggaagaacaagtattccaaccgatgcgtagaaagttggccaggaagataaatggtgcttttttagaggcgttagatatatctgaagccaaattagtattaaaaagtcctgatcttacagatattgcttcaatatccaatgctatatatccatttatctcagcagcatccgtcattcctaatgatttgcgtccaatgcttgaaaaattattgaataggaagctagatgaattacctgaggaatacaacaaaccaatatctattcttctcgcagaaatgcaaggacaatctaatgaacatactgtttcggaaccgaagacagttcaaaaatcactatctgaatacgataacgtattagtaatgaaacagatgagagatttgttacaggagttgaaggacaatggtaaactatga

SEQ ID NO: 642 - DNA, 1590 bp, Listeria innocua
atggcattatcaactgaacaaaaaacaaaaatgtgggcaatgctcaaccaaacacgcggtcaaattggtttaactgcatataaagactatatcttcggaattttgttttataaatacttatctgaaaaagcaacacattggctaaatggcgtattacgcggggaaaattgggagaatgtttattctcaagattccgtaaaagccttaaattatatgaaaaagaatcttggttatgcgattcaaccaaatgaattctttgtagactggaaaaaagcaattgatacggaccgtttcaatattgggatgatgacagatacatttacgcattttaatcaacaaattgcatttgaagcgaaaaatgattttgaaggaatttttgatggtatgcgctttgatagtgcggatttaggtgctaatgcacaagctagggctagtgtcatgatttctatgattgaattgctatcctctccagaatttgatttatctggtagtaatgacacagtttcagatatttatgagtatctagttgcacaatttgctactgtcctagcatctgatatgggacaatactatacaccaaaagaaatatctaatgtaatggctcggattttaacttttggccgagaagatatggaaaaattttctatctttgatcctactgttggttctggttcacttttacttacaacagcaagttatatgaagaactcaggtagacgcggagtgataaagtattatggtcaagaaaaagatgcaacgccttaccgcttatcaagaatgaatttgatgatgcatggtattgaatataatgatattaatattaatcatgcggatacacttgaaagcgattggccagatggggtagtggatggaaaagatactcctcgaatgtttgatgcggtaatggcgaatcctccttattcagcacattggaataataaagatcgtgaagatgatccaagatggcgggaatacggtgtttcgcctaagacaaaagctgattatgcctttttattacactgtttgtatcatttagaagataatggacgcatggcgattattttaccacatggtgtattattccgcggagcttctgaggggcggatccgaaaggctttaattgataagcaccagattgaggcaataattggttttcctgataagttattcttaaatacatcgattccagtctgtgttgttattttaagaaagaatcgtattgaatcagacattttatttgttgatgcgagtaaaggatttgagaaaattaaaaagcaaaataatttacgttctgaagatgtggaaaagattgttgatacagtaattaaccgtaaagagatagagaaatactcacatgtagcaactttggatgaaataaaagaaaatgattataatttaaatattcctcgatatgtagatacttttgaagaagaggaggctattgatttggtggcacttggtaatgaaatggttacattaaatgccgatataaaaaaagccgagactgattttcttggtttattagatgaattagccgttactccggatacgaaggaaataattgaagctactaaggcggtatttcgatga

SEQ ID NO: 643 - DNA, 1614 bp, Listeria innocua
atggaagaagcagaagaagatatccaagagttggactcagatcgcgcgatttcgtttcaacatactaactatcgcgggaagtacagcgccatcgaagacgatttgatggtgttatataagtttagttgtcatgcaggggaaaagatggaaaccctggtagaccaaccgttttatgagaagttggacgcgtttgtggatggcatgcaagatttgagtatttcgacgtattctaccaccaaccggattggtgcgaagtcgaaacaaacgtacatgtcttcttacggcaatcagccacaagtaattgaatccgtgaaagacaatgcgacgatcgaagacttactaaacggagacaacttctacgcaaaccaaatgcaactacaatatagggactggcaacgagcgaatccaaatcaagatgtgagtaagaaagactttcaaatggggatgttacatagccgggtatttgaatataaatcgattaaagatgaacaacaagagaaagagttttgggtcaacattgtggcaaccgtggtgattgtgggtgtcagtattttctgcccacctgccggccttgccttagccgtaggatacgggagtttagaagctggttcggcgataagtgggaaggactgggtatctggccgagaactaagtacggaagaacgggcgctccgtggcggtttagcgctgctagatatcgttccaggtgtgaaagcattgagcacaggagcgaaagctgccagtgccggctcgaaacttgtccgcgtaggcgataatattttagtaggtagcaagaacgtcggcaaaggaaccatcgacaatggcattcaagcagggaaacaagcgatggatctccggttggccaatgcgaaaaaagtcagcgaagccgtccaaaagaaactcaccaaagacctcgacgatattagcacgatggccaagaccatccaaaacaaaaccaaagaaaccttcacgcttccaccgcgtgagcaaatcgcctttgcgggaggaggcagtatcccggaacaaagtgccgctggagccgcctccatagctgcgaagaaaaagctgaaagatattatgcaaaacatggataatttgaatgtgaagggcggcggtaaagctggtataattgagggtgcagaaaatagtggaaaatatctagatgatattgaaattcctgataatatgaaaaagtgggattatcctccaagtaaagagttgtttaaaaaatatgaagaagtatataagaatccgaagtattataatcaggaaactggagcgattaattggcctccaaataacggttttataggagaaacgcatgaaagacttgcgaatgtgggagaattttttgatagatatggagagcctagtggggaatttttagcaaagtcaggcttttcgtttgaggaacgcgctctagctccacatagtgaaacctctatttactataaatatagagtagaaaaaccattcaaaattatagaaggagaaacagctccttggtttgatcaaaaaggaggagcaacacaactttatgggataactgaggatggtactgtattatctgtagagcaattaatagatgaagaatatttagaattagttaattag

SEQ ID NO: 644 - DNA, 1617 bp, Listeria innocua
gattccttgggattgatttattcaagccgtgattcggagcaggtgataaaagcactctctaaaaatttagccagtggaaaagatgtagttgcacaactaaaagagggaagtaaaaaaattattcaggctgttgatggacgaaccttatctggagcagcttatacagcgggtaaggatttatttgtaaatcttgttttacctacaatcgaaaaagtaacatcagcttgtgatgcaattgaacacgaattaaacaggtaccagtcaaccaactcaatagtctcaggtgaaggttaccttgacgaagacatcttaaagcaacaaattgaagctaaaaaagatatgaatacatcaatagaaaaaactgttaccataatgaatatgataatgaagacaagtttaattagagcattatttgatgctgcacaagattgtaaaagagagctaaaccagatgtcggatgttcttcaacaggatattgaagaactccagaagaagctagagaagttatatgaatttgatggacaaacaaaaaacttatttactagcagtcttgatgaaatgaaattagcaatgcaaggtgttttgattttaaataatacaactgtaaatagcgatgggagttatcaacttcctgctggaatagataaaagctggtttacagaattgaaaagtgaaaaacaacaaactgaaatgatagagaaggaaaggaatgcagtaattaaggagttaaatgagttatttgagaaaaatccagcagtagctattgaaaaaattaaaaataatgatcgtttattcggttacgtaatcggagctttagataaattccctgaaggacttcaaaatgcagctcttggaatctttatcgcacaagagagttggaataaacttccaaaagatgttgctacaaaagttttaaatagtgctaaattcgctacatatatcagtaagacatctatcgccacccaagcgattgtctatagtggattgattaaactaaacgaaaaaggatggaatgtccttgctccaattggttatacaacaaaagttctatctaaaaccagcgagggagcaaaaataatagctggatctaaagtgggatttgatttatttaagaaattaggaccagtttctgattttattaaaactcataaagtgacagttgaaggtattggttatgctggagatgggtttagtataactgcctatgcgtatgatgaatatatagatcctaagagcccggcttatggaaacgcaagtaaggctatatatggaggtcttaatttgtttatattaaaagctggaccacttgaaggtgctcaatatggaggtttaccaggtgcattatttggaacagtgaatactgcagttcaagggatggagattcaaaccccatttaagtggttaggtgataatgggaaaataggttgggatggactaatgggatttggtacagattcagatgcagaaaaatggctggctgagcagtatgaattatatgatcaaagagaaaaaaatcttaatgaaggaaatgttggtaagataaaggaagattggtttggaaaacaaagtggccgtgtaaatgtaactgattttaacaagggcctcccaaggtggtag

SEQ ID NO: 645 - DNA, 1650 bp, Listeria innocua
atgaaaaaaagattagcgttagtttgtattatgattctatctatctcaacctttttaatggcatgcggaggaaataaagacgaagcgagcaaatcacaaggcaaaaagacactgaaaatcatggaaaacgctgaagtttcttccatggactcaactttatcgcaagacgttccaagtttcactgaacaaggacaagtttttgaaggtctttatactttaaacgacaaagaccaagcagttccagcaattgcaaaagatatgccgaagttaagtgaggaccaaaaaacatatacaatcaaactgcgcgacgatgccaaatggtcaaacggcacgaaagtcactgcaaatgatttcattttcgcttggaaaaaactagcaaatccagacaccgccgcccagtattctttcctgcttgatgggaccgttaaaaacggaaccgacgttgtaaatggtaagaaaagcgtggacgaactaggatttaaagcccttgatgactatacaattgaaattcaattagaacaaccagtaccttatttcacttcgctcctagcattcaactccttttaccctcaaaatgaagattacgtaaaagagcagggtgataaatacgcgcagagcagtgaaaacatgatttacaatggtccttttgttatgaaaggctggacaaacacagaaaaagcttggactttggaaaaaaatcccgagtactgggataaaaagaacgtgaaatccgacaaaatcgaagtgagcgtagtaaaagctccgaacacagcagtaaatctatacgacactggaaaacttgatgtagcaacactttctggcgactacgcttcacaaaaaagcaacgacaaagactaccactctgagctagatgcctacgtgactcacctaaaactaaatcaagaactggatgggaagaaaacacctttagctaacgaaaacttaagaaaagcactttcccttgcagtagataaagaatcacttacgaagaaaatcttggcagatggctcaaaagcaatttatggctatgttccagaaaaatttgtcacgaatccagaaactggcgaagatttccggaaagaaagtggcgactacatgaagcaagacaaagctgaggcgaaaagctattttgataaagcaaaacaagaactcggtggcggtgaagtgactgtagaactgcttaactctgatttagaatcaagcaaaaaagtcggcgagtacctacaaagtcaactagaatccgcattaccaggcttaaaagtaaacttgaaaaccgtccctaaaaagaacttattgcaactaacacgtgagcaaaaatacgaaatcgttttatcaaactggggtcctgatttccaagatccacttacattcctaggaaactacacaacgggaaacacatataatgcgagcggatattcaagcgccgactacgataaaatgataaacgcaacttcaacaacactcacaactaaaccagaagaacgctgggaaacctttatcgatgccgaaaaattactaatagaaaccgatgcagcaatgatcccgctctatcaaactgcagtatgtaatttgaaaaaagatactgtaaaaggaatcgttcaccataattttggaacaagcttttcctataaaggtgcttacgtagaataa

SEQ ID NO: 646 - DNA, 1674 bp, Listeria innocua
atgaaaattgtgattattggttcagtagcagctgggacaagtgtggctgcaaaggctagacgaaatacagaggaagcagagattgttgtctacgaccaagacaaggatatttcctattcaatttgtgggattccttattatataggagaagaagttgaagagttagataagttgacccctagaaatgctgcatggtttaaaaagcgttataatgtagatatttttacagagcatcgagtgacagctattcatcctgaaactcaaacgcttgaggttgagaatcttcaaacaaaggagaagaaaaccgaatcctatgatgaattggttttagcaacaggagccaaaccgattgtgccagagatttttaaagcacagcaagccaatagaaatctttttcatgttcgtactattcaagatgctgctgcaattcactcatttattgaaaaagaaaagccgcaacaagccacaattattggtgcaggctttattggattagaaatggcagagcaattggttcataaaggaatagaggtaactattattcaacgtggcaatcaagtcatgaaacaaatggatgctgatatggcttatcgtgtccaaaaggagcttgaaaaaaatcatgttaagcttcaattgaatacaacgatcacaaaagtaatggagaaggatggctacattactgaattagcaaccaatcaagagcaaacaatcaaatcggatttagtcattcttgcagctggtgttactccgaatacttcacttattcaatcgacaactattcaattgggaaaatctggtgcgattaaagtgaataagaaaatgcagacaacggtaccacatatttatgcggtaggagatgttgctgagagctattctgtcattacagataaaccaatatatcgcccacttggatcaactgctaataagatgggtagaattgctggtgatatcatcacaggaggaacactggaacatcgtggtattttaggaactggtattgttcgagtttttgatttagcggttgcatatactggtttaacagaaaaagaagctaaattagaaggattagagacagctattctttataatattaagccagatcatgcggactacttaggtggaaaagagctgacaatcaaagctttagcagataaaagtagcgggagaattcttggagctcagattattggagagcaaggtgtagataaacgaattgacgtaattgccactgcaatttcatttggtgcagtagcagaagatttgttccatttagaccttgcttatgcaccaccatttgcgacaacgaaagaccccgttctttatactggaatggcgttagataatgcaataagcaatggaacacctttaatgaccccaactgaattgattgagcgacaagcaagtggagaacaactgcaaattattgatactcgttccaaaaaacaatatgaaatttcttgtgttaaaggggctatccatattccattagcagaaatacgtgatagagtggcggagctagataaaaatgtaacaacaatcacgtattgtaataagggcgtaactggaaatgctgctcaaaatatcctgttaaacgaaggatttaaagaagtctataatttatctggaggaaataaaaattaccagataattgcccaaatgctcgcctctaactga

SEQ ID NO: 647 - DNA, 1683 bp, Listeria innocua
atgtcaaataaagtgaaatcagatattgaaattgcatcagtagcagaaattctaccagttacgactatcgcggaacatttaggactagatgcagatgcactcgaactttacggaaagtataaagcaaagttatcctatgatacgattcactcgttaaaagacaaggagcaaggtaaacttgttcttgtgacagctattaatccaacgccagccggtgaaggtaaatcgactgtaacagttggtcttggcgacgcactctctaaaaaagataagaaaacagtcatcgctttgcgggaaccatcacttggacctacaatgggtattaagggcggggcaactggtggcggttatgcgcaagttattccaatggaagatattaatttacattttacaggcgattttcatgccattacagcagcaaacaacgctttatctgcgtttatcgataatcatatgcaacaaggtaatgatttaggaattgacgggagacgaatcgtttggaaacgtgttgttgatttaaatgaccgagcgcttcgaaaagtggtcgttggtcttggtggtcctattcaaggcgttcctcgtgaagatggttttgatattacagttgcttctgaaattatggcaatcatttgtttagcaagtgacttaaaagacttaaagaaacgcttaagtgaaattgtgattggctataattataaaaaagaaccaataactgttggcgaaatgggttatgaaggtgcattaacattgctattaaaagatgcgttaaaacctaatttagtgcaaacattagaacatactccagcgattgtacatggtggtccttttgctaatattgctcatggttgtaatagtgtttcagcgacaagtactgcgcttaaacttggcgaatatgtagtaacggaagctggttttggagcagatctaggagcggagaaatttttagatattaaagttccagcacttggaaaagcaccagattgtgtcgtgattgtagcgacaattcgcgcactgaaaatgcatggtggcgctttaaaaacagaacttagtgaagaaaatgtcgatgccctagcaaaaggctttactaatttacaaaaacatacggaatcgattcaaacatttggtattccatatgttgttgccattaataagtttattacggattctgatgcggaagtcgcgaaattagaacaactttgcgaagaacatggcattcctttttcgttaacagaagtgtgggaaaaaggcggcgacggtggtctagaacttgcagataaagtaatcgctgcagtcgaaagcggagaagaggactataaacgcatttatgatgatgcttggtcaatagaagaaaaattagaagcaattgtgacgaaggtttacggtggaattggcgtagaactttctagcaaggcacaaaaacaaattgttgagtttaaaaaatacggctgggatcgttatccaatttgtatggcgaaaacgcagtattctttatcggacgacccaacattactcggtcgcccaactgattttgtgattcatattcgtgaattcattccaaaacttggcgcgggcttcgttgttgctttaactggcgacgtgatgacaatgccaggcttaccgaaaaaaccagcggcattaaatatggatgtcgatgaaaatggtaacgcacaaggtttattttaa

SEQ ID NO: 648 - DNA, 1704 bp, Listeria innocua
atgatgacgaatttaagaaaacgactttcgcggttatattctgaagatgtagttgagagtttagcaacgagaattgaagcccgggtaaaccaaacgaaacaaagaaagttagtacgaaaagacaaatgggacgagaaagatattgttttaattacatatggagaccaatttaaagaggaatccaaaaaaactttaccaacctttaagaaaatgtatgatcgttatttaaaatcgacttttgaggtagtacatttcctacctttctatccttattcctcggatgatgggttttcggttattgattacaaagcggttaatccggagcttggcgattgggaagatattaaggaaatggaacagtcggcgcgattgatgtttgattttgtttgtaatcatatgtcggcgaaaagtgagtggtttaagagatatttagcgggcgataaggaatttcaaaactttttcgtggaaatggatcccgatactgaccttagttcggttacaagaccacgtgcaacaccagtgctcacgccgtttcaatttgcttctggtaaagagggttatatttggacgacgtttagtgaggatcagattgatttaaactttgcttgtccggaagtgctttacaagatgattgatgttttgatgttctatttagaagaaggtgcggaatatgtgcgacttgatgcggttggctttatgtggaaagtgccgggaacgagctcgattcacttagatgaaacgcatgaaatcgtgaaattatttagagatttagtagatatggcagctccggggacgattattataactgaaaccaacgtgccgcatgttgataatattagttattttggaaatggtgaaaaggaagcgcatatggtttatcaattcccgcttccaccactcgtgctccatgcgatacatcacggaaatgcggaatttttgagcaattgggcgaagaatttagagctcccagaaggcaagcgtacattctttaatttccttgcttcacatgatggaattggcttaaatccagtgcgcggaattattccagaagcggaaattttagcattggtagatgatttggaaaaagaaggagcactcgtttcttataaacaaaatccagatggtactaaaagtccgtatgaaattaatgtgacttacatggatgcgttaagtaaacaagcggatactgatgacttgaggctatcgagatttctcgtcgctcatgcagtattaatgtctatcccaggcgttccggctgtttatgttcaaagtattttaggaagtcgcaatgattattcaggcgtagaaacaacggggcataatcgctctattaatcgaaaaaaatacgacttggcggaaattacagcagagttgaatcaggctgactccttacgaaaagaaacctatgatgcgctaacgaaattaattagcacacgaaaagcggaatcacttttccatccagaaataccgatggaagttttagaatctacggcggaattgtttgttgttaaacgttcatccgacgcggaatcgattatattgattcataatttatcagaaaaagaagtgagttattcactagacagcggtgtttatacaaatctttataagggctccacggtaactgggagcgattccataaagcttagaggctatgaattctgctggctaaaaaccaaaaattacagggaggaacaaaaatga

SEQ ID NO: 649 - DNA, 1716 bp, Listeria innocua
gtggcaaagtttgtccttttttattggcaaattggtgcggataaaaacaggaaaggggagctacttatgcttgtcagtgatgctatttatacatactctgcagtaatcaacacggtggtacatgaaggtttaactgcttatcgtaaaaaaaatagtcgcggtgtgatggccgtgcgtgatcatttcgctgcgatcgaagcagcaagtaccaatcggaagggtgttcagttcgtcgttcgggacaaaagtcatctacaaacgaagtgtggcgtgaaaggctttattgtcactagtcaagaagcgttgatcgcagaagtagatcagattacacattggacaccgaatacataccgagttggcacttactcggaccgaaatcggaaatacataaaaggacacgaagaaaagaacttacaacaaatcaatacgtttgtgatcgatatcgatacgcaaaaagtcgacgtggcaaaaatgatcacggcatcgatgcgtgtcttgaatcaaacacctacgttcatcttgaaaaccgatcacggctttcaaatgtacttcgtactagaaacacctagctttgttagtaatgcgaatcaatttaaatcgttaaaaatcgccaaaagaatttcgcaaaacgtcaaatatgcgtttgcggaagagttgccagctgtcgatattggctgcaatgactttggtttctttcgcgcgccaaatacgcagaatgtagcctttttaaacctagaaagtcaattcgatttccatgaaatgatggaatggtcgaaaagttacagtgatcaaaaacggcgttcggtgctttctttggtaccggaatcttcaactgcagtctttgatgcgaccaaacaagaatggttttccatcatggcgaatctaaaaaatgtacgtggacgcaaaggccaatacggccgaaataacgttgcatttaccctagcgttagcttgttatgcgtccggtaaaagtaagcaagaagcgacagatttgcttgatcagttcaatgacacgctggatgcaccattgcgatttagggaaatcgaaacatgtattcgtaatgcatactcgggaagataccagggcgcaaatgctgaaaaaatcagcgatatcttgcagacgtattggaaatctgaatacgaaatcaagggctacacgccatttatctttgatgaagtaggtaaggttaaacctcaattctttagaaagcacaggaagagtagggaagaacgtacgtattcgcattttagcgaatgggaaaaggacttagaatgttacatcgagtcacagctgttatccggacaaacttttttagaacgttcgcagcgctcggtcgctgaagcattaaaaatgccttatgcgacgctaaaaaaaatactgaagcaatcggatcgtattattagcagagtgaacgggaaggggagagctgcccaaacccttttttctacagtggccatcgttgtggagcaagcgatacgacacgccttgacaaagaaagtggcagaaaaagaagcctacctggaatttttagcgagttttacggacgcagcgaagcacattcttgtgacgttgcaaacaaaaggtgtccccgcatccggttttaatatacaccctgttgtccagggggatagaagtgtccagctgtccttgaatctcctcgacaagctctatcagcagcgtcccaacaacgataattgccaaagcaggtatggttaa

SEQ ID NO: 650 - DNA, 1722 bp, Listeria innocua
atgctacaaatcagtttatttttaatcattgctgcacttttagtacttccaatggggaaatatctttatcacattgctacagagcagcatacttttgctgataaattattagatcctgtagataatttcatttataaattgtgcggtattgataataaagaaatgggatggaaaaagtacacactatcgatgttactcacaaatgccgtcatggtattagtaggttattttatattacgaattcaatcactgcctattcttaatcctaatcatatagcaggaatggagccatctttagcatttaatacaatcataagtttcatgacaaatacaaatttacaacattatgctggggaatctgggctgtcctatttaagccagttactagtgattacctttatgatgtttacttccgcagctacaggattttcggtagcgatggcttttattagaggattagcaggaaaaaataaaacaatgggtaatttctatcgagaccttattagaataattactcgtgtattattaccattatcgttaattggcggtttattacttatttcacaaggagttcctcagaatttactgtcaaatataactgttcaaaccatagaagggaagtttcaagatattgctatgggacctgtagcttcactagagatcattaaacatctaggtacaaatgggggaggtttttttggagcaaattctacaactccttttgaaaatccaaatattatttcaaatatgatcgaaatgctatccatgatattgttgcctgcctctgttgtaatcgcttttggttatatggttcgcgatcggaagaaaagagtgagcaaaagcaagaaacaaaatcttttttggataggaaatgaagcaaaaccattactttccgtaatgatcattctttttcttatgggtttaattgtgtgtgtaatagctgaaaagggaggaaacccactgctcgaaaaagttggcttgagtcaagctatgggaaacatggaaggaaaagaattgcgatttgggatagatcaatctgccctcttcacaagtgttacaacagcttttacaaccggttcagtaaacaatatgcatgatagtctttccccattaggaggaatggttgccctatttaacatgatgcttaatttagtgtttggtggaaaaggagtaggggttatgaacatcatcctctatgttattatgacagttttcatctgtggtttaatgattgggaaaacacctgaatatttagggaaaaaagtagaaggaaaagagatgaaacttgcagcattaggcatcatcattcatccatttttaattctaagttttactgcaatagcagtgagttgtacggcgggtttatctggcatttcaaacccaggatatcatgggctgacacaaatattatatgagtttacttcttcatccgcaaataatggttctggatttgaaggattagcggacaactcacacttttggaatatcactacggggcttgtcatgttttttggccgatatttgacaataattattcagcttgctattgctggttcgctcttgataaagagtcaagttaatgaatcgatagggacattaagaacagacacaaagactttttcgatgtcactatttatgattattatgttaattgctgcgcttacgtttttcccagcattaatattaggtccgattgctgaacatttgtctttatggagttaa

SEQ ID NO: 651 - DNA, 1743 bp, Listeria innocua
atgaaattgtaccaaccagatcagttaccattaacaaagtatctattttttacaggaaagggaggtgttggtaaaacaacgactgcttgtggcactgctacttatttagcagatagtgggaaaaaagttatgttagtcagtaccgatccagcaagtaatttacaagatgtttttcaaacagaactaacaaataaagggaaagaaattccagaagttccgggattaactgtagcaaattttgatcctgtaacagcagctgatgactataaagaaagtgttgtaggaccatttagagggaaactacctgattctgctttagcgaatatggaggaacaattatctggttcttgtacagtagagattgctgccttcaatgaattttctggttttttaactgatccagaagcagagaaaaagtatgactatattatttttgataccgcaccaacaggtcacacgttaaggatgttacagttaccgtctgcatggagtaattttatggatgaaaatacaacaggagcttcatgcttaggtcaattatctggtttaggtgataaaaaggaaatttatgagcatgctgtagccacattagctgatggagcaaaaacaactttaatgcttgtaacaagaccacaaaaggcaccgcttttagaagcagatcgagcttctaaagaactacaagagataggcattgaaaatcaagttttattagtgaatggcgtcttagaggaagcaacagataaagtatctcaattgatttatgatggacaacaagaagcgttggcacaaatgccagatagtttgaaagcttttcctgagtacagtattcctttacgttcttacaatgtgactggtgttgaaaatctacgccaattgttgaaatccaatcaaggtgaatttttaactgaaatagtcacaccaagagcatttcctagattgaaagacatcgtgaatgagttgcatcaatctggtaaaaaagtgatttttacaatgggtaaaggtggcgttgggaaaacgactattgctgcggcaattgccactggtttagcagataaaggcaagaaagttcatttggctacaaccgatccagctgctcatttacaatttgtgatttctgaatccgatcaaatcaaggtgagtcatatcgatgaggacaaggaattagcagattatacagaagaagtattaagcaaggctcgtgaaacgatgtcaccagatgatgttgcttatgtagaagaagatttacgttcgccttgtacacaagaaatcgctgtattcagagcttttgcagagattgtggatgatgccgattgtgatgtggtagttattgataccgcaccaacaggacatacattactattacttgattctacccaaagctaccataaagaagtagagcggacatctggtgaagtaccagaatcagtgaaacgtctcttacctcgtttgcaagatggaaaagaaaccgaagtggtcatggtcactttacctgaaacaacacctgtttatgaatctatgcgactacaggaagacttggatcgagcaggcattgctcatacatggtgggtcgtgaataacagtatgttaacaagtggtacaacaaatccaatgttactagcccgagcacaaaatgaaaatacatggattgataaagtagcagaattatctaataatcattatggggttgtagaatggcatgcagaagaaatctctggagaagcactacacaatatattgaattag

SEQ ID NO: 652 - DNA, 1755 bp, Listeria innocua
aggacaatggtaaactatgacgctatagataaccttatcgatactatcaatatattagtagagaaggttaatgaaggagaattcgaaaaagaactacttggacaactaggaatgaaaaatattcccgcatttgttgagacgttcgagaaggacatttctagccttcttctaatccagaggtcttattatattaatcaacttaaaaaaactgtaataaaggcagaaaaaccacttacgattgaagaattatttcaatactactctaatgatttgtttataggtgatgattttagaataaatatgtctaaaaaagcatctgattttcttacagcaacaacaaaagacattagtaaaactgttatgaagtcactagataaagatgtctctttcaaacgtttatctggacgttctgtgagctggattaaagaatggtcagaggatttggccaacctaatgaaaattagtactcaatccgaagtagagggggtgctaataaaggcactgagtgaagggaaaggtattcaacatgtagagctagcgctaaaggatttacccgcatttgaccgaaaaagggcaaggacaacggctattacagaagttttgacagcagctagtgttgctcagcaagaagcttttgaacaatcaccatcagttgaaggcaagaaatggaagcattccggcggtaaaggaatcgaaccccgctcatcccatattgaattaagtggaaaagtggtccagataaatgaaacgtttacgatacctggaagcggcgagttagcaaaatatccgagagatacagacttgtctgcttctgaaaggatacattgtcattgtgcccttggaccagctgtaaatgaagagattctcggatggacaaaagaagataaagaaaaagcaagaaaagaagttatggacgatttagacaagaatccgtacactaaaaaacaaaaagatgcaaaaaaattggcgaataaagttggccaaaaaataaagaacgaacaggatattttagatgctggggaagtagtgtataaaaacattgaatctaaagttaatttttatacaaggagaatagagcgtcttaaaaagattaatgataaggctaatagagatttgatttttgataagataactgcaaaagagcaaattagaacgaggttcttaacaagcaatctacaagaaaaagcagcagaaaaaagattagaacttattttttcggaactgaaaaagatacgaaaattcggcaatgttaagatgcttaatatattagataactcagatttataccttaaacagattttgataaataataagaaatactttccagcatcgtggattactgagtcgaacaagaacagtgttttacttttaaatttaacaaaagagcgtggatcacaacaactatacaaaggagtcagcatagttagcgctggtgtccatggtacaaaatcaacaataatccatgaaatgatgcatcactttgaaatttcagtaccgggatttcttgctgctgaaaaacttttttatgagcgtagaacgaaaggatacgatttggtacaattaggttatccatacgatgatcaagaaatagctagattggataaattcgttattgggtacattggaaaagattatgcaggaaccggttatgaaataatgagtgtaggattacaagagatgatggaagcagacactcgtatttttagtgatacagattatattcactttatcataggaatgttagcgaggttatag

SEQ ID NO: 653 - DNA, 1758 bp, Listeria innocua
aatgcgatgactgcaaaagatttttttaattacgatagtgtgatgaattatgtaaatgaagttgtgaaaggcaaaaaaatagcggggaaagaaatacaacaagcggcgaaaagatttaaaagagatttgaagaataaagaatatgagttcaatcctaaagacgcagaatttgttatcggtattatcgaaagaacttttgttcatgatcaaggggaaagaattgacggaaccccgcttcgagggacaccgtttattttagaaccgtggcaaaaatttattatttactccttattgggattttatataaagggtacaatcattagacgtttcaaagaagcgtttatttttttacctcgaaaaaatggtaagactagatttgttgcagcattatcgtgggcgttagcacttttagaaagaaagtcagggtcaaaaatttatatcgttggcgcggctcttgaacaatctttacaaagctttaattttattaacttcaatattaaagaaatgggagaagaggattcatttcgtgttttagataataatcaagaacatagcatttctggtgatttcggagatggctctttatacatcaaagctttagctgctaatccagaccgccaagactcccttaattgtaatgtaggaattgcagatgaattacatgcgtataaaacgcctaaacaatacaacatcattaaagaagcaatgaaagcatatacaaataaattgatgattggtatcactacggctggtgataatatgagttctttttgttatcaacgtttacagtattgcaaaaagattttagacgacactgtgaaagatgaggcttattttgtttttatagcaaaagcggatgaagacgaaaaaggcgaagtggattatacagacccaaaacaacacgaaaaagcaaatccaaattacggaatcactattagacctgctgatatgacgaatgacagtttgcaagcgcaaaacgatccacaacagagaaaagattttttatctaaatctttaaatatatatactagcgcaatgaaagcgtattttaatattgatgaatttaaagcatctgattcaaaatataactggaccttagaagaattagcaaaactaccgattaaatggtacggcggtgccgacttggcaaaacttcacgatttaacagcggcggcactttatggaagatatgtaatggatgatggtacagaggtagacatcgttatcacacatgccttctttccaattgtgatggcaaataaaaaagcggatgaagataatattccgcttttcggttggaaagatgatggagtattgacaatgacgaacaccccgactaccaattttgcagtgatagtcaactggtttaaagaaatgaaaaataaaggtttcgacattaaactagtaggctttgacaaaaagtttggtcgtgaattcttttatctgatgaaaaagagtggcataaaaatagtagatcaaccgcaatatttttataaaaaatcggaagggtttagacgtattgagacgaaagcaaaagatgggcatttctattattgtcataatcaatcatttgaatattgtgttcaaaacgtccgcgctattgaaaaaacggatgacatgattcaatacgaaaaagtggatggtgacggcggctcacaacgtattgatttgtttgacgccgcagtttttggagcggtacaaatgttagaagatatacaaatgagtgcagtagcaagcaaatggctaaattcgaattga

SEQ ID NO: 654 - DNA, 1791 bp, Listeria innocua
atgataaacaaacaacatttttataaagtaattcaggcttttattggggttcttttaatagggagtgtttttatatggcttgggtcaaataatgatgtaaatgctgaagaacagagcattaccgaacctacaccaataaacgaaatttttcccgatgctaaattagcagaagtaatgagaaactatcttagcaagacgaatgtcactgatactgttacgcaagaagaactgaataacataactattgtaggtgcaacttcaactgggattgagtcgcttgagggaatacaatatctgccaaatgtgacgacttttaactttaacggagaaaaaatacaggatattagctttttatcaaattctacaaagttagagaatctggacctgtcagggaatccaataaaagattttagtccgattgcaaacctaacaaaattgcacactcttaatttaatgaattgtgagataagcgacattagttttatcacaaatttaaccgagttgaaaagcctttatcttagtaacaatcgcataactaacataagcccattagctaatttaactaaattagactatttaattattgaaaataaccaaattactgatttaactccgcttaaaaatatgaaaaacctcaataatttagttataagtggaaatcagataaatgacatcacaacaattgctgaattaacgagtttgcagaatttatctattagtgacaatcaaattgtggatattagcccattagctaatttaaacaacctaaattctttagctatccataagaataatattgttgatacaagtccattggctaatttgacgcaattaaagtttataaacatacgagataatcagatagatgatattaccggattaactaatctaactaatttaaccaatctacatttaggtggaaatgaaatatcagatctaacgccacttgcgaatttgactaatttaaaccttttggatttaactaataaccaaataagtgaggttatacctttagctaatttaacgaatctatccaatctttggttaaatggaaacaatataatcgatattagtccattgaaagatttaaagggtttaaaaaatttaagtttgtctgatcagcgaatacagaaaaatcctgagttgtttaaaaccaattttaccttaactaacaatataaaagatttagacggtggattagttgagataacagatattagtcataatgggacctacgataacccgattgttacttgggagttgcctagatatgtaaatgaaattagttataaatatacacaacatgtgcagattggtaattctaagacggattacgatgtgacggtcagacaacctttaagcttaccatcgcatactgtgaactttatagtagacgatgttttaaaaacaagtttagaagtaaaagaagaagcgttgattacacaaccagccgcaccgaaaaaagcagggtacacatttacgggatggtatgacgcgaaaacaggcggagacaaatgggattttgaaacagctgaaatgccgagaaatgatatgactttatatgcgcagtttagcgaaaatgaagttatcccagttgatgaagacgttgatcttattgttgaagaaagcggaccagtgcaagaaagtaatgatgacgtaccaccagttactgaaccgacaaaaaatatcgtaatgcttccgaaaacaggagacagtaacaacatgttatttgttggattaggtttgttattgttcggaacaggggttgttattagtaaaaaactccgctaa

SEQ ID NO: 655 - DNA, 1818 bp, Listeria innocua
atggttatggtaccactatctcaagtttctttacctagttttgccgcagaagaacaaggattacaagcaagtcaagatgtagtaaatattccagatccagaactaaaaaaacaattaaattctcatatgtcgaaaccagctactgctgatattacagaagatgaaatgagtaggctagataatgtttcattaagttcaggtattactgacctaactgggttagagtatgcaaagaatattactagaatatcattccgtggtataaatgcttcctatgacgtagtaacaaaacttcctaaacttaataatttaactatcacaggttctaatattacttctgataaaattcctaatctaaatagtatgactaatttagaaaatttatatttatacgaatcaaattttgacaattcgttacttcctaaaattaacgcgcttcccaatttaaaaacccttaatataggttataataagcaaataactaatattagttcattaaaaagccttcccaatttaaccgatttagtagttatgggctgccaaattgacgatttcagagggattgcagattttccgaaattagaaaattttaatggtacttatcaaagatttgaagatgaagcaagcaagagtcttaaaagtagtgagctaacatttaatgaagcagaacaaacactatttatcccatttaaaattttggaaaaacaaacgatttataactacgatggaaccattttaccctacgatacaaatcctgctaatttaatgattgaaatagattctggttatgaatttacggatgataaaactactatttcacaagaaggcgttacactaaagaatttttccaaagaaaattatgatggcatggaaatgttatatatagtcgctatgttcgatggaattaacattgcaacaccaccaaatttagctaatggaacatataatataactggaaatctttctggtggattatatgacgtcgatcattctgtaagtattgaagcagatgataatgtatcttatacgcaaggacaaaccgtaacaccagaacaattcttaaaagatattaatgcaagtgccaatggtggaacaattacaagcgactttgcagataaagtagatttctccacaccgggaacttatacagttactttaaatgcatcaaattcagttggtttaacggctgatccagtgcaagtaaccgttactatcgttgaacaaacagtgattactgcagaaacagaagttagttacaatatgaatgacgcaaaaacagaagctgaatttttagcggatattaatgctgtaacgaacaatagtgctgcgattacgacagactttgatacagttgttgatttaacaacagctggtgaatatacagttacactaaatgcgggaacagcgaaacaaaaagcaacaccatttaaagttactgttaaagttgtagatccaacaccggcgccagcaccagatccaacgccgacaccggatccaacaccgtcaccagatccaacaccaacaccagaccctgcatctgaccctgatccatcaaacgatccagcgccagcagaagatcctggaacatccattgactcaacgggttcaatggactcaactgatccagctaattcaacatcagaagattcaagttcttctactccgaaagctagtaaaaaagctaactctggtaactcaacattagtaacagccagcaaagcaagtttaccaaaaacaggtgattctttacctgtaactggagtagcagtaggattcttagttttaggattaggcgttctaattgctcgtaaaaaataa

SEQ ID NO: 656 - DNA, 1872 bp, Listeria innocua
ggggaaagcatggactatattcaaattgaaaacgcatatattaataacctgaaaaatataagtatagaaatccctaaaaataaatttattgtaattactggaatcagtggttcaggaaaatcaagtttagcattcgatttgatttttgaagaaggtagaaaaaagtatcttcaatcaataggaatggctttagattttggaacagactattatacaaatattaccgggttaagtcccactgtagcagtaaagcaaaacctcatcagacaaagtaatccgcgctctactgttggatctaaaacaggacttttaaacaaattttgtctattattcgcaaatgaaggttcttaccaagatagtgaaagtttttcgttagctaatgatgatataaatcctgatattttttcctatctttcgccaaatgggatgtgttttgactgcgctggaactggtaaacaatttcatattcatatggaaaatattatttcatctaaaacagtgacggtcgaacaagtatttcaacaaattggttcaacaaaaggttatcttaatttactacagagaaaatatactgcttattttcatgaagctttttcgaattgtcccatcgagattcaaaatgaattaatttatggtgtagtagataattactctgggaaaacaagttattgcattgaacgagtattacataatcggtatctacgtaatgaagatgttcagagattttattcacaagaaatctgtgaatcctgtaatggctaccgcatttgtgatgaagctagaatgatgaaaattgctaatctacacttgggtgaaattgccagcatgtcgttaataaaagtaaaagaattccttgataattatatagagatgaataaattgtcagcttttgggacagagttatctcgttcgcttattacaactttaaattcactcatccatattaaactaggacatttaacgatgtatcgagagattccgaccttaagtggaggcgaactacaacgaatttttttatatgaccacttagaatcaaaactagattcactcatctacgtgtttgacgaacctactagcggactacacgaatcagaaaaacaagagattatcgagtcacttcaatcaatcaaagcccatggaaacactgtacttattgtttctcatgataaaaaaataataaaagctgctgatcatattattgatgttggaacaaatgctggagatttaggcggtgaaatagtttatcaaggatcctattcagagtttctgaataatcgccattcgcttacttcaaaatttctagattatgatatgacaaaaagtttcaaaaaaaataagcagaaaacaaaagatacactaagcattagtaatgcaaaccgaaacaatttaaaaaacatttcaattgaaattccgattaacagacttgttggaattgctggagtttctgggagtggaaaaagtacattaatatctaaaacattagtaccactctgcaaagaacaattaaagaacagcgatttcagtaatccaaatatcaaaggaatggataaaatacaaaagataattgaaatatcacaagctccaattggacgcaaagcaaattcaaacccggtcacttatataggtttatgggataagataagagaattatttgcaaaacaacctcaagccgttaaggaaggattaaaagcaggcgatttttcttttaactcaaatggcgcatgcctatcttgtaaaggtagtggggttgaagatatttcgattggctacgacattcaatttagtaaaacttgtccagaatgtaatgggacacgatttaattctaaaaccctgcaagttttgtacaagaaaaaaatattaatgatgttctag

SEQ ID NO: 657 - DNA, 1923 bp, Listeria innocua
ttaaaaatgcttaatcaacgtcaaaaaaatattttaagcacgctgtataatgagaataattggttgcttgggaaaaaattagcggatctattccaaataagtgaccggacaattagaaatgatatacgtgttattaaagaaaatataggagaggactttatctttacttctaaaaagttaggatatgcctataatatggaaaaaccttttccggttgacgttgaggaagaagctggatttgaacaaaaccggatggcgcaattaattaagaaattacttgtagatgatggagtagacatatatgaatatgcaaccgaaacatatacatcagaatctaccatccaacgtgatattcagtggttgcgaggctactttgaacaattattaggtttagatgtagtcattcattctagtgacggtatttatgctataagtgccacaccaactacgaaaatggaattattaaaccgcatcgcaaagctagatgagtcgctaaaaacgattttaatcaccaattgttttccagaaattaataatgaaaaaatccaccaaatattatcaaaaataatcaataaacataagattgttttaaagtattttgatgaaacaatcttactaacgcaaataatttatagcagtggcttcttaaaaaaacatccagaacaatcaacggttacagaaatcgataacccgtttttaagagagctctttgatgcgatagagcaggaagcgggttatgggatttctgctgaaatgaaacaatttattttgactgaatatgaaaaaattgttgcgatgaacaattttgaaaatcaagtcactacgaaaatggttttagaaggcgaactttaccaagaaattttactaattcttgaagaaattaagcacgtttatctcatagattttacaactgatttagaagtaactagcgatatgacaaaacacatttttatcgcacttgagagggctaaaagaggtattgtcattaaaaatcaagtgacgcatatcatcacgcagcagtacagttacttactagatattgccattttcatcggagaaaagttattagaacgtctaggagtaattctcaatcaagaggaaattattctactcgtaatgtatttataccaatactaccgcaaaatagaagctaaacatcaacttaaccaagtggtacggattgcattcattgttctagaaggtaaagctgcgatgtattacttacgagagcaattagcagaagtactacgacccgtaaacgtagaagttatagagattaccgataatacacagtgtcaattactactatcagaaaatgtagatgttgatttgtgtatttctactaaaaaaattgatttgcctgcggaagtcccgtgtattgtcttatccaacaatatcggtttaattgaggaagtaacaataaaaaaacagctttcggcaacaatagaagctaataaaatgaaaaaatttgcatatattaaagagaaatatttacatgaagatttatttttgaccaattatgaatatgatcagaaatataatgcaattgattttttaagtgaatattgtataagtaaaggatatgtaccaactagttttacagaaaaattatttagccgggaacagttattttcaacggctataccaacagggattgctttacctcatccaattaaaaatgttgcgattaaaagtggtatttttatttgtattatgaaaaagccaattacctgggataatcacaaggttagtctaattatgattccaatgattgaagaattagatggaacggaagcgccattaattaatgattttttatcgttaatagcttctaataaatcgtatgtagaacaaataagcaaatgtagcacttatcgtgaatgcgtggagttattacaaactatttataacaataatgagtaa

SEQ ID NO: 658 - DNA, 1941 bp, Listeria innocua
atgaaaacaattaaattgctaaagcttcaactagaaaattttaaaggtatcaaggaactagaaattgattttcaagataatacatcaatatacggagcgaatgcttcggggaaaacaacaatcttagatgcgttcacttggcttttattcgataaagacagcacaaataaaaaagactttgctattaaaacattagatatggaaggtaaagttattcacaagttgaatcatgttgtaaccgcagtgattgatgttgatggcgaacaagttgagttgtctaaaaagtacatggagaagtggacaaaatcaagaggaaaactagaacaagagttaacaagtcatactacagaatattatatcgacgagatcaaaaagaaagcgaatggatataagtcatttattagcgagctactagacgaggaacttttcaaactaattactaaccctctttattttaatgagcaatttgactggaaaaaaagacgtgcaatgctaattaaaattgcaggtgatgtaacagacgcagaagtaacgagtgcagatgattcactgaaagatttaagcatctttcttggaaagcactcgattgaagataaattaattcagattaatgaacagcgcaagaacttgcgtaaaagattagaacttatccccgaacttgtaaatgaagctactaaagctaaacaagatgtaaccggcttaaatccaagcgatattaaaggtgaattatcagtaattgaagaacagattcaatttatcgaacaagaaaaaaatgttctgaaaaacggtggtatacaaactgagcttaataagcaaaaagcgaacattgaactggaacttacaaaaatcaaagcaaatgagcaaaaagaaacacaagaactattaatgagtaaaaaagaagaaattttcgaagaaagaaatgaacttatagatgtaaataaccggattggtgaatctacttttcttattcagcgtaaacaaggagaaattgcaactaagcagcaagaattaactaaattaggcaaagagtgggacgtattgcaggtagaaaaatttgacgaacatcgcaaaaaatgcccgacctgcaatcaagatttcccagcagaacatttgagttctatgattgaaaaattcaatcaagaaaaggcagaaaaaattaaagaaaatgaagctgcaggaaagtcaagtaaagcagtaattgaagaaacagaaggtgatattgctgaactttcgtttgatattaaagcgaatgaacttgaattgaataatattgaatcaaaattagagattttggaacaggaaaaaacagctttagaacatcagctggaacaagctgaaaactctactacttacatcgagaaacaatctgaactggaaatgattgaagaaaaactgcgtgatgaaaaaggttcttctataactgcagtagcagagattcaaatcaaaattgataaattgaatgctgaagcaagtgatttaaaagctgatttagcaaaatttgatagcaatcagaaacaagaaaatcgcattcaggaattagaagaagaagcagcagaaaaaggcgctaagtacgacgaattggaaatgggattatatctcattgaacgatttaataaagcaaaatgtaatcttcttgaagacaagattaacagcaagttcaaatatgtttcattcaagttatttaaaacgcaaattaacggtgggattgatgagtgctgtgaaacgatttacaacggtgttccttacaattccggattgaacaatgccgctagaatcaacggtggtttggacattattaacgcactaacagagcatgttcaagttagggcaacgatatttgtagataacagggagtcggtaacggaactaattgatacagaatcacaattagtaagcttaatcgtttctgagtcagataaaaatttgagagtggaggcatag

SEQ ID NO: 659 - DNA, 1941 bp, Listeria innocua
atgctactcgcaacactcgtccccttcactttcccaaaagctaatactgaaccgacgtcctggattgaaacagaattagatggtaacgaagctttcatctcggcaacagagagaaatctcaataaaaaacgagaagatattacactagcagatgtagaaacaatcacttctcttgatccagtaggcgcctcttctatacctgataatataacagactataaaaatttaactaggctttatataacacaaggaactttgacggaagtaccagagagtattggtgaactcaaaaagctaacctttttaagtttttataataataagctgactgaatttccaacagttgtttatgacctaccagctttaaattcgcttctattacaacgaaataatattagtgaaatccctgaagaaattacgaatatgtcttcccatttatcaagtctcgatgttcgtaataacaatttaatttccattcctgataagatttttacaactaaatgggctagccgcagtggccaactaattatagatacagaaggaaatcaaattacttcagatgttcctgttgattatttagataactataataatggcggaaacatgttagagaattacaattatcgtcaaaagcaagatcaattggtttataaaggcgatccaatcgtagttccttacaaaacagactttaaacaactgactcctgataaatccaaactaggattagcttcaaataatgcgttataccctactcacgaattcgaatattacgacgacggttcttcaacgcttgaaaacggggtagccacaacagaaggtgaaggtttcattacgattaaaagcaccttatcaactacctccaacccatttgcaaaagtacgggtgccaatcgttgtggaagctcctccagaaggctccgatgtcacagtcgaatacaaaagtaccacaggagaaacaattgctccttctgaaactttaaaaggtttattagaagcaaattatacgtctgaagctaaaacgattcctggctacacactgacagaaacgccagctaatgcgaacggtactttttttaatgatccacaaacagtcacttatgtttattcaaaagaccccgttcctgctaaaccagttactgtaaaatatgttgatgataaaggtaaagaactagcgccatcagaaacattcactggttttatagacgatgattatacttctacagaaaaaacgattgaaggatacacattagtagaaacaccagcaaacgccaacggaaaattaacagcagaccaacaaacagtgaattacatttacactaaaaatattattcctgctgagtctgtaacaattaattatgtgagcgatacaggtaaagagttagcagaacaaactgtcttagatggcaatattggagattcctattcttcttttgccaaaacaattcaaggttataagctaactacaacaccaacaaatgcgaacggtacattttctgatactaaacaaagcgttaattacgtgtacactaaagacaaatctttactaaaagcaaaaattggtaaagtcgaagtagaatttgttgattccacaaacacgccaatcagtaatcctttaatagtagaaggagaaattggaaaaacgtataaaatcactcataaagaaataacaggatacacactaaaaaaagagccctctaatgagctcggaacatttgatcaaacaccgaaaaaagtcacttttgtatatcaaaaagaagacagttcagaaaaatcaccatcgaacaaaacaacttttaataaatcgataacaaaagcagaatcaagcacagtaggaatgccaaaacttccaaaaactggtgataagagtccactaattccttcactagtaggaatcttgcttttaagttctgccactgttctttggagaaagaatcagctgtaa

SEQ ID NO: 660 - DNA, 1968 bp, Listeria innocua
gtggaaaaggagggagaccgctctttaagccagttgtctgtgatatgtgatagaataaaaataatgatgaaagaagggaataacatgatcagttatttaataaagagtaggcagggccagtttttagctatcggtattttgtttgccgcagctggctttatatttggaacgatgaatagtgagtacagtcgctggcttttctatgctgctatatttttcttaggcttttatgcgtccaaaaatgcgatcgtagaaacagtgcgctacaagtcgcccaacgtggatctacttatgatcctcgctgcacttggtgctgtgatctttgattttgaatcagaaggagcagccttactactaatttttgccgcagctgaagtactagaagattatgcgaacaacaaatcgacctcagcgatctcggaattgatggctcaggtacctgaaacagctcaagtcttgaaagaaaatggtgaagtggtaaccgttcctactgaagacctgaatgtaggggaaagggtcgtcgtttctaaaggggaacagatcccgatcgacggaatcattgaccgcaaatcgatcgtcaatgaatcagctctcactggcgaatcggttcctgtcgtgaaagaggccgaagatgaagtgttcgcaggaacgatcaatgaaggcgacgttttttatatcgatgtaaccaaatccagcgatgaaacagtcttctccaatatcattcggatggtcgaagaagcgcagagccgtccttcacgcatctctaaattcattgaccggatagagagcaagtatgttatttctgtactagttatcgtgccgattttcatcgttgtgatgtatgcattgatggatctgccattcgaagaagccttttatcgcggtatggtctttctaacagtcgccagtccctgtgccttagtcgcttcggccacgccagcaacgttgagtgcgatcagtaatggagcaaaaaacgggattttattcaaagggggggctgcaatggaagctttgagcacgatggatatcttatacacagacaagacaggcacgctgacttatggtgaattcaaggtcgatgaatacagtgctcccgatgatgtattgaaagaagtgatctatatggaacagcagtcgagtcatccgatcgctcgagctatcgtgacggcgtttaaagagacggatctgagttcagtcgatcataatgaacctgttagtgaaatagccggttccggtatcaagaaaggcacagtaagggtgggaaaaccttcagccttcagtacattcaaaaactacgatcgcttcaagcagtacttccaaaaaggcaacacgatcattctcgcagcaaaagaagaggaggtcgttggttacttttcactcagtgaccagattcgcagacagtcggcagatgccgtggctaacttccagaaagaaggcattaaagtcacgttattaacgggtgataacgaagaagtgacagagacggtagcagaggtcgtcggtgtcgatgactataaagcgtccatgttgccggaagacaagatcgcctatgtcagggagagtcaggataaggaagaagtggtcggcatgatcggtgacgggatcaatgatgcgccagctctggcaaatgcagatatcgggatcgcgatgggcagcggttcctctgtggcgatggaatcatccgatgtcgttgtcgttaaaaatgacttgtcgaaactgttctacagttacaagttgagtaagaaactgaacaaaatcattttgcagaatgtgattttctcgatcagcgtgatcgtgaccttgatcgtcttgaacctctttggcgtattaggacttccactagcggtattattccatgaagggtcaacaatactcgttattcttaatggtctccgtctacttggatctaaaggtccgaagcaagaagagagagtctcggatccatctttaaagtctgtaaaggtttaa

SEQ ID NO: 661 - DNA, 1971 bp, Listeria innocua
atgaaatctaaagggagactgtttttgtacgttgttttggcgttgtcgattgttattggaacgaatgtatttataaaaatagacgcatacgcagccgctgcaccgccagctgcaatcaaccagatttttccagatgatgctttagcgaaagaaattcaaactgcactcggaaagtctagtacagcagaggttgtcacacaaacagatttagatactattaattcattaacccttacatctaaaggaatcagctccatagaaggcatgaactacttgaccaatttaggaactttaattttatcaagtaatcaagtaagcgatatttcgccactgaagggattaactaatttgaccatgcttcagttaagtggaaatccgattagcgacattagcgcacttagtaacttaaaaaacttacaagctctagatattaacgacgcgcaaatcactgacatcacgccactgagcggtttaacaaatctaaagggtttaggcttatataataatcagttggagaaccttagtggagtaaataatttacaacaactccgctccttaaatgttagtaataataagcttacaaacctagatgagctacaagcgctaagcaatttaggcgttctatatgcaaatggaaaccaaattaacaatcttcaggggctgagtactttaaaaaaccttttcttgcttgatttatcaacgaaccaaattgtggatactactccactcgccggcttaaccaatgtacaaacattatacttatcaaacaatcaaattagtgatgtaactggtctttcgagtttaataaatttagattggctcgatataagtcaaaataaaattagtaatattagacctttaaacagtttaacaaagctaacaattattcaaatgaccaatcaattaatcgtaaacgaaccgataagtttcgaaagcaccataactattcctaatttaataaaaaacattgcggaacaaacgattgatccagatacgattagcgatagcggtgtgtatgcgaatggatcagttacgtggaatttacctacttatattccaaaagtcagctatacttttattgaacgtgatacggttgggaatgcaactggtaatttcagtgggactgtagaacaaccattagtgcaatattttaaagcgactttcaatattgaaggacaagaaacaacggaaaatgtcgaaacagggacgctattacaagaaccaccaacaccagtcaaagagggttatacttttaacggatggtatgatgctgaaacaggtggaacaaaatgggattttacagccgatacgatgccagcaaatgatataaccttgtatgcccagtttagtattaatagttataccgcgacttttgatgtagatggcgtcacttctactcaaacggtagactatcaaggtttactagaagagccaccagcaccaactaaggatggttatacatttaaaggttggtatgatgccaaaactggtggaacaaaatgggacttcacaaacaatcaaatgccagcgaaagatataaccttatatgcccagtttagtattaatagttataccgcaacttttgatgtagatggcgttatttctactcaaacggtagattatcaaggtttactagaagagccaccagcaccaactaaggatggttatacatttaaaggttggtatgatgccaaatctggcggaacaaaatgggatttcgcaaacaatcaaatgccagcgaaagacataatcttgtatgcccagtttagtaaagatgcagcttctggtggggacggtggaggaaccgatgaaggcggaggcaactctgaaaatagtacagatggaactactaatacggatactataaaccacatcgtactaccagcaacaggagatcatcgtgtactttttccaatttttattgggacatttcttacgggtttagcactctttacacttagaagaaaataa

SEQ ID NO: 662 - DNA, 2007 bp, Listeria innocua
atgaaattttatataaaggaaattgagttaatagaatctaaaacatggaagatacatggtttttcagaaagaaaaatcagtagcattcaagcatattacaacgaaatccgagaatataaacaccctgaacaaaagttaaacattccttttactcaagaaaaaaattcattcactgcagttatttcgattgacgaacttgctgagtattctctcccaaataatgagactgcttggaaatttaaagtgaatggcgattatccatataatcatttgatgtcagatggacctattattaatcaacctttccaaccatctaattcactttaccaatatcattttgattttccagaaggtgtattaacgcttattagtagaccagtggaacttttagcttcattagaaagtttttcattaagcgaaaaattgatgacaggtactatcaaaattaattcttcgcttccagatggaccgtttaaagcaaagctactactaaaacgtagaccaacacctagcttttatttattccatgagcaagaacaatcatttgacttaggactggttacagataaagtcgttagcttttcgattcctgttaaagacttagcaactaacttcttagtagataatacaaatattttagatgccatgattgaaatatcgcctaaagaagtagagcaaggattaactacattcctatctattgacgccgaaagaaaaccatccattccgaaagaagtggaattggcttccccgcactttgctacactgcgctcttatgtcactggctcaagcagattatccttctatttcaaaaagaatattcaaggattagtaagtgtcagtcaactaaaagaatcaggtagcgatataactttacaatttaaattagaaggaaacttccatgaaggacaagttgtagcaaaacgactagataaaaaagcagatgtatttgaatatcatatggaacaagcttggccactaaaaaaaggaatagggaaacactctgtacgcattagtaaaagtgaattcttagctggccctaataacaaagcatatgcgacatgggattttttcctccgttccaaagatatgcctgatttacctattctagttccaaatacaattgaccttagtaatactaagttttttaatattgccaacaagaaattcctagcacaattaactaaaaatgatttcaataatttgtcatgcttaacggctcccgcgccaaaaattaaagaagatataactaaaattgctgttatgggcacttgttttagtcgcaatgcttttaactcatctccttttttcaatcctgattataaagcatttttcgaatgtagctttacgcagtttcactcttctattattagtgtaatgactgaacctgctgagagttttaatttggacaagtacaatgatatgaaaccagcagagaaaacaatcgtggaagaagattggaagaaagactttttcgttaacctaaaagagtctaattctgattatttccttattgatctttatcctgatgttattcgtccagtcatttggttaaataacaaaacggcaatcactttatcatatattatagaagatagtcaattacttaatgaccttccttatgaaagaattctagatcatattgataatgaagcattctttaatgagtggaaaggttatgctgatcaatttattgcaaaattaacagaaacattccctgctgatcgagtgattttaaacttaggtggctttacaacctcatattacgatgaaaatggaaaagtagtagtttataaaaataaaatggcaattgagaaaaataattacttctgggatagaataaacaactacttcttgtcgaaactgcctgaagcaaaagtcatcgatttttcaaagaaatcatatattggtgatttcaactatccatttggtcattcgttttcccattttgaatcagcttattacaaagactttttgaaagagcttatttatataactaaatcgtaa

SEQ ID NO: 663 - DNA, 2016 bp, Listeria innocua
ctaacgagaaggagacagaagatgaaactgaactggaagccactgttgctttttatattattattagcgctttgttctcctgtgtattcattcgcggaagaaacaagagaagcactagcaccgaaaactactgaaacgccagaattaacaaaaacgaacgacaacttaaataaaacaatcttaacccctgaaaaaaaacaagcaaacaataattcagaaaccgaaaataaaaccaaagaaagtcaaacaaataaaaaagcgcagaccccacttaaaaacctaaaaaatacccttcccccgattccgcctaatagcaaaatttcggatatttttaaagacccggggatggctaatgcaatagctgaaaatttatcaacatacaataataaaaggagtgtggattctattgtaacagaagcagagttgaaatcaattacaagtttgtggtccgtaaactggggtgtttacgataagcccttaattaaatcaattgaaggaatccaatatcttactgagctggaaactatcctttttcaaaagaatgaaataacagatttgtctccgtttttgaaatcacctaatggatttccacgcttggttaatcttgtgttggagcatagtaaaataacagatccatctgtattaccaaaaataaaaatgcctttaatagagcacatcgctctcacgggcaaccaaattatcgacctgtctatcttaaaaaacattgctgatgattcaaaaccaaaacttagaagtgtaggtttacactcacaagagattgtgcttcctaaattaaccgtttctagcaaaaagcctttttcattaattagtatgaatattataggagattctatttataggagccgttcatattctccagctgcaacatttgacacttcaacttcaactattacttggtcgaaagaagtaatgatgaaaaaaccaaatataacatttacggagcgtgtatatccgccaaaggttacaactgtacctggcgtgcactactactggcgagataattcagtctcacttggaagaattagaatggacttctctggatatgtaaaacaactacttgagtacctcggtcctccaaaaataatttcatcgaaagacgttctatatgaagtaaatacgccgctaacggaaagcaaatttttagaagatgccaagattgttacagatcaggaaacaactattactactaactttaattcgataataaaaaatacttcagttgctggtgtctactttgtaacggccacagcgtctaatatagaaggcgaagtttctaaagatataaaggttgttattaagaataagcaaccagtcatcactgcaaaaagtgaatatacttatttagtaggtgaaaacgttgactcgaatcaatttcgacaagacatcaatgcgactttaactggcccagggagcgttcctaatgatttgaaagatgactttgcttcgaaggtggatttaaataaagcaggcgattatttcgtcgagctttccactcctgattggccaccgttaaccgatgctgctaaaccagtgacaattttagtacgtgtcagggaaggcttagagatgaaaatttcagatgattttcggatggacgtggatgaaaatactgaccccattcctatttctaataataagcaaactctaaaatgttttgctcaggagggagacgctgaaatagaagtacttgatagaagaagggcgaaacaaggatggactataactggaatgatgagcccttttaaaaacgagaaaggagacatattagaaacttctcttaagtatcaaaaagagtcatcagaaagtagtccgatatttttgaatgcgactaatcaaccaattgaaacgaaacaaccaactgaccaatctggagaaattacaactacttttaatttgcaaaataacttaactctagaagttctaccaaatgatgcattagtaacgggaatttatgaagctacggtcacatggactttagaggatgtacctagataa

SEQ ID NO: 664 - DNA, 2031 bp, Listeria innocua
cgatttgttaaaataaatttaaaaagaggtgagtatagtatggaacggattaaattttatagttcatcagatatatctagcggttatcattttaagaggctgaaagaacttatcgagtctagtgaagacatagaaacaaacaatcttttggatatgctagaagtatataatattttgaaattcatgagtaaagaaacttatcctgtcaatttatcagataagcagattaaagagactaagagtatacttaacagaaaacttaatcaatttttccgagagttatcaaaacaagatattttagaattttttgattatttttttgctcaaaataatccggatttaggtggaaatgtagtaaaatatactgatatggacaagtatagtgacactctttataaagaagactttttagaatgctttgaaaagtataaattagatgcgaaaattagtggaaatgacatgagaggcttttttaaagaacacgaaatccctgttgaatattttttgaaaactaattattttgtgaaacattatcctactgtaataaaggatatatttcttgcgaaagcaagaaatttcgaattagttttagataactatactcctagtgaaactaggtattttattcctaacaacattacgaaagatgaaatgtataatctttgcaaactatatataaagggtgaggcagctgatttaaattatctttatttggttgggcaaggaattcaaggtgttaaggaacttcaaattgatgctaaattaaaattaaagtctaggaaaagatgtgcgcaaatagagaagaaaatttttagtgatgaaaatggcaatgcaaataatggaatagagcaatcaatagttatttattcagacaaagaaaagtatgatatggcgaaagaagattttaaaaacttaattgacattgactatttaaaaaaagaaaaatccaaagaaaatttattagagtatatgatgtattttaatggttttttcacaggaaattggattttaaatttatgtagttttcctaacatcgaaagttcaactttaatgaaaaagttattggggattcatactaaaaaaaattatgaaacaagtttttatttcaatggtaaaaatatcttgatgttaataagctttaaaatatatcaggataaactacaagagatttttgatataagaatagaagaactgatagtttactttttttcagaatatagtaaggaatactttcttgtaaactggctaccaatagattttacgaacaagtcagaaaaaattcatattcagactaaaaacttagttactatagaggaacaattaagaaaacaatggaaactatatattgaggaaaatgaaatagataaagaattattcgaactagaagaaacgccaacgcttaagtcgttaaagagtagattagacaggaaatatatatatataaatcagaataataaagccattctcagagttatgtatttacttttttcagatcaatcacatataacgtatataactaaagagacaaatggagataattttgtagaactaatagttaataataaaattaaaaaagatgattttcataattatcaacgattagatattgaatttttacttgataattatattatttcgattgataaaaaaggagatatattcataactgaaaagcagttattacgaatccgtattttttctaatatttataaatatggggttattcattattaccattcgaataaaaaactggatattaataaagagttgacatatcaacaacaagagatagatgaaatgattgaagaggaattattaatttatgagaatactttttttgccaaacctgaggtagactatctaaactacatccttaataattctgaatttgacaatgcattgggtataagaaacaaatattcacatggatctattgtagacgaaaacgaggatgattatttttatttactaatcgtcttagtagtatatattattaaaataaacgaggaactgatccttaacgagagatag

SEQ ID NO: 665 - DNA, 2061 bp, Listeria innocua
ttggaaaagaaagcaaaacctggtttttgggataaaaaaatattaggtactgctgtaaaaggcgcatttataaagttgaatcctgtatatatggtgaaaaatcctgttatgtttgtcgttgagattggagcgataatttctttagcgttatgtttcttcccaaatttatttgggggcaataatcaggatatgattctatataatagtttagttttcatcattcttttattaacacttttatttgcgaatttttccgaatctgtcgcagaaggaaggggaaaagcgcaagctgctagtttaaaacaaacacaacaagacatgcaggcacgccttattttaaatggaaaagaaaaagtagtgaatgctaacacattaaaaaaaggagacattgttcttgtgaatatgggggaagttattccaagtgacggagaaattatcgaaggagtggcatctgttgatgaatccgcaattacgggagaatctgccccagtcttgaaagagagtggtggagattttgcctctgtaactggaggaacgaccgtggccagcgactacttaaaaatacaaattacttcaaatcctggtgaatcatttattgataaaatgattcaattagtcgagggggcttctcgaaagaaaacaccaaatgaaattgctttaagcacgttgcttgtaagtctgactattattttcttgattgttattgtctctttataccctatggcgatttatacaggtataaagcttcctgtatctactttagtcgctctaacagtatgcttgattccaacaacaatcgggggactgctatcagcaataggaattgcaggaatggatcgggtgactcgatttaatgtcattgcgctgtcgggtaaagcagtagaagcttgcggagacgtagacaccatgatattagataaaacaggaaccattacctatggtaatcgaatggcttcagagtttattgctttagataagggaaataagaattatttgatccattatgcgatacttgcgtccattcaagataatactccagaagggaaatcaatcgttaccttagggaaggatctattaaaagaagacttggatacaaatgatataagggaaaatcaatttattgagtttacagcacaaactcgaatgagtggcgttgatttagccgatggaacaagaattagaaaaggtgcttacgatgcaattataaaatatattaaaaacataggcggagaaattccacatgaccttgaagacaaagtaaataacatctcaaagttagggggtacacctctagtagtatgtgcagaggaaaaaatttatggtgtcatttatttaaaagatacaattaaacctggtttagtagaacgatttgagaggctacgttcaattggtataaaaacaattatgtgtacaggggataacccactaactgcagcaacaattgcccatgaagcaggagtagacagctttatcgccgaatgtaaaccagaagataaaatcaaagtaattaaagacgcacaaagtaagtcaaaggttgttgctatgacaggagatgggaccaatgatgctccagctcttgcccaagctgatgttgggatcgcaatgaatagtgggacaaccgctgcaaaagaagctgccaacatggttgacttagactcggatccaactaaaattttggacgttgtagaaataggaaaacaattactaattacaagaggtgcgttaacaacgtttagcattgctaatgacatagctaaatattttgcaattattccagcaatgttcttagctattattccacaaatgcaagttttgaatatcatgcatttgtcctcttcttacagtgcgattctgtcagcgttgattttcaacgcaataattattccttgtttgattccacttgctatgaagggcgtaaagtacaagttacaacgatcagaaaaaatgcttgctcataatatgttggtctatggagttggagggatgatcgttccatttattgggattaaattaatcgacttagttattgcaccgttattgacaatgatgggattaggctga

SEQ ID NO: 666 - DNA, 2112 bp, Listeria innocua
aaaacaatgaaaataaattggaagaaagttctggtttttgttttgattttggcgcttatcagtcccgtttactcgaaagctatagagacggaacaaagcatatcgccagaacaaccagtggagccggtagtagaggaagctataaagaaaactccagaaaaaaaagaaatggaaccagaaccaaagaaagagccagagccaccaaaaaaagaagagattgaaacaaaaaaaccgtcgaccgaacctagcaaactgaaagctaacccttcatcaatacccgagaatagtacgatagcagatttatttccggatccggtaatggcagaatcggtagttacaaacttaaataatcaaatccgctataaaaatgattgggttgtgactgatgttattacacaaaaggatttagataatctatcttcttttactgatttatccacagtaattataaaaaatctggaaggtatacagtatatgactaatctaaatagaataagtttaaggtcagatgatgatttgcaaggtctatcagctttattaaaagcaccaaatggatatcctaatttgcaggagataactattttaagaggaggaattacggatatttcaccgatcttaaaaataaatgcaccaaagttagcattcctaaacttatctcagaataagattagtgatttatctccatttgctaatctgccgaacaattttcctgtgctggaggaaataatacttgcgtctaacaatatttcaaatgtcgagcccttagctaaatatgctagtgctagtatgaggtttcttcttcttaatagcaatagtatttctgatttatcgagttttaaaaataattctatgccaaaactagtcgaaattgtgtgtacttatcaacaagtttatttagaaccaatggatctttcagcaaaatatgattttactttaaaggcagcagaggctaaaggtgtgaacaaatcaattcctataactgtgttcgatccaattgcgacaattgataatacaacttccatgattacttggaagcaaaatgtcatagaaaagaaaccagaaatatttttaaaagaaggtggatttcaagaaggcgttaaatatggatgggatgaaactactccggttaaggatgatattggcaaggtaatctttgatggtacattttttcaaccattagtatatatagtggctccaaaaattacatcatatgaaaaacaacttatttatgatattgacacgccactcacagaggaacaattgttaaaagatgcaaaaatcgtaacagaccaaccatcaaaaatcacaactaattttaaagacaaaataccgagttcgccagatcccactaaatatgtagtgacaatcgaagcttctaatatagatggaggtgagtcggtaaatgtggatgttatatttcaaccaaagccacctatcataactgcggatgaagaatatacctatttagttggtgaagctattgatgctaatcaatttagattagacgtgaatgcgactttgactggtgttggttcgctagtggatgattttgagtcagtagtagacctaacgaaagctggtgattatgttgtaacgctgtcgtctcccggaaatccaccagcttctcaaacagctattcctgtaaccgtagttgttcacgtcagagaaagtatggagctccaaattcctaatgattttcggatgggtatagatgaaaattcagaatcggtgccgatattaaatagaaaacaaaccctgaaatgttatggggctgacggaaaagtagatttaaaggtgacagatagaaggagatcaaagcaaggctggacgctaactggagcaatgacaacatttacaaatagcagcggtgacatcattcaaagttcgctaaagtatcaaagtaaatcatcaggtagcagcccagtttacttaaataatgcaaatcagcctattgaacaaaaacaagcaactcctacagaaacaggctttgtctctactattttcgacttagaggatagtttatcaatagaaatccagcctaacgatgctttagtgggggatgcttatgaatctaaggtaacgtggactctagaagatgcgcctaggccttaa

SEQ ID NO: 667 - DNA, 2118 bp, Listeria innocua
aaacaacgagagtttggtgtaagtaaagtgaagaataagttagtttacacttttaatgctttatttatcctcctatttggctacttgctttgcctaagcattttcaaaccacaaacttttacttttgaacatccttttgtcttaatagttcttagcgctgctgcgttattagttcttattgggattttccagtttagtactagattaaataaaaaaggagatggttttttaaccatctctttagtgattttgatattagcagtccaagtatatctattagtttcgctgcaaatgaattcatatgcggatgcctatgtaattaagggcgagtctttaaaaatgctggcaaatggaggacatgctactggtcaagaatactttatgatgtatccaaataatatctttataaccattatacgatactggttatatgcttttggaggaatgcttggagtttccaatgtattcttacttgaaagtgtatttctatttttatgtatgaatattactatttttgtattgttttggattattcgtaaagaaaatggtagcaaatatgcgaatatttatcttatcattatactattttgtgttccattactaggttacatttggtatttttatactgatactctagtcttgccttttgcttcccttattactttattttattatttatatacgaaaaataataaatggtggtattttattattatcgggttattgtttgccgttgggtatcatattaagccaaatatcataattttattgccagcgatgattattcatcaatgtttcataagaaattggcgtaaggtcttgctaaatacaatggtgttagcgattttctttgtaagtttaaatgctgttttcacgccattatctaatcattatggatttaagaaaaatttggctatagaatttccgcaaacgcactgggtgatgatggggcttggtgagccagcaggtcgttacaatagtgaagacgtggcttttacaaatcaatacaagacaaaagaagagaaacaagaagcgaatatagagaaaataaaagaacgactaaaagagcatgggcccattggacttgcaaaattatataataataaaatgataaacacatggacagatggtacacgcgcttatacgtggtacacgaattctgcattagattatccagcttcatttgattatttctttggagataagcgcttttttacagagttcgctgcccaaatgttccatatcattaatttactgttaatatgtttaggtgcgttacgtttttataaaaaaagagaacttgatatatctttctttataaatatcaccttagttggtgtctggttatttcatttaatctgggaagcaaatcagcgttatatattatttgtaactccattaatgattgtgtcttctatttatggatttaagtttattatagaaagtttatttacagaaaaagtagttttaaaagataagttaaaaaaatctttcttaattacgagtttccttatctttttgttaagtagtgtttttcttgcgtttggtggaaaaatgattgcgactgataaacaagatattaatcattatattgttaagcaaagttatgctcatatagcgttaccagttaataataaacaaactatttcacaagaatttacatctgatagtccttttaactcaattgacatatatgtgatgaaaaaaccggaagctagtagttcatatcgaataaaagttatcaatgaaactaatgacactataatttataatcaagagaaaaaaggtacagattttccaaatgaggcttaccttaaattgagcgttaacgataatcctaaaggaaataataggtatcgcatcgtaatctcagaagtagaaaatagccatccaaatcaacctttagttttaggaacctattttgataatgatttagacctttacccatatggcgatttgtacgttaatgatgacaaaaaagaataccaagacataggcttttttgttacaaatacaacctcaaaaccattaatgccaaaatatgcatatattatgtttgatttatgtatcatgcttgtttttgcaggaacgtattatgtttttaaaagaagacgttaa

SEQ ID NO: 668 - DNA, 2202 bp, Listeria innocua
tttagaagaaaatacaatttcttggagcggaaatgtttcgaaagtgcaggtgacgacaagatggtcgagcgtaatttaaatataccgcttttatatgaagcagatgaaacagagttcctgcatagcgggatttgttcgttatcggaaactgtgcgttgtgaagttcatgaagttatgaatgcggagtttgaacttgaattagagtatcctgtcaacggttcccatgcacacgatttgataaacggacgttatatttctgcattcgttgattcgcagagaggttataatccttttgaaatagacactgtagaaaagaatttgtttgctgatacattcatcatcaaagcatcacatcagacaaataaattaagaaaaaaaatgattaaagaatttaaagtagataaagtttcatgtggaactgcaatgaatagattgaaagactcgttacttgaacctacaaacattgaattttattcagatatttctacattgaatagtacgtttctacgttttaagaatgcattatcgtgcataggtggagtggaaggctctattttggatacatggcgcggtgaaattgaaagaacaacaaacaagatttcaatgttgaaaaaacgagggacggacagcggtgttgtgattgcatatagaaagaatatgacaggattaaacataaatactgatacgcttgatatggtaaatgcaatcatgccttacgcgattaaaacagtgaacgactcagatacagttatttctttgtcagagagttatatctactctccggattacaaaacgggcgatgagataaacgctgttgaaattgattattcttctgatgaaaacgtagttgatgaaatcacacttcgcaatgcatctaaaaattatttttctagtaatactattaatgagcctaagttagatttagaaataagctttcaagatttaggacaaacagaagagtataaaatgtttcaaaatatgaatagaatatttatcggtgatacgctttctgtatttcattctgaattgaacatcgaagcaactgcacgtatggtagagttcacgatggacagtttgagaggtgaatatgttaattgtaccgtcgggagtatcaagagtgatttaaaatcaacgatgactgcaggaatggctacaaaagatgaaatagaagctggcgacaatcgaatgcaagaatatgtagatgatttgacaaagcaaataacgggaaatcaaggcggaaacttgatcattcgtcctcctgaaaaaccagcggaactgttaattatggatactgataatattagtacagcagtcaatttgtggagatttaatcaaatggggctgggtcattcaaaaacaggatacaatggtgaatacactattggtctcacacaagatggtaagatagtagctgatttgatagcggcagggactttaagagctattgacattgaaggcgtgacaattacaggttcagctggttattttgatgttttatattcgagttttttacccagtaaaccatcaccgcaataccgagaagagctgcagatgggcggtggaacaggatttaatttacaagcgcagtctacaacaaaaccatatcccgcaatgcaagtaaggctaaatacaaatggtgatttagggcttgccattgaagctgtgaatgaaaatacgggtgcgatagatgctgatatggttgtcagactatcaccgttcgcgggaattgaaacgcctctcattcaaagcgacggttggtgttgcataggtgcgaacccggatgggaaaacagcttcaatcgatagatacacgtgggtctctggcgggggtccacaattacgttatgtgccgcatcgagctagtaattttgagactgctagttcagaagaatataagaaaaatatacgtaaagtaaagaaaactgcgtttggtaaaacagctaagcaagttattactgaaacggatgtttatacgtattcacatatcgcagataaaactaacgaaaagaaaatcggttttatcgcggaacaagcttctgattcattgaccacagcagacggaaaggcaattgatttatataattccgttgcatggctttatcaatatgcgaaagaaaatgaagccgaaaaagaagcattaaaagcagaagtaaaagagttgaaggacttagtaaataaattagtgaatgaggtgaataaatga

SEQ ID NO: 669 - DNA, 2274 bp, Listeria innocua
gtgtatgaacaaattccggacgaattaaaaaaattaaaacaatggtgcgcttttcaacttgtttgggatgaagagcgtggcaaaaacaaaaaaataccgatgaacgcaaacaacggttcatacggtaatagtgtagacgagcggacatgggcagattttgaaactgcccttgattcccttgaaaaatatcgttttgatgggttaggtttttactttaagaaaccatattttggtgtggatattgatgatataaaggatgaaattgaagattacctttatggtaatacagaaaatattgctggtgaatttattcaaacactgtctagttacacagaatacagtgtgagcgggacaggaattcatattattgcaaaaggcagtttcccggaaggtggtcggcgtaaaggaaacattgaaatgtacccggacggtcgatttttcgttatgacaggtcaagtaattgataactacagacaagtcaatgaagcgacatccgctattcaatatttgcatacgaaatacatcggaacaaatgaagtaagacaaataaataatttacaatctacagttgatttgcctgtaagcgatattattcaacgtgctgaacgaagcaaacaaggcgcacaatttaaaacgctttacgatggattatgggatggactatatccctcgcaatccgaagcagacttagcttttgcaaatatgctggcattttggacaggatgtaatgcagaaaaaatggacgaaattttccgttcaagtggtttgtatcgaacaaaatgggaccaaaaacgcggtgcgcaactttacggtgaaatggttattaataaagctataactaatacctctgaaatttaccaacctggcagtgaactagaaggatattctatttctatcaaaaatcagaataatacagcacgtaaagtatatgggctggatgatactggtaatgcagaacgttttcgtgataaatttcatgatattgtccgtttttcatacattaacaaagggttttattactacgattcaaaagtgtggaaatacgataatataggggctgtaaaaacacttgtcgatgatgtaattaaagatatgaaaagcgaatttgcttacatggataatgaatcagatgcagaaaaagcgttcatgaagcacttaaaagcaactagaagcaataaaggaaaaacgaacatgttgaaagaagcgcaacatttaatgccagttttgcccgaagaattcgatcgctacaaatattttttgaacacacaaaatggatatatcaatttgcaaaatggtgagcttatcaatcatgataggcaaaaaatgtttacaaaaatcagcaacatcgaatatacagataaaattgacgcaccgctttggcaagcgtttttaaatgatatttttgcaggcgataaagagttaatcaattatatgcaaaaagcagtcggttattctctctctggatctacatcggagcaagtaatgtttatccttttcggaaatggacgtaatgggaagtctgtttttctcgacattatcaatgacattttcggttcttatgcaaccaatatacagccgcaaacaatcatggtcaaacagcaatccagtaatgcaaatagtgatattgcccgattacatggagccaggtttgttacaaccactgaaccaaacgagggtgtgcgtttagacgaaggactagttaaacagctcacaggtggcgacaaggtcactgcacgtcatctatataaagatgaatttgaattcacgccagaattcaaaatctggatggcaaccaaccacaaaccaattattcgagggagagatgatggaatttggcgtcgattacatttagtacctttcacagtaaaaattcctgacgaaaaagtagataaacagctaaaatataaactccgcagtgaattaactgggatattgaactgggctgtagaaggcttccttaaatggcaaaaggaaggcttggggatgccgaaagcagttgaaaatgctagctctgaatataaatcagaaatggatgttattactgcatttattgaggattgttgtgatgtgagagaaggcgaaaaggtaaatgccaaaaaaatgtatgaaacatatcatgagtgggcgaaagaaaacggtcaatatttaatgagtagtacgaaatttgggaaagaaattggaatgaagtttactaagaaaaaaactaaaaccgcaaatgtatacgagggcattactttaaatgacgattattataatttgaacttaaatttttaa

SEQ ID NO: 670 - DNA, 2274 bp, Listeria innocua
gacatgaacgaagaaactagaaaaaagaaaaaaagaccttcacttaccacactttacgaaggaacgatgaaggaaattacgagcaatgagaaccgttacatcgaatttttgaatttcgccagcagggtgcataaatatagctttgatgaacagctgcttttatatgcacaaaaacaagatgtccacatggtagcgacatttgatatttggaaaaagcttggtcggtttgtgaaacgcggatctactgcagcgcttctatttgattacacgacacaacaaagaaagtatgtctttgatatatccgaaacaggcggagaaccccttcaggtatttgattggcagttacttgataatgacaaaaatgatttacttcgatattggaacacatatgaaaaacagagtggtacgcttgtcaattgggaagatggcattcacgcaaaaatagcttcctatcaaaaaccaataggtgatcagattcatccgttttttgtaaaagatattgaagtggttgcagcgtatatcatctatcaacgaacaaatacactaataccagaggatttactactagatgtacagagcgttttacagattgggaaaagagataatacgttactggagatacaacattttgccaatttaaccgcaaaggaatttttacaagatgtggaacgcattttaaataatgaactgaaaaaagagagggtgctttaccatgacagaatcaaatttgaagatgagttatcgcgaagagaatggcaacctgcttccagagatagaaacgtcagaagaaatgatgccgattggaaagatcgggaagctgatccaattgaaatgggagaaagaaaaatcgcttcaagtgatgaaatggaagttaaacggaaattatcttcaggaagtgaaacgaatggaaattcaagtgcaagacaagatcaaccagtattacgagaaactcgtgacgaaagaaagcttaccgaccgagatggaaccattagcgagagcgaagcgtctgaaatcgcttcggatgcaagcagaggagatcattctgaaccaactatagtagaagaagtaaaagaatctgagcgatcaggttctttttttatgcctgtcagtgagcgaggagaacaagtcgatttatttgcagaagaaacaaactacatggaagatccagaaatttcttatttagaagataatgaggaagaatcggtagagaactttcgctttgcggatacattcacctttccaagtggtccaaaagctaaatttcaagcgaatattgcagccattcgcttgctgcatcgattagaaacggagaatcggttcgctaatagcgaagaacgcaatatattagcgcaatactcagggtggggtggtcttgcggatgcttttgatgaaaacaagctagcgtttcaaaaagaatatctcgaactgaaggagttactaacacctgaagaatatcaagcagcatttgaaggaactttaacgacctactatacagaacctgctttaatcgatcgcatgtaccaagttcttcaaggcctaaatgtagaacccgaaaaaattttggaaccatcgatggggataggtcacttctttggtcggttgcctaaggcctatcaaactgcttctttaactggtgtggaaattgataagttatccggtagaatagcaaaaaaattatacccgaaagcagctattcaattaaaaggctttgaagaaatgaatagccaatctaatacctttgatattgcgattgggaatattccttttaatgactttaatgtgaccgataaatccaaacgatatccgcataaattgatccatgattatttctttgagaaaagtttagatctcgtcaagccaggaggatatattctttttgttactagcaaaggaacaatggataagaaagatagtcgagcgcgccattatttagcgcaacgagctgatttaataagtgcggtaaggttaccaaatacagcattttccggattgggtgggacaaaagcaaccactgatatcctgcttcttcaaaagctagaaaaagaacgatttgtggtggaagatattccagaatgggtgcaaacaacaggatttcaagatagtcaaggaagaattaacacgtatttttacaatcatccagaaaaagtcttaggggaattgaagctatctggcatgtatggtggacaaaaggtcattgaatgtgtgccaaaagcgaaccaagattggttggtcgaattagataaatgggcagtaagctgtaaagggccatattaa

SEQ ID NO: 671 - DNA, 2325 bp, Listeria innocua
atgagtaaagattcaaataaaataattgaacaaagccgagaaataggaataagcataattatgccactttataatgtggaagaagtaatacttgaaactctcgaaagtattcatgagcaaacttttgatagttatgaagtgttattaattgacgatggttcaacagataaaacaatagaaattgtaaccgaatatataaaagataagccacggtttaaattatacactcaaccaaacggaggaccagcttctgcaaggaaccatggtttacgacttgcaataggtatgtatatttgttttgttgatagtgatgatatactgcctaactattccttacaactaatgtatgatggtgctatttctacaggggcaaaactaattactggagcaaccaaacgttttaattcagagggcgaatggtttataccaatgcatattcaatataatattgctaaaccaggaatgaaaaccttattaaaaaatcctgagttgttttattcaattggaccatgtgcgaaattgtatcaccattcactaattgatggcgtatttttcccagagaatattcgctacggggaagatcaaccgtttgttttacatgctttattgcaagccaaagatatttatacagtagaaaaagttgtttattattatcgtttacgcgatggtgaatcgcaatcattaacgcaatcagtagataaagatccaattcgtattttaaagtctgttttccagatttttgactatggtgaagaagaactgaaaaaaaacaacactgattacgaggttgctttaaaatattatcaacgcgtttctagtgtggagctttggggagcgttacgagcagcaatagaaagcaaaaaaagtgagaaccaaaaaattgcttttacaatgactttagactggttgaaaacaaaatcagatgactttttaaatattatcccttcatttagatacttcttgttatttagtagtattgagcgtgtacgttatataacgaaagacaataaagaaaactatcgtaatttaattggttatttatggagccgacaaggggaagaagctaaaattgcatttagaaaaacttacccaattcccatgaaggctgctctacaaataattgaaaataataattggcgtgatgctcgtaaaatttcatttaaatttattgttcgacgcaagtttaaagctccaattttaattcgtaaaataagtagagggattatttttagaattgctacattaatgccacggaagaagaaccaagtgatattagctacagaacgtagcaccactttggaaggtaatttattagcaatttatgattatatgttttataacaatatgcctcaaaaagtatatgtgtttttacgaaaaaatcggaattggtttgaaatgtttcagctatattatacgctggggcgaacgaaaacaattgttttagatgattattacaataaaatttacggtttgaaatttaacaaaaatacacatgttgtgcagtcatggcatgcaacaggcgcatttaagaaatttggatttagtgcgctggaaggtacagatgcaaatacagaagaatttgaaactcgtgcgcattccccttatactgatgtgcttgtaagctcagaaggaattattccggaatatatggaagcttttagaaaacaagctaatcaaattaaaccaattggtgtacctcgaactgatgtgttttttgatgatgaatatgtgaattatacaaaagaaaaatatatgaaaatgtatccgcaattgcgcgataaaaaaatattgttatatgcacctactttccgtggtggaccgaatgagcgttttaattatagtgtagttcttgatattgcagcgttgaaaaaagaacttggcgatactcatatcttaattttgaaattccatccggttattaaaaacgtttcattcaatgtagaagaagatgatccgtttattttgaatttaacgctaaataatgatattaatgacttaatgttattcagtgatgcgcttattactgattattcttctgtcattttcgaatttagtttgatgaacaaaccgatttatttctttgcctacgatattgatgattatcttgatgaacgtggtttctactttgattataaagcgaccattcctggtgaagtgtttagagatacaccatcgcttattgaagcggttaaaagtggtctatataattacgacgagttggaaatctttaaaaagaaatttgttggtagtttggatgggaattcaacgaaacgttttgttgagacttatattggaaaagcaaatgagaaagtgaaggatatatga

SEQ ID NO: 672 - DNA, 2376 bp, Listeria innocua
agtttggtaaaatataggacagtaaacaaattaaggagtggttggagaataatgataaataaaaagtggatgaaaattgtaatgattccaatgctagttgtcccaatgtacggtttgacaactgtcagtggacaattacagaattcattaactggagaaaattcctttgttaaagacgctcaagctgcaacaacagcatcgcaacaagcgtttatagacaaaatagcacctgctgcccaggcatctcaagaaaaatatcatctgttgtctagtataactttagctcaagcaattttagaatccggttgggggaaaagtggacttgctacacaaggatataatttatttggtattaaaggaaagtacaatggacaatcagttatcatgtcaacctctgaatatgtgaatggtgagtggattaagattgatgctgagttccgtaaatatcctagttggaacgaatctgtaactgatcatacacttttattagtgaatggaacttcttggaataaaaacttatacaaaaaagtagttgatgcaacagactataaagtagctgctaatgagctacaaaaagctggatatgcaacatctccaacttatgctgctagtttaatccgagtaattgaaacttatgatttagcaaaatatgatgttttatacgacaaaattcttactcaaaaatccacttccggtaaagcgactgtaacaagtccaacagggaatggtgtttggactctaccttataaagttaaaggtgtacaatctgttagtccagctagcacatacgctaacaaagatattgatttagtatctgttgctacaactaaaagaggtacgtactatcaatttaaatataatggtaaagtaattggttgggtagatggaaaagcactgaccatatacgatagcgtcaattatgataaagtaaacgttggacgagctaagattacgagcgcacctggcaatggtatttggtctaaaccatacaatgtatatggacgagaatttgtaaccaatgcaactacttatgcccaacaagaaataaaactcttacgtgaagcgcaaaccgcaaaaggaacttattaccagtttagtattaacaataaaacaattggttggattgataaacgtgctttgactatctatccatatgattctgttatttctagcaaagctgttaaccttgatggacaaattactaacccaacaggaaacggtatttggacaaaagcatataaattagaaggcacaacttctgtcgcccaggctactcaatatgctaaccaagatgttaaaattagtgaagttgttgaaactcaacatggtacttattacaatattagtatcggcggaagagcaatcggttggttagataaaaatgcgattactctatatgaccaagctgagtacaataaagctgttacactagacggaactatcaaaaacgtacaaggtaatgctatttggacagaaccttatcggactgctggcacaaaattagtcgctcaagctgaaaaatatgccaacaaagatgttcaaattgtccgtgaggcgaaaacaccaagaggaacttactaccaatttaaatcaggtggaaatgtgattggctggttagatgtaaaagcttttgatatgtatgatgaaataacttcgaacaaagctgtaaatatggaagcagttattgaaaatgtcgagggaaatgctgtttggactgcaccttataagagtgtaggtgtaaaactgattggtccagcaagtaattataaagataaaactgtcaaaataactcgtgaagctcaaacaagtagaggaacatattatgaatttagctctaatggtaaaactgtaggctggttagataagaaagcatttaaaacttatagtactatagaatatgatgaatcttatgtacgtgatgcagttgtaacgaatgttagtggtcatactgtttggacattgccatatcaagtttatggtgtgaaatcagttgggtcagcatcaaactacaacaataaacaagctaaaattacaagacgtgctaaaacagatcgaggcatttattaccaattcagcattgatggtaaaaatgtaggttggttggatgaaagagcttttgatgtctatgatacggtagaatacaataatgtaattaataaaactgcattattgagcaacccaacaggaaacggtatatggtcagcaccttatagagttatcggtgttaagaatgtaggacaagctacctcatatgctaataaaaccgtgcaattagttcgagaagcgaagacaactcgagcaacttactctcaaatgagcgtagatggtaaactaattggttggattgaccaaagagcatttacgaatattagataa

SEQ ID NO: 673 - DNA, 2496 bp, Listeria innocua
atgtatttgaagaaaattttacatattgttatcgcgcttagtgtaatttgttcgataattttagtgccggtggattggcccgcaaaagcagacggtaataataagagagatgatctcattaaatctgtcggtttttataaatcagatggtcaaaacgtaatggcgaaggaaaactataatgaaaagctcaattattttttagaggtagcttttggagggaattctttccaaaaaggggactactttaatattactttatcatctgatactttactctatacagagaaagcctatgatttgaaagtggatgttgacccaacagcggtaactaacgaacaagtagttggtaaggttactgtagaaaaaattaatggctcgcccacattgcactttgtttttacagaagattcagagtccttttttatgaaaaactttgatgcgaattttaaaatacaggtgatgccggctcatggcgataaaaacgttattaacctttcttacagtggagctgcgaaaaattttaaaaatattgggacgagcagtgtagaattgaacgtaaatatggcaagtgactggccaccagttggaataaaagattttactaaaaaaagcggtgatttataccatgcgattttagtatatgaaaagcctagtagcaaagtgaattacgaaacagaaattttagtatcgtatccgctttttgaaaaacgcattccgcttggaaatgtgcaaaatattaaaattgaagtttgggacgaagcgaaggagatttatagaattggtgttgcaggggtggattacggaacgattacatacgatgttggaactccatttgtaggcggtcctattttccaaatgaattgtactattccgttcaaaggtatttctactaaaactcgtgttagtttcgatattgatacgaatgtggacgggaaacctggaacaacagatccatacttggttagtctttcttctgtatcatcggctacaaagtcattagaattctatccagtgaataatgctgatacgaaaatgacagctgctttttttgggaaagtaacgacgcgttttgaggatgagttaggcaatccggttacttttaatgattatagtacggtaacaacaccgggaaaagtcaatcaagatggtaaatttgaaatagcggaaccttttttacataattccgtgcaaaacgtggataaacatgcctatgattcccttttgaatactaataaatataaattattagaggtaacttctcctaataaactatctgaaacagcggataatttaagtattcaaataaagcaaggctaccaaaatgatgttttatacaaaataaaagcactccaaaaacctgtcattagcgcacttcctgaaatcgaatatagtaaaacagtaaaccggacaatggaagagtttttggaagatgtggaagcaaaaacagatattccagctgatataaaatgtgatttaacgaatgtgaaatggggtgttccgggcgactatccagttcttattaccgcggtaaatgaggataatcaagcagcagacccagttcctgtaacgattaagatttccaaaaatcccgcaccggttataacggtagacccagaaataatctatgataaaacagtgacgaaagatgagagcacattactaaatgaagtaaatgcgcgaacaaatgatggttcgacgattacttctaatataaacgacaaagtaaaatggggcgtgccaggcgattatgaagttacgttgaatgcggtaaatgaagacggcgtagcagcggaagcgaaaacatttatcgttcgtattttaaaaagtccagcgccaattatcgctgttgatcctgaaataacgtacccgaaaacagtaactaaaacggaagctgaactccttcaagcagtaaatgcgcaaacaaatgatggttcaccgcttgtttctgatatgaatgacaaagtaaaatggggcgtgccaggcgattatgaagttacgttgaacgctgtaaatgaagatggcgtggcagcggaagcgaaaacatttatcgtccgtattttaaaaagtccagcgccaattatcactgtggatccagaagtaagctatgattccgcgataattaaaaatgagacagagctattaaaagaagtccgcgcaaagactaatgataactcagctattacttccgatgctccagataaagtgaaatggcaaacgccgggaagctatactgtgacactgaatgcggtaaatgaagatggcatcccagctgatccagtaacgtttatcgtgcatattgtagaagcgaaaaaagcgccaattgttatagaagaaaatccagctgatacgcctactaagcctagtaagcaaaaacccaaagagaaaattgttatcaagaaaacaacgaaactcccgaggacaggggatacacaatcgaaagctatcttaggtggggttctttgtttgggagcatggttcttagttagaaagaaatag

SEQ ID NO: 674 - DNA, 2499 bp, Listeria innocua
atgcatactaggattagcaatatgatagaggcgatagatagagagagcaaaaaaaaaggaagcgaaggggctgtatttaataaaacggtatttcatatacatacgcctgcttcacatgatttcggactttttgcaaaaaatgatacagataaaattacaaatgagcaattatttaataaattacttgatgatggttttccattgaagaagaatattcattcaatagaaggattgaatgaagtcaattcaaataatgttttcgataatggtattgagttagctctattttgtttgcaagctaataaattatctgtaaacaatgtcaaaatggcacttataacagatcataatacgctttctggtgttagtaaaatggtagaagcatgtaagataaacaagcgatttttaaataataaatgtcctcaaatattagctgggatcgaaataagctgttcggataaacatcacgtagtagtgatacttaataataaagacatggacatgatgcaaaaggcagaagattggttaacgaattatattatctcagatgatggaacatatttaccatccttacttgttattgaggcatttgttgagattggagctatagcttatatagcgcattttaatacttcagatttatttaaaaaacctaaatttttaagtggactttatatagataaattattttctaccaaaaaaatggaaataattggcttatcaaatatggatagtaagctagctattgaggaaaaattatctaactacaccaaaagaaagtttcattttattttagacgaggattctcatactcttgaagagttatgtactaaacctttttggattaaagcacagtcattagattttaacgctattaaatatgcgttaaatgattttgacaattcaatttccttttgtgaacgtcagatgccctcaatttatattaaatcgttgtatatagaagggaagacattcattaaaccatcaaataaaaaaaataaaggtgtagtttttacattttctccaagaatgaacagttttattggtggaagaggaagtggtaaaagtacagtgttgaacacaatagaatttttaatcacgcaatatattgaaagtgaacatatatttgactccgttttgcctcagggagatttatgcctttgttgtgtatttgaaggagaaacatattatattacatctttaaatgctgaagatgaagacaaccaaagatttaggaataattacttttataaggaatctagattggaatataaaaaggtatctgaaacccagaagagaaatgaagtttttggaagaattgaagtatggaaaaaatgtcgagacaatggctactatgaaaaaataactcgaaaaaaagcaattcttgataaaatgtttacaagaaaattttctgtaaataatcttgtttccagtgctcaagacagtgataatattaaccaattcattataaacatgattgaactagaccgaatcttaaaaaagaaaattaaattatcaacaatagacactaaaaaatggttcgaaatcaaaaaagcatttcaatcaatagaattaaaattaaatagtcatcgagataaatatttatcgacaattaatgaatataataaaagaaataacaatagtgttaggctaatttatcaacaagtagcagttgagaattttgtatatgcttgggaaaatacaatgtatttaaacaaattaaatgcaacaaaagatttccataactataatattagtttaggtgaggtagtgaattatttgcgtgatctatcaaagaaaattaatccttttaatgtcattattaaatttcatgaatggaaatttgatgaattagatcaaatttctaacattactgattttttgatgagtagaaataaaacattagataacaatttaattgatgtaaacatacctgctaataaaataaaattatttaaggaattaagaaagagaattaatcaatctttttcttatatgatagatgagttggagagattctattctcatgtagacaggtggagcttagaatttaatattaataaccgtactggacatgataacagaaatccggattttaggacaataaccgagttatcattaggtcaaaaagtagtagccatgttgaactttattctctcctttagtgagtttgaaggagatgattcaccattaattatagaccagccagaagataatttggataatcaatacatttataataatttggtaggactttttaagaatctcaaacaaaacagacaagtaattatagcatcccataactccaccattgtggttaatagttcaactgaattagtgtatgtaatggattcggatgctaataacggctggattcaaacaagtggtttttgtaaagaaaaagtggttttaaacaaaataataaatacattagaaggagggcagattgcattttcaaataaaagtgagttgtatagtagcgttactaataaaaaataa

SEQ ID NO: 675 - DNA, 2601 bp, Listeria innocua
atgacgtcatacgtattgaaatttcaggaaaccaacgaaacaaatgaagccttagttggtggcaaaggaatgaatttaagcgagtgcgcaaagattcaaggcgtgcgcgtaccagccggtttttccgttacgaccgaagcatacaaagaaaccgtagcagaaaatcatgaattcaaacaactcctggaacaactcacactccaagaaaacgaaaacacagcggacattcgtgaaattagcgcaaagattcgcacactcattcaaaatatcccgattgctccagaaatcagcgttgaaattgatgctgctattatgaacatcgatgcgagcgcggcatttgctgtccgctctagcgctaccgccgaagacctccctcatacttcctttgctgggcaacatgatacttatttaaatattattggtatagatgaaatactgcgccatattagtaaatgctgggcttctttatttaccgagcgtgctattatttaccgaaacgaaaaccattttgaacatagcaaggtgcatttggctgtagttgttcaagaaatgattttccctgaagcttctggcatcctattcaccgcagatccaatcacgtctaatcgaaaatcactagctattgatgcaagtttcggcttaggtgaggctctagtttccggtttagtgtcagcagattcctataccatccaagaaaatactattacaaataaaatcattgccactaaaaaaatcgccatatatgggttaaaagaaggcggaacggaaacgaggccactggagccatccaagcaaacagctcaaacattaaccgatgaacaaattttaactttagctaaacttggcagaaccgtagaagctcattttaataaaccacaagatattgaatggtgtttggctcaggggcaattttatattgttcaaagtcgtccgattactacgctttatccagttcctgaggtggacgagccaggaaatcgggtctatatatctgtggctcatcaacaaatgatgactgatgcaatgaagccacttggtctttccttttatttaatgacaacctctgcttcgatgtatccagctggtggaagattattcgtggatattacccaaagcctatccttccccacttcaagagatatgatggtaaatacacttggcgcgtctgacccattaattaaagatgctcttttgacagttattaataaaaaagatttcttgccaccattaccagtggaaaacacacccaatcatgcgaccgcaccaggcaaaccacctgtacgaaatgttcctgatcccgctgtcgtttttgaattagtaaaaaatagtgaagcatccattaaccaacttaatgagacgattaaaacgaaatcaggttccgccttatttgatttcattgtagaggaccttctggagcttaaaagcgttttatttaaccagacaagcattgatgcaattatggctggtatggacgcttctgcatggttaaacgagcatattagcaaatggcttggtgaaaaaaacgtagcagatacactttctgaatccgcacccaataatattacttcaaagatgggcttagaattgttagatgtagccgatgctattcgaccatatcctgctgttagaagctatttagaacaaactaaaaatccagatttcttagctgatctagctcatttagaaggtggtaaagaagcaaaacatgcaatagaagcctatttagaaaaatacggaatgcgctgcgccggcgaaatcgacttaacaaaaacgcgctggatagaaaacccgctagcgctcgttccattaattttgagtaatattaaaaatttcgaaccaaatgcaagtaaacacaagttcgaacaaggcgaaaaagaagcgcgcgaaaaagaacaaacccttttaaaacaattagcagagcttccagacggggctgaaaaagcggccgaaacaaaaacgaaaatcgatactttacgtaatttcatcggctatcgcgagtatccaaaatacggaatgattaatcgttactttatttataagcgcgcattgcttcgtgctggcgaagagcttgtgagaagtggcgttatctcagaaaaagaagatatatatttcctttattttgatgaattacgcgaagttgtacgtacaaataaagctgattatcaacttattaatactagaaaaagcgattttgcttcttatgaaaaattgacgccaccgcggattcttacatcggacggcgaaatgattagcgggcaatatcaccgcgaaaaccttccggaaaatacgattctcggtctgcctgtttcatcgggtgtggttgaaggtcgggcacgcgttattttaaatatggaaaaagctgatttagaagatggcgatattttagttacagcttttaccgatccaagctggactcccgcgtttgtttcgattaaagggcttatcaccgaggttggcgggctgatgacacatggtgcagtaattgctcgggaatatggtctccctgctgttgttggtgtcgaaaatgccactaaaattatacaggatggtgcacgtattcgaataaatggaacagaaggatatatcgaactccttgattaa

SEQ ID NO: 676 - DNA, 2709 bp, Listeria innocua
ttacattatataataaaagggaatccgaaaggaatgggctatatgcatataaatggtcacgaaaataacgatatttttaataaacgacgcggtaaacttagaatttactttggctatgcggcaggcgttggcaaaacgtttgctatgctaaacgatgcacaagagctagttaaaaccggagttgaccttgttgtcggctacgtagagcctcatgctcgtccagaaactatgaaacttttaaatggtctggaaaaaatccccactaaacctattttatataaaggtgtaaaactatacgaattcgatttagattcagcacttaagagaaatcctaagttaattattgtagatgagttagcgcacacaaatgcgtatgcttgtagacataaaaagagataccaggatattgaagaattactacaggcagggatagatgtttttactactgttaatgtacaacatatagaaagtctaaatgatattgtggaatcaataacaaacattcatgtacttgagcgtatacccgatgcagtttttgatggggcagatgaaatagaattagtagatattgaaccacaagatttactagatagattaaataaaggcaaaatttatagggaaaagcaggctagacaggcagtactcaatttctttaccaccgataaattaattgccttacgagaaatagcattacgaagaacagctgatcaagtgaagagaattgccgagagtaatatagttaaccctaaaaataattatggaaaagagcatattctagtttgcatttcaccatctcaaggtaatgagaaagtgataagaacagctgctcggatggctgaagccttaaaggggaaattaacagcagtttttgtggaaacacctgaatatgaggaatcttcaatcaaagagcaagaatctttgagaaaaaatttacgacttgcagagcagcttggtgcccaaatatcatcagtttatggagaggatatttctcaacaattggctgaatacgcaaatgttagtcaagcaactaagattattcttgggagatcctcgaaacgaaaaagttggctcaagcctaagttagtcgataaactttctgaacaaatagatagtacagatatttatattattcctgatacgcagcctagcaagacaaaaaaacatttcaaaataaaaaacgaaatgtctttttcggtttcggattctattagaacagtcatcattttattattttgtacaattatcggtattatattcgattacaatcattttagtgtcgtcaatattatcattgtatatatcctaggagttcaagtaaatgcggtaattacaaaggggagagtctatagtattgtatcggctcttttaagtgtgctgatttttaattatttcttcacggagccgcgatatacattgcatgcaattgatcctggatacccggttacttttgttatcatgctcgctgcagcaattattactagtacattaactaaaagaattaaagagcaggcaaggcaagcgtcccaacgagcatatcgaacagagatcttacttgaaacaagccaaaagttacagaaagctagtactgaatcagctcttttaagagaaatcgctatacagataaataagctactagaaaaacctataattatttacccagtaagagtaaataaattagataaacctctaatatttaatgaagataaacgtgataataacgaatcagagtggataagcaaagaggaacgtactgtggcagaatgggtattgaaaaaccaaaaacgagctggagttacaagtaatacctttactaatacaaaatgcttatacttagctgtaagaggaaatggggaagtattggccgtgatcggaattgtcatggacaaagaggcgcctatggataatttcgaaaaaagcatcttaattgctgtactagccgagagcgctctggcattggaaaaagaaaaatttcgggttcaagagcaaattatctcattaagaatgcagcaagagcaggtgcggacgaatttattacgagcaatatcacatgatttgaggacgccattgacaagtatttcaggcaacgcaggtgttctaaaagcaaatagtcatatcttagaagaaaagcaaaagcaaaacttatataacgatatttatgacgactcaatctggttaataaatttagttgaaaatttattgtctattactcgtcttgatgagggtagttcgaatatcaatatgcaaccagatttaatagatgaggtaatttcggaagcacttaggcatatagataggaaaagcatcgaatataatattagtatggagattcaagatgaggatcttattgtaaatattgattctcaattaattatgcaagtaattatcaatattgtggacaatgctatcaagtatacgccaccaggatcgaaaatttgtatcgtagcaaaacaagatatggattcagtttgcgttgaaattaaagataatggagagggtattccagataaagagaaagataaaatttttgatatgttttatacggctaataacattaatgcagatggacggagaggactaggtttgggactttatctttgtatgtctatcattcaagcacatcaaggtgaaatgtatgtcaaagataatattcccaaaggtgctatctttggattggttttaccgattgaggaggtggatttaaatgaataa

SEQ ID NO: 677 - DNA, 2844 bp, Listeria innocua
ttttgcaacctagatgaggaggatcatatgaaaagaaaaatatgtttactaattgcagtaggagtaatccttttacaattaagcgcagacccatttgctatatgggcttcagaaaataatggaaacaacgtaaatgcggcagaaacagagacgacaaaatacaaattgatattatcaacccctaaacgtgataatttaatgggagaatatgaagcagacgaagtaattaaatctgccccagcaaatccagttattgaagggtataagttttggggatggtatgaagaaccaaatggttacggaataagatggtattttcaggataataaaatgccggctcatgatgtaactttatacgcatactttacaatagagacctacacagctacattaatctctgaagaaagaacagctacccaaccagttgtttatcaaaagaaaattaatgaacctacaaaaccagtaaaagatggttatacatttattgggtggtatgatgcagaaacaggcggtaaaaaatgggattttgctaacgatttaatgccggggaaaaacatcacattatatgctcaatttgcttctaaaacatatcctatgacctttgataatggcggggtaacaacgacagaaacagtggactatgatggtcttgcagaagaaccaacaacgccaacgaaagctggttacacatttgatggttggtatgacgcagaaacaggcggtaaaaagtggaattttgctcaagataagatgcctgcaaatccagtaactttatatgcccgttttacaatgaataattacactgcgacttttaataatgatggaacaacgacaacgcaaacagtcgattatcaagaagcgctaacagaaccaactgaaccgacaaaagatggttatacgtttgaaggttggtacgacgcacaaacaggcggaaacaaatggaatttcgcgacgaacaaaatgccggggaacaacatcacactatatgctcgttatagcgctaaatcttatacaacaacatttgacaaagaaggaacaacaacgacacaaacagctaattatgatagtcttttgacagaaccaacagcgccaacaaaagagggttacacatttgatggttggtatgatgcggagacgggcggaaacaaatgggattttgcaactgacaaaatgcctgccaagaacatcacactgtacgctcgtttcacagtcaaatcctatacagcgacatttgataaagacggaacgacaacgacacaaacagctaattatgatagtcttctgacagaaccgacagagccaacaaaagagggttacacatttgatggttggtatgatgccgagacaggcggaaacaaatggaattttgcaaccaaaaaaatgcctgccaagaatgtcacgctgtacgctcgttttacagtcaaatcatatacagcaacatttgacaaagacggaacgacaacgacacaaacagtcaattatgatagcctgattcaagcgccgacagagccaacaaaagccggttatatatttactggttggtatgatgccgaaacaggtggaaacaaatgggatttcacagcgaaaaaaatgccagcgaaaaacgtcacattatatgcccgttttagtgcaaatgcttatacagcaacatttgataaagatggaacaacaacgacacaagctgttgattacgacagtctaattacagaaccaacagccccaacaaaagacggctacacatttgatggttggtatgatgccgaaacaggtggaaataaatgggatttcgctgcgaaaaaaatgccagcgaaaaacatcacattatatgcccgttttagtacaaatgcttatacagcaacatttgataaagacggaacaacaacgacacaagccgttgattacgacagtctgattacggaaccaacagcaccgactaaagacggctacacatttgatggttggtatgatgccgaaacaggcggaaacaaatggaatttcgcagtgaaaaaaatgccagcgaaaaacgttacattatatgcccgttttagcacaaatgcttatacagcaacatttgataaagacggaacaacaacgacacaagccgttgattacgacagtctgcttacagaaccgacagcgccaacaaaagaaggccacacatttgatggttggtatgatgcggaaacaggtggaaacaaatgggactttgcagcaaataaaatgccagcaaaagacgttacgctatatgcccgttttaccgttaaatcatatactgccacacttaatggtgaagaagttacaacacaaacagttgactaccaaggattactacaagaaccgccagcacttacaaaagctggttatacatttgatggttggtatgatgccgaaacaggtggtaataaatgggattttgctacaaacaaaatgcctgctaatgatttagccttatatgcgcgctttacccaaaatccagtagttccggtagacccggtaaatccagtaaacccggtaaatccgataaacccagtaaacccagtaaacccagtaaacccagtaaacccagtaaacccagtaaacccagtaaacccagtaaacccagtaaatccgattcaaccagcagatccagcacatcaagacgatctaatggatgacatcttaccggcaactgagaacacaaacattactgctacgataaaaccagctaatgaccctgttaagaaaacaaaacaaagtaaagaattaccaaaaacaggcgaccaagaaaatatcctttatttattaatagggttattactaatcgctggaacgtttggctttttcaaaaaaatgtctcataaataa

SEQ ID NO: 678 - DNA, 2988 bp, Listeria innocua
gtggcagaagcaaaatttgaagcagctttaattaaaaagcttgaaactgaagggtggacttatcgggaagatttatccaatgttagtattaaaaaacttgaagagcattggcgtgatatcttaaatgaaactaacgcacataaactcaatggagtaccattgtcagaaattgagtttggattaatccttcaagaattacaacgtattagaacaccgtatgatgctcaattattattagtgggtgcaggtggagtaggttcaattcctattactcgtgatgatggttcaagcttggaagttgaaattttttatgaagatgatgtagcgggggggcgctctcggtatgaaattgtcaatcaagtaagatttgataatctatctgaaggattaacaacaaaacgtataattgatgtagctttacttattaatggaattccggtagtacatattgaagaaaaagatgagcatttgcaaaatcagtggcgagcttttgaacaactcaaaggttatcatggtgacggactgtataaaggattgtttgcttttgtacaagttcaagttatcatgagtcaacattcggcacattattttgctcgtccaaatgcatttgaacaatataataaaacttttgtgtttggctggcgggacgaaaataataaagatattacggatgcatttgaatttattcatcaagtaatgagtatccctgctctccaccgcttagttacagttaatatgatcccggatgcgtcaaatgataacataatggtaatgcgcagctaccaaattcaagcaacaagggaaattttacaacgcatgaaagaaatggaagcaagcggacttgtgcaaaaagagggcgggtatatatggcatacaactggatcaggcaagacagttacttcctttaaagttgcacaactcttagcatctgcgcctagaattaaaaatgtactatttattgtggatcgtattgacttaatagatcaaacactcgaaaattttaaaagtttcgcatatgctcactttaaaaatcgcattaagaaggttaatggaagagagttaaagagagaattaaagagaaaaggctcctcgcaaattttattgatttcagttcaaggattgacaaaagctgttaaaaaaggtttagaaaatgacgactggaatgtcattattatggatgaggcgcaccgaagcgcgagtggagaatctgtaaagttaatcaaaaaggccctcaagaagacaacttggtttgggttcacgggtactccgaacttttacagtgatgaaataaatgatgtcaaaacaactcgagaaatttcaacgcatgatatatttggcaaacgactacatacatataccattaaagatgctattggcgacggaaatgtcttaggatttgatgtaacttatttcaaacctcattgggtggttgaacatccacaagaagacttttctgaaaaagactatgaaaaagaagtttatcaaagtgatgtctatcgtcaagaagtcgtaaaagatatccttgataactggacgaaaacatctagtggggctttaattgcaggtaaacgtgaagagaatgccttccaagcgatgtttgcagtgtcaggtaagcaagcagctgtgaattattataatattttcaaatcgaaaggatctcatttaaatgtagcaatgacattttcacgtgatgagtctaatgaacatggtacaaaggaacaaaatgaggcgcttaaaattgcgattaaagactatactgaaaaattcaatgttccaagcattttagacgcaaaggatccggctcgagcttacatgttagatataactaagcgattagcacgtaaaagaccatataatcaaggtaaagaaaaagatagattagatttagtaattgtttcagatcagcttttaacgggctttgattcaaagttcatcaacgtaatctacatggacaaaatgctcaaagaaggaatgctaatacaggcgatttctagaacgaatcgaacttttgaccttaacagcaaaccacatgggaaagtacgtttttatcgccaaggtgatgaaatgcgcgaatttgttgaaaatgcgctacgtatttatacgagaggtggcaatgatactcttcaagaagcggaagaggagacaaaaaatcagctacctaaagatttagaaaatgacgatattcttgcaaagccccagagtcatcaaatcaacgaactagaagaagctgtcttaagattgaaagagcttgctggcgatgattttagtcaagttccacgaggccaaaatgatctaaaagaatttgttggtcttgctttaactactcaaaccaggatccagcaattaatacagcagggttacgagctaggaagcgagattgaggagctaaatgaacaaggtgaagcgactggaagaatggttcgtttgaacatttcaagtattgatgaatttggtgctttacaagctcgtttatatgatgctaaggagaaattacctcctgaggaacgtccagatctcactgaaataaagattggaattgaattttatcatcacgagataattgactacgatatgctagttgagcttctgaatacctttatggatgaaaaaaataaaagtaataaagatgctatcgaaaaacacatcgtaccaatggatgaagaaagtcaacatgaaatccatgggatcgtggatgatattgaagcaggtaatattacagaacattttacaaccgattctcttcaggaaacacgtaagaaataccgtactgaacatcgagagcttaaagttcgccgttgggcagctaaccaaaaagtcaatggtaatcgtattgtggaagctttcgacttattcttaccagggcatacgctcattgataatccaaagctagcggatattgtgcgtgagattgaagaagaggaaaacatcggattttttgaagcctcagattttgaagaagagctaatggcattcttcaattcactataa

SEQ ID NO: 679 - DNA, 3024 bp, Listeria innocua
aaggggtgttgggagaaaatgaaaaattttaataatattgatgaacgtgtagtggatgatttaaaaaaagaactaaaagcacagagcaagttaaagattgctgcagcatcattttcaatctatgcgtacgaggaattaaaaaaagagttagaaaaagtcgatcaaattcagtttttatttactagtgatctatttacgaaagaaaaagcaccgaaagaaaaaagagagttctttattcctcgtctaaatcgtgaaagtcagctgtatgggaatgagtttgaattaagaatgcgcaatgaattatctcaaaaggctatcgctaaagaagctgcagaatggattcgtcaaaaagttacgtttaagtcaaatatttctgggcaacgttctgataatttcatggtcgtggaaaataaaggaaatataaatgtatatgcacctttcgatgaatttacaaccgctgaaattggaacaacaaaaggtgaaaagcttttttataatatttcaaaatttgaaaatgaaaatacacaacaattcttaaatgcgtttgagcaagtttggcataatcaggattatgtcgatgaggtcacgaatacagtattagataatattacggctgcatatcaagagaatgccccagagtttatctactatattgcgttatataatttgtttggtgaatttttgtctgatttagatcaggattatattcctgatgaacgtacagggtttaaagactcaaaaatctggtcattattgtatgattttcaaaaggatgctgtgttgggatccattagtaaattagagaaacacaatggtgttattttggcagattctgttggtttgggaaaaacgttctcggctataggagtcattaaatattatgaatcacgtaataaaaatgtcttagttttagtaccgaaaagattgaaagataattggaataattacaagaataactacaaaaacaaccccttagctgaagatcgtttacggtatgatgtcttatttcatacagatatggatcgcgaacgtggtgaaagtaatggaattgatttaggaaagataaactgggggaattatgatttagtcgtaattgatgaaagtcataactttagaaatggcgagggtactacacataaaaaagaagaaggtgtagaaaatcgttatcaaaagctaatgcgcaaaattattaaattaggagtaaagacaaaagttttaatgttatctgcaactcctgtgaataccgatttttctgatctacgtaatcaattgatgctagcatctgaaggtgatagtagtaatcttacgaaaactttgactactaaaaaaacagtaacagaaatttttggtcaagctcaacgagcttttaaagattggtcttctttggaaactgaaaatcgcacaacggagtatttacttgacatgttggattttgatttttttgagttattagatagtgtgactatttctcgtagtcgtaaacatatagaaaaatattatgaccaatcggatattgggaaattcccaaaaagatttgctccaattaacgaaagtccgaaattaacagacttagatataacctataatgatctatttcagtttatcgatttgctaaatctggaagtttatacgccgcttaaatatgtatatccctctaaaatagagaagtacacagagcaggcaacagctggagcttcaagttgggcaaatcgagaaaaaggacgcaatcagctgatgattacgaacttactcaaacgagctgaaagttctattcatgcatttaaattaacaagtgaacgaattttagagaatattagtttgaaattacaagttattgaagagtataaacaatcaaaaaatggcattgtaaaaagcgattcagatgattttgaagatgatgtgtttaccgttggacaggacttaaaaattgatatagcagatatggattatcaatcatgggaaaaacaattagtagcggataagtatgtgtttactgaactattggatgttgtaaatcgtattattccggaacacgatacaaagatggcaacacttcaagaaataattcttaaaaagatagagaatccgattaataaaggaaataaaaaggtcataatcttcacggccttttctgatacagcagactatttatataaatatttatctaatcaattaatccaaaaagatggggttcatacagctttgatatcgggaacacgaacagagtcaaccattccaggaagaaaaaacgattttaatgagttgcttactttatttagtcccaaatctaaaaatcgtgatgcattaggtttagatggtgaaattgatgtagtgattgcaacagatgtcattagcgaaggtcaaaatttgcaagatgcagattatctcatcaattacgatatccactggaatcccgttcgtattattcaacgttttggtcgtattgaccgaattggatctaccaatgataacattcaaatggtcaatttttggcctgatattagtcttgatgaatatattaatttaaaagcacgggttgagaaccgagcaaagttagtggctatatcctcaacaggggaggataccatcgataatacagatccagatatggagtatcggaaaaaacaactagaaacgttacagaatgaagtggttgatttagaggatatgtcaagtggagtcaatattatggatttaggtctgaacgagtttcaacttgacctgcaaaaattgagggaaaaatacggagattacgaagcaaaaccttatggaattcatgcgataacaaaggctgatagtaatcatccagcaggtgttatctttgttttaagaaatcggaataatgctatgaatatagacaaacaaaatcgattacatccgttttatttagtctatatcgctgaaaatggtaaaatcatttcgaatcattttaatcctaaaaaaattctagatgatatgaggtatctatccagcgaaaaatctgtaccgattgagaacctagttggttctgttgcaaagttttaa

SEQ ID NO: 680 - DNA, 3282 bp, Listeria innocua
ttggcaaaaggtagaatacaaggtattacaattgaagttgatggcgatacaaaagggttgaattcagctttaaaaagtgttaacactcaatccgctaagctaaccagtgaattgaaagatgttgaaaaactattgaaatttaacccaggcaatgttgaagcacttgcacaaaaacagcaacttttgacaaagcaaatagagacaactactcaaaaattaaatcaactaaagcaagcagaaagtcaagtagaagcacagtttaaaagtggtgaaattggtgaagaacaatatcgagcttttagacgtgaaatcgagtatacagaaggcgctttgaatggttacaaaggacaattaaataacatacaagtagaacaagaaaaattaggtcaaaacacaaaaagaattaatactttatttgatgcaacgggttccagtgtggatgattttgcggacattttaggcggtagactgactaacgcaattcgcaatggtacagccacgtctgaccaattagaagaagcaataaataaaatcggtcgagcggcattaggaactgatgttgatgttggtaagatgaaaaatgcgttggatacagtagatgatggaaaaagtattcaaagtgtagaaacagatttaaaaagtttatcgacacaaagtaatgaaactggtgaagctctcgaaggtatgagtaagaaaatggacactggaatattgttagaaggagccgaagctgttcaaggtgtgactgataaagtcatagaattagggaaagcttcatttgacagcgctttggatgcagacgctgcaacagggaaatttaacaaaaatttcggtctggttggcaaggaagcgaaaaaaactaaagatacgattgtggacttttacaatactggtttagttgattcatatgaggaagctggcgaagcgctgactcaaacgaaaagacaattgaatgacctcaactcaacagatctagaaagtgtgacagaaaaagcacttgcattttctaaaacatttgattctgatatgaatgaaacgttgcgcggcgctaatgctttgatggaaacctacgggctgtccgctgaacaatcatttgatttaatgactgtaggagcgcaaaacggactcaataaaacggacgaattgggggacaatctagcagaatattccgggcagttcaagcaaaacggctatagcgcacaagggatgttcgaaactttagaggctggcttggattcaggcgcttataatttagacaaggttaatgatttagtaaaagaatttgggattcgtgtgtcagatgactcgatagaaaaagctgtcgaaggtctgggcggaaagtggaaaaccatgtatgcggacatgaaaaaggatggctacgataacaatgaaattttcgctaatttggctactgaaataaataaagttggagatgaacaagaaagggcatctattgtatcagcaatatttgggtctctcggagaagacaatactgtaaaagttttaactgcgatgggcgatttaaatggtgagctaggtgcagtacaagggaaatatgatgatgtaaaaggcgcatcagaaaaattgacagagacaaatagcaaacaagacttaactaaaatgtggcatgaattacaaacggcactcgcgccaataggagaatatttattggaactagctaatacaatagtcccgaaagttgtaagtgtaattaaagatttaaaaaaatggtttgatgaattaagcccgttttcgaagaaagtcatggaatttgtaggaataatgacaggggtgtttacagttattatgtcaattgtatctgcattggctccagtaattgctgcgtttgtaatattaggaagcgttgtgggtactgtgattgccgtcattgctgcaatagccgcagcaatagccgccgtcattctaattataaaaaactggggcgctattgtcgattggttgaaaggcgtttgggaaacgatagcagactttttcagtgatttatgggaaaatgttaagcaaattttttcagatgcatgggaaggaatcaagcaatggctcatggatcttttcattgcgtgggctaaatggaactatgatatttggaacggtattgttgagtttttcgcaaatatttggaatggattaaaagaaaaatggatggagttttgggacccgattattgaatggttcaaagaaaaatgggaactaataaaaacaactgcttcggaagtttggcagtctattgtggatactattgtcgctgtttgggacgggttaatgactttcttagacccgataatcagcttaattactactctaattgaagcggcgtggttggcaattgttgcggtgactcaagtggcttggggagcgttcgaaacgtttataattgaccctttaaaaaacgtgtggaaatgggttcaggatatatttaaaaaaatagtgaattggataaaagaaaaatgggaacaagtaaaactcattacaaaagttgcttggttgctatttaaggaatatatgattgatcctgtcattgcagcttataactacgttaggcaaaaatttactgatttagcaaattggataaaagaaaaatgggagtttgctaaagctattacaaaagctgcatgggcagcgttgaaacaaagaatgattgaccctatcgtcgaagcgtacaataaagtaagagagaaaatcagtaatctggtttcttctattaaagaaaaatttgatgacgcaaaaagggcagttaaagaaaaatttgattcaataaaaaaatcaatcattgatccgattgaaaaagcaaaagacagtgtgaaaagaattgttgataaaattaaaggatttttcaaaaacctgattttaaaaattcctaaaccatcaatgcccgacttaccacatttcagtttaaaaacaagcacaaaaaaggtcttcggtaaggagataaaattcccgtcaggcatagatgtagattggtacgcaaaaggtggaattttaacaaaacctaccatgtttggcatgaatggaagttctgccatggtcggcggagaagctggaaaagaagctgtgttgccgttaaacgcaaaaaatttaggcacgatagggaaaatgattgctgacacaatgccgcaaagtggtggagacacatacgatttgactatcaatgtgaatggcaatgtggacaagtcaatgattaatttaatgaagaaagaaatgcaaaaaattcttgttgaacaaacaagacggaaagatagtagcatgggcggtgtgacaatatga

SEQ ID NO: 681 - DNA, 3735 bp, Listeria innocua
ttacatctaaggagactaatcatgaaaagaaagataagttctatcattgtagtcgggataatgctctttcaatcattaactatgtatccatttatcaccgaagccaaagaaaatgaacaaaaagaagaaataaataaaccctcaaaaataactaagggattaactaattccctaaaatacactaagacaattcttgaaacaggggacacctatgatagtgtatttcctgacagtgctttagctaaagtagttgctaaagaagcaacggggtcagagaatacaactcagctagtaacacaagcagacctgaataaaatcaaatctctcaatggttataataaaggaatcagcgtattaacaggaatcgatttgctagtcaatgtgacaagtataagcttgaataataatcaagtaacagacatttctccaatagatcaattacctaatttagtaagcctatcggtaaaaaacaatcaaattagcagtcttatcttaaatgcgcaaaatcaactcccgaaactaacaaccattgatattgaaaataatcctgatcttaatactatcgatatccaagatcaaccccaattggtagatgtaaagacatccggttatacaggattacgtaagttaacaacggtaattgccaaaaacaatccagaattagtcaatttaggccaatacactatccgaaatgtctactttagccaagtagcaagtttaacgaaagttgaattagtcaatctccctaaggtaagaaaagtaaaccttgagaggaacagtattaatgagctaaaagttactgatttggctattgaagatctgccattagaagaaaatgaattaacagatacagtattcgataacatccaaaatctgcctaatttaaaaacgttagacctgtcaaaaaaccaactagaagaagttgtgttagacaaaacggatgtagaaaatctacccaatttgatgacattagatatacagcaaaatttggctataaaattgataaatgttcaagatcaaccccaattggtagatgtaaagacttccgattataaagaattatctgcgttaacaacagtaattgccaaaaacaatccagaattagtcaatttaggccaatacactatccgaaatgtctactttagccaagtagcaagtttaacgaaagttgaattagtcaatctccctaaggtaagaaaagtaaaccttgagaggaacagtattaatgagctaaaagttactgatttggctattgaagatctgccattagaagaaaatgaattaacagatacagtattcgataacatccaaaatctgcctaatttaaaaacgttagacctgtcaaaaaaccaactagaagaagttgtgttagacaaaacggatgtagaaaatctacccaatttgatgacattagatatacagcaaaatttggctataaaattgataaatgttcaagatcaaccccaattggtagatgtaaagacttccgattataaagaattatctgcgttaacaacagtaattgccaaaaataatccagaattagttaatttaggttatcccattatgcaaaatgtttactttagccaggtggcaagtttaacgaaagttgaacttgctaaccttccaaaagtaagagcagttcgattggaacgtaatagcatcaatcagattgaactaaataatttagtttcagtaaaagacgtgaatctaaatactaacaaaataacaaatgatagcatagagaaatttagaggcatgcctatactagcaactttaaatttaaacaaaaaccaaattaccaatataaatatgcttgatggtttcccacaaatgactactttaaatatcgatttaaactccatcagtgttttaccaagtaaccttaaaacaaaaatgccaaaactatcgagaattagtgcattaaatcaaacagttactttaggtaaagcaattgtagtggatgattccgatttaattattaataatgagattagtaattttgaaaagttaaccgagccaagcccaatatcaaattttggaacttacgcaaatgaaaaaataacttggtcgtctgaaagaataaaaaatttaacagaggtcagctttcagttttctgagctaattaatgtgactggtatagatggaactttttcaggaaaagtaacacaaccatttaaaagatcaactaccccagtaattaatgcagattccgaaattcattatccacaagggacagaaaaaacagaagcagagtttttaaaggatgttcaagcgcaaacaacggatgatttagccattaaaagcgattttgaaacaatggtgaatctcaagaaagtaggaaaatacacagtaacattaaacgtagagaatctggatggaattaaagctactccaaaagaagtgattgtttatattgatgctgtacaaggtgcaaatataactgtgaaatatgaagacgaatcagggaataaacttgcggaaaatagtatactaactggaaatgtcggtgaagaatatagttcaagtgcaaaagaaattttaggttatacactaactgaaatgccatcaaatgcacaaggagaatttagcttagaagaacagactgtgacatatatctattcgaaaaatcccgttccagctaaagacatcacggtacaatataccgatgaggatgggatggaattagcaccaaccgaaacattatcaggtaatgttgatgaaaattatgttacaacagcgaagacttttacaggatacgaattaattgaaacaccgagcaatgcagaaggaaagtttagcgaaaatgcacaaacagtgacctatgtgtatcgcgcgattaaagcagagccaattttagctaaagaagttacggtgaactaccaggacgaattaggagctaaaattagtgaaacggaagtattgactggtgaaattggtgaaacatacacaacagtggctaaaacaatagatggctataccttaattaagagccctactaacgctaacgggatttttaacgagaatcctcaaacggttacctatgtgtatcaattacaaaatagcccaatagcagcaaatatcaccgttaaacacttggatgaaaacaacaacgagctagcaccaagtgaggtactaagcggaaatgtcgatgaagcatatacaactaaaccaaaagaaataaaagactattcgctagtaaaagtaccaactaatgctagcggaaaattcacgacagaagcacaaactgtgatttatcactataaaaagaacagtataccgacatcatcttatattactgtaaaatatgtagatgaaacagggaaagagctggccataagcaaggtattaaacggaaacattaatgattcctacgcaactacagccaaggaaattaaaggctatacgctagtgcaaaagcccgctaatgcaactggtaaatttacggatcagaatcaaactataaaatatgtatatcgtgctaataaagccgaagtaaatccaaatccaaattcagatgtactagggagtaattccaatggagatattcaaccaacgaatgatattaagccaacaaacgatgtccaaccaacaaatgaggctccacaaaccctacctaaaacaggtagtcagccggcaaatttgatctttggattaggaattttactagtacttcttagtacccaatggctacaccgaaataaaagaaaaaaagctaaatctcataactgctga

SEQ ID NO: 682 - DNA, 3795 bp, Listeria innocua
atgattacaaaagattttgcaaaatcttatgctatttcagttggtattaatgatacagcattaagaggcgcaaaaagcatcgcgaattttatgcaaaaaaatatgcctaaaacttattcaattggggtgaatattgctgataatgcaagtaaaaaggttgctggaattggtaaactattggataaaaaattacctaaggcttattatacaaaaatagatgcggatggcaaaccttttgaagtcactgtcggacgattaatgaattatttacgtcgcaaaaacttcaaaaaatatgaaattgttttatcggcaaaagatacagcaactgaaacgataaaaaaggctgcatcttttacaaagaaactgttctcaaaaggttattcagttactatcactgctattgataaattaaccagtactgctgcacgaatgggttcaaaaattaaaagtgtattacctaaaatgattaatattccagttaaagctttgaattatacagctagcgccattggtgcggcaaaaagagctttgttttctctgccgactttgttcacggtaactataggtgctgtattagggaaaagtttttatgaagctacagtgaaatcatcagctacatttgaagaatatacagtgtcaatgacacactggctaaagtctgcagataaagcaaaagattatatgaaatggatcggacaatattctgattcaactccttttagctcggctgatttaatgccagccgcggcaagagcaacaggtttaacaaagaatagaaaagaatttgaaaagttaatgaaactatctgtcgatatggctgctttaactccgggaaaaacagtcgcggagtcaatggaagcattagctgatgcgcagatgggggaatttgaacgattaaaagaatttaatatgaaatataccaaagaatcaatggatgcagctggtggatttgacggttttattaaggatgcgcaagacaagttttctggtggagctaaagggttttcgcaagcctatacaggaatgatttcaactattaaaggttatacaagctcattctttagaagtataggtgatggattccaaacagcgattaagcctcgattatctaaagttattaagtggttagaagaaaaccaagatgcatgggcagcgtggaaagaaacggcagttgaagccggttctgagattgctagctggttgggtgaaaaattcgatggtttatttagttatattggtaagaaattggaatctatcaatgagtggcggagttacggaacatcagttactaacatattcaaacaaatcacgtatgaaattggacaagatataaataattggttatacaaaaatggtggaatgaatcaaattaaagacttttttagtaaggcgggttctgcttttggttcagcaataaatgcttttattactggtgttttgtttagcagtgaagtgaagggcgaagaagtagcaggaagcatgggattagttaatattatggctaatgtaggtggcgaagctgctaagtcatttgggaaatcatttctagattcactagatccaggagcgctaataaaacaaattttttctaaattacttgatatcaatacaagtggtcttaaatctgtttttggcaaaatgattggcaataaagagcttgaggatcaagggaacatatggggaactttattagctgacggattgttattaggatttgctttgcgcttcaagggaattcggctgattatggctgctggtttaaaaccgattagtaaaatagcgggcaagggcattaaaggcctaggaaaaaaaggaatgggtaaaatatttcctgctactatgaaagtagaccctacgaaaaccacaagagtaggacgatattcagaaggcgggttacctggttctatatctaaattaggtaagtttatggataaaactggagcacttggcaagggattaaaaggcttaggttcagtagccaaaagaattcctgtgcttggcacagcattatcggctacctctctcattggcataaataaagaaaatgctggcgaaaaggtcggagattttggaggcggtttgggaggtatggctgcaggagctgctggaggagctgctatcggttcaattattccagggattggcacagcaattggtggtgttattggatcaattatcggaggtatcgccggaagtgagctaggacagcgaattgggaaatgggttcaaaatggacctgttggaaaagcttttggaaaagtaaaagattttcttgcagagacgttgtttgacggtggttggtggtctgaaaaatggaatgatgtaactagctatgcaagtgatatgtggatacagtttaaagaaggatggaccaatattactgagtgggtaagtgagaaaattgagcttattgggggatttttctcaagtgtatggaaaagtatctcaaatacattcgggggatttgtcgaatggtttgataaaactatttggacacctatttacaacagtgcagttgataaaattaatctaattgtaggtatattcacagttgcatgggaagtaatttctggtgtttgggcagttgtgtcagaatggttcaatacaaacatttgggaaccgattaaatcagcagttgaaatcgtaggctctgcaatatcaagctacttttcaacctcatgggaaatgataaaattagtttggttcctcgctgtagaatggtttaatacgaacatttgggaaccgattaaattagcagtttcaactgtggcttatgcaatatcaagctacttttcaacctcatgggaaatgataaaattagtttggttccttgctgtagaatggtttaatacgaacatttgggaaccgattaaattagcagtttcaactgtggcttatgcaatatcaagctacttttcaacctcatgggaaatgataaaattagtttggttccttgctgtagaatggtttaatacgaacatttgggaaccattaaaggttggggcacaagctattggtgaagctataagtagtttcttccaaactgctcacgatgcagtaattagtgcttggaatggagttacagaatggtttggtgcaaatgtaagagatcctatagttggggtcgctgaagatattagcgcagcttttcaagatgcgtttggctggataaatgatgtaataggtaaagcgggagaagctgctaatagcgcgaaagattggattggaggaaaagtaaacggagcaaaagatttctttactggaattggtgaagaaaagactggtttaaagaagaaatcagtgggaaaaaatgccaccggaggtttaattactcaagaacaactatcttggattggtgaaggtggtaagaaagaatttattattcctgttgatcaaaatgtagggcgtggaaaaatgcttcttggagcagctgctaatgctctcggggtcgatatgggaggacaacaaagaaatacagttaataacgttatacaaatgccttctgtaccgctacctgctagttcagcttctatagcaatgctttctacaggtgctaatggtcctgcaacaacaaattcgataactgtaactccagagattgcgcaagcggctaatggtcctgcgagtgtatctactaaaagtggtgataaaatagtgactgtaaactttaacggagacaatcactttgctaataattctgatatggaagattttgaaggaagagttgttagtgtaattcgtcaaacattagatgatgaagattttgaaagtggagatggtattcaagatggctaa

SEQ ID NO: 683 - DNA, 4023 bp, Listeria innocua
gttgaagggatgaagaatatgaaaaaaccgtacacgattggactagacataggaacaaactcggttggatgggcagtgttaacagatcaatatgatttagtgaagaggaaaatgaaaattgctggagactctgagaaaaaacagataaagaaaaatttctggggagttagactatttgatgagggtcaaacggcagctgatagaagaatggctagaacagctagaaggagaatagagagaagacgcaatcgtatttcgtatttacaagggatatttgcggaagaaatgtctaagactgatgcaaatttcttttgccgattaagtgatagcttttatgttgataacgaaaaaagaaatagtcgtcatcctttttttgcgactatagaggaagaagtagaataccacaaaaactacccgaccatttatcacttgagagaagaactcgttaattcttcagaaaaagctgatttaagattagtttatttagctttagctcatattataaaatatcgagggaactttttaattgagggggcattagatacccaaaatacttctgttgatggaatatataagcaatttatacaaacatataatcaagtatttgcaagtggtattgaagatggttcgctaaaaaaattggaagataataaggacgtagctaaaattctcgttgaaaaagttacgcgaaaagaaaaacttgagagaattttaaaattataccctggtgaaaaatctgccggaatgtttgctcagtttatcagcttgattgtaggcagtaaagggaattttcaaaagccttttgatcttattgagaaatcggatattgaatgtgcgaaagatagctatgaagaagatttagagtctttgttagcgctaattggagatgaatatgcggaactttttgttgcggcgaaaaatgcatatagtgctgtggtgttatctagtattatcacagtggctgaaactgaaacaaacgcgaagttatccgcaagtatgattgaacgttttgatacacatgaagaagatttaggggaattgaaagcatttatcaagcttcatcttcctaaacactatgaagaaatatttagcaataccgaaaaacatggttacgcaggttatatagacggtaaaacaaagcaagcagatttctataaatatatgaaaatgacattagagaacatcgagggtgccgattattttattgctaaaatagaaaaagaaaactttttaagaaaacaacggacgtttgataatggggctattccgcatcaattacatttagaagaattagaagccattttgcaccagcaagcaaaatattatccttttttaaaagaaaactatgataaaatcaaaagtttagtaacttttagaattccttattttgttggcccactagctaacggacagagcgaattcgcatggttaacaagaaaagctgatggtgagattagaccgtggaatatagaagagaaagtggatttcggtaagtcagcggtcgatttcattgaaaagatgaccaataaagatacatatttacctaaagaaaatgtattgcctaaacacagtctctgttatcaaaaatatttggtttataatgagttaaccaaagttagatatattaatgaccaagggaagactagctatttttctgggcaggaaaaagaacagatttttaatgacttatttaagcaaaagcgtaaagttaaaaagaaggatttagagctgttcttacgcaatatgagccatgttgaaagtccgactattgaagggttggaagactcgtttaattcaagttattctacctatcatgatttactcaaggtagggataaaacaagaaatccttgataacccagtaaatacggaaatgctagaaaatatagtcaaaattttaactgtgtttgaagataaacgtatgattaaagagcagttacagcaattttctgatgttttagatggggttgttttgaaaaaattagaacgacgacattatacaggatggggaaggttatcagctaagttattaatgggaattcgtgataagcaatctcacttaactattttagattatttgatgaatgatgatggacttaatcgtaatctgatgcaacttataaatgacagtaatttatcatttaaatcaataattgaaaaagaacaagtaactacagcagataaagatattcaaagtattgtggcagaccttgctggtagcccggctataaaaaaaggtattctacaaagcttgaaaattgtcgatgaacttgttagtgtaatgggctacccacctcaaactattgttgtggaaatggcaagagaaaatcaaacaacaggaaaagggaaaaataattctagaccacgttataaatcattagaaaaagcgattaaagaatttggtagtcaaattctaaaagagcatccgactgataatcaagaattaagaaataatagattgtatttatattatttgcaaaatggcaaggatatgtatactggacaagacctagatattcataatctttctaactatgatattgatcatattgtgccacagagttttataacagataactccattgataatcttgtgttaacgagttcagctgggaatcgggaaaaaggggatgatgttccaccactagagatcgttcgaaagagaaaagtattctgggagaagttataccaagggaatttgatgagtaaacgtaaatttgattatttaactaaagctgaacgtggtggtcttacagaagcggataaagcgagatttattcatcggcaattagtggaaactcgtcaaataacgaagaatgtagctaatattttacatcaacgttttaattatgaaaaagacgatcatgggaatactatgaagcaagttcggattgtaacattaaaatctgcactggttagccaattccgtaagcaatttcaattgtacaaggtgcgtgatgttaatgattatcaccacgcccatgatgcttacttaaatggggtagtcgcgaatacgttattaaaagtatatcctcaattagagccagaatttgtttacggagattaccatcaatttgattggtttaaagcgaataaagccacggcgaaaaaacaattctatacaaacatcatgttattctttgcgcaaaaagatcgaataatagatgaaaacggtgaaattctttgggataaaaaatatttggatactgtcaaaaaagtcatgagttatcgacaaatgaatattgttaagaaaacagaaattcaaaaaggagaattttcaaaagctacaattaagcccaaaggaaattccagtaaattaattcctagaaaaactaattgggacccgatgaaatatggtggtcttgatagccctaatatggcatatgcagtggttattgaatatgcaaaagggaaaaataaattagttttcgagaaaaaaattatccgtgttactatcatggaacgtaaagcatttgaaaaagatgagaaagcctttttagaagaacaaggttatcgtcagcctaaagtcctcgcgaaattaccgaaatatacgttatatgaatgtgaggaaggacgccggagaatgctggctagtgctaatgaagctcagaaaggaaatcagcaggtattgccaaaccacctggtaacattactacaccatgcggcaaattgtgaggtaagtgatgggaaaagccttgattatattgaaagtaatagagaaatgtttgctgaactactagcgcacgtatcagaatttgccaaaagatatacgttagctgaagctaatctaaacaaaattaatcagctttttgagcaaaataaagaaggcgacattaaggcaattgcacaatcttttgttgatttaatggcattcaatgcgatgggcgcgccggcgagttttaaattttttgaaaccactattgagcgtaaaagatataacaatctcaaagaactattaaattccactataatttaccaatcaatcacaggactatatgaatcacgaaaaaggctggatgactaa

SEQ ID NO: 684 - DNA, 4185 bp, Listeria innocua
gatttattgaaaggggaacataaagtgaagaaaaaaagtatagcaagtctgttaattagcggtattatttttagtcagttagcaccaattgttagttttgctgtggaacaagaagcaaatgaaaagccaacagaactgacgcaattagaagaaaccccgaattcaacagatgaaaaaacaaatgaagaattaaatcaaacagaaatagaggaacaagaaatacaggatgaaaaaagtcaagatactgagagtaatacaggcacggaacattctcaaacacaagagtctagcaaggagtcaaatgagacaactaacacccagagtgaaataagtgctgaacaagctacaaaagagaaatctaatgtagaaaaagatgtaaatcctgaaataatcaaaggatcatggggaacagctccttatgaatataatcaggatactggggaacttaaagtaggcggtggagatttatcaaattggtataacactaccggttttattataagtaaagcagatgacgcagaagttaaaaaaattatttttacagaaccggtaaatgcaccatcagattctactagattatttgagggagatggattcaagagtttagaagaaatatgcgatttatcttatttggacacgtcaaaagtaacaattatgaccgctatgtttcatggtttgaaaagcgtaaagagcttagatgtcagtaacttcgatacaaaaaatgttacagatatgaggtacatgtttcagggaatgatagccttagagagtttagatgtcagtaacttcgatacaggaaaagtgagaagtatgtactacctatttgcgaatctgaaaagtataaagagtctagatgtcagtaactttgatacaaaaaatgtgacagatatgggcgccatgtttatgggtatgagtagtatagagagtctagatgtcagtaactttgatacaaaaaatgtgacaaatatgggcgccatgtttatgagtgtgagtagtataaagagtctagatctcagtagctttgatacaaaaaaagtgacatatatgacaagcatgtttagatattcggaaagtctgacaagcttagatataagcagttttgaaacgaatagttctacaactgaaatgaagttaatgtttgacggagccaataatttgtccctcattaagttaggaaaaaaaataaagttttatactgtggctacgtatgaaaaacttgttaatccaccccgcagtgcaccttataatggaacgtggacgaaccctcgtacaaaacgaacaattttgtcagactctttaacgatgaaatacgacggtgcaaccatgtatggatattatcattggtctgctgtaaataatatcatagccattgattctactatttattcaggtgatgactggaaagctgaggataattttatttcagcaacggataaagatttcaatctaattgattttccgctggtaacagtaacaggatccgtagatactacgacacctggtgaatatgaaatcacatatagtgtaaatggcttgactactacaatcacagtaacagtgaaagaaaatcaagcaagtgttgtagcggaaaactcaactatctatacaaaagaatcgtggaaagccgaagataattttgtttcagcaaccaataaaaaaggtaaaattgcagatatttcgtcagttaccgtaacaggggaagttgatgtaaatacaccaggagactacgaaattatgtatacaattgatggagtctctacaaaaataattgtgacggtgaaagaagataaaagcagtatagaagctaaagattcaattctttatataggtgatacgtggaattccaaagacaattttatttcagcgacagataaagatggtaatccggtggactttaaggatattaaagtagaaggcacagtaaacacgataaaaccaggaactaacaaagttacgtatttgtatggaaaccaaagtaaggaagttaccataacagtcaaagcggatcaatcaactttagaggccaaagattcaattatttatactggagataagtggaatgccaaagacaattttattacagccacagataaagatggtaatccagtagactttaaggatattgaagtcgaaggtacagtagacacaacaaaaccaggaactaacaagattacgtatatatatggaaatctaagtaaggaagttaccgtaacagtcaaagcgaatcaagcaactttagaagccaaagattcagctctttatgtaggtgatacgtggaattccaaagataattttatttcagcaaccgataaagatggcactccagtagactttaaggatataaaagtcgaaggcacagtagacaccacgaaagcaggaactaacaaggtaacctatttgtatggaaaccaaagtaaggaagttaccgtaaacgtcaaagcggatcaaacaactttagaggtcaaagattcagttatttatactggagacaagtggaaagcagaagataactttatttcagccacagacaaaaccggaaattcagtaggctttaaggatattaaagtcgaaggtacagtagacacaacgaaagcaggaactaacaaggttacctatacgtatgcaaatcaaagcaaggaagttacgataacagtcaaagcggatcaagcaactttagaagccaaagattcaattatttataccggagataagtggaaagcagaagacaactttatttccgctactgataaagcaggaaagacaattgactttaaaaatattaaagtggaagggacaatagataccacaaaagctggtaattatgacatcacttattcttattcaggagtgactcgtagtactgaattgagtaaaacaattacagtaacagtcaaaaaaaatcaagtaaacttggaagcgaaagactcaactctttatgaaggagacaagtggatagctaaagataactttgtttcagcaaccgataaagatggcaatacagtggactttaaagctattgaagttaaaggaactgtaaataccacaaaagcaggaacttacaaaatcacctattcatatgcaggcatcagcaagacaattacagtgacagttctagccaatcaaactaaaatcgtagcgaaagatttaactatttatgaaggcgacaactggaaagagcaagacaactttgtttcagcaacagataagtttggacaagcaattgactttaattcagtaaaagtaacaggttcagtagatattcaaacaccaggtaaatatcgaatcacctacagcatagaaggtgcatctacaaccattacagtgacggtcctagcagatcaaagtaaccttgttgctaaaaactcaacgatctatgtaggcgacaaatggcaatcaaaagacaactttgtttcagcaacagataaatatggtaaaccaattgatctttcacttttaacagtgacaggaacagtggatacgactacacctggtgagtatgaaatcacatacagtgtcaacggattgactactaccattacagtgacagtgaaagaaaatcaagcaaatattgtagcagaagattcaactattcatgcaaaagaatcgtggaaagccgcagataattttgtttcagcaacagataaaacaggtaaaaacataggtctttcatcagtttccgtaacaggaaaagtagacatcaatacaccagggaattacgaaatcacgtatacaatcgacggtgtaagcacaacaataactgtgactgtgttagtaaatcacagccaaatcgaagcccatgacgctaaaataaaagttggaacatcatggaaaccagaagacagcttcattttagctaaagataaattcggtgaaacagcagacttctcagatgtaacagttgaaggaacagtagacacaacaaaaccaggtaaatatcaaattacgtatacaattgatggagtgtcagtcactattacggtaatagtagaagataattcaaaaggttcatcaaacactatcaccatcccaccaactaatcactcaattggtgaagaagaaacaagcaattcaaatgacaaacaacttccaaaaactggagaacaacaaaataacttcatcttattaggtggactagttttagtagcactagcttttatcttaggcaaaagaaaaatgtataaataa

SEQ ID NO: 685 - DNA, 4710 bp, Listeria innocua
atgactaaacaaacttttgatgatttaattaatcagattaatactgtttctaaagatgtacaaagagaacgtgggacgctttttgagaaactaacgttggcttatttaaaaaatgaaccaacttacaaagccttgtatcaaaatgtatggttattgtcagaagttcctgaatcttatggtattcccaaaaaagatacaggtgttgacttagttgctgaacaaaaaaatggtgatttggttgcgatacaagccaaattttatacaaataaggttggtaagtctgaaattaattcctttgttgctgagttaggaaaaagttattatcaacgagggcttattgtatctacgatggatgattggaattccaatgcacgtgagacgattgatcagaacgaaaaagggattgaaatcattggattatcagaccttagaaactctcaaattgactggtctcaatttaattttgaacgtccagaaaatgtagtcgttaaaaaacctaaaaaattaagagagtaccaacaaacagccaaagataatgcactttctcattttaaagaaaatgaacgtggtcaactcattatggcgccaggtacaggaaaaacattcactagtcttaaaatttctgaagctctagctaaagataaagctggtccttttaaagtgttatatcttgttccgagtatccaattgctgacccaaacattgcgtggttggaataatgatactgaacttacaataacgagtatggctgttacatctgaccgtgatgcgtcacgtggtacagatggaactgaggatataaaagcctctgatattggttatccagcaaccacttctagtaaaaagatattgcaaaactggcatgattttgaatcattgccaaaaccaaccgatatgctcgttgtttttagtacgtatcagagtattgaagtcattggtgaagcccaaaaagaagggtttcctgagtttgattttattatctctgatgaggctcatagaacgacaggtgctcatgaagcaactaaagaagccagtgcattctctaaagttcacagcaataccaatgtaaaagggctgaaaagaatgtatcaaacagctacaccaaagatatatggggaaagtgctaaaaaaaatgctaaagacaagagtattttactctcatcaatggatgatgaaagtaaatatggagaagtgttcttccgtatgggatttggtcaagcagtttcacgtgatatcctaaccgattataaagtgatggttttagcagttgatgaagcagcaattcaaaaagatatgcaacgaacgcttgctgatccagaaaatggcttgaatattgatgatgttggtcgtattgtggggatttggaacggaatgatgcgccgtaatggctataagaatcctatcaaaaatagtccttatgatggagcccctttagaacgagcgattgcctttacacgaacaattgaagaatcgaaaaaagtatcgggtcaattcgaagaagtagtcaatgaatatatcagcgaagctattgaagacgaatctatccatttatcaatgcgtcatgcggatggacaaatgaatgcactccaaaaaggagagattttagattggttagcaaatcctaataaaccagccaatgaagctcgaattgtttctaatgtccgcttcttaacagagggtatcgatattccgacacttgatgcagttatatttttatctcctaagaaatctcaagttgatattgttcaagctgttggtcgtatcatgcgtaaggctgaaggtaaagactatggatatattatcttaccaattgttattccaactggagaaaagccagaaacaatattagacaataacaagaattacgaaacagtttggcaagtgattaatgcgttacgttctgtcgatgaacgatttgaagcaatgattgataagttaaacatggcaaaacctaaacagttaaaagttattggtgtagggagtgctccagatcaagggaatgaccaagataaaactattgaaaattctcctgtccaaacggaacttgagtttgaatgggataaatttgaaggagctatttttggtaaaattgttcaaaaagttggagatcgtaaatatcttgagaattggtcgaaagatgttgctaaaattgccgagcgtcaaattaactggattaaaaataagttatcagataaaaaagatccgattagcttagaatttaaaaaattcgtttcatcattacaacataatatcaacgaaagtattgatgaaaaacaagctgcggaaatgctatcacagcatttaattacaaaacctatatttgaagcactatttgcggaatatagttttgtgaatcaaaaccccgtctcccaagcgatggaatcaattgtatcagagctagaaaaagctggttttgccaaagaacaagaaaacctagagcctttatatgaatccgtcagaatgcgagctgaagggattgaaaaagcagaagacaaacaaaagattattgttactttgtatgataaattcttcaaaactgcttttaaagcaacaactgaaagattaggtattgtctttacaccaattgaagtggtggatttcattgttcattccgttgatgatgtgcttaaacaacactttggcaagtcattagctagtgaaggcgtgcatgttttagatccatttacaggtacggggacgtttattgttagaacgttgacttacctaaaagaacaaatggatgctggagaaatatcgttagctgatattacccgtaaatttactcaagaattacatgcgaatgaaattgttttattaagttattacattgcagcaatcaacattgaagcgacttttgatgaaataaacggtgatgaagaaggatatgttccttttgaagggattgtcttaacagatacttttgagagtacagagactgaagataccttggatgatgattattttggaactaatgatgaacgcttaaaacgtcaacaatcaatacctattactgtaattatggggaacccaccatattctgcgaaacaaaaaaatgaggatggaaatcaaattaggactacttatgaaaaactagacgcaagtttgcaaaattcttgggttgaaacttcgacagctactaataagaataatctttttgattcctacatccgtgctatgcgttggtcgtcggatagaatctcagataatggtgtgatcggattcattacaaacaattcattcatagatggaaacgcaatggacggtatgcgacaatctctcttggaagaattttctgatatttatgttttgaatcttaaaggtggaatccgtggtaaaactaaagatcagtctgtattagagggtggaaatatttttgacattatgacaggtgtcactattattatgttaattaagaaatcagattatacggggaaaggacggattcattacttagatatcgggaataatcttgataaatatcagaagttagaaaaattgaagaactggaaaagtttaaatggagcaacttcagaattccaaaatataattccaaatgaaaaaggtgattggataaatcaacgtaattctaattttgatgaacttatatctctaggaaataaaaaaacacagaatgctctttttattgattatactggtgggataacaacaggtagagatgattggtcatggaacttttctcagtctcaggttgaaataacgatgaaaacaagtattgattattataatcaatatcttggtgatacaaatatttataaagaagatgtctctgatatttcttggactcgttcattgaaacaacgttatgagcgtagagaacctcaatcttggcaaggtgacagaatatatcttgggatgtatcgaccgtttaccaagaagcatgtctattacgcacaagcgtggatagacaggcaataccaaatgtctaaggtattgcctgtctccacgtcttcaaatttgatgatttcgttatcaaataaaaccggaggaaaacagttttctaccttaatacttgatgttttaccagataggaatatttttgcgggcggttcacagaatttaccaaaatacctttatcagaataataataacggtggtctttttgatagcgatgaaaaatattcagcgattcgtccggaagtcctaaagagattatcaaatttgagcgaagaagatgcgatgtactatatttacggcgttttccatagcgtacaatatggggaaaaatattatgaagatttagcaaaatcatttccaaaaattcctaatgttaagcataaagaaaagtatataaaaattggtaaagaattagctgatttacatttgaattatgaaaatcaaccaatttgggaaggcattgacgttcaaatatctgaactggattatcgtgttaaaaagatgaagcaccctaaaaagggtgtattagatacgattatttacaatgagagtatcaccattaaaaacattcctgaaaaagcctatgaatatgttgtaaatggacgtccagctatcgaatggattattgatcagtatcaagtaaaaactgataaaaaatcaggtattacagacgatcctaacgaatttagtgacgatcctaagtatattttgaacctcttactatccgttattaccgtaagtatgcgcacccttgagttaattgatgaattaccagaatttgagattcaagagtag

SEQ ID NO: 686 - DNA, 4731 bp, Listeria innocua
agggtggtgtctgatatggaaggcgcattgagaaaaacaacaatcgaaattgattggaaaatcaataatcaaatgttgcagaaagctgatgaggaaactgatcgcatcgttcgttctgcggataaaatggaacgaaacttcaatcaaacttctagggctgttgacggcaccacccgtgctatacataaacagtcaaatgaagtgagagagagtgcgactcgagtagataagcttgataagaattttaaagaagcaaagaactcggctaatcaatttgggaattctgctaagggtgcagttgataaaactaaaaactccgtagactcagcaaagaatagcgttaataagttagataatgaaattgataaaacaactaaaaatgctaattctaaattcagcgcactaaaaacaaccattattgcagttggtagcgctttggtggttgctggtgggaaagcaatgtttaattatgcatcagatacaaatgagtcattaaataaagtggacgtagcatttaaaggaaatgctgaaagtgtcaaacggtggtccaaaacaactctggataatatcgggcttgcgcaaggtacggcgttggacttagctgccacttacggcgatatgtcaacatcaatgggattgagcacacaggaagcagaaaaaatgtcgacttccatggtcgacttggccggaaacttagcgtcatttaaaaatattgatattgatagagcgaatacagccctaaacggcgtattcacaggtgaaactgaagcgttaaaaagtttaggtattgtaatgactcaaacgaacctagaacaattcgcactggaaacaggcgctggaaaagttgcgaaaagtagcactgaagttacaaagcaaaatattgcacgtgaaaaagcacaaaagaaattaaatgaagcgataaaagaacatggtaaaaattcgttagaagcaagggaagcacaaaataaattacaggaaattcaagctaaaacaagcgaaggcgcaaaagttaatttaaaagacatgaaacaagatgagctagtacgtctacgttataactatgttatgaagcagactactaatgcgcatggagattttaaaaacactagtgatcaagctgcaaacgcaagccgagtattttctgaatcagtaaaagagctagcatcaaatgctggacagttcttgctaccaatcattacaccgctaattatacaagcgagtgatttcacgaaaaaactttctgatattcctggagctgtaaaggggatgaaggagaaattcaagccggctttcgaggtattcgaaacagttggagatttcttcaaaaaagaccttatcccaagtgcgaaagaattagcgaaaagtatgggacccggtttcatcgagggtggagttttagcatttaaaggattaggcatagtattaaacactactgttattcccgcttttaaagcagttactaagtttacgcgtgaaaatccggacagcatgaaaaggattgctaagtatgcgactgttggtgtagccggatttttagggtttaagttagttaaaaatactatcgataaagtaacagttgctattggaaaaatgaacagcaaactattgaacattggaccgagcgctgcggctggtgcgacagaagcaaatgttgcgatgtcaactataggaacaaccagcaatggcggtggcggagttgtattgcctgggggaaaaggaaaagggaaagttaaacttttcagcaaagctactgcaggactcaaaggcatgggtaaattcggtaagttggctagcggtgtaggtgttttaggtgtaggattaagcgctactgagttgattggtatgaacaaaaataatgcaggtgaaaaaactggtggctttggtggttctttaggtggtatggctggtggtgctgcaataggaactatgattgctcctggagtaggtacagctattggtggggcaattggcgcttttgctggaactgcattaggtaaagaattagggaaatatgttcaaaaagaaggaccaaaaatattagataaattcaagacaggttggaaaggcttaagcaaaattgctgaagagcatccgattttaggagcaaatataaatgtaataaataaaactatcgatgcggcaaagaaaggcattaaagcagttggagacacgcataaaactgtttggaatgcttcaaaatcaatagtcgccgacccgctcaaaattgatgcgagcagtaaaggtgtttctaaagactctgctaaagcaatgaacgagtatttacgaaatgagcagaaaatgcaagatagtcgagtcgaaatcatggtatctggtcgtcgtattactgaaaaagaactcgaaaacaacataaaaacatatgataaaatgtctgatcagttaatagctgcaactgaaaaaaaatcagcaaaagcaaataaagattgggataagctagtagcacttggggctgtttctaaagatacagctagcgcaaagaaacacactaataatgaaactgcatcaataaataaagcggatattaaagcgaataacgaagaattaaaagctttagaaagagaattctataaagggcaagaagagattacacgaaatgctgaaaatagaattaatgctattaaacagaaagctagcaaagagaaacggaaattaacaaaagatgaagaaaaagaaatccaaagaatggaaacaacaacacttgagttccgtcgttctgaacgacgttcttatgaaaaagaagttagaaagattgaagaaaagcaaaggaaagaagctgctattgcactcactgcttcagctaaagaacaaaaaataatactaggaaacttagaaaactcgaaagaaaaaatgtcagcaaaagcagcagcaagtgttgttaaaaattccgcaaaagctagagatgcatccgtaaaagaagctaataaagagtataaacagactaaaaaaatacttgatgaaaaacgatttgtcacaggtgaaatttcagaagaagaatatcaagatgcgctgaaaaatgcgaagaaaaagaaaaacggcgtagttaaagaagcggagaagatgcacgataatgtagtgcgagaagctcagcaacaagcaaaaggacatttaagagaagtagattgggaaactggtgaaacattaaataagtgggagcaatttaaaaaaggaacagttgaaacatttaacagtataaaagatgcagcgctcggaaaatggaacgagttgtcctctgcgacagttaatattttcagtggaatgaaagatacagcgttgagagtatttgatagttttaagacaaacttgtataaagtcattaataatgtaattaccggagtcaataaagtactatcgttctttaacattaagacaatacctgtgcttgggaacggtagcataggttcaagtcaagaaaacagtttatctgcaaaggataagaaaacgtatcattctacatcccaatcaggaaatctagctatgaactatactggttctaataatgcaagtggccaaattatggctggtgaggaaggtttcgagattgcatataacaagaactcagcacaagcgagaattctaggggaaaatggtcctgagataaccactgtagcacctggaacaaagatccttaatcatgcggagtctaagaaaattatggctggtggcatgggagcaggaaaaatacttcctggattcgcaaaagggaatagcacaattggcgattttgtttctgcaagcgttgataaagttcaggcagctggcggggcaattcgagatggtgcctcggcaatgtgggactggatgtctgatcccgttggaaaagttaaagacttaatagcgaaaaataatacgtttaatggcgaaggtatacaagcgctaggtggaggtatagttaaatattttgggaatggagtaacaaactacgtaaaagataaaataggttcttacatgagctctagttctggattaggaccttccactggaggaacatttggaccacgcttcggctctccgttcagatttacgtctggatacggaccacgtgtggtttttggtaaatctgaatttcacaaagggatcgactatggcgcacctacgggcacaccgttgccggcgcaacattcaggtatagtatcattcgcaggtggtgcaggaggttttggaaacctgattaaaattaaggttgcacaaggagtagaaacactttatggtcacttgtccaagattttaacgtcgagtggtgcagttgtgagagcaggtcaaacaataggtttagtgggaagcacaggccgttcgactggaccgcatgtacactatcaggtaaatgcaaatggttctcctgttaatcctggaagtgcaattggaggaaagaaaaaagcatctggatcggaagatgtagctaaaattgcggaaaagaaaggtctagcattcagacggggcggaagaccaccactgaacaaacaagttcttgttggtgaggaaggtccggaattatttgaaactgatagccctggaatgattcatacagcacagaaaacgaaacaaatgctaaataaaagctcttcaggaacaacaatcaacttcaatcccacgattaacattactattgaaggtggatcgagcgaaagcgagtcatctattcgaaaaactgttcgagcggaaatggaaaaattattcgaaaaacttgttggaatttatactcctggagaggtgtga

SEQ ID NO: 687 - DNA, 4758 bp, Listeria innocua
atgataacgcttaaaataattaaagaagataaagatacaaaagaaaaaatcaatggttcttcttttgaaattaaaaataaaaaaactggagaaacaaaagaagtttctataacagaagacgggacaattgtagaaaattcactctcagaaggagaatatattgttaaggaaaagaaggctgccccagggtttactttagacgaacaaacttataacgtcaccttagctgataaagatgaggttataacttctatttcaaccaaagacgaagcagaaaagactccaattgttacagaacaaccctctaaaaaaggaaatctgaaagcagttatagcagataatatttttactgcagtaaaggtagaaaatggaactgggaatgaacttagtacgactaaccgcataaaaaatggcggagcagtagttctgaaaatgaattttactttttcggggaaaaactataaagctggagatacatttaaaacggttttaccagagacattcaactttggaacaaccaatttaacaggagatttcttgccttcaactgaagcgaaatgggacctgaatgcaagcactcgggaattaactattacctttttaaaagatggtgtgcaagaaggtaattatgatattgagcttagtactgcgctaaaaagtttctctgagacagataaaacaaggcaggaagcagtttttaatacggcgggtggtaatacaatttaccagttagaaattattcctgaagtagacaaggctacacaggtaatgctagaagcaactccgggtaaactcaatcctgataaagctaccgtggatgcaaggtttaatttaacaaaagaaagtaatgagctaggggaacttaggctatcggacactgcttacggaggttcgactattattaataggaatagtattaaggtctactcaacagatattagtgctaaaggaacattcattgggtcaaagcaattacttaacgagggtacagattatgaattgatttatgcaccttcaggattaacaattaaattaaaagaaggtctaaaagcaaaaggatatcaagttacctatgagcgttccattgataagacaaatacgtctttgactactttagggacttcagcaacaacagttggaagctctggcatgttatcaaatggaagtatgaccatttcagtaacaataaaagcatatgatcatttaactaaaaaagcagtttataaccctgtaactcaatgtattgattggacaattaatgttaattatgatttagcaaatttgacacctgatacggttttaaaagatgtattaacagacgataatgttagttatgtcgcagattctttgaaaatcaagcaagtcacttttaatgaagaatcaggagaagtagtaataggcgaggatgcgtctaatgattggactgtttcgactatatcagataacggtagttttaatatgaactacaagaaaacagataaaaaagcgtatcaagtaacgtattctacaaaactaaccgattttagtccacgaaaaattaaaaatgaagtaacggatgaaaaaggtgttaaagcaacagaaaactttgatttcaagccagacttactaaaaaaagaagctggagagattgattattataataatacaatggattggactattacagttaattcggaaggtattaatatgcaaaatattaatatcgttgacgagttttctacaggtgtaaaaagtttaatcagctacagtgtgtacgcttatccttctgattcaggctataacatattaactgaaggtagagacttcaccatccaaaaagacgtcacgccagatggttttaaaattaaacttatcggtaactatgcgacaacagataataaaattgttgtgaaaatgaaaacaaaaattgatttaactgatggagcaaacacgctaaataataaagcctcgttttcatattttgacggtagtttaacccagtattcagaaacaataaaggcagaagcaacaccggaaactagtattttagctaacggtgggaaggtcggcaaatggaacccggcaactggtgaaataaattggattgtatctgtcaatgcaatggggaaaaaatataataaattggttttagatgatgaatttctggatggtacaacctttgtagagggatctttacagtatcgtaatgtagttaattcatccgagctgaccgacttgagtattcctctagagataaaagggactttagcacaagttggggatgctaattatccaaccaaaatagacacatcagccaataaaatacatttagaatttggtaatttagatactaatcgtgtatttgttaaatataaaacaaaaccaaaagataattggtttttctcacagtgggtaaacaataaagctatcgtttcagataatggagcagatgaacaaatatacgaaacgaaagagtttgcttttttgcaaaatgaagttattaaggtagctggaaacatcgatagtacatttggaaataaagtgaattggaatatggaacttttgaatattactccagaaagaacactgtctaatccagttattaccaatcgattggaacaaggaaatacgggtgctcagtttattaaaaatagttttcaagtaattaatacaaaaacgaacgaaccgataaacgaagaaaattatgatattacttttgaaggaaatacctttaccattcaatttaaaaactatactgcaatggcgccaatcaaagtaaactacagcacaataagtttactttcaggaccaatttctaacgaaactacggtagaagcagaagattttagtaatgtcccaatgttttttaaaaagagaaatgtggcagtatcaccagtctttactgtgggaactggatcaggtattgcaacgattggtacgattaaaatcacaaaagtggatgaagacgatactacgaagaaattagaaggcgcaaaatttcagctttacacactagatggtgaaaaatctggacaagaaataacaactaattcagaaggtgaaattttactagatggtattcaatctggaaagtataaattagttgaaaccaaagcaccagaaggttacaacattagcgatgaatacaaagaaggaaaagaaattactgtaagttcatctggtgaggaacttcttttaaccatcaagaatgcaatgaaaaaaggcaatgttattttaacgaaaaaggacagtgcatcacatgaagtattagcagatgccgagtttgaattacaaaacgccactgggtcaaaactaaaagaaaaactaacaacagatgcgagcggtaatatagaaataaccgatttagcacccggtgactataagttaattgaaaccaaagcaccaaccggttaccaattagacgcgacaccagttaatttcacgattgattttaaccaatcagaagcagcgaaagtaagcaaaaccaacacagcaaaaacaggcacggtaatgctaacgaaaaaagatagcgcaacaaatgccgagctagcagatgcaacatttgagttgcgaaacgaggacgaaacgctagtccgtgagaatctcgtaacagacgataatggagaaattagtgtagctgatttagcacccggtgactataagctaattgaaactaaagcaccaaccggttaccaattagacgcgacacccgttaatttcacaattgattttaaccaatcagaagtagagaaagtaagcaaaaccaacacagcaaaaacaggcacggtagtgctaacgaaaaaagatagcgcaacaaatgccgagctagccgacgccacatttgagttgcgaaacgagagcgacacattagtccgcgaaaatcttgtaacagatgataatggagaaattagtgtagctgatttagcaccaggcgactataagctaattgaaaccaaagcaccagctggttatcaattagacgcgacaccggttaatttcacgattgattttaatcagtcagaagcagcgaaagtaagcaaaatcaacacagcaaaaacaggcacggtagtgctaacgaaaaaagatagcgcaacaaatgccgagctagcagatgctacatttgagttgcgaaatgagagcgacacattagtccgcgaaaatcttgtaacagatgataatggagaaattagtgtagctgatttagcgccaggcgactataagctaattgaaaccaaagcgccaaccggataccaattagacgcgacaccagttaacttcacgattgattttaaccaatcagaagcagccaaggtaactaaaaccaacaagaaaaaaattggtacaattatagttaactttatagatgtagacggcaatcaattaaatgacaaggaagtgcatactggaaatgttggtgaagaatacagtgtgaaagctaaagaaatcgttggccatacattggttaaagatcccgctaacaaaaaaggtatgtataaagaaacttcacaagaaataacctttgtctatgagaaaaaggcaatgccgattactgtggaacctactgaaccatcaaaaccaacagaacagctaacagaatcagctacagtagcagagccaaaacctataaaacaaaacattaaaacaaccaacaaatcaccaaataataagagaaaacttccttctacaggagatgagttcccttatacaatgctattcactggattgtttgttagtgttgctggagtattcttcttaagaaaacctaaacaaataaaatag

SEQ ID NO: 688 - DNA, 4806 bp, Listeria innocua
atgagtaaagcaggagaaatttattacgatataaaaatacgcgaaaatggctataaaagccagatgaacaaaatcgataaggatatggataattttgcgaagaaagggcaaaaagcatctgacaatatcgacaaaatcaataagaaaaacattaatgttaaaggtcttgattcatctatcgtcaaagttgaacaattcggaaatatgcttgaaaagtctggtcaaaagttaacaaaagctggaaccgcgatgaccgttggatttacggcgccaattgtagccggaatggtgaaatcaactaaagcgtatcttgattttgataatgaagtgacagaagttaactctttattgcgtgaatctggtgaatcagcgaaagagtttggcgatcgttatacacaagtctttgattatgcacagaaagctagtgttaagtatggggtagcttctgaacaaactatgctcggtatgaaagaaatggttaaaaaaggctacgatattaatcaaacaatggcgtctatgcctgcgatttttaacgctgctcgtgcatctggcgatgatttcgaaacagtaatgtctgttacaacatctacattagaacaatttggaatgatttctaaagacacaaataagcagatggaatacacaaacaaagttgctgacgtgctaacatatgtagctgataaaacagcggctggattctctgatatgggaacagcaatgaactatgtcggtcctatttcgcattcgctaggatattcacttacagatacagcagcagctgttggtttgctttctaaccgcggtattgaagggcaaaaggcgggtaccggcttacgggggatgcttacaagtttgcttaaaccttcaaaatcagctgcagaagcaatgtctgcagttggattaacaattgaagataacaacggcaatatgaaaactttgccaactttgttggatgatattaatgataaaacaaagaaaatgacgaaaacacagaaaaactctttcttgacgatgattttcggacgtgaacctttatcagctgttaatacgcttttggaagcgggaggcgattctctacgtaaatattctaagggcgctgatgaagcaaatggatatactaaacaagttgctgataatatgcgaaaagctggtaaatttggtgtggatcaattcaaagcttcgctcgaagtattagaacagaacgtaggacaaaaattaatgcctgccctcactccaatcatcgagtgggctaataaaatgattgataaatttaatgacctttctggagaacaacaacaaaacattataaaatgggctggaattattgcagcaactggtcctgtattaacggttggcggaaaactagtatcaatgactagcggactaataaaagggttcgcggggctaggtaagatattgggattgggaagtaaattaacttctttggcagctgggtttggggctactacaacagcggtagaaggaactagtttggcagcggcaggattagcgggatcgtttggagcgttgccagctgtcattggtctagcaggcgcagctttacttggtgcagggatctatgcgttagataaacatataagtaaaattgaagagagtaaagaacgtgtgaaaacgtggggctatgacattggcgccgaggcagataagtctatggtgaaatttaatgagtttgcatcggaaggtacactggcattagacacatttgcatcaggagcaacggcagacagcgagaaaattgtcagtgcattcaaaaacatggcggacgaaattaagaagaatacagacgatgcattgggtgacttcaagaaagcatatgatgaagcttcacctgctgtacaagcgttactagacaacgccatgaaagattctgaaaagagagcagaagaaagaaaggcaaacgtagattcgcaatataaagaaatagaaaagatttatcaatctcatgcagttaaaactggcaagatgacatctgaacaatcgaaaattgttaacaatatttacaaagatatgcagattgaacaaattgaaagtttaggcttaagcaacaaaaagaaaacacagctgataaaagcgatgaacggtgaggtacagaatttaagtacaaaagcactcactgaacaagctaactatcttggtaaagtcacaaaagcaacaacagatgagacgaagaagcaaaagaaagcattcaaagaatcttatgataaaggattaatagacaaaacggcatacaataacgcaatgaaccaactggatagagatcagaatggaacagtgcggtctagtgtaacggctttgatacgaacgcaagaacaactatatgataagttaaatgtaagtagtgatgtagctcaaaaaaacatccgacgcggattaaaagatatgggactagattatgacgaatttacacgtgatgtacaagaaaaagcgggcaaagctgacgaagccagcaagctaattggcgatggagcaaaaatggcagataccgcatggaacaacttagtattagaccctaaaacttctgaaataagagacaatgttggtgaattcgtatccaatttagctaaaagtgatgatggttggaataatctgaaattcatcatgaaagaagcaaaattaaccacagatgctaagaaaacaattgcaactgcaactattgaaagtggtcgttgggataagatgactttcaacgaaaagaaattaattgtcagttacgaggactctatacatgtagctaacgcgctgtcagatttaggtatttgggataaattgaagcctgaacaaaaaagtatgattgcgaatgcagatactagccttgcgctacaaaaagcactacaagacatgggtgtctgggacaaattacctccgtccatgaaaactttagtagttgataattctgatgtgttaaaaaagcttaattcatctaaaggaatgattgtggaatacaacggcacaaaagtagatttaaaatcattgctagcaacgaatacagatgttaaaacaaaaatcgagcaaggtaaaaatgtaattgttgagtataacggtcaaaaaataaaccttaaaaatctttatgcgaacaatagggatttattgagtaaggttcaagaaggcaaaaataatatttattcttacaatggtacaaaagtaagcaaaaaaacatttactgcgcttactaatgctgatactgttagagatttacttaataacatgattgcggattgggggaaaatacctcaaagacaacaaaaagttttagaaattgcgtataaaacgaacggtaaaagtcctagtgggattcaagaggtaggttatgcaaaaggtacaaataaccatagtggcggaccagctctggtaaatgatgcaaggggaagtaactacgaagaaatgattactacacctgacggaaaaagctttgttccaaaagggcgtaatgttcttcttgatctaccacgaggcactgaggtattgcgaggggataaaacagctaaagctttgagaaacgtaccacattatgcaaaaggcacatctaaacaaactgcgtatgccaaaaatgtaaataataagattgctaatgtacagacggattataaaacgggggcaattaacgcacaaggatatattaataagcttaagcaaattaataagcaatataccttgaatgaggcacagacacgtaaaataaggactaatatagctgctgcaaataaagaaattagtacgcaaaaaactaagcttaatcaagcagttaagtcatctacacaaaagtactatgataacgtgaaaaaagctaacgatgaagcaaaagcaagcataagcgaagctaagaagacatataacgatgctttaaaagctaatcaagaaagcgcttatagccaaataagtttatttgatagggccaaaacagataaatacgctggtagtgatttattagcaaatttgaggacccagacacagcaacaagatgaatttatcgctttaataaataaactaaaaaaacgtaaagttaatgatggcttggttaatgaacttagagaacaaggtttaagtgctactggacaaattagcgcaatcgcaaatatgtctgataaagaactccaagcatatcaagctgaatggtctaaaaaacataaaaacgcaaatgctattggattagatggatctaaatctgaaaaggttactatggataaagctattttagcagctaataaaaaagcgactacaaacattgcaagtgcaaaaaatacatggttaaaagagttaggagacgcaaaacaatttaaaactgctggttcaattcttggtactcaaactgttgcagggattataactggttttaaaaacatgaatggtcctttacaaaaagaatcatcaaatatagctaaaacaatcgagaacacaataaaaaaagaactagatattcattcaccttcaagaaaaatggaaaacgaagtaggttttcaagttattgcgggagtcggcgtcggcatgcggaagaatgctaatatcattagcatagaagcagctagaatgagtaaaaatcttactaattcgattccgcgcatcgatgttccagtgacaccaaacactcaagcaataaatgcatatcagtcagatagtaataagttagtgagcaatcaaaaaaacattgttgcaaatacacaacctattcaagtgaatttagtattaccggatgatagcagtacgccagtcgcatcgtggttaataaatgatattgatatgctattaaacgctaaaacaattatatcgagagcgaaggcaggaggttaa

SEQ ID NO: 689 - DNA, 6392 bp, Listeria innocua
gtggatgcgccagacaagaaagcgggagaacaagcaccaacagaagttaaagaagaacgaacagaaaatgaagtggtttttgataaccacgacgggagctttacaaaacaaatctttgcggatcctatcaatatggaagttgacggggatatgaagcgcatcgatgcgaatgtggagaaagaagcagattctgacatgattgttccaaaacaaaccccattagaattaggcttcttagaaaaaatggaagacggggcatatcagaaactaacaaaagctggcgcagaagttacttttcgcttaaaaggagcacgtacaggcgagaatgaacaagcagtaacagaccaaccagcgacctacaaagaaaatgaagttacttatgaaaacgtatttcctagaacagatctaaggcatttaacttttccacaatcagttaaagaagacttagtactacaggaaccaaatcaagtagatacgtatgtttatcaaattgaaacaaaactagatttagaactagcggagaatggcgatgtgctattcaaaaataaatccgacgaaacaatgtatacgcttccaaaaccagtcatgacagattccaatgtcggcactgaaaccggggaagcggcacaatccgaaaatgtttcctttaaagtgaaacaactgaccaaaacagtgtatgaactacaactaaaagtagatacagaatggctaaatgatgacgctcgcgagtaccctgtctatattgatccatctgttcgtttagataaaatttataatgccaatattaattcggctaaaccaaccgaaacaaatattggtagtaagctatgggattctggtcaaaatgcttatacgttaaaactcggtaaatgggacaattcaacaggaaataatgccgcttttttaaaaatggatacatctactttaaataaagcgactatttctaaagcaacattgaaagtctataacatttggcatatgtccccaacggttaaaaatgatctttggtattacgaggcaaatgcaaaatggtctccgtggcaagtgacttggaatacagtgccacctgtaacgagattagggagtgttaacgttggtcgtggtgagtgggcgaacttagacgtaaccaaaactgtccaagcatgggcaagtggctcacgagtgaacaacggttttcgcttaggtactaacattaacaaaaactattggaaaaaagttgtagcaagtgaaaacaataaaaattatccctatttggaagtgaattatacgtacgcacaaccagaaaaaccaaccgtgaaaacaagttcaaacggtgttggaactggaacaggatacatggatttatcttggaaagcggttcctggtgcgactagttataatattgttatttctaatggatataaatacgaatattttaatacaaaaagtacagcaaccacttggagtaccaaaggaaagaaaattttcccaacaaatgacgaaattgctaaaggagaatttgaattccatcatgatggcaaaggaaccgacttcgctcttgatccgcgagcgcaatatgaaaatgcctttcaagccggaagtacttttggacttcgtaatttaacacgctatttattcagagtacaagccgttttcccgggtggagaaagtccgaattccgacttagtattcgcctacatgccaatcgagaaaccacaagctcctgttgcaaaagcgtattctaacttggcacataaagaaacaggatacgtggaacttaactgggaaaagagcccaatggcagatgggtataaagtacttgtctttaatgggaaagcctacgaagaatacgatgtcggcgcagaaacaaagtggacgacacaaaacaaaggtatttggccaaccaaagaagaaattgctgaagggaaatacgctctacaccatgacggaaaaggcgcagaactcgcaaaagacccttccccagtgtataccaattctggcggaaattataaagagcgcacaaactactggttccgcgttatcgcttatcaaaaagcaggaaataacacaactagcgtgcaatcagaaccagccacaccatctattccagaggcactcaataaacaactaggaatggttgattactggacaagtgtgccagttcgtggcggcgaagtgaatgctacaaacggaaactttttattccatgaaacagatttcaacttagaagggcgcggtccaagcattaatgttaaccgtacatttaatagccaagatgatgcaactggcattttcggtaaaggctggacaagtacgctcgaagaaaaactcgtagaagaagaaaacggtaatatcgtttgggtggaatcggacaagaaaatccatcgtttcacaaaaaaaggcgataaatacgaagctccaccaggcatttactccgagattactaaaaacgcagatggctatttgaaaatagaagaagataagtcagaaacacgctttttagttgatggacgattaaaatccgaaaaagacacaaaaggtaacgaattaacatacgaatatactgacggcaaactcacaagcttgcgcgacgcttccggacgtaccgttactctcacgtatgaaggcgagctcgtaaaagaacttgtcggaccagaagaccgtaaaatcagctacacgtataatgacaaacaggagctaatcagttcatccacagcccgcggaaaattatatcgctacggctacacagatggcttattaacctcgatttacgatccaaaacatacagaagaaaaaccatacgaaacaacttttgcctatgaagaagaaaaattaacagaaataaccgatccagtcggcaaaaaaacaacactttcttatgacaaagcagaacaacaaactactttaacaaacgagaaaaagaagaaaaccatttattcctacaatgatgctggaaatccaaagaaagaaattgtagatgcagatggtctcaaactcacaacgacctacacgtatgaatcaaataacttagtaaaagaagtgaatcctaagggacaagaagaaacgtacgcttacgatgcagatggtaatattacgaaagcgacagatgcatacggaacagaatcatacacttacaatgataataacgatgtaacgagctcaaccgatacagaaggacgaaaaacaaccgttacttatgacggagcagatgcggtatcagaaacacttgcgacagaatcccaagtatcctctgtaacacagtatgatgcctatggaaacccaattcgcggtagtggcgaactttcttccggcggtaacttacttcaaaacagcggctttgaaaaaggagcaggagtttccaactggacactgattcaatctgatgcaaaaggaagcatgacattcgataacacacagtcagctccaggagcacttggcggcagcggttccgttaaactaacgagtgaagcaaattctaccgtaaaaggctattcatccgttacccaacgcgtcgatgtagaaccagaaaccacgtatacatttagcgcctggattaaaacatccggaatgacaaacgccgatgcacttctcattggccgtttacaagatgcgaatgcaaaagacgttaccgatgccggcgtatggcaatccaaccgcgccacatcgatcaaaaagaacggcgactgggtaaaacgccaactaacctttaaaacatctaaaaacacgcgccaagtcttgctttatttggacaacgaacaaccagctccacataaaggaaaaggaacgatttggtacgataatgttcaatttgaaaaaggcagtgttgcttccagttacaacccagtagtcaataacagctttgaaaatcataatggaacacttccgactggctggatgcgtacaggcaataccgcgctgacacaagcaaaagtagtcgataatcaaagccacagcggtgatagcgccgtttacttcgagcgaaaagcaacaagtgaagcttacacgcatattgtccaagatgtacccgtaaatcaaaaagaagccaaagcattaacaatttccgcactatccaaatcagaagacgccaaagcaaacggttctgttgcaacgatgtcgaacgattattcggtatggggcacagtatattatcaagatggcacaacttcttctgtacaaggtcaattcccactcggaacgaacgactggaaccgaagtgctgtagttgttaaaccgaccaagccagtcaaaatgattaaagtttacaccatgttccgcaatggtttaaccggaaaagcttggtttgacgatgtacgtgtcatagaaggcgaagtattaacaaaaaatgaatatgacgcttccggaaactatgtaacagctagctatgacgaagaaggccgcaaaatcagcttcacttacgatatttacggcaataaaacatccgaaacagacgaaaaaggcaacaaaaaaactttaacttatgatgcagacaacgcacttatagacaccaaactagcgaacggcacatccgtagcctataagtacgacgacaatggcaacaccaccgaaaaaaatgtcactgcatctggcaaaacgcaaaaaaacatctatgaatatgacgtagataacaaaattaccgcatttaccgacgcactcaatcgcacaatcaagtacgaatacgatgcagccggtaatgaaacaaaagcaatcatgccaaatggtcgcgtaaccgaaagcacatacgattccgctgaccgcatggacgggattaaatggaatgataaactagcatttaaattccaatacgatccaaacggcaaccaaacaaaagtaaccgacgaaattaacagcatcgtaaccgacaaaacctacgacgatgccaaccgaatcaccaaagtagccgaacgaggtggcgacgtaagctacacatacaaagacaaaccaacaaaagacaacaaagggaaaacagacaaagtcggcgaagtagccattaaccacggcgactacacagcaaaaacaagctacacatacaacgacttagaccgaaatacccgcgtaaacgatggaagcaaaaatgcctattttgagtttgacgaatttggaaacatcaacgtctacacagcaggaaacggcaccgcagccaactacacctacgatagcacgcaaaaagtcaccaacgcagctattagtagcgcaagcggtacccaaattttagacgaaaactacacctatgacgcagcaagcaaccgcacaagcattgacaacaaacaagacggaaaaacaacctacgaatacgatgcagtcaaccaactaactaaagaaacactaccagacggcaccgtaaaagcatacacatacgatggcttcggaaaccgcacacaagtagcaatcagcggaagcgagacaaaaacaattgacgcaagttataatgatggtaatcaactagtttcgtggaacggagaagcgctgacgtatgacgccaatggtaaccgtacaagcgatggcaagtacacgtatacatgggataccggggaccgtttaagcagcatcacgaaaaaaggtgagagcgagccgtttacgagttatacgtacgatgatgataaccgccgcttgtcgaaaaccgtcgatggcgtgacgacgaattatcattatgacggagatagtattgatgttctgtatgagactgatggtgatggaaaagtagttcgtcagtatgtttattcggatgataatgttcgtttagcgatgaagatgaacggcaaaaccctctattatcactataatgcgcatggcgacgtgattgcactcacggatgaagcaggtaagattgtcgcagaatatgcgtatgatgcttggggaaatgtgctgaaaaacactgcctctacagaagaagccaaagcgaatccttatggttatgcaggatacacgtatgacaaggaaatcgaacaatattacttgatggcgcgttattacgaaccagagcaaggcgtgtttaccgcttacgatccgtacccgggcgatgaagatgatccgcaaacgatgaatgggtataattatgcgaataataatcctgtgatgatgtttgatcctgatggtaatgttgcatggtggattgcggcagcaggttatggggcattcgaaggtggggcagaatatttattaacaactaagaagaagaattggaagggttttggtaaagctgttgtaaaaggagctgttttaggtcttggatttggtaaattatacaaaggttttaagtttttaaaatcaacaaaaattgtaagaaaaaattcaaaaaaattcaaaaaaacaaagatatataaaaaatttagtaagaaaaaaaaggttgttaataagccctcaactaaacgaaaaaaggctaagaaaaaaaagaagagccgaaaaaaagggcatta

SEQ ID NO: 690 - DNA, 2022 bp, Listeria monocytogenes-EGD
atgaaatttaattggaaagtagttctgctgtttgttttaattttagcatttattgttccggtttattcgaaggctgtagaaacaggaaaagaagtacctaagagtccggaactactagatgataagtcatctacgttaaaaaatgtaaatacacctaaaaatttgaaggctagcccgctaacaattccagcaaatagcacgatagcagatttgtttcccgatgaagggatggcaaaaactatcgcaaaccaactaggacgaacagaaaataacaattttcaaacacctactaaaacggattggaaagtggatgatgttgttactgaggtagagttaaatagaatgtggtacttaacttcagttgctactataggaagtatcgaaggcattcaatatctacctaatctttacgatgtacggttacagtttgataaacaatgtaaggatttatctccttttttaaaggcaccaaatggatactcgcagttatatcggttaaatattaataatggtaatatttcagatatttcacctcttactgaactgagtgcaccaacgcttaacgatatagacttaggaggtaataacatttctgatttatccctttttccaaagctgcctaataaattccctaatttagaagaaatatctttggaaagaaataatatatcagatgtttcgccacttgctaaatttgccagtactaaaataaagatatttaatttggatgagaatcatattactgatttatctagtcttacaaataacaaaatgcctaatttacagcgattatatgttcgatatcaaacattagatatggaaccggtagttacttctagtaagtatgaattttctatacagccatctattttcggaacaaccaagccagttaaaataactgctactaaacccaaagcaactattgatcctattacttctaaaattacatattcagcagaagaaatggctaaaaaaccgttttattacactcctttgtttccaggagttacctattcgtgggacgagaattttccgttaaatggtagcaatagcctagtggacttcaggggtacgattactcaaccattaacttatattgaaccaccccaagttgtgtcttacaattcaggccttacttatgagataggtacatcacttacggaacaacaatttctaaacgatgtcaatttgataacagatcaaccaacaacaattacaagcgattttgatgtgaaactaaagaatctaaacactgtaggtatttactgggttgctgtcaaagcttctaatattgaaggaaatgcggaggccaatattatggtaacgattaagtataagccaccagtcataactgcagatgcagaatacacctatttagtaggagataaagtaaatgctactcaatttcgagcagatgtaaatgcaactttgacaggtgaaggaacactaagagatgactttatatataaagtaagacttaatacggcgggagattatgttgtaactcttacttcgcctaaaagtggatactatgagcaagatgcaatacctgttacagtcattgttcacgtaaaagaacttttggaattgcaaatcccagatgaatttcgaatggatatagacgcaaatgcagattctgtgccaatttcagataagaaacaaacgcttaaatgttatggttcgtctggaaaggctgagttagaggtgatagatagacgaactgtgcggcaaggatggacgataaccggagcgatgacaccctttaccaatagcggcggcgatgtgctacaaacttcgctaaaatatcaaagtaaagcaccttccagcagtccgatttacttaaatacaacgaatcaaccaattgaaaagaaacaatcagctgtgactgacccgaaatatgattccactgttttcaatctggaagacagtttatccatggaaattgagccaaatgatgcgctagtgaacgattcctatgagtcgaaaatcacgtggacactggaggatgcgcctcgaccataa

SEQ ID NO: 691 - DNA, 1251 bp, Listeria monocytogenes-EGD
atgactttatatagacagttacttgctcgtgagaacgaaaataatccgattcgcgttggtgttatcggcgctggtcaaatgggattcggtatgatttcgcaaatcgccgctattccaggtatgagtgtcgttggtattagcgatattcatgtagaagcagcacaaaaagccgcagatgcttacaatgccaccgctacaaaaaaagaaaaaattctattatctaatgactttaaagaaattattcattctgatcttgtagaagtgattgtcgatgctactggtgttccagaagtcggcgcaaaaatttccttagaaactttacttgctaaaaaacaactcgttttacttaatgtagaaattgatattactatcggaccgttaatgaaaaaattatatgacagcgctggcctcgtatatactggctccgatggcgacgaacccgctgcaataactgaactttacgaattttccaaatcaatgggtatggaagtccttgtcgctggtaaaggaaaaaataataaacttaaaatcagcgctaaccctgatagttgccaagtggaagccgacgggaaaaacatggcgtctcacatgctagcagctttccaagacggaactaaaacaatggcagaaatgaacttactttctaatgctattggctatgtaccagacgttgttggaatgcatggtatttctggtgatgttgattctgtcatcaaagacctagacttaaaagaccaaggtggtattttaaacaaatttggcgttgtagaatatgtagacggtttggcacctggcgtattcgttatcgtcaaaggacaaaatgaaggcgttagtcacgaacttagctacctcatgaaaaaaggcgaccgcgatcatcacatcctttatcgtccttatcacttagcaagccttgaaacacctctaaccattgcaaaagctgtgttgaaccacgatcacgctattgttccaatgggcgcaccagtttccgaaacggttgcagttgctaaaaaagacatagctgcaggtgaaaaattagatggcattggcggtttctgtgtacgcggtgtacttgaaactcacgtcgatatggcaacgaatggtcatattccaatcggcttgattagcggtgaggtagtagcccgcagaaatatcaaagctggcacatttattactgacgaagacgtttcattagatgaatccactactgtttggaaacttagaaaactgcaggatgaaacatttagtaaataa

SEQ ID NO: 692 - DNA, 1332 bp, Listeria monocytogenes-EGD
atggcaacgcaaaagaatttagttgatttagcaacaaaagcttatatttacggttttcctttcatttttaatacacaacaaatcgagcgttatgtaacggtagggattggtggaacaaagcaagttcctttcaataattttactcatgcatctcgcttggcagaaccgtctgataaatttgtcagtgtgaacaacgatactatttattctaatgcaccaattgatgttagtgccggaccggtcgttttaagtgtacccgatacaagtggtcgttattatgtacttcagtttgttgatgcatggtcaaacaattttgcttatgttggaaaacgtgcaacggggacttcagctggcaaatttcttttaactcctccaaattggaacggtgatgttcctgctgatatgatagaaattaaatttcctactaatatagggattattattggccgacttgcttgtgacggtgaagctgatttaccaactgtaagagaattacaagaacaacttaagataactcctttaaatgaagggaaagaagtggatggttttcctgaatatgatcgctcactaggaaaagagctagctttctttgaacaattacgagtttatatggctcaatttccaccagcagaaagagatttggttaagcaagaaagttttgcgccaattggtttgatggaaaaaggggtatctccttatagtaacccgagtgaagaattaaaaaatgcccttatagagggagcaaaagcaggtttagcgaatatcaaaaaagcaacaaccaattttaaatcagaaaatggctggggattaacacaacatttatttgattataatgctgatttttttgaaataggaacgaaaaaatctttagactgggtaattgaggaccgtgaagaagcatacataattcgtgcagtttcagctattacggcattatggggaaaccatggctatgaagcggtttatttgatgacatggacagacacagacggtaatgccttaaatggaaaaaataaatatacattggagctaaatccaattccgccagttgactcattttggtcgattacgatgtatgacttgcctgaatactttttatgtgagaacccgattaatcgttactcgattggagaccgtacgccaggtatacaatataatgatgatggcggtatcactatagtggtttcgaaagatgagccaactgacccgaaagaacgtgcgaattggttgccagctcctgatgctgagttcagaccaatgttccgcttatataatccgcaacaaccactcgtggatggaagctatcattttccgggatttgaaaaaaagtaa

SEQ ID NO: 693 - DNA, 1149 bp, Listeria monocytogenes-EGD
ttggaaaataagacaaggctttggacgaaggactacgtatttttattgttaggaagtgtacttttatatattggatttatggtgtttatgccgacgttgccggcccggattattgaactaggcggaacacaaatgcaagcgagtttggcggtagggttgttttcgattgtagcactactgatgcgagcgattgcgggaagttggaacgataaatttggcccgaaagtacttattattgtgggctttttgattttaattttaactacagtaaacttttattggtcgactgcggtggctgcccttcttatattgcggctttttcacggggctggctggggtatcggaacaacttccattgcaacaggcgtttctaaacttgtgccgccaagcagaacgggagaaggtattggtttttatgggcttacgactgcacttggaatgtcacttgcgccgattatcgctattttaattatgaattatttttctttcgatgttttagtgacattttcgcttgttttgatggtatttattttaattttgatgacacaggtgaaaattccaaaatcagaaaaaattgtacatcaaaaaatgaaattgtttgagaaaacggccttgcttccggctggcttgtgtttattaatggctattccgcttggtgggatccagacatttatgatggtatatggaacagaactggggatttcgacgacgtggatatattttatcgggcaagcgattatggttcttgtgagccgtttgtttgctgggcgactttatgatacaaagggacaccgttttgttattattccaggagcgctttcgatgataattgggatattaattctttcttttgcaactggggcaatcagtttgtttatcgcatcgctattctttgggctaggttacgggatgtcgcaaccggcgcttcaagcactagctgttgaccgggctgcaccgcacaataaaggtaccgcgaacgggacttttctttcgggaatggacattgggatggctgttggtagttttggtttgagtattgttgcgacttactacaattatgctattatgtatcgcacagcaattattgcacttgttgtattttttgccgtgtattggtttactttaggacgaaaagtgaaaaatagctaa

SEQ ID NO: 694 - DNA, 2556 bp, Listeria monocytogenes-EGD
ttgaaaactactaaaatagtaattgcctcattagttagtttaaccatggtttcaaacccgcttttaacattcgcagcaacgaatgatgttattgataatacgacagaaatcactactgataaagaaacaagctcaactcaaccaactataaaaaacacactcaaagccggtcaaacacaaagttttaacgactggtttcctgatgacaattttgcttcagaggtagcagcagcatttgaaatgcaagcaactgacactatcagcgaagaacaactagctactctaacaagtctagattgccataattcatccataaccgatatgactggtattgaaaaattaactggtttaacaaaattaatttgcacaagtaacaacattaccacccttgatcttagccaaaacactaatttaacttatctggcatgtgattcaaataaacttacaaaccttgacgtaaccccgcttacaaaattaacctacttaaattgcgacacgaacaaactcacaaagttagatgtaagtcaaaatccactgttaacttatttaaactgcgcgcgcaacaccttaaccgaaatagatgtcagccacaatacacaattaaccgagctagactgccatttaaataaaaaaatcaccaaattagatgtgacaccacaaactcaattaacaaccttagactgtagctttaataaaataactgaattagatgtaagtcaaaataaactactgaaccgtctaaactgcgacactaataatataactaaactggacctcaaccaaaatattcagctaactttcctagattgctccagtaacaaattaaccgaaatagatgtaaccccgcttacacagttaacatattttgattgtagcgtaaatcctttaactgaattagatgtatctacgctttcaaaattaactacactacattgtatacaaacagatttattagaaatagacctaacacacaacacacaattaatatattttcaagctgaaggatgtagaaaaataaaagagcttgatgtcacgcataatacacaattatatttattagactgccaagccgctggtataacagaattggatctttcacaaaaccctaaattagtctatttgtatttaaataatactgaactaacggaattagacgtttcccataacacaaagctgaaaagtttgtcttgcgtaaatgcgcacatccaagacttctcttctgtaggtaaaattcctgcccttaacaataattttgaggctgaagggcaaacaatcacgatgcctaaagaaactttaacaaacaacagcttgaccattgcagttagccctgatttattagatcagtttggaaatccgatgaatattgaaccgggagacggcggtgtgtacgaccaagcaacaaatacaataacttgggaaaatctcagcacagacaatccagccgtaacctatactttcacttccgaaaacggagctatagtaggaaccgtaacaactccatttgaagcacctcaacccatcaaaggagaagacgtcacagtacattaccttgatgacaaaggagaaaaattggcggatgatgaagttctaagcggtaatttggacgatccttatacttctagcgcaaaagacatcccagattatacattaacgactactccagataacgcaaccggaacattcaccactactagccagtccgtaacgtacgtttacactaaaaacatcgtagccgcagagcctgtaaccgttaattacgtggacgatactggaaaaacgctctctccatccgaaatattaaacggaaatgttggcgacacttataacgccactgccaaacaaatcgacggctacacattatccgccgaaccaaccaatgcaactggacaattcacaagcagcgcgcaaaccgtcaactatatttacacaaaaaatccagcccctgaaaaaggagttgtagaaattcactatgttgacgaagataataaacaacttaactccaccacagaaatttctggaacaataggagataactacacgactgagccaaaaactatcgaaggctatacgttaacaactacaccgggtaatgcaaccggcactttcaccacaggcagccaaaccgtgacatatgtgtatactaaaaacatcgaagcagcagagccgataacagtgaattacgtggatgctaatggcaaaacactcgctccatccgaaacattaaacggaaacgttggcgacacatataaagcaactgccaaacaaatcgacggctacacattatccgccgaaccaaccaatgcgactggacaattcacaagtagcgcacaaactgtcaactacatttatacgaaaaacacaaacacagatcaacctttaccaactaaaaaacctacgaacaccacaccaaccaagccatctaatttaaagacaaccgaagtgaaaaaagcttcagataccctaccaaaaacaggcgattccgcaccatggaaatcagctctacttggggtattcctatcatccacagctctagttatctggaaaaagaaaaaatag

SEQ ID NO: 695 - DNA, 381 bp, Listeria monocytogenes-EGD
gtgaaaaagagatggataatagcaacggtagttctagtaatgattgttgcgggattaggcgtgaaattttatatggatgaagaaaaattaaataaagaaatgataaatgtagtttatagtgatgaagcgaaaagagtttttgaaaatgggttgaaaaatttggatgctgaagcattgactgggaagggtgtaattaacacatatgaaattgataagaaaagtatcaaacaaaaccctatgggaggaataaatgttactttgcatgttaatggagattctgagttatatgttttttttacattgaataaagctgatgacaaaaaactaattgatgatggtggcggaaattctgcaaaattagaaaaattattagacaactaa

SEQ ID NO: 696 - DNA, 2466 bp, Listeria monocytogenes-EGD
atgaaatctaaaaataattatttcaaacaaatcaccaccataatgaccgtcgtgagccttttaattatggtgttaggtattcaaggtaataatgatgttaaagcagcgccacaggtcgcgccaccagcatcaattaatcaaatttttcctgatgcagatttagcggagggaatacgagcggaacttcaaaaatcaagtgtcacagatgtagtaacgaaagaagaattagaaagcatttcgcaactgtcggtatacgcgaaaaaaatagcttctattgaagggcttgagtatttaaccaatttgaaatttttaaatcttaatggaaaccaaattacagatctcagcccattaagcaatttaacaaaactaacggaaatttatattggtgataataaaatttctgatattagtccgcttcaaaacctaactaatgtgactgacttatatctagtagataatgatattagtgatttaaggccattagctaatttaacccaaatgtatagtttgcgtttgggaggtaattcgaatattagtgatttaaacccagtgcgaaatatgacgcgtttgaataatttagaagtaacagggtctatattaaaagatttgacgccgctagccgatgtaaccagcctaactcgtttaacattgagtgacaatcaaattgaagatttaagtccactagctggcttgacaaaattggacaatatagcagcatattcgaataaaatcactgatattactcctgtgaccaatttaacaagactccagtatttggatttaggtagtaatgaaatcactgatttaagtcctgtggctaatctgcaaaaattaacctcgctacatcttgcaaacaaccagattactaatattagtatgcttgaagatttaacaaatttaacttcgttgggtttacaaaacaataaaattagtgatatatccgttttgaaaaatctaacccatgtgacttatttgcagttggggtataaccaaatagtggatgtgaaaataatcggaggactaactaatttaacaagtttgcagttaacacaaaaccatattactgacataagtcctttagccaacttaaccaaaatacaatactctgacttctctaatcagatgataacaaatctagaacgtaatttttcgaagacactctccgttccgaacaatataactagcatagatggaacgctaattgcgcctgaaacgattagcaataatggaacctacgacgcaccgaacttgaagtggtctttaccgaactatttaccagaagttaaatatacgttcagccaaaaaataccgattgggacaggcacaagtaattatagtggcttcataacacaaccgttaaaagaattactagattacaaagtcacatttaatgtagaaggtaatacaagtgaagtagagactgtaacagaagaaaatctcattccagaacctacgagcccaaccaaacaaggttatacatttgatggttggtacgacgcagaaacaggcggaacaaaatgggacttcacaaccgggcaaatgcctgcaaatgacctcacactatatgcccatttttccgtaaatagctaccaagcaaattttgatatagacggtgtggtaacgaatgaagcggtagtatacgataccttactcaatgaaccgaccactccaaccaaacaaggctatacatttgatggctggtatgacgcagaaacaggcggtaataagtgggatttcaaaacaatgaaaatgcccgcgaatgatgttgctttttatgcacattttactatcaacaactatcaagcaaattttgatatagatggtgaggtaaagaatgaaacgatagcatacgataccttactcaatgaaccgaccactccaaccaaacaaggttatacatttgatggttggtatgacgcagaaacaggcggaacgaagtgggatttcaaaacgaaggaaatgcccgcgaatgatgtcactctatatgcacattttaccatcaacaactaccaagcgaactttgatatagatggggcagtaacagaggaagtagtaaactatgacgcgcttattcctgaaccaacatcaccgtccaaaacgggatttactttcgaaggttggtatgacgcagaagttggcggaacaaaatgggattttaaaacgatgaaaatgcctgcgaacgatattactttgtacgcacatttcagtaaggaaacaccaattattcctagtccagatgaaggattagactctgattctaccaatggaccaattactataaatgaaccgagtgctactagtacgccatcccaaaataataacatcacagtaacagcaggggaaaatactacagaactagcaacagctaaacttccaaaaactggagataatgccccgtggaaaacattgtttgccgggatattactttcatcatccgcgttttatatttggagaaaaaaagcataa

SEQ ID NO: 697 - DNA, 762 bp, Listeria monocytogenes-EGD
atgaaagtacaacgcattcaagcgattgagaatttaattcacgaaaaaggcagtattagcctcgatgatttatgcgaacaattcaacgtttccaaaaataccgttcgccgagatattgccaaacttctccaaaaaaacaccatccaaaaagtctatggtggcgtcgtttctgtttataataatcccgaagaaatccgcccgtttgaaaatcgcgatacggaaaatcatctagaaaaacaacttatcggaaaagcggcggctgattttattgaagaaaatgatttgatttttattgattccggcacaacaaccagctgtctcgctgcggctctgccaacggataaggagattactattattacgaacagcctagatgtgatcaattttgcgagtgaaatggataatgtgaaattgattgttattggttcgacttttaaaccgagtactaaatcttttgttggcgtggagaactggggattttttgagaaatataatattacgaaagcattcatggccgcgactgcgctttcgactgcgcatggggtgatgaactcggatattttggagtatgagattaagcgccatatgatggaaaaagcgactgcgaaatttttgctggtggatcatacgaaggtggataagtcggctttgcttacatacggggagttggcggaatttgattggttggttacgtcgaaggacatagctggtgggtgtttggggtattgtgaggatgttggggttttggtgaggttggtttag

SEQ ID NO: 698 - DNA, 387 bp, Listeria monocytogenes-EGD
atgatcaatgaacttcaaaagaaaattgatgaaataaattactgggatttactagtattagacattcaaagtaaatattttggtgatgaagtatatatttatatagaaaaagatgaggagatttgttggaagctatcatttacttcctgctataaagtttcctatgagaccgatgcaaaatggcgtggagatttcaaagttagaaatacagggccgaaatcaggctattatgctcaagacatttcgttaaatagatatgcggaaaatgaagactttattgaatgttcttttgatgcatcaattatgacaatgaatattatttgtaaggaaatcattgtagaagaagtaagtgtcatagaaaattcgtttttttggaaaaattattaa

SEQ ID NO: 699 - DNA, 630 bp, Listeria monocytogenes-EGD
atgaataaatttaaaatcctaggtgaatataaagactggtgcgagatttataaagatggaaccctcattcataatggttcatctttagggattgtaagccaagtagagtctgaactttgtttaaggttaaattacggaacaaataaacatttctattcgatattgaaaaaatgtggtgattttattttagccgtccctaagaaagtgggatttttaaaagctgaatacaaatatgaacctattatttttaataaacaagaatttgatgaatttattgactgtatttatgtagatgaaaaattgatttctagtatacctcagttaaacaaggaagatattttaaatatgtggttcttatcaaatccactgcataaaacctatagcaatgaaatggaaatgcaggaaaatattattaataatattttattcttttctgacgatgagtatgatatatcttgtctaaaaaaggttattaataaacctgatttatcagtacatccaatagacagtaattatgaagttatcacgatttatatggatggagatgcaggaatgtatgagtggaagggcatagtaattatagataataacgcttatttaaaaattgatacacattattatataaattaa

SEQ ID NO: 700 - DNA, 348 bp, Listeria monocytogenes-EGD
atgacagaaaaagatctagaaggactcatgctaatgcataaaagaattattgaaaatttagaagaattttctatgcctgccaaacaacaaatggaaaaattaaaaggttttgtacttactgatgaattggcatcagacttttccgatattgcattacaatatgcaaaaatattatttgaccacggttggttaacaaaagaacagctagatatgttccttattgtagacaaaaaattagaaggtatgtcaaacaacgaagatttttggagtgatgaagcattagaaactagtattgagtgggctgaatgtagtaaacaagggaaagcaatattgaaaacttttaggtaa

SEQ ID NO: 701 - DNA, 384 bp, Listeria monocytogenes-EGD
gtggagataaaggttcaaaagaaattgactgacggcagaatcgcttttagtagtgaatatggtgaatgcgttggtatatgggccgatgaagacccagaaccaagtagggtttacacagtagaaattacgataccggacatgattagcgcagaactactacacgagagtgaagagaaacattgtgcactagaaatagacgaagaaggcttagttcacgtaattgggaagttagaggattacgaggaagatggctttgcagtactccgcttagaagaaagtattatttgttttgacacgaaattcagcgaagaaatcgaaatgctccatggaagatttgttgaatttgtgattccggaaataaaattgagtaatgttggtatatag

SEQ ID NO: 702 - DNA, 648 bp, Listeria monocytogenes-EGD
atgacaaccaaacgcaaagagactagagaaagtgtttgttatcgggaaatcaaaaagaagattagaaacggggaactaaagccaggagatcgtttaattgaaaatacattatcacaacaattagaaattagccgtacacctattcgaaaagcaattgggatgcttgctgcagatggatatgtggaatacaatgattttcgcggcgcttttgttcgggacagcattattaataaagaacgttactttgaaatgacagaaattattggtttgtttctaaaacaagctattcaaaaaatccgtacaaaaaaaataaccttcaataaaatgcgagttgttgcaaaattagtcgaaattgaacgtgaagaaccaacagacccaggtatttactttgaatacgaaaaatggtttgtgagtgatttattaacctatatgaaaaataattactatttgaaaattagcgatgatttttttaataatattcaagaatttggtgacgaagaagtcattaagattgctcaaaatgcttgtgttaaaacagttgctaatattcaacgttttattgatgcattagatgaacaagattatgataagtgcatggcgattattgatcaagtcattgatgcccatgtcttagtcgcttatcgttga

SEQ ID NO: 703 - DNA, 612 bp, Listeria monocytogenes-EGD
atgttattaactagaaacgaaccttttaccgcagaaaaaatacaagcaaaggcagacatccttgagctagttcaatttgaacgattttgccgcgataatgcactttgggacgcaatggaaacctgctttacaaaagattcaaacgtaaaaatttcctggtttcaaggaactgggcatggctttattgaggcatcaaagaaaatgaccaaccctgcgccacataaaatatacaatacccaagtttggattaagaacgaccgagctgtggcgataatgcaagccactatccaaacacgcaccatcataaatggagtagaaatggaacttaattctgacgccaaattagtgacacgagtagaacgaatcgatggcaaatggtacattaatgcatttgaaggagtttatgagaaagactcattgatgccagtggttccaagtaaaaatgctgatgttcctgctgagttgttagctaattttagaaaaagctatgcttgcctagcactttcattaacattaaacggctatgagattgataataatcttcccggcattgatcgcccggagcaagtgactcaatttttcaaagaagctgatgagtggttgctccaataa

SEQ ID NO: 704 - DNA, 681 bp, Listeria monocytogenes-EGD
atgaacattcgaactgaactgcaaaatagccaattatgcgaaggtataacagaagctcaattaaccgaactgatgaacaaaattacggttaaagagaagcactataaaaataatgaaattttattttatacagatgaagtaacgaaagtatatattttagttaaaggaaatgcggctattgctaaaaatacaagtagcggtaagcgaattctaggtaaaaatgtcacagaacctggggaactggctggggagatttattatttctcgcatcgtaatccattttgggactacgcgatcgtgcttgaaccgacaacagtactagaaattagcggaattgaccaaggaactcttcaaaccttagatttagctttacaaaaccaactattagtcaatttattaaaaagtgttactagaaaatttgaatatataggtgaaaaggtacgaatggtttcagaagactctgttcgtgcaaaaataagcaattatttatttggcatccaagacgatgatggcagtatcgaattaacagaaacaagagaagaaattgccgactatcttgatattacaagaccttcactttcgagagaacttggcagaatgcaaaaagaaaatattattcgtatcgaaggaagtagcgttattattttagatgcgattatatttgatacttttattgagtaa

SEQ ID NO: 705 - DNA, 837 bp, Listeria monocytogenes-EGD
atgagcgttttaaacattgaaggagcaaaattatcgtatcagaaagtcggacaaggtcctattcttatttttataccgggagcaaatggaactggagatatctttttaccactggcagagcaattgaaaacatctttttctgttgtaatggtagatcgtcgtgggtatggggacagtgagttaacagcagctataccggagcgcgctagtcatgcatatgatgattaccgagtgactagagatgctgctgatattgctgcactcgcaaaagcgttaagcgacgtgcctgtttatattttagggtcaagctcgggttcgattgttgctatgcatgtcttgaaaaatcacccagaagttgttaaaaaaatagcctttcatgagccaccaatcaatacattcttaccagattcggagatgtggcaagaagcgaatgaaaagattgtacaaactgccctaactaaaaatatggcagaagcaatgcaactttttggcgaaacacttcatattgcccccattgacgcagaaagcatgtcgaaaccagccgtaacaatagacgaagtgacaaaagattcaaccacgcaacaaatgaaatactggttcacttatgaaatccgccaatatactagctctaatatatctttagacgatttcaaaccatatgttcatcagattacgttacttaatggtaccgattcaaaaggctcattcccacaagatgttaatgcctttatagccaaacaactcggattaactatcgtggatattccaggcggtcatttaggttatattcaaaaaccagccggatttgctaaagtacttttatcaatctggggataa

SEQ ID NO: 706 - DNA, 297 bp, Listeria monocytogenes-EGD
ttggatattgccaagtggtttgacaatgccgaactttattcaatttcacaagttttaaaagaaaatgcggctcgctttgaagacgattgtattggaattatttttccttgttataattttgccgcatctcgcatggtttgcgagtttattgagagaatacaattagttagtcaatacatttttgttattgtcacttatagtaatacggcgccaatgtgcgcctctaccgaactatatgaacacttccttatgagcacctaccatttggtgggtgttttttggaaaataaatccataa

SEQ ID NO: 707 - DNA, 516 bp, Listeria monocytogenes-EGD
atgtttaagaatttatttaaaaagccgaaaatgaaggatgaaatgcttgaaatgaagcaaaatcaatacggcgcacgagcttttaatatgatgattataatagtagcaatcgttatacttatcaaagcagtggtattagaagcgagcatcagtgagctttgggttgaattattattgctcatcgttggtggtggctattatttttactcagtgctgaaaaacaatgttccatttatgccaacaatttcgctgaaacaaacaatcagattggttttcttgatatcagcgattttcggtataagcgttggtatccgcaatgtctttttcctttacgcagataatatgtcgggaaccgaattgagttatcaaatgatgatgtttttctttattagcttgtttactgcaattgggagtggtgttatatttggtgccttagcttattgcttataccaattatcgaaatggcaagaaaaaaatattatgaaaaaaattgaagtagaaaatgctgaagattaa

SEQ ID NO: 708 - DNA, 288 bp, Listeria monocytogenes-EGD
atggaaatgaacgctagttttattgggttatatgcaattacagtctattatctgtatgggtatttggaaaaacgtgaacggttagagtggttgttactattacctgttttgatggcacttactataacaattacaaatacaaacgcttattatgagaacatagtgacgaatcccttagaacaaaatattgtaagctttatcgcaagttttataattttggcagtatgtctcactattccagttagtattgtactatttttcagaaaaagaaaaggtgaggtacaatga

SEQ ID NO: 709 - DNA, 342 bp, Listeria monocytogenes-EGD
atgtatcaatcattaagtaacataataataaacttgcaagcaaataaggatttattgttacagcaagataatgaagttgatagaattaaatctattttaccgcttgtggttgctaggaacagtattattgaaacattaggtagaaatccagtttggggtatttcattaactgatgatgtgaacaacttaaagattgataatcaactagttactgaagttattccgtttgattggaacaacgaaacattgtacctatgctactttagtgacctggaaagtagtaatagtcctagtgagatgggaataagttttcagttagtaaatattttttctttgtcataa

SEQ ID NO: 710 - DNA, 300 bp, Listeria monocytogenes-EGD
atgaaatactgttgtatttccatcataatcatcatttgctattatttcaccaatgaaaaaacgaaactagattttggaattagtaccactacaattgttgaagaggttaaaaaaaatcgcgaagactattcaacattactaaataaattggcagaaaaagaattaaaaggaattactacccttagaaatttcagattgctcgtttccagcatattcctgataatagttattttactgatagcaattacttacttagcaaagaaaagacaacggataacggaagattttatcgcgaattag

SEQ ID NO: 711 - DNA, 1374 bp, Listeria monocytogenes-EGD
atgtttaatttgcaaaaaggttttccagaaaattttaaatggggtagctccactaatgcgcaacaatttgaaggtggctataaagaaggtggaaaagggctttcgattgcggatgtgagggttattccagatatgccagacgaatctgattttgaatcgttcaaaacggcttcagaccattatcatcattataaagaggatattgcttattacggggaaatgggcttccaaatttatcgttttacaatggcttggtcgagaattttcccgaacggagacgaaacagaaccaaacgatgctggagttgagttttatagtaatatgttggcagagttagaaaaatataatatcgaaccagttgttactttatatgcttatgatatgccgttacaactgcttgaaaaatataatggttggctagatagagcaattatcaaagattacctacattatgtagaaacggtcgtgaaattatttaaaggtcgagtgaaatattgggttcctttcaacgagcaaaactttatttcgattgattctgaatacatgagtggttatcgtgctaaaaataaagcagaagttttccaaattcaacatcattttaatttgtgttatgcagaagcaacgaagcttgtacaccaaattgatccagatgcaaaagttggtggaaatattggtaacatttgcccttacccaatgacttgcaaacccgaagatgtcgaagcaagtgacaaagtagcgcaacagttaggttatgcttatggagatatttatttcagaggatactatccaaaatacttccttaaagaatatgaaggcgtagattttgagcaaatcattttagatgatgacttaactattatcaaaagttctgagccagacttcatgtcgttaacatactatatgtcgagtgcgattgaagcaaaaggtgaagaggaagttgtggtaatgaacgggatcaaagcgccaaacccatattgtgaaacaactgaatggggttggacaattgatccatatggttttaaacattatttgcaagagttctatcatcgctatcaattaccaattctaattctggagaatgggatgggtgcacgcgacgaaaaaaataccgatgatacaattgatgatacgtaccgaattgattatttggcttcacatattgcgcgtatgcaagaagctgttgaagaggggtgcgaaattattggttatcttacatggtccgcaacagatctttattcaacgcgtgaaggtttcgagaaaagatatggctttgtttatgttgataaagataatagctataaacgtttgaagaagaaaagtttctattggtataaaaaagtaattgaaactaatggaaatgatttaaattattaa

SEQ ID NO: 712 - DNA, 1854 bp, Listeria monocytogenes-EGD
atggattatcaaaaactagctaaagagattctggctaatgttggcggagaagaaaatgtgcgctcagtggttcactgtgctacacgacttcgcttcaaattagtaaacaaagaaaaagcagacaaaaaacaaatcgaaagcatatcgggagttattagtgttgtagaaaatgctggacaattacaagtaatcattggcaataccgttggagatgtatataaagcactgggttcttttactaaactaacagatgatggcgactcggagatagcaaaagggacaaaagattcagatgggaactttttgagtaaggcaattgatgttatttcaggtatattcacacctattttgggagcgcttgcaggtggtggtatgctcaaaggattgctgatgattcttactacttttggatggttgaccgaatcaagtggtacgtatcagattttatacgcggctgctgatagtgtgttctatttcttaccgcttattcttgcttatactgctgcgagaaaatttggtgctaatcctccggtcgcgattgcagcagcaggtgcactagtatatcctacaatgattaatctatttaatgagggagctcatattactttcttacaaataccagtcgtattaatgagttattctttctccgttattccaattatcttggcagtttggtttttatctattttagaaagatttcttaatagtaaaattcatgaggcagcgaagacctttttaacgccgatgatttgcctgatgcttatcgtaccgcttacattcttagcgtttggacctctgggtacgtttattagtcaaggtttagctagcgggtatacatttatttataacttgagcccaattgtagcgggtgcttttatgggtgcgttctggcaagtattagttatttttgggattcattggggctttgtgccaatcatgattaacaacttatcacgctatgggcgtgacaccatgattgcgatggttggaccatcaaactttgctcaagcaggtgcatcacttggagtatttttaaaaacaaaaaaaccggaagtcaaagctattgctggttctgccgcacttacaggcttttttggaattacagaaccgtctatttacggggttactttaaaatacaaaaaaccatttgttatcgcgagtatcgccggtgcaattggtggtgcgatagttggtgcagctgggtcttctggtgcagcgaacgctatcccgggaattttaacattaccaatttttatcggaaaaggatttgttggctttattctcggaattgctgtagcctatattttatcagcaatcggcacatacttcttcggttataaagacgagatggcagacggaattgctccaactacaaaagaagcgaaagaaactggcgtcgaagcagaagttattgtaagccctattcgcggcaatattgttccgttaaatgaggtaaaagatgaagctttttcagcagggttacttggaaaaggtgtagcaatcgttccgcaagaaggtaaattaatctcaccagtaaacggcactatcgaaacagcttttccaacaggacatgcgattggaattcgttctgataaaggggtagaaattttgcttcacgttggctttgatactgttcaattaaatgggaaatattttaaattacttgtggctcaaggtgatagagttttggtagggcaagcattacttgaatttgacctagaagcaattaaggcagatggttatgatattacgactccgatagttgtaactaatacggatgcttacttagatgtactcatctcggatcaaaaaactgttaattatgaagatacgcttttaacaccagtactttaa

SEQ ID NO: 713 - DNA, 933 bp, Listeria monocytogenes-EGD
atggagcaagaagtaacacgactaattagtgcttctaaacaagattttgaaaagatgaacggcagagacttaaaacgctccatttttcaatcagaaggtagagtaattatggcgcaacatcttttatttgcaagtcagggtcttgtccgaggggttacgaatacggaattattagcagcattcggatcggatatgattatgctcaatacatttaacctagaagatgaaaaaagtaatttagggcttcaaggacttaccctcgaagatttgaaaaaacgcgtgaacatccctttaggaatttatcttggttgtccaggtgaaaataagacttcagaaaacattatttatgatgcagcaggaatgttagctaccgatgaacatttattaagagcaaaagaaattggcgcagattttattgttttaggtggaaatcctggttcaggaacttctattcaagatatcattgaaacaacaaaacgagcacggaagttgctaggtaacgatgtcttaattttcgctggaaaatgggaagatggtattgatgagaaagtgttgggcgatccacttgctaaacaagatgcaaaagaagtgattaagcaattgattgatgcaggcgcggatgtgattgatttacctgctccaggatcaagacacggtataagtgtgcgtatgattcaagagttagtgcagtttattcatttatacaaaccaggtacactcgcaatgacattcttaaatagttcagttgaaggggcggatcaagatacaattcgtttgattgcattgatgatgaaagaaaccggtgccgatattcacgcgattggtgatggtggtttttctggctgtacgacaccggaaaatgttatgcaattatctatttcacttaaaggaaaaccttatacgtactttagaatggcaagcagaaatcgttaa

SEQ ID NO: 714 - DNA, 447 bp, Listeria monocytogenes-EGD
atgaaaattgctattggaaatgatcatgttggaatcgagcttaagccagttattgttgcgtatttacaggatttaggtcatgaagtagatgattttggtgctttctcaaatgaacgaactgattatcctgaatatggtaaaaaagttgcagaaagtgtagcggcgggaaaatcggacttaggaattttaatttgtggttcaggagtgggtatttcaattgctgctaataaagtaaacggaattcgcgctgttgtttgtagcgaaccatactctgcaaaactatcacgcgagcacaataatactaatattttagcttttggttcaagagttgttggtgcagaacttgcgaaaatgatagttcaaaactggttggatgcagaatttgaaggtggaagacatgcgaaacgcgtcgaaatgattgctagaattgaagatgaaaatgattaa

SEQ ID NO: 715 - DNA, 672 bp, Listeria monocytogenes-EGD
atgagcaaaaaactgatttgtccttctatgatgtgtgctgatttttctggcctagaaagggaagtggaagaattagacaaagctggaagcgatgtttttcatgttgatattatggacggcgcttttgtaccaagctttggtatggggttacaagattttgaagaaattcgtcaaaaaactcaaaagttagttgacgtccatttgatgatcatgaatccaggtgattatgtggaaatgtttgctgataaaggtgcagatattatttacattcatccagaagctgatttacatccagctagaacattagacaaaatccgaaataaggggaagaaagttggtattgcgattaatccgggaacggcgattgcaacaattaaagaacttttaccattagttgataatgtgatggtgatgacagttaatccaggttttgcaggacaaaaatatttggactatgtagatgtgaaaatcgcagaacttgtcgaattgaaaaaggattatacttttgaaattatggtggatggggcaatatctccagaaaaaatcagcaaactttctcagttaggtgttaaggggtttgtgctaggaacatccgcattattcggaaaaaaagaaagttatgctgaaataatcaaaaagttaaaacaagaaaagatggaggaattacgatga

SEQ ID NO: 716 - DNA, 1005 bp, Listeria monocytogenes-EGD
atgaaaaaaacatccataaaagatatcgctaaattaagtggcgtctccgttgcaactgtatctcgtgtcatcaatgataatggccgcttttcagaagaaacacgggaaaaagtgctggctgttattaaagaaaccaactaccaaatgaattttagcgcaaaaagcttacgcatgaataaatctttttctgtcggaattttagttccggatattagcaactattttttctctagcgttgttcagcaaattgaagctattttattcgatcaaggctactctactattatttgtaatacaggccgtaatttagataaagaaatggcatatttaaacatgttagagagcaaaatggtggatgggttgattgttatttcaggcgcagatgaatttggctttaaatataccaacgccgaaaatggtattccttatgtatgtattgaccgccaaccaaaagataaaaaagatacaattttcatttcatcaaatcactaccaaggagcttttgaagctacggaagcattaattcatgccggagtgaaatcccctgttatatttatgcatagcaggcaatcgtcttcagctaaagaacgtctcaaaggttttcaagacgccttaaagaaaaataatattcgctacgaccctgacgtttccaaatttacagtagatttacaaatacacgattatcaaaaaagcattattacctttgtcaatgaagtaacaacaatggatggtatttttgcgattaatgataatatcgcgcttgagctattgaacctcttgccaactatcggaaaaaaaataccaaatgacattaaagtaatcggattcgatgataccccgcagtgcaattacactgttcccaaattgagtagcgtgaaacaaaatattcctaaaatcgctcaaataaccgtagataatttaattactattattaaaaatcctaagcaaaagaaacgcattacagagattgttcccgttgaattatctttaaaagactcaatttaa

SEQ ID NO: 717 - DNA, 510 bp, Listeria monocytogenes-EGD
atgttaaacgaaaatattaaagcaatcagaaaatcaaaaggactttcgcaagaagaaattgccatcaaactgaatgtggtgcgacaaacaatctctaaatgggagcaaggactgtcagttcctgattccgatatgttaatctccatatcggaagtgcttgaaacaccagtaagcactttgcttggagaaactgttatggtttcaaaggttgatgatgtaaaagcaatttccgaaaaactggagattataaacttacagtttgctcaaagaaagaccgccagacgaaaaatgctttattggctatttgtctcgttgtgtgccgttatagcaataatttctgcggtctttataatactaaatagtccttacttaggttgggattatagtgatcctgaaactagcgttatcggagtagcttttcatacatttgaatggttgtttgtcagattagcaccgattatccttataggaggagtcgttggaatttttctaacgcggaagaacgtataa

SEQ ID NO: 718 - DNA, 1104 bp, Listeria monocytogenes-EGD
atgaaccaagtagctccattttatgcagatcatgtgggaagtattttacgcacaaagggaattaaagacgcacgagagaaattccaaagtggcgaaataacagccttagagttgcgcaaaatcgaaaatacagaaattaagtatatcgtcgaaaagcaaaaagaagtcggcttaaaatcaatcacagatggcgagtttcgccgtgcttggtggcattttgacttcttggagaatttggatggggtagaaggatacgatgcggctggcggcattcaattcagcaaagtccaaacaaaatcgcattcggtaaaaatcacaggaccaattgactttacgacacatccatttatagaagattttatttttctcaaagaggctgttggtgacaatcatgtcgcgaaacaaactattccaagtccagcgatgctccattatcgcggggatatagagtatcagccttatttagatgatgcagagaagtttgccaatgatttagcgactgcgtatcaaaaagcgattcaagcattttatgatgccggttgtcgttacctgcaattagatgatacgtcttggagttatttatgctctgatgaacagcgtgaagtcgtgcgccaaagaggttttgacccagaaactttacaagaaacatataaaaatcttatcaacgaagcaataaaacataaaccagctgatatggttattacgatgcacatttgtcgtgggaatttccgctccacatggattgctgaaggtggttatggtccagttgcagaaacgttgtttggcaaactaaatatcgatggtttctttttggagtatgataatgaacgttctggagattttgcgccactaaaatatgttacccgtccagacttgaaaatcgttctaggcttaattacatccaaaacaggtgaattagaggacgaagcagccattaaagcacggattgaagaagcgagtgaaattgtgcctctaagccagttgcgcttaagcccgcaatgcggtttcgcctcgacagaagaaggaaatattttgacggaagaagagcagtgggataaattgcgatatgttgtccggcttgcgaatgatatctggggcgaataa

SEQ ID NO: 719 - DNA, 1386 bp, Listeria monocytogenes-EGD
atgtcattattcagtttgaaaaaaaagaaccattttgttccactagaaattcaaagacaacaatggttcaaacactttatcgttgcatttatgtctgtatttatttgttatctaacggtctatcttctaaggaataactttaaagcagctcagacattgttaattgagcagaaccatttcagcaccacagaactaggaatgattggtttagctttttcggttatgtacggaattggaaaaacgattttaggatatgtcgtggatggaagaaatgctaaaaaaataatgagttttttattagggatttccgccattatatcaattattattggaatacttttagttgcaaagcaagcaacagtgggtatattgtttatcctttggggagcaaatggatttgtgcaatcaccaggtggaccggcttcctattcaactatcacacggtggacgccaaaattgaaaagaggaagatggttaggtttttggaatgcctcgcataatataggtggtgctttagcgggaattgttgctttttggggtgcgactactttctttaatggcggcgcagggggaatgtttatcgttccaggtatcattgcaatcatcattgcaattatttgcttctcggtggggcatgatgaaccagaagaattaggctggaactctgccgctgaaatttttgaagagcgggaagaacaaggagaatcggagacaaaagacctttctagatttcaaattttgtgtcgatttgttattaataatccttgggtatggactttatgtgtcataaatatattcatctatattgttagaattggtattgataattgggcgcccgtttattgtattcaagcgctaggatggagcacaaaagatgctattatgactatttctttttttgaaattggagcattgctaggttcattatcgtggggctggctctcagatattatgaaaggtcgccgtatgctttgctcgattattgcagttgttattgaatttttcatgttaattagctattcgcaagttacaagtgtttatagcatgtatacggtattatttattttaggattcttagtatttggcccccaacttttaattggagtgtcggtgatagagtttgttcctagaaatgctttagctgtaacaaatggcttaactggaacgtttgcgtacttattcggagattcttttgctaaagtctttctaggatatattgcagacccaacaaaagcgggtatgcaaatatttggctataatttacatggctggggcgcaacttttactattatgtttacagctttaattattgcaggcttaatgatgattccagttgcattaaaacaagagaaaattatacgacaagcaaaagttttacatctataa

SEQ ID NO: 720 - DNA, 1005 bp, Listeria monocytogenes-EGD
gtgagtaaaaatgtaaaaaaaatagtgataactctctttgcattaataatgacagtaggattagcaagtgggttcatcgcacctataaaagcaagtgcagatacaaataatttcacggttaaagtggaatatgttgatgcagatggagcggagattgctccttcagatatattaaccgattatcattatgtatctactccaaaagatattcctggctataaattaagagaaatacctcataatgcgacaggaaatatcacagatactggaattatcgtgcgttacatatatgataaaacaatcgatgtaagatacgtagatgaaacaggcaaagacttattaccagtagtagaaatcatcaatagtgaagcagcggttttagagacaatatctgactatacatttgtaaaaaaagacattagcatagatggcttgcatatcatttttcgctataaaaagaatatttctaccattccagatttcggaaaaccgaatcaagtcactgtaaattatctggatgaaaacaagactccaattgccccgtcattatatttgagcggacttttcaacgaagcatacaacgttccgatgaaaaaaattaaaggttatactttattaaaatacgattcggaaattcttggcgtttttaccgaatcaccacaaacaatcaacatcatttatcaaaaaaaagcgcctgagcaagcaccaagcatggaaccattacctgatccaactgttccagaaagcccgcaagtagaaaaatcaaaaataaagaaatcaaaaatagagacaacagaaaaaagaactacatcaaaagtgaaaatcgcaccgaaagcattaaaattaaccaaagtcgaacaaaaaaaacaagagacgaaagatagcttaccaaaaacaggtgatagctcggtaaacttattaattacatgcctcggaattattgccatatcgtgtggcgtatacttactcgtacaacaaagccagaagcgccgtcgtaaagaatag

SEQ ID NO: 721 - DNA, 747 bp, Listeria monocytogenes-EGD
ttttcacatgttttttggaaaggagagatttttatattaaatcaaaaatatcaattactacttcataatgaatatgacacaaaaagtggtgatttagtcaaaaaagaaatagttgcaactaaaaaaactaaaaatctcttggaagatctaacttcgcatttgttatgtgttacaaatcaaatagagtatggaaaatttatcacttggtatgaaatggaaattaaaaaagttctacaagttcatcccaatcagcactttattattaaaatttcctttcaacaattatattttcgggaaacaatgctgttgcttgagaatttacagaaagatagccggcgactaacgattgagctagttggagatagtcagattagcccttattcaaaggaacatttttccgcagaggacagtgatgcttttttgaaagggaagttaaaaatgttgaaaaagtggcattattttatttcaaagcatattgaaagtggtgccatcgaacaaacactgatttttacgccctatattgatgaattgaaatatagtttaacgcaaaagtcgaagctcttacacaatattactgaattaaagttttttctatcattttggaaaaattgggctgagcttcgatttgttgattttttagttttagtagatgaaaaaaacgaatttgtatcgcatgtgcttttaccagatgaattaaatgtacgttgcaaaatgtatgagaactttggaggaatggtcagtgagtaa

SEQ ID NO: 722 - DNA, 837 bp, Listeria monocytogenes-EGD
gtgaatccagcatattttgttttgttagtagaagagctaaaaacaaagtatcttgtcaaagatatctgtcagatactacaagtacctttatctacctattatcgctggaaaaagaaagatttctcacagagctcattggagaaaaaaatagggcagttatgtaaagcatatcagttcacttatggttatcgaaaaatcgccgcattaatgaaacaagaagaacaagttggcatcaataaagtacagcgtattatgcaaaaatatcagtggcaatgtcaggtaaaagtaaaaaagaaaaatcgaccaggctccgcctactatcagacagaaaaccacttaaatcgaaactttcaagctagtcagccgctggaaaaattaactaccgatatcacctacctttatttcggagactgccgtttatatttatcaagcattatggatttgtataatggagaaatcgttgcctactccattggcgaaaaacaagacacagaattagtgctagatacattaaatcagttgtcccttccagaaggaagtttacttcatagcgatcaaggttcggtgtacacatcttatgaatattatcagtgctgtaaaaagaaaaacgttatccgcagtatgtcccgaaaagggacacccgcagacaacgctcccatagaatgtttccattcctcgctaaagtgcgaaacattctaccataaaacagcgtataaatacgctaaatctattgtaatccaaatcgtaaaagattacattaaatattataacgaaaaacgaattcaacaaaaattaggctaccaatctcctattaatttcaggaaacaagcagcctaa

SEQ ID NO: 723 - DNA, 306 bp, Listeria monocytogenes-EGD
atgagtacaagagtaatgtatccagcagaaataaaagaaaaagctatcaaaatgaaattagcaggtaaatctaccaaagaaattatgagaacattaaacatcaaaaatccaacacaagtgaaaacttggtggcgctggtatcgaaatgaagaaacccacaggtttcaccaaggagtaggtaaacaatataaataccaaaaaggggtgcctgaattaccagaaatagaacaattaaaaatagctcttcggcaaaaagagctagaactggaaattttaaaaaagtacaaggcattggaaaggaagtga

SEQ ID NO: 724 - DNA, 1635 bp, Listeria monocytogenes-EGD
atgggagacataaatattcagcagatgatttttcaatttatcggaggacttggaatttttcttttcggtataaaatatatgggagacggactgcaaatggcagctggcgacagactccgcgatattttagataagtacacaacgaatccttttatgggtgtacttgccgggattttagttaccgtattaattcaaagtagctcgggtacgactgttttgacggtcggattagtaagtgccggatttatgacgttaaaacaggcaattggtgttatcatgggggcgaacatcggaacaaccgttaccgcctttattattggtattaagctatccgagtattctttaccaataattgctgttggtgcagtacttttattcttctttaaaaatcataaagtgaaaaatattggccaagtattctttggatttggtgcgttattttatggactggatttgatggggcaagggatgaaacctcttgctggaatggaatctttccatgaattaactgcacaaatgagtacgaatccattcttaggtttgctaatcggaacaatcttcacggcggttgtacagtcatcgagtgcgactatcgggattttacaagaattatatgggcaaggtgcgattgatcttcaagcggccttaccggttctattcggtgacaatatcggaacaaccatcacagctgttcttgcagcgattggtgcgagtgttgccgcgaaacgtgcagcagcgacacatgttatctttaacttaatcggtgcaatcattttcatgctgatacttccgctattcacttctctggttgcctacctgcaaggaatgtttggactaaacccagaaatgacgattgcggttgcgcacgggacgtttaatattacgaatacctttattcaattctggtttataggtgcatttgcatggcttgttacgaagcttattcctggcgacgactcgcgaattgactataaaacaaaacatttagataccaatttaatcgatcaatctccgggtattgcactggaaatggctcgtgaggaaacgcttcgtatggcagattacgcgaaatttggtttgcaagaagcgagacaataccttgtgaaccgggactcaaagcatgcggaatccactgttcaagtagaagaagccgtaaataatttagaccgaaaaatcaccgagtacttaacgaaaatttcttctgtcgccttaacaaacaatgaaacagaagaacatgcgctaatgcttgataccgttcgtgatattgaacgcgttggtgatcacatggaaaacatcgtagaaaacatcgatcaactaattaaaaataaagcgaaaatgtcagaagaggcttccgagcaactcattgaaatgtttgagctgacaaccgcgaactttgaacgagcagtgaaatccatgcataaaaaagatcgcgcactcgcagaagaaactattttagtagaaaaagatattgataaagcagaacgcagactacgtaaaaatcatattcgccgcttaaacgaaggcaaatgccaagttgttagcggaattttatacattgatatcgtaagtgatttagagcgaattggtgaccatgcaaacaatattgctgaatctgttttagaattaaacgaataa

SEQ ID NO: 725 - DNA, 663 bp, Listeria monocytogenes-EGD
atgaaaaaaattattttcacagtggtactaagtttggttctagttcttgctggatgtgccgatgtaacaaatacagtaaaagtggataaaaaaggggaagcgaccatttcctttgatatcgatatttcttctgtagcagggattttcgcctcaagttactcggatgaagtagaagctaaactgaaagaagctggatttacagtagataaaaaatcaaatacaagctatcatattgaaaagaaagtagataaaaatgaaacaacgaaaagcgatatgaaaccggaagattttggggtaaaaattaccaatagcaaaagtttcttcacacaaaaaatcaaagtagatgccgatattgacatcgaaaagatatggaaaaaagaagtggcggatgttccgtttccaaaagaaattttaagccaagttgattatacatttattttggatttaccgatttcgtcaattggagagaacaatgctaaaagtgtggatggcggtaagctcacttgggatgtgcctctcgacaaaaaatccgaaatgtattttgaagtcaccgtaccaaacgtaaaaaacattgcgattgttggtgggattctacttgtcgtaatcattggtctatttatttatcttattagaagacaccgaaaaaagaaaaaacaactataa

SEQ ID NO: 726 - DNA, 768 bp, Listeria monocytogenes-EGD
atgaatataaaagaaaaactagcagtccaactttattctgtacgaaaagaaatggagcgcgatttagaaggtacgctccggaaaatccatgaaatcggctttcattacgtgcaactcgatggtatgcgtggcaatgattctagagaggtacgttgtttactacaaaaatatgagttaaaagtgattggcatgcacatcaagcatgatcgttttatgaacgatttggatggcatcattgaagaagcttatttctttgattgtaaaactatttttgacaaatatattgaagaagaggaccaaacgacagcgggctacatggcaacaaaagcggcgttaattaatgcggcggaaaagctacatccactcggttttcgcattggtcttcacaatccggagtatgatttcaatgaatgcattcatggtcgcagagtgatggattatattaccgacccagttgacggcatttgtatttatgcagaacctgatacttactggattcgtgcggctggacatgatgaaacagaatatattaagcgctacagcggccgcgcgccgattgtgcatatgaaagattttttgagcggttttgagctagaagatatggataataatttagtcgaaataggacaaggtgaagtagattttcgcgctatcattgaatggggcgaagtaaacggagtcgagtactattgcattgagcaagatagatccaaaagagatatgttcgaaacattagaagcaagttatcagtatttattacagttgtaa

SEQ ID NO: 727 - DNA, 861 bp, Listeria monocytogenes-EGD
atgaaaaaatggatggttattatatcaatcattagtttagttgcactattaggtgcttgtggcaataatgataatgaaaaagatcaagaagataaatcaacaacagattcaacaactaaaaaagcaaaatcttcatcaaacgaatcaaataaagcggcggaaacaaaagaaaatgataccaatgataaagcagctaccactgataagggaagttcaaatcctactaaagaagaaaaagatacgtctacaacaacagatacaccaaaaaaagaaacaccaaaaagccccgcgaaaacagaagcattttctttttcaccttctggattcaaagtatctacagttgaatctattcttggtggagatgtaacaacgacgtatttatctagctctaaatcattccaaaaggattttgaagctttaacactttttatcaatcaatataaagtagaacatgtcattaatccaacaaaagaagtaagtgcgagtaacccagaaagttatttagcaaacaagaatggttatgttattacacttgatatctccattaaaaataattcgaaaaaagataagatgtataaagcagatcaaattagtttgcttggagcaagtaaatctgtcggcgggagtttagataactttatcccttctggttttcatcttataggaagttcatcggatccatataattttacagcaggtaaaactgctagagggcttttaactttcacgatggatgaagcaacttataatgatttagcaaaagattcgcaaataggcgtaccagatccaagtagatttgactctagtagcactaaaggaagtagtcaagataacgttgttgcaccgtttccaattaaataa

SEQ ID NO: 728 - DNA, 945 bp, Listeria monocytogenes-EGD
atgcatcaaattttcaaatcagatgaaaacggcaaattaattgaattagaagaagtgacgcgcaattgttggattaatattgttgctccaacttccgaagaaattaataaaattgccgataactacgaaattccacttgagttcttagaagatccactagataaagatgaaagtgcccggattgaacgcgatgacgactcggattctgttttaatcgtttgtgactttccggtagtcgatgaagatgatattcattacgcttcattcgaaaccattccaatggggataattattacaaaagactattttattacaatttgcacaatcgattcttctatcgtgcagtcctttattagaaaccgtattaaaggcttttatacacatatgaaaacgcggtttgcattgcaaatcttatacatgatttccactactttcttgcgtcacttaaaacgcttgaaccgtcaaacggacgaaatcgaaaaagaactacatgaatctatgaaaaataaacaactttatgatttaatggggattgaaaaaagtttagtttactttgtaacagcccttaaatcgaataaagtcgtactagataaaatgatgcgtcaaaatattgttaaaatgtacgaagaagatcaagacttattagaagatgttattattgaaaatcgccaaggtattgaaatggcggaagtccactcgaatattttgagcgggatgatggatgcctatgcttcaattatctcgaacaatatgaatatcgtgatgaaatttcttacttcttttaccatcatcttgacgattccaacgatggtgtttagtttttacggaatgaacgtgaaattaccgtttatgaatacaccaatggcttggatgcttacgctcggttttgcattcgggattgctggagcacttgcgattgtattctggcggagaaaattcttttaa

SEQ ID NO: 729 - DNA, 669 bp, Listeria monocytogenes-EGD
atggaaactaatttagagttacaggatattacttatcagtacgactcgggaaacaaagctcaaattgttttaagaaacctttcttatacattttcagaaggaacattttatacgattttaggaccatctggtgcggggaaaacaacattactttccattgctgccggtattgataaaccaacctccgggaaattaattattaataaaaaagtattaaacgaaacaatgagtttacagagttatcgtaaaagtctaagctcaattatttttcaaacgtataatttaattccttatatgacagctgtacaaaatgtctatacagcgatgggaatacaacatagtcaaatgaaagataaacgcaaaagagctattgaattgctaaaggaagtagggttgacagataaacaaattaatagtccagtcttaaaattaagtggtggacaacaacagcgcgtaaccattgctcgcgctttatcaggaaatgcgccatttatttttgcagatgagccaaccggaaatttggatcatgaaacctcggaacacattattgatttatttcgtgatttagcacataaaaagaataaatgtgtcgtcatggtcactcatgataaccatgtagctagtcgttctgatgttattttgaacttaaaaggaaaaacattaatataa

SEQ ID NO: 730 - DNA, 1422 bp, Listeria monocytogenes-EGD
atggattttatcagaagagcctttattagtattaatgctaagaaagggaaatcgcttgtattatttacgctattattagtcattttcagtttagtttttacaggttttgccattcaggaatctactaaacaaagtgctgaatcagcaagaaaacaacttggagcaaacgttactctacaaatgaatcaagaggaaataatgaaaaaggcgcaaagcggggaagaaataaaggaagaagatttatcgattccaaccgaggatgtaaataaaattaaaaaattgccacaggttgacaattatacaattagctcagaaggttccgcatcaaaaggtgatttaacaccaatccctgctaaaaaacaagaaggtggccaagggggcatgacccaagttgctggaacagatacaaatgggaaaaaggtagaaaccccaagtttttcagtcaaagcagtaaaccaaacagctactttaaacagtttcaaagataaaacagataaaattatttctgggaagccattaacatcagatgacaaagaaaatacagcgcttattgaaaaacaattggctaaaaaaaacaatcttaaagtaggcgacacctttcaactgacgaatgataaaaagaaaaaagtgaagtttgttgtcaaaggtatttatcaaagcaatcaaaaaatagaacctcaactagaatcatttcaaatgatgctccctggaaataaaatctatgccaatataaaaggagcaaaagattttctttggagtggaggcattgaaaaagctgaatttaatttaaaagatccaaaagaaataaattcatttatctctgaagcaaaaaaattaacggatgtagataatggagatatgttccaatttgatgcacaaaacagtgcttacaaaaaaatgattggaccgattgagcgagtggcatcttttagtaatattattgtgatgattacacttctggctggtggcttaatccttgcgcttatcgtattactatccattcgtgagcgtaaatttgaaatgggtgtgcttttatcacttggggaaagtaaaacaaaattaatgagtcaatttttagtagaagtattaattattgcagcacttgctttttctttttcttgtgcattggctaatccaattggccaagctatctctaaccaaatgctttcgactgaagtcacgaaagaagcaaataaagagaatgaaacttccacacaagaaagcatggcaatagctctaggtggggaagagaaaactaaggttgatgcggagccgattgataaaatagatgtcgtgattacaagcaatataatggggcaagttggtgggcttggttttattttaatattcctagcgacaacgataccgtgtttatttatcattcgactacaacccaaaatgctatttactcagaaagattaa

SEQ ID NO: 731 - DNA, 1446 bp, Listeria monocytogenes-EGD
gtgctggctataaaatggatgaataaagtgagaaccagaattagttggaaaattttcttaatatttgtgagtatcattttactttttacggctctagtctatgccatgctaatctttttcttaccacaattttattatgattataaaataaaacaaattaatgattatgcaaatgaagtcgtaaaagcaggcgaagcggatgatattgaaggtgtggaaaaagcactaaatgattttatggaaaatacaaatattttaccaattttaatagatagtaatggaaatattgtttatataccaaatgtgaatatggcatccattaaatcagcaacatcgactgttgtagacggcacgaaagcagaaggtggtacaactgcaacggattattcaggtggaacagaaacaaaaaataaacctatttctatcaatggtcaaacctacaatctcacctatacgattaacatccaaaaaattaatgatatttcgaccgtcctattacaatttgctccttactttattttatttgcatttatattaagtttattaaccgcctactttttctcccgcagaatggtgagacctcttttacgaatgaataaagttgcctccaaaatggcgaatttaaactttacagaagtacttccgattacatccaaagatgaaattggtcagctttcgggaaatttaaacgaaatggcaattaacctagaaaaaacgatgcttgaattaaatgaagtaaataaaaaattacaaaaagaaatagaaaaagagcgtcaactcgaggaaatgcgaaaaagttttgttacagctatttctcatgaattaaaatcccctcttgctgcagtaatgggtcaagtagaagcaatgcgttataatgtagctccatatgacaatcatccaaaatacttacaagagtcataccagattttggaaaagatgtctcagatgatacaagaaatgttagacgtatccaaagttgatcaaacaaactatatgatagagaaaacttctttttccttaactgaaatggtggagaaaattatctatagtaaaaaaatggtaccacatcgtctgtctcaaaaagttgtttttcaagtgaaggaagatgttacagtaacagcaaattatgcctttatcgaaaaagcaatcgaaaatatttttgagaatgcttttaattattctaaagaagaaacaaccattttagttgaaattcaaaatcgggaaaaaggtttctatttttctgtgcataataaagctactagtattcccgaagaagaattgaacaaactatttgagccgttctatcgccttgagaaatcaggtaacaaaaaaacaggtggaaatggtttagggttgtttattattgcaaaatttttagatatccaaagaatccactacaaacttattaatgaaaaagacggtgttacttttcaaatatggcaataa

SEQ ID NO: 732 - DNA, 663 bp, Listeria monocytogenes-EGD
atggaaaaaatactcattgcagaagatgattcagctattttaggagttattacagcattcttaaccgaagcagggtatcaagtaatgacagctaaaaatggaatagaagcatatcatctatttcaaaaggaaacatttgatttaattattatggatattatgatgccgagtatggacgggtacacactaacagaactgattcgttctacttcaaccacaccgatacttatgatgacggcgctctctgaagaagatgacgagttgaaaggctttgatctaggggcggacgactatatacaaaaaccattctcttatttagtattattaaaacgagtgcaagtacttttgagacgagtgaaccaaagtgaaacaaagaagcaaatactacgatgcggaaatatttctgtagataccgaaacctttgaagtgatttcagctggagaaacaatcgaattaacgaaaaaagaatttgatattttagtactcctgattaaaaatcaaaagaaggtgattactcgtgaaatgatattgtcacaagcatgggatttcgcagctattgtggatacgtccattatcaatacgcatatgaaaaatctacgcaaaaaactgcacactgaaaaaattcaaacgattagaggtgctggctataaaatggatgaataa

SEQ ID NO: 733 - DNA, 1266 bp, Listeria monocytogenes-EGD
atgttaaaacaaagtgcagataagcgccggattgagaaaaatgataaaccttttttctaccttgcagatactgtttggagtgcgtttacgaatattgatttaacagattgggcctactatttaaaagtccgaaaagagcaggggtttaatgtactgcaaatcaatattttgccacaatgggatcgaagtgtactaaaaaaaattcaagagccgtttggtataaatgaaggttttttcgatttaaaagctaaaaatgaagcctactttaaacatgcagaaaagatgttagaaatggcagtgaatcaaggttttactccagcgcttgttttgctttggtgtaattatattccggagacgtggggggcgaaatttggtacttcaccactgtttcgaaaagaagacattaaaccctatacagaaatgatgttggaacatttcgagcaattcgaaccaatttatatcattagtggggacacggattttccaacggaaactgtaacagattattatttggaagctttagaaaccgtttctaaaaaagcgccacacgcacttaaagttttgcatatttgtggtcgattaaaagatattccggaaaatctgcaaacacatccagcacttgatttgtatttttatcaatctggacataattcggagcaccaatcaatggcctatacgttggcagaacactttagtcagttagagccaatcaagccagttatcaattcagaaccgtgttacgaattgatgggatatagtcgacaaaaatatggtcgttttagccgagaagatgtacgaaaagcagcttggcaaagtgtcttatctggtgctatagctggtatttcttatggggcacatggcatttggagttggcatgaagaaggaagtacatttggatcagctctaggtgaaggatttgtttctccatttaattggcgacaagcacttcattttgaaggagctacagattatgcatttctaaaatcctttattctggctaatgacttaacaacactggcaccaataaatctagttttaaatcaaactccagaaattcgagcagcggagaccgaaaaagtagttatcatttatgtgccatcaaatgtcccaatttatttgaaagggcaatttgtttctttggatgactatgcgattgatttggagcaaggtaaaaaggttagcctcgcaaaaatacttcatgaagaaaaaacagaaattcagatgactccttttttgaaagatagcttatatgtaattcacaaataa

SEQ ID NO: 734 - DNA, 1857 bp, Listeria monocytogenes-EGD
atgaataattcggatcttgcaaaagaggttgtaaagcttgttggtggaaaagaaaacattttgagtgtgattcactgtgtgacacgactacggtttaagttacgtgatgaaaatctagcagaaacagaaaaaatcaaagccttaaaaggtgttatgacggttgtgaaaagtggtggacaataccaagtggttattggtgatcatgtgagttatgtttatgatgaggtcattcgagtattaggtattaaaccagatgatgcactgcaagataatcctgaacaagaacacaaaagtatttttaataagtttgttgaattaatttctggaatttttatgccagtactgggtctattggcagcttcaggtattttgaaaggattcctgacagcggcagttacaatgggactaattaatacctcagctggtgtttacgaagttctttacgcggcaagtgatgccctcttttactttatgccaattatacttgggttttcagcagggaaagtatttaaaacgaatcaatatctttctgctgcggttggtgcagcacttgtttacccgacgcttgttgatatgtatagcagcggagctcatttaacatttctacatatccctgtaattttaatgaattatacaatgtctgttattcctgttattttagctatttactttatgagcaaactggaaaaagtattagtgaaatttattccgaaaagtttacaattgatttttgttcctctattattacttttaattgtggtgcctgtgtctctaattatcatcggacctgtttcaacgtatgctagccaactacttgcaaaaggagcattggggctttattcgcttagcccgatgattgcagggttcttcctggctggggtttggcaagtggctgtcatgttcggattgcactgggcatttatcccgattttcattaataatatttctgttttagggtatgatccaattaatgcaatgctttattgtactgtattcgcgcaaactggcgcggttatggcagtaatgctcaaaactcgaaaccaagaattgcgttccctttctataacagcaactatttctgggtttttaggaatcacggaaccagcgatttatggagtaaacttgccgtataaaaaaccatttattatggcttgcgtaggatcagcatttggtggggcaattgcaggtatgagtgctgcaaaaatgtttggaggtttcgcttctggtgggatttttggtattccgatgttcattaatccagatggaataggctgggatttttggggattcttaatttctctagtagtagcattcagtgtagcattgattttaacttatttctttggatttaaagataaagtagaggaagtagtaattcaaacaggagaaaaagctacattagatgaaactatttatagcccacttcaaggggaattgattgcattaaatgatgtgaaagatgaagttttctctgctggtataatgggagcaggagtagcgattcttccagcgagtggcgagattcgtgctccatttgatggaacagtacttagtgttttccaaaccaagcatgcgatagggttgatttccaaacaaggagtcgagttgttaattcatgttggacttgatacagttaatctaaatggtcaattttttgatattgaagtaagcgaatcagaagaaataaaaaaaggtgatttattaggaacatttgaattggatacaataaaaaaagccggctatgatattacaacacctattattgtaactaatagtgctacactcgccgatgttattacagtaaaccttggaaaacacgtagacaataaccaaaagattttagaagcaaaggcttaa

SEQ ID NO: 735 - DNA, 1464 bp, Listeria monocytogenes-EGD
atgaagaaacactatcaaatagccattgatcaaagcacatctggtacgaaagtattattgtttaaagaaggcaaacttgtagatcgtttagataaaaagcatcgacagttgtatccaaagaaaggctgggtggaacataatcccatcgaaatttgtcaaaatgtccgtacattaattgcggacatcttgacaaaacatgatttaattacagcggatatcgaacgacttgctttgacgaatcaacgggaaacaattgtagcttgggataaacaaacggggaagccactttataatgcgattgtatggcaatgtaatcgaacaaaagaaatttgcgaaacgttaaaagaagctggttatgaaaaaagaattaaacagcttaccggactgaaaattgattcttatttttctgcttctaaaatgatgtggttattggaaaatatttcagcggtgcgggatgcagcaagtcgtaatcaattggcatttggcacaatggatgcttggttgttattttcgcttacggatgatagtaattatttcacagaccgaacaaatgctagccgcacactcctttatgatattgaaaaaaatgattggtcagatgagttactcgaacttttcggagtcaaacgtgcttatttaccagaagtgaaacaatctgctggaagttttggaagttatcaggagataccgattcatagtgtgatggctgattcagaagcggcactttatggacaaggctgtgatacatttggggcagtgaaggcgacgcttgggacaggatgctctgttatgatgcaaattggtgagaacagattacctgaaaacgatgctattttgacaactcttgcctgggatgttgcaggcgtgaaccagtttgcgttagaaggaattattcgttcttgtggagacacattggtttttttatccgaacaattagaactatttaatgattacgatacagcttgtaagcgagcatttcaattaccatgcaatgagggtgttgtgctaattcctggacaattaggtttaggcgccccttattggaatacagatatacgagcagagattctcggtctcacacgagaacatacaaaatggcatattattcgtgccggttttacaagtattgcatttcaaattaaggctgttattgaccaaatggagttaatgataggtcaaaatattaagcgcttacaagtagacggtggattaacaaagcaacatgagttgatgcaatatttagcagatgttttaaaagcagaagtggcagtcagtcccgcggaagaactttcggcaattggtgctattgaaattgccgacaataacctacaaaataagagaacgatagcaaaattgtaccaaccaagtatcactcatacacatgctctggaagattttcaagaatgggaaaaacaagtgaaaagcagtattctaaaaatacagaaggtgaggaattttaaatga

SEQ ID NO: 736 - DNA, 957 bp, Listeria monocytogenes-EGD
atgaataaaatagcgaaccgccaagtaatgtgtgaagttttaatgaaagaagcaactcgtaacgatagtaatttagttgttttaacaagtgattcaagaggatccgcttcactgggggcttttgctgagaaatttccagagcgattaattgaaactggtattgccgaacaaaatattgttggaattgcagcaggtttagcacatagtggcaaacgagcttttgtcgcttcaccagcttgttttctaagtatgcgcagtattgaacaggtgaaagtagacgtggcttattcagacacaaatgtaaaattgattggcatcagcggtggtgttagttatggtgcacttggtatgagccatcattcgcttcaagatattgctgttactagagcgattcctaatttagaagtcattctaccagctgatcgtctggaaactgaagctatttttgactatttgcttcaatcaaatcggccggcgtacgttcgtcttggcagaaatgcggtagaagattgttacgcagaaaaaccagtatttcaaattgggaaagctggaactcttagggaaggaaacgatgtgtcaattttagcaactggtgaaatggtacgtgtcgcacttgatgcaagtgaagaattgaagttgaaaggaatcagcgcacgcgtattgaatttttcaacaatcaaaccatttgaccaagaagtagtaaaagcggcattaactgaaacgaaactacttattagtatagaagaacatagcatttatggtggcttaggtgcagcagtgagcgaagtggtaagtagttcgccaacaagtattcgtcatttgattttaggaattccagatgaacccgctatcgctggaacgagccaagaaatttttgattattatggcttatctgctactggtattgttgctacaatcatgaaaaacctaccgatcattggagacgaaagaagatga

SEQ ID NO: 737 - DNA, 825 bp, Listeria monocytogenes-EGD
atgagtgaattaaagttaaaatcgtttgaaattagaaaagatgttctaaaaatgatatacgatgcaaaaacgggacatactggttcagatttatcatgtgcggatattctcgtggcgctttgctatggtgtgctgaatgttaatccggaaaatccagaagctttagatcgtgatcgttacgttcaaagtaaaggacatgctgtcgaagttctttgggcagttttagcagataaaggattttttgcaaaagaggaattggctgatttctccgcatttggctcgcgtataatcgggcatccaaataataaagtagctggaattgaaatgaacacaggttcgctcggccatggtttatctgtttctgtgggtatggcattagctgctaaaatggatgggaaaagttatcacacctatacactcatgggggacggggaacttgcagaggggtctgtctgggaaggcgcaatggctgcagcaaattataaattagataatttgactgcgattattgatcggaactccttacaaatctccggtcgaacagaagatgtaatgagtgtagaacctttggcagataagtggcgcgcatttggttgggatgttatcgaagctgatggaaataatccggataagctacaagcaatttttaaaacagttaatgagactggaaaacctcgtctaattattgcgaaaacaataaaaggttatggtgttaaaatggctgaaaatgttgctaaatggcatcattacgtaccaagcagtgaggaatacgaaatagctatgaaagatttagaggaaagaatggaggcgtgccgtcatgaataa

SEQ ID NO: 738 - DNA, 1404 bp, Listeria monocytogenes-EGD
atggaggcgattaaaattgggtttgcaccgacaaggcgcagtatatttagtgcgccagatgcaatcaaatatgcaaatctcacacgagataaactaaacgaactaaatattgaatttgtggacattacagaatttaatgaagatggattactttatgatgatgcagatgtgatgaaaattgcagcaaaatttaaaaaggctggaatccaaggtttgtttttaccacatactaattttggaacggaatatgtttgtgcaagacttgctaaagagttagatgtaccagtgttgctttggggtccgcgcgacgaacgtcctgatgaaaatggtataagacttcgagatacacagtgcggtttatttgcaactggaaaaatcttacgtcgatttcaagtaccatttacatatatgacaaattgccgtctatctgatccagagtttgaacgaggaattcgagatttcattgcagtttgtaatacagtaaaaacatttcaaaacatgcggattttacaaattggaccacggccattcgatttttggacaacgatgtgtaatgaaggagagttgctagaaaaatttaatgttcaattagcaccaattccacttccagaattaatgaaagaaattcgtagtgtatctagcgaacaaatagaggaagtagatggaaccgtcgaatattgtcacgggtgtgcaatcgttaaaattaaagaagttgacttacgaatggttgctgctcttaaagtagcaatgaaaaatttagcaacgaaatatggttgtagtgcgattgccatccaatgctggacagcacttcaagatgaaattggtattatgccttgcgctgcaaacgcgatgctcattgatgaaggaattccagttgtttgtgaaacagatatccatggagcaatttcttgtttattaatcgaagcggcaaatttaggcagaaataaaagctttttcgctgattggactgttagacatccagataatgagaatggtgaattgctacaacattgtggactgtttccgttttctgttgcaaaagataaaccggcaattggctatccgttagcgtttgattcacctggtgcagtcgaagcggaagcgaaaggtggcgaattaaccttatgtcgttttgatggtgataatggcgaatattccttgttactgggtaaagcgagaggtattgaagggccatatacaaaaggaacatatctttggattgaggtagacaatttgaaacgattagaggaaaaaatcgtttctggaccatatattcatcatgttagtggcatccatgcagatgtggtcccaattctttatgaaacatgcaaatacattggcataaagccagacctctatgatccaattgaagaagatataaaagcttatttacgcggtgaatag

SEQ ID NO: 739 - DNA, 324 bp, Listeria monocytogenes-EGD
atgtatataaaagggaggttaatctttttctttgtagtgttagtaatcgcgttatgttccgtattaatattgcttataataaaaataagcgtatggaaagatgaaccatttcatttaagcgatgcaaaggagattgagtgtcttggaagttgtgaaataaaaaatactaatcaaaaaatccatttcttctccataaaagagaatttgtttgaggaaaagggtgatatagctggaattttaaatgaagacgaacaaaaagttgctgataagtccattttcattgttattttggatgatgaaaaagggattgcgaacgaagagtaa

SEQ ID NO: 740 - DNA, 870 bp, Listeria monocytogenes-EGD
atgaaattcaaaaaggtggttctaggtatgtgcttgatcgcaagtgttctagtctttccggtaacgataaaagcaaatgcctgttgtgatgaatacttacaaacacccgcagctccgcatgatattgacagcaaattaccacataaacttagttggtccgcggataacccgacaaatactgacgtaaatacgcactattggctttttaaacaagcggaaaaaatactagctaaagatgtaaatcatatgcgagctaatttaatgaatgaacttaaaaaattcgataaacaaatagctcaaggaatatatgatgcggatcataaaaatccatattatgatactagtacatttttatctcatttttataatcctgatagagataatacttatttgccgggttttgctaatgcgaaaataacaggagcaaagtatttcaatcaatcggtgactgattaccgagaagggaaatttgacacagcgttttataaattaggcctagcaatccattattatacggatattagtcaacctatgcacgccaataattttaccgcaatatcataccctccaggctaccactgtgcatatgaaaattacgtagataccattaaacacaattatcaagcaacggaagacatggtagcaaaaagattttgctcagatgacgtgaaagactggctctatgaaaatgcgaaaagggcgaaagcggactacccgaaaatagtcaatgcgaaaactaaaaaatcatatttagtaggaaattctgaatggaaaaaggatacagtggaacctactggagctagactaagagattcacagcaaactttggcaggttttttagaattttggtctaaaaaaacaaatgaataa

SEQ ID NO: 741 - DNA, 777 bp, Listeria monocytogenes-EGD
ataattttgataaacgcccctaaagagaacacgccaatagctaacattgcaagaattaacgtcgtatggttccctggttcttccttcgctttttcgtcttctgcacttttagcaattagttttccttcttcaatgccagcagaacgattttttccgtttgcgttattagctgattcgctttcctctaccattttttcctcggtttgtggtttcatttcctctttatcgctctctgtagcttctttttggattactggtaggctcggcatattaattgactgcttgtttgtttctgcttgtttttctataaagggtgttttattttccctaagtacggtttcttgtggttttgtggcaggaagttctgctagctttggtgcggtctttacaggggttggttttttagtcactgttttcgttgtagtttttttattaaacacatttaatggctgtgatggattcttaaatggcgtttttttagttatgtcacttatcagagccggtgcgcttattttcgatacctttggacttaacgaaggaaccgggctgctagcaaacggatttaatggtaaaaaacccgcatttcttgagtgttttcctgttcctctatctcttaaatcagctaggcgatcaatttcttcttctgttgtctcgctgttttcgtcatctgtaaaatcaccactattcagcgaactaaattcttcagatgttggtctaccgcctctcccgttcaactcttcttctgttgggattggtgggaaatcagagaaattttga

SEQ ID NO: 742 - DNA, 552 bp, Listeria monocytogenes-EGD
atgatttctagttcatcttctgttggaggcggtggaaattcgaacgagctcggttccgatgtagcaggagcattaaaaccaagaagcattggcgtctctggcaaagcaagtcttaactcttcatccgtaggtggtggtggaaattcgaatgagctcggttctgatgtagcaggagcattaaaaccaagaagcattggtgtctctggcaaagcaagtcttaactcttcatccgtaggtggtggcgggaagtccgaagcatttacctcttcacttttctttttggttaataattggtcaattaaccctgcacttttatcaacaatcgctttctttacttcaggattttcgtcgattttatcacgtacccatttccccgcatcttttatttttttaaatactttagggaaaaatggttgttggtttgcttttaaaggttgtggtgaagactcatctgctgactgcatgctagaatctaagtcactttcagaagcatccgcaactgactctttcgccacttttttcttatttacttttgttggtttatccggataa

SEQ ID NO: 743 - DNA, 1920 bp, Listeria monocytogenes-EGD
gtgggattaaacagatttatgcgtgcgatgatggtggttttcattactgccaattgcattacgattaaccccgacataatatttgcagcgacagatagcgaagattctagtctaaacacagatgaatgggaagaagaaaaaacagaagagcaaccaagcgaggtaaatacgggaccaagatacgaaactgcacgtgaagtaagttcacgtgatattaaagaactagaaaaatcgaataaagtgagaaatacgaacaaagcagacctaatagcaatgttgaaagaaaaagcagaaaaaggtccaaatatcaataataacaacagtgaacaaactgagaatgcggctataaatgaagaggcttcaggagccgaccgaccagctatacaagtggagcgtcgtcatccaggattgccatcggatagcgcagcggaaattaaaaaaagaaggaaagccatagcatcatcggatagtgagcttgaaagccttacttatccggataaaccaacaaaagtaaataagaaaaaagtggcgaaagagtcagttgcggatgcttctgaaagtgacttagattctagcatgcagtcagcagatgagtcttcaccacaacctttaaaagcaaaccaacaaccatttttccctaaagtatttaaaaaaataaaagatgcggggaaatgggtacgtgataaaatcgacgaaaatcctgaagtaaagaaagcgattgttgataaaagtgcagggttaattgaccaattattaaccaaaaagaaaagtgaagaggtaaatgcttcggacttcccgccaccacctacggatgaagagttaagacttgctttgccagagacaccaatgcttcttggttttaatgctcctgctacatcagaaccgagctcattcgaatttccaccaccacctacggatgaagagttaagacttgctttgccagagacgccaatgcttcttggttttaatgctcctgctacatcggaaccgagctcgttcgaatttccaccgcctccaacagaagatgaactagaaatcatccgggaaacagcatcctcgctagattctagttttacaagaggggatttagctagtttgagaaatgctattaatcgccatagtcaaaatttctctgatttcccaccaatcccaacagaagaagagttgaacgggagaggcggtagaccaacatctgaagaatttagttcgctgaatagtggtgattttacagatgacgaaaacagcgagacaacagaagaagaaattgatcgcctagctgatttaagagatagaggaacaggaaaacactcaagaaatgcgggttttttaccattaaatccgtttgctagcagcccggttccttcgttaagtccaaaggtatcgaaaataagcgcaccggctctgataagtgacataactaaaaaaacgccatttaagaatccatcacagccattaaatgtgtttaataaaaaaactacaacgaaaacagtgactaaaaaaccaacccctgtaaagaccgcaccaaagctagcagaacttcctgccacaaaaccacaagaaaccgtacttagggaaaataaaacaccctttatagaaaaacaagcagaaacaaacaagcagtcaattaatatgccgagcctaccagtaatccaaaaagaagctacagagagcgataaagaggaaatgaaaccacaaaccgaggaaaaaatggtagaggaaagcgaatcagctaataacgcaaacggaaaaaatcgttctgctggcattgaagaaggaaaactaattgctaaaagtgcagaagacgaaaaagcgaaggaagaaccagggaaccatacgacgttaattcttgcaatgttagctattggcgtgttctctttaggggcgtttatcaaaattattcaattaagaaaaaataattaa

SEQ ID NO: 744 - DNA, 1533 bp, Listeria monocytogenes-EGD
atgaaaagtaaacttatttgtatcatcatggtaatagcttttcaggctcatttcactatgacggtaaaagcagattctgtcggggaagaaaaacttcaaaataatacacaagccaaaaagacccctgctgatttaaaagctttgccagattcctgcgaagcaaaagatttttataaaaattttaaaattcttgatatgacaaaagataagctaggcgttacgcattatacgctcgcgctaagttctggtggttacttgaccgataatgatgaaatcaaggtccacgtcacaccggataataaaatcactttcataaatggagatttgcagcaaggacagcttaggattactaatcaaataaaaattacagaaaaaaatgctatcgaaaaagcatttgaagccatcggtcagagtgaagctcatgtgaaaagttatgtcggaaacccagtgaaagaaaaagaaatcatcctcaattccagaacaaaacgcttagtttataatataaaattgatttttgctgagccggaagttgcgagttggattgttcaagtggacgtagaaaccggcgcaattttaaaaaagcaaaatatgctttccgaggtagaacgggctgatacccacaaagattttcaagcgcttggtaaaggagccaaccgattgctccagaggccactacatgttatgaaaattaatgacctattttacttagtggatagaactcataaaggactcataagaacttttgatttaaaacataataccgacacttcgtttgggaaagtggtatcaaataaaacgaatatgtttacggatccagaatttagttccgcagtggatgctcatttttacgcaagtgaagtgtacgaatactataaaaatgtccaccaactagagagtctagatggtaaaggtggagaaattgattcgtttgtccattatggcttgaattgcaataatgccttttgggatggccaagaaattctttatggagatggggacaaaaagaatttcaaaccattttcatgcgccaaaactattgttggtcatgaactaacgcatgcggttatccagtattcggcgggattggaatacgaagggcaatcaggtgcgctaaacgagtcgttcgccgatgtttttggttattttattgcgccaaatcattggttgattggtgaggatgtctgtgtgcgtgggtcgcgagatgggcgaataagaagcattaaagatcctgacaaatataatcaagcggctcatatgaaagattacgaatcgcttccactcacagaggaaggcgactggggcggagttcattataatagtggtatcccgaataaagcagcctataatactatcactaaacttggaaaagaaaaaacagaacagctttattttcgcgccttaaagtactatttaacgaaaaaatcccagtttaccgatgcgaaaaaagcgcttcaacaagcagcgaaagatttatatggtgaagatgcttctaaaaaagttgctgaagcttgggaagcagttggggttaactga

SEQ ID NO: 745 - DNA, 1590 bp, Listeria monocytogenes-EGD
atgaaaaaaataatgctagtttttattacacttatattagttagtctaccaattgcgcaacaaactgaagcaaaggatgcatctgcattcaataaagaaaattcaatttcatccatggcaccaccagcatctccgcctgcaagtcctaagacgccaatcgaaaagaaacacgcggatgaaatcgataagtatatacaaggattggattacaataaaaacaatgtattagtataccacggagatgcagtgacaaatgtgccgccaagaaaaggttacaaagatggaaatgaatatattgttgtggagaaaaagaagaaatccatcaatcaaaataatgcagacattcaagttgtgaatgcaatttcgagcctaacctatccaggtgctctcgtaaaagcgaattcggaattagtagaaaatcaaccagatgttctccctgtaaaacgtgattcattaacactcagcattgatttgccaggtatgactaatcaagacaataaaatcgttgtaaaaaatgccactaaatcaaacgttaacaacgcagtaaatacattagtggaaagatggaatgaaaaatatgctcaagcttatccaaatgtaagtgcaaaaattgattatgatgacgaaatggcttacagtgaatcacaattaattgcgaaatttggtacagcatttaaagctgtaaataatagcttgaatgtaaacttcggcgcaatcagtgaagggaaaatgcaagaagaagtcattagttttaaacaaatttactataacgtgaatgttaatgaacctacaagaccttccagatttttcggcaaagctgttactaaagagcagttgcaagcgcttggagtgaatgcagaaaatcctcctgcatatatctcaagtgtggcgtatggccgtcaagtttatttgaaattatcaactaattcccatagtactaaagtaaaagctgcttttgatgctgccgtaagcggaaaatctgtctcaggtgatgtagaactaacaaatatcatcaaaaattcttccttcaaagccgtaatttacggaggttccgcaaaagatgaagttcaaatcatcgacggcaacctcggagacttacgcgatattttgaaaaaaggcgctacttttaatcgagaaacaccaggagttcccattgcttatacaacaaacttcctaaaagacaatgaattagctgttattaaaaacaactcagaatatattgaaacaacttcaaaagcttatacagatggaaaaattaacatcgatcactctggaggatacgttgctcaattcaacatttcttgggatgaagtaaattatgatcctgaaggtaacgaaattgttcaacataaaaactggagcgaaaacaataaaagcaagctagctcatttcacatcgtccatctatttgccaggtaacgcgagaaatattaatgtttacgctaaagaatgcactggtttagcttgggaatggtggagaacggtaattgatgaccggaacttaccacttgtgaaaaatagaaatatctccatctggggcaccacgctttatccgaaatatagtaataaagtagataatccaatcgaataa

SEQ ID NO: 746 - DNA, 954 bp, Listeria monocytogenes-EGD
ttgtataagaattatttgcaacgcacattagttttattactctgttttattttatacttttttactttcccattaggcggaaaagcatattcgcttaataactggaataagccaataaagaactctgtaactacaaaacaatggatgtccgctctacctgacacaacaaacctagcagcgctctctataccaggtacacatgatacgatgagctataacggagacataacatggacattaaccaaaccactagctcaaacacaaacgatgtcattgtaccaacaactagaagcaggaatacggtacatcgatattagagcaaaagacaatctcaacatttaccatgggccaatttttttaaatgcatcactttcaggtgtattagaaacgattactcaatttttaaagaaaaatccaaaagaaaccattattatgcgtttaaaagacgagcaaaacagcaacgatagttttgattatcggatccaaccactaatcaacatttataaagattatttttacactactcccagaactgacacgagcaataaaatccctacattaaaagatgtccgcggaaaaatattattactttcagagaaccacacaaaaaagccattagtcattaactcacgcaaattcggcatgcagttcggcgcacctaaccaagtaattcaagatgactacaatggtccgagtgtgaaaacaaaattcaaagagattgtccagactgcttatcaagcttccaaagcggacaataaactttttcttaaccatattagcgccacttcattaacattcacacctcgtcagtatgctgcagcattaaacaacaaagtagagcaattcgtactcaacttaacatcggaaaaagttcgaggattaggcatactaatcatggacttccccgaaaaacaaacaattaaaaacatcataaaaaacaataaattcaactaa

SEQ ID NO: 747 - DNA, 714 bp, Listeria monocytogenes-EGD
atgaacgctcaagcagaagaattcaaaaaatatttagaaactaacgggataaaaccaaaacaatttcataaaaaagaacttatttttaaccaatgggatccacaagaatattgtatttttctatatgatggtatcacaaagctcacgagtattagcgagaacgggaccatcatgaatttacaatactacaaaggggctttcgttataatgtctggctttattgatacagaaacatcggttggctattataatttagaagtcattagcgagcaggctaccgcatacgttatcaaaataaacgaactaaaagaactactgagcaaaaatcttacgcactttttctatgttttccaaaccctacaaaaacaagtttcatacagtctagctaaatttaatgatttttcgattaacgggaagcttggctctatttgcggtcaacttttaatcctgacctatgtgtatggtaaagaaactcctgatggcatcaagattacactggataatttaacaatgcaggagttaggatattcaagtggcatcgcacatagctcagctgttagcagaattatttccaaattaaagcaagagaaagttatcgtgtataaaaattcatgcttttatgtacaaaatcttgattatctcaaaagatatgcccctaaattagatgaatggttttatttagcatgtcctgctacttggggaaaattaaattaa

SEQ ID NO: 748 - DNA, 2031 bp, Listeria monocytogenes-EGD
atgttaagtggcagaatggtactaatcataaagtatttagaaggcaaaagtgagtcgagtattcgtggtatcagtaaaaagcttgaaatatctgagcggaaagttagatatgatatcgacaatataaatgacgcacttacgcttaatcaattaaaaccaattttgaaggaggggaaaggaaggttagttataccagctgatttggccaaattagcactggaggaaaaagaaacttatatttttgctccgcaggaaagaatcaacattttacagtatttgctattttttaatgttaaaaaggtgaacttggaacatttaagtaaatggatgaatgtatcgcgaacaacgattaaaaaagatttattgttaattgaagaacagttgcaaaagttgaatcttcaattggtttataaacaaggctatagattgattggtaatgaaaacgctctcttgaatgaacgtgtccggattttgcgagattacattgattttatcccaagtgaagatatagaaacaaacttttatagaaaatgtatgttaggcgagatgaaagtatcacttaaaaacattgatataaatggcgtgaataagtggtctaagcaacttttgaaacaaatgggttggattttaaatgatgaatcgtattactggtatttagcgaatattttagtcttttgctggtatataaaaaatgatgtcactaatccacttaaagatgcaaagctggtacttccaatttttaattcccaattaattcaagggatggaagtgattttagattacgagcttagtcaggagcagttaaatattctagtcggctttgtttttttcacgaacaagtatgcaagcttgaatgaagaaatggacttaattacaacagaaacgatagtaaattcgctaatcacatccatgagtgaagaacttaatttgccttttttagaagatgcgattttgtataaaggattactaaatcatgtagctccactgattgaaagagtgagagggaatgtgcaaatttacgaagatacttttgatgttattccaactgaatttctctatattttacaagcaacaagcaaggtggttaaaactataccgttacttgagagcgtcgaaaatgagagtgaaatatctttgttggcgattcattttttagcgagtattcagcgtaatcagcgtgaggagaagttgcatgtattacttgtttgtggtcttggctacggagcaattgcaatgatgaaagatacactaaatagcgagtatcaaatcgcttttgtcgcaactatccccgaatatatgttaaaagattttactgcttgggaagaggtggatttagtcattacaacagcaaaagtgacaaccccactaccaaaatcgactgtcaaagtaagcccagttttaaaagagtgtgatttagtggagttagagaagcaaggcttaaaaaagaagaatattttgactagttactttgcaattaataagcggcttagcttccttgatagcactgtgaagcagcaagttattagcgtcattaaggaagaactaggatatgggcatgttagtattccgaatcgaaagttaggattaagtgatttgattggaatagatgcgattcagattacatcagagagtttaacatggcaaactgctattcagcgagctacaaagctactatctgataatcatttcgtacttccagcttatgcggagaatatcaaacaaattcaagaagaactgggtttttattccgttaaagacgaggaatttgctttgtttcacgggaatgacagccagttagttcagatgaatagtatggctcttttgattaatgaacagccggttatgtttggggagaagcaagccaaagtcatttttattctcgccagtaaagataaaaaagagcaaattccagcaattattacactcactaaaatgacctatcaaacagattttatttctaaattagaacaagcaaaaaatccaattgatgcggatagaattataaaaaaatatgaagaggaggttagataa

SEQ ID NO: 749 - DNA, 453 bp, Listeria monocytogenes-EGD
atgggtgtgaaaatcgacttcttgtctatttcaaacatcaatgtaaatactaaagaagatgcgattctacaattagtgaatgttttagaaaaagctgattatttggcagataaatcactttttgaacaagatattttagaacgcgaacgaacattatcgacatatattggacacgaaatcggcttgcctcatgcccaaagtagtggcgtaaaagagccttgcgtcgttgttgggaaattaagtaagcctgtgaagtggactgaagaggaagaatttgtccaaattgtatttttgatcgcggttcctagagataaccaaaataatttacatttaaaagtactatccaatctagcaagactattaatgcatgaagattttcgaacaaaattaagtaagttagacgacatcgcaacagtggcactattaaacaaaagtgtgaaggaggataactaa

SEQ ID NO: 750 - DNA, 1062 bp, Listeria monocytogenes-EGD
atgagaactcttaaatttttgcaaaagcatttgatgacagcaacttcttatatgattccatttgtcgtagctggggggatattgtttgcgctatccgttatgttgagcggacaagctgccgttcctgatgcgggctggttagcaaaactcaaccaaattggtgcagcaggcctggctctatttattccgattcttggtggttacatagcatttagtatggcagataagcctgggcttgcacctgggatgattggcgcctacttagcaaacgaaattggtgcaggatttatcggaggtattatcgctggtttcttagctggttttgtcgtaattcaattaaagaaaattaaattagcaccttcgatgagaacgttaggatccattttcatttatccattacttgggactttgattacgggtggaattatcgtcttcctcattggagagccaatatcaggttttatggattggatgacaaatgcgctaaatagcttatcaggcgcagcaaaagttccgctaggcgcacttcttggtgcgatgatttcctttgatatgggagggcctgtaaataaagtagcagcaacatttgcacaaacccaagtggatacactcccttatttaatgggtggagttggtgtagcgatttgtgtaccgccaattggtttaggcgtagcaacacttctattcccaaagaaatttactcgtgtagaaaaagattcgggaattgcagcacttttgatgggaagcgttggtataacagaaggagcaattccttttgcaacagcagatccattacgggtcatcccttcaattatggttggttcgattgtaggtaacgtttcggctttcttatttggttgtttaaatcatgcgccttggggtggtttaatcgtgttacctgtagttgataatcggattggttacattgcttctattgcgcttggggcagttgtgacggcaattatgctccgaattttgaagaaagatgctacagagcttgacgaagcactggaggaagggcaagacatagatgacttagatattaattttgaagacatttag

SEQ ID NO: 751 - DNA, 309 bp, Listeria monocytogenes-EGD
atgaaaatagtagcagtaacttcatgtccaagcggtgtggcacatacgtatatgtcagcagaatcactcgaactctccgcaaaaaaaatgggcgtcactattaaagtagaaacacaaggctcctctggtatcgaaaataaattaactgcaaaagaaattgaggaagcagattgtgtcattatcacaaatgatgtcgaaataagggaaagccaacgattcaaagggaaaaaagtggtcaaaatgagcgtttcagaaatcataaaaaaatcggacgcgctaattaaaaagttacaaaccatgttcgaatga

SEQ ID NO: 752 - DNA, 1269 bp, Listeria monocytogenes-EGD
ttgaaattaccaataaaaaaagcagtagaagcacttttgaaattacaaacaacaggggatagcgctacacttatcggcgttggaccaatgtctcgcaatcttttacaagcaagtttcgaattagcgaaggaagatgattatccgcttatgtttatcgctagtcgtaatcaagtagatgcagacgaacttggtggcggatatgttaatggctggaaccaatttagtttcattgatgcaattaaagaagttgctaaagaagtggattttgatgggctatattatgtttgtcgcgatcacgggggaccttggcaacgggatcaagagagaaatgatcacttaccaacagaaaaggcaatggagttaggaaaaaaatcttatatagcggatattgaagctggctttgacttattaatgattgacccaaccaaagacccttttgaagtaggaaaagttattccactggaaactgtactggaaagaacggttgatttaattgcattttgtgaggaggaacgaaaaaaacgtgggctgccagaaatcggttatgaagttggaacggaagaaacaaacggcgggctaacttcaacagaaacgtatgaaaagttcattactcaattaaaagtggaattagaaaaacgcgatttaccattaccgactttcatcgttgggcaaacagggacattaactcgtaaaaccgagcaagtaggtcactttaatttcaaaaacgcctatgatttagcgcaaatggcaaaaaaatatggtgtcggtttgaaagagcataatggcgattatcttgatgatgtaacgcttttagaacatattccatcagaaataacagcgaccaatgtagcaccacaatacggaacagaagagactcgcgcgtacttgaaactagttgagttagagcaaaaattagtagagaatggtttaatcaaaactccttctaacgcacgggaagttttactcattcaatcgattaaaagtgaacgctggcgcaaatggatgttagatggtcaaaaagatatcactatcaatgaaatcatgcaagatgatgatttatcacttgaaatcctagatatagcaggtcattacacattcaatgatgcaatggttaagaaagaaatcaacacattatatgccaatttagctgcgaataatattgatggaaaacgctttgttattgatcacatcaaacgccctatccgcaattactccgaatgttacaatttaaaaggagccacaactcgaattaaacaattagctaaataa

SEQ ID NO: 753 - DNA, 630 bp, Listeria monocytogenes-EGD
atgaaaaataaaacaactaaaaaaattatttgtgggggtttggctactgttcttttatctagttcattggttttaccaacaacatctttagcatctacatctaaacaaaaggttcaagattatcaacaagaggaaactttttcagactcacctttaacagaattagacaatcttattgcagaaaaatatataacttttgacagtccactgaaacaatataaagtaaatccgtctattggtagtgaaatgacaacagaaaaaatagaggccgttaacaaacaagtggctgagacaaataatttacttactttagctacaaatgactcaagtaccaatgttatagctgtgactcctgaaggtaaagagacagtagttaaaagaggtttgttaaaaggagcgggagtgaataaagttacataccattggaattacgcacgtataagattgtcaaaaaatacagtaagaacaatgggcgttggcttaagtatagctgggatctggttgccgttgaaagtagtatcaaaagtttgtgcttctctcggtgtaggtacaggttttgttaagcacggaatttggtttgattataattatttttctaacctacttcttactggctatgggtggcagtga

SEQ ID NO: 754 - DNA, 618 bp, Listeria monocytogenes-EGD
gtgaagaagttagttgcttggtttaacggattatcaaaaatgtggaaagtggtagtaataataggcgcagtttttgtagttataatagccttaacaacaggagaggatgaaggtgaacaaacgaagacaaaaaaagacagcaataaagttgtaaaaacggcgagtaggcccaagctttcaaccaaagatttagccttgattaaagctgatttagcagaatttgaagcgcgggaactttcttcagaaaaaattttgaaagatacaattaaagaagaaagttggtcggatttggattttgcgaatgataatattaatcaaatgattggcacgatgaaacgatatcagcaagaaattttaagtatagatgcgattaaaagaagttcagaagcctcggcggatacggaggcatttaaaaagattttcaaagaatggagtgagttcaaaatagagcggatacaagtaaccatcgatttgctgaatggaaaaaaagacagtgaagctgtatttaagaaaacatatccaaatcaaattatctttaaaaaagtgcgcacgaataaattacaaacagccttaaataacttgaaagtaggctacgaattattggatagtcaaaaataa

SEQ ID NO: 755 - DNA, 1893 bp, Listeria monocytogenes-EGD
gtgaaagaaaagcacaacccaagaaggaagtattgtttaatctcaggtttagctattatttttagtttatggataattattggaaacggggcgaaagtacaagcggagactatcaccgtgccaacgccaatcaagcaaattttttcagatgatgcttttgcagaaacaatcaaagacaatttaaagaaaaaaagtgtgacagatgcagtgacacaaaatgaattaaatagtatagatcaaatcattgcgaataatagtgatattaaatccgttcaaggaattcagtatttacccaatgtgacaaagttatttttaaacgggaataaactaacagatataaagcccttagcaaacttgaaaaatttaggatggctttttttagacgaaaataaagttaaggacctaagttcgctcaaggatttaaaaaaattaaaatcactttctttggagcataatggtataagtgatataaacggacttgttcatttaccacagctggaaagtttgtatttgggaaataataaaataacggatataacggttctttcacgtttaactaaactggatactttgtctctcgaagataaccaaattagtgatattgtgccacttgcaggtttaactaaattgcagaacctatatttaagtaaaaatcacataagcgatttaagagcattagcaggacttaaaaatctagatgttttagaattatttagccaagaatgtcttaataagcctattaatcatcaatctaatttggttgttccgaatacagtgaaaaacactgatgggtcgttagtgactccagaaataataagtgatgatggcgattatgaaaaacctaatgttaaatggcatttaccagaatttacaaatgaagtgagttttattttctatcagccagtcactattggaaaagcaaaagcaagatttcatgggagagtaacccaaccactgaaagaggtttacacagtaagttatgatgttgatggaacggtaataaaaacaaaagtagaagcagggacgcggataactgcacctaaacctccgactaaacaaggctatgtttttaaaggatggtatactgaaaaaaatggtgggcatgagtggaattttaatacggattatatgtccggaaatgattttactttgtacgcagtatttaaagcggaaacgaccgaaaaagcagtcaacttaacccgctatgtcaaatatattcgcgggaatgcaggcatctacaaacttccacgagaagataactcgcttaaacaaggaactctagcctcgcaccgctgtaaagctctaactgttgatagagaagcccgaaatggcggaaaattatggtacaggttaaaaaatattggctggactaaagcggaaaacctttccttagaccgatacgataaaatggaatatgacaaaggggttaccgcttatgcaagagtgagaaatgcgtctggaaattcggtttggacaaaaccctacaacacagccggcgctaaacacgtgaataagctatcggtctaccaaggtaaaaatatgcgtatcttgcgcgaagccaaaacaccaattactacatggtatcaatttagcattggtggtaaagtaattggttgggtcgatacccgagcacttaacacattctacaaacaaagcatggaaaagccaacccgtttaactcgttatgtcagcgccaataaagctggcgaatcgtactataaagtcccggtagcagataatccagtcaaaaggggtactttagccaagtataaaaatcaaaagttaattgttgattgtcaagcaaccatcgaaggtcaactttggtaccgaataaggactagttccactttcattggttggacgaaagcagctaatttaagggcacagaaataa

SEQ ID NO: 756 - DNA, 2403 bp, Listeria monocytogenes-EGD
gtgagaaaaaaacgatatgtatggttgaaaagtatactagtagcaatattagtatttggcagcggagtatggattaacacgagtaacgggacaaatgctcaggcagctacaattacacaagatactcctattaatcagatttttacagatacagctctagcggaaaaaatgaagacggtcttaggaaaaacgaatgtaacagacacggtctcacaaacagatctagaccaagttacaacgcttcaggcggatagattagggataaaatctatcgatggagtggaatacttgaacaatttaacacaaataaatttcagcaataatcaacttacggacataacgccacttaaaaatttaactaagttagttgatattttgatgaataataatcaaatagcagatataactccgctagctaatttgacgaatctaactggtttgactttgttcaacaatcagataacggatatagacccgcttaaaaatctaacaaatttaaatcggctagaactatccagtaacacgattagtgatattagtgcgctttcaggtttaactagtctacagcaattatcttttggtaatcaagtgacagatttaaaaccattagctaatttaacaacactagaacgactagatatttcaagtaataaggtgtcggatattagtgttctggctaaattaaccaatttagaaagtcttatcgctactaacaaccaaataagtgatataactccacttgggattttaacaaatttggacgaattatccttaaatggtaaccagttaaaagatataggcacattggcgagtttaacaaaccttacagatttagatttagcaaataaccaaattagtaatctagcaccactgtcgggtctaacaaaactaactgagttaaaacttggagctaaccaaataagtaacatcagtcccctagcaggtttaaccgcactcactaacttagagcttaatgaaaatcagctggaagatattagcccaatttctaacctgaaaaatctcacatatttaactttgtactttaataatataagtgatataagcccagtttctagtttaacaaagcttcaaagattatttttctataataacaaggtaagtgacgtaagctcacttgcgaacttaacaaatattaattggctttcagctgggcataaccaaattagcgatcttacaccattggctaatttaacaagaatcacccaactagggttgaatgatcaagcatggacaaatgcaccagtaaactacaaagcaaatgtatccattccaaacacggtgaaaaatgtgactggcgctttaattgcaccagctactattagcgatggcggtagttacacagagcctgatataacatggaacttacctagttatacaaatgaagtaagctatacctttagccaacctgtcactattggaaaaggaacgacaacatttagtggaaccgtgacgcagccacttaaggcaatttttaatgttaagtttcatgtggacggcaaagaaacaaccaaagaagtggaagctgggaatttattgactgaaccagctaagcccgtaaaagaaggtcacacatttgttggttggtttgatgcccaaacaggcggaactaaatggaatttcagtacggataaaatgccgacaaatgacatcaatttatatgcacaatttagtattaacagctacacagcaacctttgataatgacggtgtaacaacatctcaaacagtagattatcaaggcttgttacaagaacctacggcaccaacaaaagaaggttatacttttaaaggctggtatgacgcaaaaactggtggtgacaagtgggatttcgcaactagcaaaatgcctgctaaaaacatcaccttatatgcccaatatagcgccaatagctatacagcaacgtttgatgttgatggaaaatcaacgactcaagcagtagactatcaaggacttctaaaagaaccaaaggcaccaacgaaagccggatatactttcaaaggctggtatgacgaaaaaacagatgggaaaaaatgggattttgcgacggataaaatgccagcaaatgacattacgctgtacgctcaatttacgaaaaatcctgtggcaccaccaacaactggagggaacacaccgcctacaacaaataacggcgggaatactacaccaccttccgcaaatatacctggaagcgacacatctaacacatcaactgggaattcagccagcacaacaagtacaatgaacgcttatgacccttataattcaaaagaagcttcactccctacaactggcgatagcgataatgcgctctaccttttgttagggttattagcagtaggaactgcaatggctcttactaaaaaagcacgtgctagtaaatag

SEQ ID NO: 757 - DNA, 1452 bp, Listeria monocytogenes-EGD
atgcttactaaaatagctacttatggttgttgtgcaacaagggatttgttcaataaagcatttgttagtgattggaaaaatcattttcaattagtgtcatatcaacagcattgcagtattgtttcactaatgtcaaagccaattgatatcgaactaggagaagaactgctgggagagttaagtaactttgaaaaaagtgtatttaaacaagacgtattaaaatcttttttagaaactttaaaaacaactcaaccagaatatttagtgttagattttcatgtggatacattcaatggttttattgaactcactgatggggggattatcactaatcgaatcgtccgctataagaaattggatatttttaataaaatggaagcaaggaaagttttttcgccgttagaaaatacgactgagtttagaaaacgttggatacagagttttaaccgttttatgcaatttatgaaagaaaattgccctaatacccaaattatcattaataggttagaggttgcacgaatgtattattctttagataaccaaatggaaagcatgatagaacgtagaaaaacaaaagatcaccatactgctgagacattagctaaaattgatgagtgcatagattactttgagcgttatgctatgaataattttgatttacagtcattggactttaattccgaagaatactttggtgcagaaaataatccatggggaacctgttatatgcattacaatccctattattataaaaaaaagtttaaagatttatggaatatagttgaaaatcattttcatgcaccaacaaaattagctagttttgcacctggaggccttgcgaaacaaattccattaggtgtgaccaaattatctgatatggatgaagtaggagtatattatttaacaaatgctacttacttacaaatggaggatcgaccgacaacagataatgcaggttattttttcattgtttatccgcgaaatgggaaaaatgggtatatgcaagagctgagaaaatcaacagcagctttttccattcaaatttttgtccgaattactgatggaaaagagagttctaaatggaacatggtaaatagtggctttcgaacacttacaatacctgatgtgacttctatttctgaaattacagaggctggagaatattatattactgcagaacaggttaagaaacttcaggatcatcctacaaagaaaaatggttggtttctaaccgtttctaagaaaaatcatgatagcctaaaacaattgttaacaaaaaatactcaaaatgacaatgcctttgaagaatatgttcgacttgtaaacgtggaaaaaagaacaaacttaaaatggcgtaaatatcattttgatgaagcaaacttttcgattatagttgctatacgtaactttaaaaacaaagtggtacgaagattaaaattaacaaaagcataa

SEQ ID NO: 758 - DNA, 813 bp, Listeria monocytogenes-EGD
atgattagagcgatttctgtagatatggatgggacttttttagatggaaatggtgaatatgatcgtgctaggtttgagaagatttatgcagaattaatgaagcgtgggattaaatttattgttgcgagcggcaatcaatattatcagcttaaatcattttttcctggcaaggatgaggagcttttttatgtggctgaaaatggggcggttatttttcatcaaggagaacttcggagtgtgaatcgttttgatgaaagattagttcaaaagattttgtggacgttgattcaagattatcatgatttgcaagtgattctttgtggggtgaagagcgcgtatttattaaaagccgccgatccagattttaaagcatttgcgaaaaagtactattttgagttacaagaggtggagtcattcgatgtgcttccggatgatacgtttatcaaatttgcgcttgatgtagaagtggctaaaacagggcaaattgtcgaggatttgaatcaaacgtttgttggcgaaattcgcgctgtgtcgagtgggcatgggagcattgatattattattccgggtgtgacgaaagggaacgcgattcagcaacttttgaatgaatggcaagtggcgccagaagatttgttagcttttggtgatgcgaataatgatatcgaaatgttgcaactaacttcaaatagttatgcaatgctagaaagtagtccagaagttcttgctgccgcgaaacatgtggctccttctaataaggaggcgggcgtgttacaggtgatagaggaatacatgaaaaaaagccaaagattttga

SEQ ID NO: 759 - DNA, 555 bp, Listeria monocytogenes-EGD
ttgtcaaaaggaagattagaagcatttagtgatggtgtatttgcaattataattacgataattgttttaggaatgactttaccggatgtatttaccgcagctagcacacaagcattcttatgggaaatttttatatttatcgaaggcggattaatcatcggacaattttggtattcacatagcaggctgttcgatcaagtcacattcatttccacatctgccgtcttatttaatattttatttttactagttttatcacttattccattatttacaagagcaatcatgcaacatccagatatgaccgcaccaattattgggtttgttattactattttgattacttcggtgatattccaattattgcatcacgctgtaaatggaaaagattcaggtatcgacaattggaagtttcgaatctctagtttcatatttgttattgcacttggtattatcagtttcttcgctccacaaatatccaccattttatttattattttcccaatcgctggttggattattcaactcacaaaccgccgtcagcctccaaaataa

SEQ ID NO: 760 - DNA, 948 bp, Listeria monocytogenes-EGD
atggaaaaaagtattgaatactcctgtatagtccctgtttttaatgaagaagaagttctactaaaaacatataaacggcttacagaagtcatgcaaacacttgacggtccctacgaaattatttttgtaaatgatggtagtcgagatctcacgaagagtatgttgcaaaagttaagcgcagaagatagttgtgtaaaagcaatccatttttcgaggaattttgggcatcagattgctattactgccggtgccaattatgctcacggtaaagctgttattgtaattgatgcagatttacaagatcctcctgaattaattattgaaatggttgagaaatggaaagaaggctatcaagttgtatatgcacagcgcctcaaacgaaaaggcgagactttctttaaaaaacaaagcgcttctcttttttatcgtattttaactaaattaacagatatcaatattccagttgatacaggggatttccggcttatggatgcgcaagtttgtcgcgaactcgctggcttacatgagaaaaacccctttgttcgtggccaagtaagttggcttggctttaaacaaacagcccttcattatgaacgagatgaacgcgcggctggagaaacaaaatatccactcaaaaaaatgattaaattatctatagatggtatcacctctttttcttatcggcccttaaaacttgcaagctatcttggcgttttaacagcatttattggctttatttacttaattatagtgctcttccaacgattctttactgatacaacattaacgggctggacttctattattattttacaacttgtttttggagggacaattcttttcattctgggattaattggtgaatacattggtcgaatttatgatgaagtaaaagatcgtccgctttatattatagaagaagaaaatggtttttctgaccaaaaataa

SEQ ID NO: 761 - DNA, 675 bp, Listeria monocytogenes-EGD
atggcagagaaaacaatagtagaaaaattacaactggctaaatataaagaagcagtcatcctaaatcaaccagatggagcggattatttccaaaatctagcaaattacgaagaaaaactagcagacaaacaatacgatttaattttcgattttgttgaaacgctagaagaattaattacgttcgtgcaaaaagttattgctgaaaataaactttccgtggatggatatttattcttcgcttaccctaaaaaaggcaataaaaagttcgctacatatgtacaccgcgatgaattaatgccagcgcttaaaaccgatgaagaaggttacgtcgatggcagcacactcaaattcacgcgaatggttgcactcgatgaaacgtacacggttgttgggctaaaagaagcaacaaaactaaaagcaaaaggcgttaagaaaaataatccttccgcagatgaatacgccgaccatgtacctctagtcgcagaatttctagcagacaaaggcgatttacaagtcttctataacaatctagctacaggataccagcgtgtatgggcgcgctatatttactctgccaaacaaccagcgacacaagaaaaaagacgtttagaaatggtcgatattttgagtcaaggttataaaacaaaagatctttaccgacaagggaaaaagtaa

SEQ ID NO: 762 - DNA, 504 bp, Listeria monocytogenes-EGD
atgacaaacagaacattaactaccaagttactaggaacactaagctatacgcaagaaaatggaacgatgatggatgccgtaattcctttggatggcaaagaagtaaaggttgattatagtatttttgaaaagcttacttcagaagattattttaaagatatcgttactttaactgatcaaattccggaactacacctaaaagcgaaaaaaactattttagagcaatttgatggaaatgatacgcttactatttattttgattttcatacagatgaattgcccaaagaggttttagaagttaccgaatgtgatgcgctagaaaatgtaacaaaggaaatcttaatcgataaactagttctgtcaggcgtttggttttcggaaaatgccaataatgagttggatttaacattcgatttcaaactattaccagaagttagcgatgaacttttagttgtccgttttaatacaaatggagaaattactgaattaacccatgaaagttaa

SEQ ID NO: 763 - DNA, 315 bp, Listeria monocytogenes-EGD
atggaagagatggaacaaccagaaaagaaggtcattattcgtgggaaaggcatccacaataaatggaagtggagcacgattattgtcagtattctttctgtcataattattagtgttttaagttatcagctgtattcagttagtcaaaatatcccagaaaataatactaatggaacaatgcaaggacctggtggaggtgagatgccgagcggaacgccgccgtccggtgaacctggccaagcgccaaatagttcagacgatagttctgactctggaacaagtgatagtactacaagcagcgacggaaccctttaa

SEQ ID NO: 764 - DNA, 2781 bp, Listeria monocytogenes-EGD
atgaatatggtcaaaaatgagtggaaaaaactatttcataataaggtactattaatatcttttatcgcaattctttttatccctataatgtatgcaagtttttttctgaaatctgtctgggacccatatggtaaggcaagtcatctaccagttgcagtcgtgaatttagatgaaacagtagaattccaaggacagaaaatggatgtcggaaatcaactagtcgctaaattaaaaaaggacgattcgcttgactggcgttttgtttctgagaaagaagcaaaacaaggcatgaaagatcttaaatactacatgattgtgacgcttccaaaagatttctctaaaaatgcgacaacacttttagatgaaaatccgaaaaaaatggagattggctatgaaacaaatggctctcttaatttcatcggcgaagaagtaacgaaaatggcgatggaagatttgaaagcccaagtcggaacgagtgtaacgaaaggttatgcagagacaattttcgcccaagttggcaagctgggaaatggcattgtacaagcagcggatggagccgaacaaattgcggatggcggaaacaaacttagcgatgggaacaaagaaataacagcgaatcttgataaattagcaaatagcatgataacttttaaggatggtgctaatgcttttaatgtcggtttaaatcaatatgcttctggtgttgaaaaagcaaacaatggcgcagcgcaactagatgcgggtacgaaaaaactagcttctaatgtaggtccattaaaaaatggcattgctgcacttgatactggtgccaaccaattatcaagtggagttggacaatatacatcaggcgtgaatgaattaaataaaggtacatcatctgctcttgtcggttcatcaagtctcacaaaaggtttgaatgatttaaataatcaactaccaaaccttgagaatggtgtcggtgaattacaaacaggattagagaaattaaacacaggtagtgtaaaactgaaatcaggactagaaacattagattctaacctatcaagtccagcgagtaaatcacaaattgcagaattacaaagtggtttgaatcaatttaagacaggaattaccgaattaaatcaacaagttaacaatactcaattaacgactattgttaataaaagtaaagcaatcgaaccaactattaacaaaattgaagaacatttagctgcactagaagcacttacaagcgggaaccatagtgaacaaattatcgctaaaattgaagctttagaaacattagttcctgaagataaagcaaaattaatcaatgatattaaaccgattctagatgatttagcccaaaaacaaaacgaaatcattcaaatgttgcataaagatttagaagaaatgagccaattattagcagatgttccagacagtattgatgaaattgaagctttacaatctggagttagccaattaaataatggatttaacggtaatccaggcatttacagtggcacaaatgctttaatcgattcaatggtagatattcaaaaagcagtaggtagcgcgaacgatcagaacacattactaggcggtgcaactgtgcttcataacggaattgcagatgcgacgacaggtgtcaaagaattaaatgaaaaagtaccgagcttagcagatggggtaaaccaattaacaggtggcagccaagccctaaataatggcttgaaaaaaatcaatgacggaacaacagaattggataacaaatctggggaactaaacagtggtgctacaaaactcgcaaatggtatgaatgctttttcaggtcaactaccagctttatcaaatggtataaatgccctaaataatggggcaatacaattagcagatggtacgaacgaacttgcagataaagtaccaaaattacaaaatggcgcagtagcattaagtaatggagcaggcgaaatccaaaatggttcagcgcaactagcggcaggttcagcacaacttggaacagggattgacaaattaaatacaggtgcaacagaattatctacaaaattagcagctggaagccaacaaatgagtcaaattaatccaacaaataagaacttcaatatgttcgcaagcccagacaaagtaaaccataaaaattatagtacagttccaaactatggagcagcattagcaccatatgttatgtcactagcgctatatgttggggccctagtattcaacttcgtattcccaatcagaaaaatttcgatgcggggacaaacaagtacagcatggtgggcaagtaaagcttctgtaggcgttttcgtagcaatcgtaatggcactaatccaagcaacagtaatgttagtactcggattgcatatagattcactgattcaattttatgcaatggcaattaccacttcacttgcttacatgttcattatcatgttcctagctatgacatttgataatccaggacgttttgtcgcgatgattttactcattgtacaactcggaggtgcaggtggaacattcccaatgccactaactaatggattcttcaatgcgattcacccattcctaccaatgacttactctatctacggattcagacaagccattacaagcggaatcggcatgaacgtttacttccaaagtttgctcgttctagtaggaatcttcgcagtattcattggactactatggctcgggatgaagcaattgcaaaagaaacatcttgagggagtgtctcaactagataataatcaagaattacaagcagtagaagattaa

SEQ ID NO: 765 - DNA, 1488 bp, Listeria monocytogenes-EGD
atgaagaaagatgtttatctggctggagaccagagtataactgttagtatgatgcttttgagaatgattgcagaagagtcacgttggtatactgtaaatgagctgagcgaacgtttggacatgaatcagagaaccatgcagcgttatattgcagatttgttggagaaaattgaagactataatgaccctaatattcaactgtataccgcaaaaaacaaaggtgtgtttctagaaattacattaggtgcggatgtactcaattttgaattatatcttttagaagagaacgtaacaattatcctcatgaaagctatctttttcgaagaattcacctctgtaaaaaaatttgcgatggattattttttgagtgagacgacgattcggaggtcgttaaaatattttcaagaattgcttgaaccttatgggattaagctgaagcgagaaacgtatgaagttgtaggacctgaggaacaagttaggatgtttttttatagttatttttggcggttgtatcaaggggcgatttggccatttgacatagttaatcataaaatggtggaagaagctacgatgaaagtgacatcgagtctgagacagaacctaacttatgtgcaacagtatcagattgagtatgtgatagcgattaatattattcgaattcggaaaaggcatttagtcgaactaaaaccgaattggaaaaattatttagacctaaataacgattttaaaagtttgactaaaataaaagctgtgtttgaatcactaaatatccaaaaagagagtgagatttatttcttttatttattaatggaaacacgtcctaaattatatgaaaataaagaggtagctagacgagctttggaacctcataaaaagaataattctgatgtttatgccgctaccgaagtttttatacgtgttttttcagaagaaatggccccgatacctcagaaaaaatatgatcttttttttaatagtagcttttcagcacatctattttgtacgttatttaagtatttttcggcggatattaatgggtatgaatatattcgtaaatttaaagaatattatccgaaattgcatcaaaaaatggatgagttgttggatattctttatgaagaaacaggcaatgaattatttttagaaaaggactttttattgacgagatatggtttactcttttcttctattaaaagattaacctattttgaggaagagattcagattgtgctagatactgatttacctaagtttgcagagcttaatttaagacatcaaatttttgattcgttgaaatatcgttataaagtacattttttgaataagaatagtgcgccgcaagcagatgtgattttgacgactgttgctacgccgatgatggtggagcggtataatagagaaaaggtgctccacattggagcagaaccgtcagcacgtgatttctataacatcgtcaatattgtggtcgaagcgatttctactaaatag

SEQ ID NO: 766 - DNA, 990 bp, Listeria monocytogenes-EGD
atgtgcacaagcttcgtattagaaacgttagatggaaaacatttattatcaagaacgatggattttgcttttattttggaggcgaacccaacaattagcccaagaaattatggatggaaatcttctacagacggtgccaattatattaatagatatgcatttgttggagcgggaagagagttagataaatacattttcgcagacggattgaatgaagaaggattaagctgtgcatctctatatcttccaggagaagcagtttatgcgccagcaccagtggaaggaaaaatcaatttagctccacaagaatttttgctttggctgttaggaacttgcgcaacgattaaagatgtggaagcaaagttatcggttataaacttggtggatcaaccagtaccgttacttggaatcacaacaccattacactggattttcacagacaagagtgggcgttgtgtagtgattgaaccaacagaaacatcgcttcgtataaaagaaaaccctgtaggagttatgacaaatacgccacgcatcgaatggcatatcgagaatttacgcaactacacaggtttacaagcaacacaattagcgccggtgaagttcggagagtatatggctaaaccattttcgcaaggtacaggaacaagcaaattaccaggtggttatactccgccagaacgttttgtccgtgcggcatacttgaaagaaaatattataaaagcgaaaaacgaagaagaagctatcacaaatgtgtggtatgtcttgaacagtgtccgcattccgaatggagcggtaattaaagaaagtggtgaccctgatttcacacaatatgtggcatctatgtgttcggaaagcaaaacgtactatttcacctcatacgaaaacaaccaaatcaatagtgttactttgtcgaaggaagttatagaaaatatgaaagaacctactacctatcaagtggataaagtgcaaaatgtgaataaattagtctaa

SEQ ID NO: 767 - DNA, 1539 bp, Listeria monocytogenes-EGD
atgagagaatatttagattcaaaaagccaaaaaaaggtagcgcttcttgagaagattttttatgcggaaaatcatacaagtacacaagaggaactattaaatgatttgaacattacgtatccaaccctcatttctacgattaaaacaatcaattttgatattgaacgctttggctataaagcgttttctattgttcactccgcgccaaatttgtcctataccttaaaaatatcggataattgtagtattcaacttattatcaacgcgtatattagagagtcgcctaaatttcaaattctcgaaactttgttgctggcttccttccctaatctacaagcattggcaaaaaaagtacatgtttcttattctgggataaagaaagaaataaaagaattgaatgaagagctaagggaacggaatttatctatttctacaggaaaccaggtagaaataacgggggatgaattttcattaagaatattctatgccttcctttttttagtcacatatagtggggatcgttggcctttttcttttgttcaatatgatgaaatcaccgacttattagagagttgcccaaaagaaatttatagagcaaactcgatagataaggggatgatgattcactattatgtggctatgcatttattaagagatagaatgaattgtcaaattgacacaactcggcagtttaaagtagccctatataaggcttgcaccgaggagtctaagaaatcagagagtgcgttcattaaaaaggtagcgaaacaacttcctaataggaactataaagaaattacctacacgacgcaaatcatactgagtaccattgttgctttcggtagttattcttctattgaaaaaatgccttcctttttctacatggatgaacagttagaagaaatgggcttcatgaaactagttgattttgccagtgaacgagtaaatgataatctctctattccattttcagaaaaagagatggaattgctccgttactcctttgcgagtataaattatagatatttcttacttgataatttaatcaataagttcaataatattgtgccagggtatacagatcttgatcgaaatataagaaaaatccataaagtgaatcacctagaaccattgattagtcaattagtaaatctaaaagaaatgcgtctattaaaaccgtttgaagaaaaacttgcttcagattatctgatcattttggataagcggattgatttttctatacacaccttgcctattaaagtaactattttatcgaccatatctaatgaaacagccgtatttgattttatgaggtatttttctagttactacaatctggaaataattaatcaagtcgatccggtcgtggatttatatataagtgatttttccgtatctccagaagtgttgacatcgttacgtatcaatcaaccaatagtctatgtaaatactagatggctagaatctgattatgtcaaaattaatgataatctagcgaaaatagcgagaaaaaaatttattgctaataaaaaagattag

SEQ ID NO: 768 - DNA, 2070 bp, Listeria monocytogenes-EGD
atgaagaagctttccatgcgagtcatcctaatcgttaccattattttcattgcttgtgggagcgctaatgtttctatcgcacaagaaagggatacaacgaatatacttccagaagaggagctggattctctttatacctctaatctcattacagaagaagtcgcgcaagacaaaccggcagaggtcgagaatctagaagaagccccaattacggaagatttggtacaaaatccagatgttcttgagcagcctattgccgattcggatgattcggatttaacagtagtaaactcaggtgatttttggacaatttatcgtaatactgtgaacggtgaatatagcttgcatatgtttggtaacgtgccaagtagtaaaccaaccgcttggaatagttatttgaacagaattaaacatatagagattgaagaagctactttgacaggaaatttctcatcgtattttagaaataatgttttcacagtacttgagagtgtgagaattgaacgttcgaatctatctagagtgacgtcttttgcactcgcattttatagttcaggaattgaaaaagttatcattagagataataattatccgacagcaccatctttactcactacggaaggtatgtttaaaaattgttccaaccttatggaggttgatttgagtggtcttgatactagtgcggtaactactatgtgggatatgtttaacagctgtagggcacttgaggaactggatgtaagtcattttgatacaagttcagtaactaatatgtcttacatgttttatgataatagaaatcttgaggtgctggatgtaagcaaccttgataccagttcagtaactaatatgtatgccatgtttgaagattgtactagtcttgaagagctggatgtaagtcattttgatacgagttcagtaactgatatgtatagagtgtttaatggctgtgaaaaactgaagaaactagatgtaagtaatttcgataccagttccgctactgcaatggttcaaatgtttagaaattgtagcgcccttgagaagttggatgtaagtaattttaatacgagcttagtaactgatatgcgtgccatgtttgctggttgtactagtcttgaagcgttagatgtaagtaattttgatacgagttcagtaactaatatggctgccatgttttctgataatgaaaaagtggagaagcttgatttaagtacctttgataccagttcagtgactaacatgggtaccatgtttaaaaattgtacagcgttaaaatctttatatctagataattttacacatgcagcaagctcgacagatatgtttactggaacaacctctttatcttacttgtttgtcagtcacaatgtaagcaattttaatgggttagaaaatacaaactggtatgacgaaaagaattgggtgcagtttgaaactctctcgcaactacagacatatcatcggaaacaaagcgaacctactggctatagaaaaggagctttcctttccttaacgatggatgcgatgggtggacagtttgaagacgcggaggaacaaaaggtacaaaataaattttctggggaatactgggaagaagtgattcctgtaaaagaaggacattattttgacgggtggtaccttaatcaagattgtaccaataagtttgacttttcattgcccgctgatgcatcaataactatctacgcaaaatggatagaaaactatacagtgattattccggcttctatttctttaaatgaaacttctgaattgaaagtggaagggattaatcgaggagataaaaatttgtccgtgggattaaatcgaacagcaacgtctatttctgagagcaacaagctaactttaaccaatacggcagacacaacagtccaatgtttggcaccactgagttgggacgggtcagaaactaatccagaaaaagcgattttaacccttaccccaggttcggaaataacagaaggcgatgcagtcatgaatatttcaatcccagaaaatatccaggcaggaaaatatacggggaatctagtgttttcgattaagtatgaatga

SEQ ID NO: 769 - DNA, 474 bp, Listeria monocytogenes-EGD
atgaagaagaaaaaagtagttgttatatcattactactattgctagtaagtgtcattggaatcagtagttattttctattcaaggataaaataaatctgttggatgtagacccttctgccgttgagtggaacgggaaaaaacagaaggatacaagtggagaagaaaatacaatcgccattccgggttttgaaaaagtaacgttgtatgcaaatgaaacaaaacaagcagttaatttccataatccggaaattaatgattgttacttcaaaatatcgcttattcatccggatggttcggttctatggagatccgatttaatcgaaccgggaaaaggtatgtattccattgaattagaaaaaacgttagcggtaggcgaatatgaaaatgcagtattaaaatatgaatgtttttctttaaacgatcagtcacctttaaacgggtctgaaataaatttaaaattagttgtcgtctag

SEQ ID NO: 770 - DNA, 486 bp, Listeria monocytogenes-EGD
atgaataaattagtattaagtacgttaagtgtagcagcaatgggtatggtgatttttagcggagggacagcctacgctgcagataaagaaggaaatacagtagtggaatattctgttgaaggagattataccttagttgtaccagaaaaagtaaatttatctaatgataatgccacagaaatgtctgtgaaaacaatcaatcgtaacttagaaccaggaaaagaagtagaggttacattatctagtggattatcagccgatggagagattgaattagaacgtgttggcgctacttcggacgtaataaccagtagttttaaaagtaataatagtacagtaacaatggctaatcctgttatcggaagcttttcaggttatgcaatagaggaaacagaagtaagtaaaattcaaattggaagtcctcaaggagacaaaaaagctggagcatatcaaacaacgttaacttttacagctgcttttaaataa

SEQ ID NO: 771 - DNA, 306 bp, Listeria monocytogenes-EGD
ttgaaaaggaaattagttttggcaatggtactaatcagcttttgtgggatgttcctcttatcgcctgaacgagttcaagctagtcaaacagtggttgaggtgttcatttcagaggatgatttggatgtcagtgaagaaaacatacaggaaatccctaaaaaagaactggcagcctcttcagataaggataacaaacaacatatgttacctaaagcaggtgatacagtaactaactataccttgttgggcttagtgctcgtccttatttggttgataatgcaaagaaaaaggaagaagaaggaataa

SEQ ID NO: 772 - DNA, 909 bp, Listeria monocytogenes-EGD
atgaagttatccaatttgaaatactttgttgatgtggctatggaaggaagttttacccgagcatctgaaaaattatttatttcacagcctacccttagtagacgaataaaagaagtagaaacagaattaggtgtagaactgtttattaggaatcgtcattcgctggagttatcaagtgcaggtcaacaatttttaatagaagtaaatgatattttaaaccgagtcaacaagctatcccatatgtttgataatcaaaaaacagcagatgaagctggacaattattaaagattggttatctctcgaatttcaatatgaacgcaatgtatgagctgctcgaatcattcaagcaaagtcatccacatgttcaattctcattaaaaccggatacaccaatgaatttagctgaaggtctttctaatgggcaatatgatttagtttttaatttatccgcttatttccagccgaacatgtctatagaagaagtattatttataaaaaatcatttgcaaattgctatacccgcggaccatcgattccggaaaaagaaaaaagtatattttaatgatttgaagcaagaaatagttattttgctcgaaagaaaacagtctcccatcattgtagactatgttgttagtcaatgtactaaacatggttttaatttaaaagcgaattcgtatgtaaaagatctggatgaaggactagcaatgacatctgttggagaaggattagcctttttgtattccggcatgaatgatggaacattagaagataagtacaatattaaaattatggatattcaagaagaacggaatgaccagaatattgtcgcagccattaataaacagagcgaaaatacactgcttcaagaattattttcgtttataaaaagtagtctattaacaaaataa

SEQ ID NO: 773 - DNA, 1761 bp, Listeria monocytogenes-EGD
atgactgcaaaaataacagaaaaaatgcttttcagcccttcttttgaatacgtggataatggcatcgagcatggagtgctaagtcctttcgaaacaaaagaaatcattttagaaaaaggacaacaaattgctgaaggtttcaaactactggattgttccattaaaatgttaaaagatgtaccagttaagatgcgtgacggtataaccatttataccgatatttatttaccaataacagaagaaaaagttcctactcttatcgcctggagcccttatggaaaaagcgctggaacagctcctcgatacaaaaatctatttaatatgctaggaatggggaatgcctggaattctggccttaccaaatttgaagcacctgatccagcatactggtgcgcacatggatacgctgtctgtaatcctgacatgcgtggcattgctcatagtgagggtaatactacaatgattggctctcaagaagctgaagatggttatgatttaattgaatggttagctaagcaatcttggagtaatggaaaaacagctctaacaggaacatcttatttagccttttcccagtggtatattgcagctgagcagccccctcacctaacatgtatcaatcctactgaaggattagcagatggttatcgtgacttagcttttattggaggcattccagatcctaattttattgagcgtttgcaaatcaaccatgtcagtgctaaaaattcgcaaagagaagatttaacaaaggaaatggaagcatatcctttagctgatagtgctatttggaaagacaaagttgcagatccaagtaaaattacaataccagcttttgttattgcaagttattctaatacgcttcacacaatgggtacatttcgttcttggcgttcacttggttctaaagaaaaatggcttcgtattcatgatcgccaagaatggccatattactatgacgaaaataacgtagaagaattgcgacgcttttttgattattatttacttggcaaggaaaataattggacagatacaccaactgtgcgctatgcattaattgactttcaaggtggcaatcaaactgacttaccatccgaagtttttccacctaccaatagtgaaaacaaacgttattatatgaatggcctattacgtactttacaagaaacacctacttcagatgattttaaagtatcctatactactgaaaacttgccagggagagcatcgttccaaatgacgtttgacaaagaaacgcattttgttggttatccaaaagcaaaattatttatggaagtagatggatacgatgacttggatgtttttgtttggcttcaaaagctagataaattcggcaacgtactaagtgaatttgtcgtaccaaatcacggggccgcacttcaggatttcacacaagaaggggcatctgctttacgctataaaggcgcttggggaagacttcgcgcatccatgcgacaactagattctcaagtttcaacagatgaaattcctgcttatagctttgacaaagtagaaaaactctcttccggagaaattgtagaactagacattattttgagtcccattggtctaacttataaagcaggtgaaacactcagagtagtcctgagtagcaaagatgaacttggctcagtaatgccaggaacgcccggatgcacacctaataataaaggtacgcatatccttcatacgagtaaagagcacccatcctatattcagctaccaataatcaacaaatag

SEQ ID NO: 774 - DNA, 1509 bp, Listeria monocytogenes-EGD
atgataaaaatatctgtaattatccccatttataatgcggaaaattatatagaaaaagctttttccagtttaaaaaatcaaactttagcacaaaatgaatttgaaattttatgtattgacgataagtccacagacaacagccttggaaaattaaaacaacttagcaaaatccataaaaacatgcggataattaatttgcataaaaattcaggcggtccaatgattccacgtaataaaggaattaaagaagcaaaaggaaagtacattattttcttagataacgatgattatcttggtgaagaggcattggaacgcttatttattcaagctgaaaaaaatcaatcagaagttattttcgggaaatatgtgggcataaatggccgaggagttcctcaatctcagtttaaaaagggcaatagaaatgaagcagatattttagctgataatttagtttatacacttgctccccacaaaatgtttcaaactgcatttttgaaaacgaaaaagatttactttgatccgaatattcttattggcgaggaccaatattttgtcatgaaagcttatgttaacgccaaagtaatcaccgttttagccgattatgactattattacgttgtatctcggggcgatgagaatcttagtattaaagaatcaaaaatggatccaagagaaatctgtaaagttgttccagcagtcgtcaaggaaatcgaagcttctccactccatccaacttacaaaaaaactttgattcgcgcttacattcaacgttatttcaatgattatattactggcaattataaccttgattataaaaatatgtcagaaaggcaaaaaacttttgtacaagtgatgaaagatacaattgtttgccatcttgatgaaaaaatgaaaaatgaacttcctactaaaacacggtttatgattgatattattgctgaaaataatcctgaaaaattaatagatgttcgaatgcaaatggaaaacttttctaaaaaccaagtcgttaaagtagaaaatggttatataaaaggccgtttccgcaagatgcgacctcagttagcttacgatgacgtgtacgatattaaccacttaaatagttctaaagtgcagttgcattcagttacattacaaaacaataattacttacttgatatttcactagagcaatcccttctgacaaggtttcaaacagcattacgactatgcttgaaagaacgtgatggcaatctagaaatatggatttcaccattaaaaatgctatcaacagagcggggaatctatgctgtagatagcactctctttaaccacacgtgtatttgggatttatttattgagtcagaaattaatggctttaaaaatcgaaagcgcgttggtaaagatagagactttgaagaaattgtatcttctaacaacacaccactcctcattcaaaataacagttatcaaataaaggcgtattttacaacgccgtttagtaatttatcttttcaaataataagtgaataa

SEQ ID NO: 775 - DNA, 819 bp, Listeria monocytogenes-EGD
ttgacagtagcatgcgggagttctgaagacaatgaagaaagtggagaaataagtacgaaagaaattgaacttaccgttgacgaccctattataccaaccgatgaaaacggtgaagcaactatagagggaactgtagatcctaaatccaaattaaccattgatggtaaagccgtaaaaaaagatgacagcgggagatttacttatacttacagtttaactaacgataatgttgcagaagttgatgtcaaacttctagcggtcagaaaaaattacaaagatgaaaagtacactataactattactaacaattcaaaagcatataacgacaacatggttaaacaagaggcaatacaaaaagaggaagccgagaaagctgaaaaggaacgtaaagaagcggaggaaaaagcaaaacaagaagaagaagctgccgctgcaaaagctgcaacgactgatgaaaacactccttctgatgataccgtatatggtactttagccagtaaagatactttaacaaaagagggagatgcattttataaagatgaagcacttgatgtactctattctacagtagaaaacgatgaaatttttcaagtacttatacaattaggcgacgaaagtacgattcgaaaagatttagataaaaatcatttaacagaattagcacgagattatatggaatctgatgccactcttatacaaactgtctccgatgaatcttttgtttatgaatctccatctataaataaaacatatacagtagattatatgttaaacgatgaaggttatgttattgcggtttatgttacacaagcaaagtga

SEQ ID NO: 776 - DNA, 228 bp, Listeria monocytogenes-EGD
atggcaattgtattgaggttagatcgagtaatggccgaccgtaaaatatctttaaaccagttatcccaagaagttggtgtagcaaatgtaaacttatccaaaataaaaactggtaaagtaagcgccattcgattttctacattaaatgaaatatgtaaagtcttgagctgccaaccaggtgatattttagagtatgtagcggatgactctgttgaaaacgaactttaa

SEQ ID NO: 777 - DNA, 1320 bp, Listeria monocytogenes-EGD
atgaagcacgctaaaaaatctttatttacctttattatatttatgacaattttaagtatcacttttaatcctttttcagcaaaagcagcacctttaatgcttaatttacctgcaccacaagtggatcaactctatattggagatgactatattaccggaaaattacaacaagaagtacctatgcattatcctggcaatgcagcttatgtgctttttaacaataaacaatataatatcaccgactatacggttgaaaatgacgtgaatttccgtctaaaattacctaaaacactggaagctggagatacactaaactattttaccatcactggtaacgtacttgatccagttgcttatcctggacaagaatcatacaaattagccggacctttctcaccaattgaaaaggcaaatatacaagttaattatgtcgacgaaacaaaccaaacacttgcaacatccgatacattatccggaaaactcggtgaaacttatacaacatctccaaaagcaattgatggctaccaagtaaaagaaacaccaacaaacgcaacaggcacctacacaacaaacactgaaacaatacaaataaattacgtatatgaaaaaacagcagtagaaggggcaaacgtatctgtagaatatataaatgaagcaactaatgaatctatcgccccaaccgaaacactttctggaaaaataggtacgactttccaagcagaagtaaaagaaatcgacggctacgaattaagccaagtaccatcaaatcaatccggaacatacaccgaccaaacacaatccgttattttcaaatataaaaaaataacaacgcctgatgaagtcgcaaaagatgtaactgttacgtataaagacactaaaggaaatcaacttgctgatccagttattttaaaaggagacattggatcaactttcgaaacagaagcaaaatcttttaaaggctataaattaactaaaacaccaagtaaccacagtagcgttttcacgagtgatagtcaggaagtagagtatgtatatagtaaagatgacgcggttatcacgccaccagtaactccggttaacccagataaaccaataattaaccctgtaaaaccagttaatccagccacatcaactgtaccaaacaaaaatatttcaaaaaagaataccactaaaactgtaaaccaaacaggtaaaacaagcacagctctccagttaccaaaaacaggtgacagcgaaaataatttaccattaattatcggtgttagtttgttaatcagcggagtttatatctttactacaagaagaaaacgagtgaaataa

SEQ ID NO: 778 - DNA, 273 bp, Listeria monocytogenes-EGD
atgaaaattttagcagtgtgtggacttgggcaaggaacaagcttaattttacgaatgaatgtagaaacagttttacgcgatatgggagtagacgcagacgtggagcatattgatgtatcagctgctcgctcaatgaatgtggatattatcgttacaagccaagagttagcagaaacacttggaacagatacaagcgccaaagtagtcatcgtcaacaactattttgacaacgcagaaattaaaaatgcattatccgcagcaatcaatagttaa

SEQ ID NO: 779 - DNA, 1107 bp, Listeria monocytogenes-EGD
ttgaatgaaagaatatttcgcgaaaacactcgcccagtccaagtgggtaatttaactattggtggtagtgaggaattaactatccaaagcatgactactacaaagacacatgatgtcgaagcaacagtagcagaaattcaccgattagaagaagctggttgtcagattgtgcgagttgcttgtcctgatgaacgtgcagcgaatgctcttagtgccatcaagaaaaagattcatattccgcttgtggcagatattcattttgattaccgactagcacttaaagctattgatgcaggtgttgacaaaattcggattaatcctggtaacattggtcgccgtgatcgggtggaaaaagtggttaatgctgctaaagcaaaaaatattccaatccgtattggggttaatgctggtagtttagaaaagaaaattattcaaaaatatggttaccctactgctgacggaatggtagaaagtgcacttgcccatattaaaattctcgaagatttagatttttatgatatcattgtttctttgaaggcttctgatgtgaatttagcaattgaagcttatgataaagctagtcgcgcatttaattatcctctgcatctcggaattacagaatctggtacacaatttgctggaggaataaaaagtgctgctggtttaggagcgatactcagtttgggcattggaaatacattacgagtatctttgagtgctgatcctgtggaagaaataaaagtggcccgggaagttttaaaatcatttggtctttcctcgaatgccgcaatgcttatctcctgccctacttgcggtcgaatagagattgatttaattcgtatcgctaatgaagtggaaaattacatagcaaagattgaagttccgattaaagtagccgtgcttggctgtgcggtcaacggccctggagaagctcgcgaagccgatatcggaattgctggttcaaacggagaaggccttctttttagacatggtaaaattattcgaaaagtaccggaagctattatgatagacgaacttaagaaagaaattgatattttggcagaagaattttttgtgaagaaaatagatttggaaagccttagataa

SEQ ID NO: 780 - DNA, 996 bp, Listeria monocytogenes-EGD
atggaaattatcaaaatatctcctcgtggttattgctacggagtcatcgatgcgatggtgattgctaaaaatgcatcccttgatccaaacttgcctcggccaattcatattttaggtatgattgttcataataaacatgtcaccgatgcatttgaatccattggtatttatacagtagatggcgctaatcgagaagaaattttagataaaataaccacaggaacggttatatttaccgcacatggtgtttctccttccgtcaaagcgaaggcagtagcaaaaggcttaacgacaatcgacgcaacctgtccagatgtacttcacacctataatttaattttagaaaaacaagcggctggctatgaaattatttatataggaaaaaaaggacatcctgaaccagaaggcgcatacggaacagcaccagatgttgttcacctagtagaaacgaaagcagatattgatgctctttcattactttccgataaaatttttgttacgaaccaaacaacgatgagcaaatgggatgtcgctgatttaatgcattatataaaggggaaattcccgaaagctattcaacatcaagaaatatgtatggccacccaagtgcggcaagaagctgtcgcattacaagccaaagatgctgatctcactattgttgttggtgatcctagaagtaataatactgctcgtttagcccaagtttcgatagagaaagctggcacaaaggcgtaccgaattgccgatattacggaattagatatagagtggatcaaagacgcaaaaaaagtagcagttacagccggagcaagtacgccaacacaacttgttcgtgaagtgctattgtttttggagcaatttgatgcggcagataaaactacttggaaacgcgagcataatcaggactttgagcgtattctacccaaaacgaagaataagtacatggctgaaaaaagaagtcaacggttagctcacttgaaaaatggcggaagctaa

SEQ ID NO: 781 - DNA, 1500 bp, Listeria monocytogenes-EGD
atgaaaagaaacaaaacagcattaagaatcttagtcactttagctgtagtattggcaattactttttgggtagggatgagctcaaaagaagtacaagcagcggtgattgaacacccaacccctattaacgaaatttttactgatccagtgcttactgataatgtaaaaacactgctcggaaaagcggatgtaacagacgaagttacgcaaaccgacttagatagtgtaactcatttatcagcaaaatcagcaggaataacaacaatagaaggattgcagtatctaactaatttatcggaattagaattaatagataatcaagtaaccgatttaaatcctcttactaatttaacgaaaataacagaacttagattatctggaaatccgttaaaagatgtgagcgcgcttgctggattaaaaaatctaaaaacgatggatcttatttatacagatattacggatgtgacaccacttgcaggactttccaatttacaggtgttaaatttagatatcaatcaaataactgatataactccacttgcaggactatctaatttacaatttttatcgttcggaagtactcaagtaagtgatttgacgccacttgctaatttatctaaactaaccacactaaacgctatgaatagtaaagtaagcgatgtttctccacttactggtttatctaatctcacagaagtttatttggaagagaatcaaattagtgatgtgagtccgcttgcaaaattacccaacttatctattgttactttaacgaatcaaacaatcaccaaccaacccgtattttatcaaaataaacctatcgttcctaatgtagtaactggcctttctggtgagcttattgcaccggatactattagcgacaatggaacatacactagtcccaatttaacgtgggatttaaacagcttcattaatagtgttagttacacatttaaccaatcagtcactttcaaaaatacaacggctccttttagtggaacagttacacaaccattaacagaagtttacgctgtagtttttgatgtggacggagagcaaacaagtgcgatggtaggtgtgaatgaattaattaacgaaccaactgctccagccaaggaaggttatatattcgatggatggtatgacgcaaaaacagacgggaataaatgggactttgggatagataaaatgcctgctagtgatataactttatatgctaagttcactgagaacgaagaaccaaatgctagtagtccaattaatgtggaaccaaatgacaataattcagacaatgcagaaccaaatgctagtagttcaaataatgtacaagaaaatggaactaacgaaggaataaataatctgaacagttcaggtgaagataaagtcaacatcaagttaccgattactggagataaattgaatgtgcttcctatttttgtaggagcagttcttatcggaattggcttagttttattccgcaaaaaacgtcaaacaaaataa

SEQ ID NO: 782 - DNA, 1647 bp, Listeria monocytogenes-EGD
atgaaaaaacggtggaattcagtattcaaactagttttaatggtaactgctattctcgggcttagcctatatgtaacgacaagccaaggtgtggaggttcgggcagagagcatcacgcagccaaccgcaattaatgtgattttccctgatccagctcttgcgaatgcaattaaaatagcggctggaaaatctaatgtaacagatactgtcacgcaagcggatttagatggaataactactttatcagcatttgggactggagtaacaacgatagaaggagtgcagtacttaaataatttgatagggttagaacttaaagataaccaaataactgatttaactcctcttaaaaatttaacgaaaataacagaacttgaattatctggaaacccgttaaaaaatgtgagcgcgattgctgggttacaaagcataaaaacgctagacctaacttctacgcaaattacagatgtgaccccacttgcaggtctttccaatttgcaggtattatatttggatctcaatcaaataaccaatataagcccgcttgcaggactaactaatttacaatacttatcaatcggaaatgcccaagtaagtgatttaaccccacttgctaatttatctaaactaactactttaaaagctgatgataataaaataagtgatatttcgccacttgctagtttacctaatcttatagaagttcatttgaaaaataatcaaattagtgatgttagcccacttgcgaatacttcaaacttatttattgtcactttaacgaatcaaacaattaccaaccaacctgtgttttatcaaaataatcttgtcgtccctaatgtagtaaaaggtccttctggcgcgcctattgcacccgctactattagtgacaatggaacatacgcaagcccaaatttaacatggaatttaactagttttattaataatgttagttatacttttaaccaatcagtcactttcaaaaatacaacagttccgtttagtgggacagttacacaaccattaacagaagcttacactgcggtttttgacgtggacgggaagcaaacaagtgtgacagtcggcgcgaatgaattaattaaagaaccaacggccccgacgaaagaaggttacactttcacaggctggtatgatgcgaaaactggcggaactaaatgggattttgcgacagataaaatgccagcagaggacatcacattatacgcgcagtttacgattaatagttacacagccacatttgatattgatggtaaattaacgactcaaaaagtcacttatcaaagcttgctagaagaaccagtagcgccaacgaaggatggctatacgttcacaggttggtatgatgctaaaacgggtggaactaaatgggattttgcgacagggaaaatgccagcgggaaatataacactatacgcccagttcactaaaaatgacaacccgaatcccgatgatccaactaccaataccccaacaggaaatggtgatggtacaagtaacccaagtaattcaggaggcaataccacacttccaacagctggtgacgaaaataccatgcttccgatttttatcggggttttcttgctaggaacagcgacgctaattctccgcaaaacaatcaaagtaaaataa

SEQ ID NO: 783 - DNA, 1473 bp, Listeria monocytogenes-EGD
atgaaacagagaaaaacctcagtactacatgttttacttgtagtgacagctatcttgggaattagtttatgggtaaatgcaagtcatgggatgaaagctcaggcagagagtattgcgcaaccagcgccaattaacgaaattttcacggatccagcattagcggacgaggtgaagacggaacttggaaaaactagtgtcactgatgaagttacgcaaacagatttgaatcagataactaaacttgaagcagacgacaaaggaataaattcaatagagggaatacaatatttaactaatttgaatatgttgggtgtatcttccaatcagattactaatattacacctcttgccaatcttactaatttagattctttatatttaggagataataaaattagtgatgtgacgccactttcaggattgacacagttaacattcgtacaattatctatcaatcaaataaaagatgtgacacctcttgctaatctaacgaaattaaattatttagatttacgagaaaatcaaataagtgatgcaagtcctttagttaatatgactgatttaacggttttacatttagaaaaacaacaaataacagccgcgccagtcgtatatcaaactaatttagttgcaccagatattttgaaaaatgcttatggtgaagtagtaccaccaacaacgattagtaataacggaacctttgctagtccaaatatcacttggaacttagatagtttcacgagtgaggttagttatgattttaatcaaaaaatcacactaggtgataatgggaaggtaacttttgcaggaactgttgttcaaccgatagtagaagcgcccgtgaattacattactacatttgatgtggatggaacgacgacgacagaaaacgtggtagtggatacattaataaccgaacctgctgaaccgacaaaagaaggttatactttttctggttggtatgatgcggaaactggtgggaatgaatgggattttgcagtagataaaatgccggctacgaatatgacactttacgcacagttcacgataaacagctacacagcgacatttgatgtggatggtgaaacaactaatcaaaaagtagattaccaagctctgctacaagaaccgactgctccgacgaaagatggctacacatttgtaggatggtatgatgcaaaaacgggtggaactgaatgggatttcgcaactagcaaaatgccaactagtgatataactttatatgctagatttactaaaaatcctagctcagacaattctcaaacagctcccggaaaagatgataaaaacgacaaagataaactaacaattaaagctaacgacagcgcagatgcgacgagtactaaacttccaaaaacaagtgatgattcaagtatgattcctactattttaggaacgcttttcatcggaggtgcaatactaatcttacgaaaaaaaactactaacatttaa

SEQ ID NO: 784 - DNA, 1179 bp, Listeria monocytogenes-EGD
atgctaacattaaaaggaaaatataacgaagcgaaagtttttacagataatgtggacgacaataccatcgggcaaattattacgctgtgtaatcaaccgtttgcgaaggatagtaagattcggatcatgcccgatacgcacggtggtaaaggttgtgtgattggaacgacaatgacaattcaagataaaattgtaccgaatttggttggagtggacatcggttgtgggttgtatgtagtgaagctaaaacctggcaagttaaaaatggattttgataagctggataaagttattcgcgaacgggtgccatctggaagcaaaacgcacgataagcctgtagatgaatttgatttggaaggtatagttgcgccaattcatcacggctgggtagctagaagcatagggacgcttggtggcgggaaccattttattgaggtgaatcaaggctctgacggtatttaccttgtaatccatagtggaagtcgggtgcttggtaaagaaatcgcggaatatcaccaagaggtagcttataaaagattagacatattgcgtaaagaattaaaattagatgcaactgctgcgaaaaaacgtggcaatttagaaatggctaataacttgaacggtgagcgcgaacaagtgaagttggattacgatttatcttatgttactggtgtggatttaaaaaattatttaaatgatatggaaatcgcccaaaaatttgcggcacgtaaccgctatgtcatggcgcaaataattttaaaagcgatgaaatgggataaagcggtcgtttctgcatttgactgtgtgcataattacattgatatcgaacacaacatgcttagaaaaggtgcgacatctgcgcaacttggtgaacaaattatcgttccacttaatatgcgtgagggtagtattcttgcaactggtaaaggaaatgctgattggaattactcggcgccacacggggcaggaagaatgctaagtcgctccaaagcaaaagcgcaaatcagtttggaaagttatcaggcggcaatgaaagacgtttggactacttcggtttcgaaaaaaacaatcgatgaagcgccaaaagcctataaatcagctaaacaattacttgctgatgtagaagatacaatggaaattcaagagataattaaacctttatacaacttcaaagcgtga

SEQ ID NO: 785 - DNA, 504 bp, Listeria monocytogenes-EGD
atgaaaaagtttttaagtatcttaagtattttagttttggctttacttgtaacagcatgtggaagtgattcaagtgataagaaaagtgcgaaaaaagaagaaaaaatggagacagtaacatatatagcggacattaatggcgctaagttagaagcaactttttctcacgtaggtgataatttgagaaaagtagatcaaaaaatggtttatccgttgactgctcttggattagaaagtggcgctaatttagatgatgctacgaaaaagcaattagaagagcaagtcgcttcccaatactctgcatataaagagagcaaaggagcttcactagaaacgaaatttactgatgaagcgctagaattaacaatgtctgttgatttatataaagcagataaggattcagttgcttccttacttggtggaactacagatcctaaaaatgttagtctaaaagaaactgtaaaacaattcgaagctcaagggttcaagaagaaagaatcttaa

SEQ ID NO: 786 - DNA, 663 bp, Listeria monocytogenes-EGD
atgtttggtcgaaaaaaggtttctataccagaggaatatcagcgatttaatcaattttcagcagataaagagagattgctttgcataggagctttcactacagagtgtaaacataaagtagaaacaaaattagatggttcgaataaaatgctgaagctatattatccgaagaatcaagctgcaaaagtcatgaaatattggttgccgatgtttgggattaatgatggctattctgctgtagaggtaatcactaactggattcaagcaaatgattattcaggaatgattgctgcaaatacaacaaataaagttattcgaattgttactaaagcttctcaaaaagaagggctagatgaaacttcacttgtagcagctgctaacaaagtgaagacgtatggcgcatttgatttagatagattaggttatattgtgcgtgtctgctattctttagacttgatcaatgaggagcaagcgtgggacttctttgaagaattatggggcgctgcgacaatgcattttgatgactgggatgagtactgcgttagttatttgaacggagaagaaggtttggatacaaactggtacagtgacggtgttaaggcctatgtggcattacgaaaagacgcagctagtttgttaaataaatatcaactaaaaaactaa

SEQ ID NO: 787 - DNA, 2280 bp, Listeria monocytogenes-EGD
atgacaaaagcatgggatggttttaaaggaaccgcatggcaagaaaacattagtgtaggacagttcgttcaagacaactacactccttacgatggcgatgaaagcttcttagaaaaaagcacaccaagaacaacgaaactaaatgaaaaaataaataaactggtagaagaaatggatgcaaaaggcggcgtacttgatatggataacgctatcgtatccaatgttgcgtctcacaaagctggttacgtagaccaagaaaatgaagttatcgttggtctacaaacagataaaccattcaaattagcgtttatgccaaatggtggccttagaacagcagaacaatgtttaacagacaacggctactccatcgaccaagaattacatgacttctacgtaaaaaatcgttctacagcaaatgatggtattttcagagcatatacagacgatatcaaacgtgcgcgtcactcgcatatcgttagtggtcttccagatgcatactcacgcggaagaatcatcggcttataccaaaaaccagctttatacggcgtagatcgtttaatcgctgaaaaacaacaagacttgaaaaaaattgccatttcttctgatgaaaatattcgtctacgtgaagaaatttggttacaaatcaaagcacttaaagacttaatcgttttaggtaatgaatatggtctagaacttggccgtccagctgaaaatgcaacagaagctgtacaatggacttacatgggctaccttgcttctatcaaacaagcaaacggtgctgcaagctcattcggtcgtattccgattttccttgatatctacatccaacgcgatttagaaaaaggcattatcaccgaattcgatgcgcaagaattaatcgaacaattaacccttaaattaagaatggttcgttttgcaagaacagatggttataacgaactttacgcttctaaccctactttcgttacaacatctatggctggtatgggtgcagacggtcgtcatcgtgtgactaaaacagattatcgtttcttacactgcttagataacctaggaaactccgcggaaccaaacttaactgtcctttgggatgctcgtttgcctgaaagctttaaagaatattgtatgaaaatgagcgtaaaacattcctccattcaatacgaaaatgataaattaatgcaagaagaaggctatggcgatatgcaatgtatcagctgttgtgttagcccacttaacccagaagcagacaaagacaaaggcgaaacacataacctgcaatattttggtgctcgtgtcaacgtacttaaatgtcttcttggtgctatcaacggtggtaaagatgatcttcacaaaaaccaagtattcgatgtagtagaaccaattacaaccgaataccttgaatacgaagaagtactagaaaaattcgataaatcaatggactggttaacagacacatatgtagatgcgatgaatatcattcactttatgacagacaaatataactatgaaagcatgcaaatggccttcttaccatctaaagtaacagccaacatgggattcggtatttgtggattcgctaacgtagtagatagcctaagtgccatcaaacacgccaaagtaaaaactatccgcgacgaagacggttttgtatatgactatgaagtagaaggcgacttccctcgttacggtgaaaatgatgaccgtgccgatgatatcgctgtaatggttcttaagatgttcaaagacaaattagattcccataaactttacaaagatagcgaagcaactgtttctgttctaacaatcacttctaatgttgcttactctaaacaatgtggtaactccccagtgcataaaggacctgtatttgatgaaaacggtaaaatcgttaaagaaccagaattcttcagcccaggagctaacccttctaacaaagcaaaaggtggattcttagataaccttgcaagcctttctaaattaccattccactatgctaatgacggaatctccttaaccatccaaggagctccaaaaatgttcggtaaaacaaccgaagaacaacatcataacctagttggtattcttgacggttactttacaaaaggcggtcaacatatcaacttgaacgttcttaaccacgacgaagtaatcgaaaaaatcaaagctggtatccctgtaatcttacgtatcagcggctactgcttaaatacgaaagatctaaatgaagaacaaaaaatggaactttgtcaaagaatgttccacgaaaaattaatcggttaa

SEQ ID NO: 788 - DNA, 1782 bp, Listeria monocytogenes-EGD
atgatgtctatcaaatctaatattatgaaaatcggagtttgtagtgtaatggttttagtaccactttcacaaacttctttaccaagttttgctgctgaggaaatagcattaaaagaaagccaagatgtggtgaatattccagatccacaattaaagaaagaactaaatttgtatctgaatcaagcggaaaatgctgatattacagaagcgcaaatggcgacgtttagaaatattacgttgaattctgggattaaagatttaacagggatagaatatttaaaaaatattactactctttctataaataatatcaatgcatcctatgaaccaatccagactcttagtagtctagaaaaattagtaataaatggggaaaatgttaacgctgatataattccagacctttctgtcctatcaaatttaacttttttagatttgagtcgaacaaatattgatgatactattttctctaaaattagtaatattcctaacttaaataaattagatattagcaataacaaaggaatcactaaaattagcgaattaaataatttaccaagcttgcaggagttacgtgtgtcagactgtcaaattactaacttcaagggaatagaaaaatttccaaatttaacagcattttatggtgatggccaattatttggaattgattcttttgaaacagatggttttaaaaatattaaaagtagtgaattgacatttgatgcaaatgccaaaactttgtttgttccattcagtattgtcactgtcaatacgattttgaattatgatggattatcattgccttataatacgaaccctgactatactagtatagcgctaggtgatcaaagttatgttgttacaaatgataaaatatctattaatcagcaaggtataacgttaagtgattttacccaagctgattttgatgagttggaagcattcgaagtgtatttaggatttgatagcggaaatatttctaaacccgctaatttagcgaatggaacctatagtttaaaacagattggtagttatagagcatttagtgttgatcactctgtaaatatcacagcacaagataacatctcttatattcaaaacgatacagttacaccagaaaaatttttaaccgatattaaagccgatgctaatggtgggacgattaccagtgaccttactgataaagttgatttcacaaagccaggaaattatacagttacgttaaatgcccaaaacacaaaaggcttaaaaggtgaacctatccaagtcacagtcactatcattgaaaaaacagtgattactgcagaccctgaagtgacttacgatttaaatgaagcaataacagaagaagaattcttagctgaaatcaaagccacaaccaatgatgatacaatgattaccagtgattttgaatccgctgtagatttcacaaaagctggagaatatatcgtcactttaaatgcggaaaatgatactcaaaaagcagcgccactaacggtgaaaataagagtaaatccgaaattaccagatccagtagttccaataccatatccagacccaacaccagacccaacaccagacccaacagttccagtgccaacaccggaagactcaacatcagatgatggaggcgttcaacattcaaactcaagaaatcctagaatttctatttcagattctagcttagagaagttaccaaaaactggagattctctgcccgaatcaggagtgttattgggatttttaaccttagccttaggcatagtaatacgtaaaaaataa

SEQ ID NO: 789 - DNA, 1797 bp, Listeria monocytogenes-EGD
atgtcagttaaatcaaatatcgtaaaaattggggtatgttttgccgtacttgcagtcccagtttcgcaaacaacattaccagtatttgctgcagagcaacctggattaaaagcaagtcaggataacgtaaatattccagattcaacatttaaagcctacttaaatggactactaggacaagcgagtacagcaaatattacagaagcgcaaatggattcattaacatatattactctagcaaatataaatgttactgatttaacaggcattgaatatgctcacaatataaaagatttaactataaataatattcatgcaacaaactataatcaaataagcgggcttagtaatcttgaacgcttacgcattatgggagctgatgttacatccgataaaattccgaatttaagtgggttgactaatttaactctactggatctttcacacagtgctcatgatgattctattttaaccaaaataaacacactgcctaaagttactagcatcgaccttagttacaatggtgcaataacagatattatgccacttaaaacaatgccagaacttaagagcttaaatattcaatttgatggtgtgcatgattatcgagggattgaagattttcctaaattgaatacactgcttgcatatagccaaaccataggcggtaaaaaactgattaactccgatattaaaagtagcaaattaacttataacgcagaaaatcaaacattatacgtcccattcagcttgatgacggaacggactgttaattatgatggctatgtaccagattttgtgaaatcaactgctagcagcgacacttactttacaatgaatgagcaacaagtaaatggtaatcgcctaacaattacaagcgacggtttaacagtaagtgatgtgagtaaaactgattttgataatcttgaaaaaatggaatacaatgcgagaatcgatttgagttatcaatcttacaacactccggaacagttccaaaatggtggatcttatactatctcgatgccaatctatgatcattacttcactgttgaccattctttgaatatcacagctgatagtgaaaaaacatatatagaaaatcaactagttacagaagcaacatttttatcagatattcatgcgaaaactgatgacggatcgaccgttacaagtgatttcgctgataaagtagatttcaatactcctgggacgtacacagttactctacaatccgagaataatgccggattaaaagcaacacctgttcaagtaaacgtaacaattaaagcgaagacaacgattactgcagatgaaaaaatcacttataaagtagacacatctaaaacagaagcagcatttctagcagatattaaagcaacaacaaatgatggaacagcgattacaagtgattttgcgactgttgtagatctttccaaacctggaaaatatgtcgttacactaaacgcagaaaatgatttacaaaaagctttgccagtgcaagtgatggttattgttgaaaaagaaacaccaataccagacccgacgcctacaccaacaccggacccaacaccaacaccagatccaagtccaacacctaatccggttatcaacccaaacgtaaataaaccagaagtgccaagttacaaaattccatcgttaactgtaaatgagaaaaaagctaaagcagaaccaagtaaagaggctttacctaaaacaggggattccttacctgtagcaggtgcaacagtaggatttctattaattggcttaagttggtttgtttctaggaaaaaataa

SEQ ID NO: 790 - DNA, 348 bp, Listeria monocytogenes-EGD
atgattccagttgttagtaagccagccatttattttcatgcagatgtagatgcgaatccagacagtattaaacaagttttatttggaatagaagaagaaggcattccatgtgaattagaaattatgcctttgaaagacgaagtgcaagcagcatttcgagcatctgcgagttctccgcttctagtaggggttacgctgaaaaatgatcatttagtgattcattatcgtaatttacccccagataaaccactattttcagcgcatcgtttttgcgcaagcacactagaaaaccagcgaaatatgggaatgaatgcagcgcgacttgtcaagggtgtaccttttaaataa

SEQ ID NO: 791 - DNA, 843 bp, Listeria monocytogenes-EGD
gtgcataatcctaatttattcaacacgttaaaacaaaatgaatatacattacctaaagacccaaatacatctaatgaaataattgatacaatgttgtcctatctttcttccacggatagcgaattaagagataatattgcttacaatattttttccgagtggcttgttgttcaggataatttaactacggaacaaaaaatgagaatttataattatgcagtaaataagaataatttactgttcaagattaatatcattgactcagatgcagtatttcaacgctcatttttagccttaattatcgcattactactagaaaataataaggttcataatttcttaacggatagtgaaattagggaaactttgaatttgcttattgagctactaaaaaacgaaaaaaatactcattcttttattgaagaaaaaggttgggcacattgcatcgcccatacagcagatgctttagatgaactaatttaccaaagaacaattagtgaaatagacgttaaaaaaataatgactacaattgcatttttttataagacaaacactaaaatgctaaccggcgaagaagatgaacgcctaagtaatatattaataacagccctttttgaacaaaaaataagtaacgaagaagtaaaaaactggttaatttccatttcagaaacaattcccagctaccttccagaaataccacttataaatatcaaacagttcactcaaacacttctaataaaattaaccgttttaaactatgatgtggattttagtttgtttcctattgtaactcgctatataagaaaaaatgatgataattctaccaataaaaaagccctttaa

SEQ ID NO: 792 - DNA, 630 bp, Listeria monocytogenes-EGD
atggctgaatatcaaagtcaactagctagaatccaagcaaaaatcactactttaaaagaaaaagatgttgatttgaatttatttggttcagaaagccatgcctataaactcaatcagcctttgtctaatcaaactattgctgcgtttgaaaatgagcatcaaattgctttaccacaaggttatcgcgcatttttggaacagattggtgatggtggaatgggtccttactatggtttagaaactctagtggacggactttgttcttctcttgattacaaggctgaaaagtatggtgtgcaaacgctgagcaagccttttccacatacagatgactggaatgggccgggttataaagaaggaatgtccgatgaagcttatgatgcttggcaagaactttgcttttctgataaagaagtatttggacttctgcgcattgctaactttggttgcggcgtgtccattaacctagttgtaaacggcccttcttacggagaaatttgggtggatgacagaaataatgacaatggtgtctatcctgatttttactttgggaatgaagaacgtttaggctttcttgaatggtatgagttatggttagataaatctatagaggaatttgaaaaagcctag

SEQ ID NO: 793 - DNA, 1482 bp, Listeria monocytogenes-EGD
ttgaatagtacagcagtagaacggcccgttgatgttaacgggaaatcttatagtagaagtttattagtagtaacaatgattattggggcatttgtagcgattttgaatcagacgttattagcgacggcgctaccaatgattatggatgatttgcatattacagcagcgacggggcaatggttgacgacggctttcttgctgacaaatgggattatgattccgattacagcacttttaattgaaaaaattagttcgaaaacgttatttattacggcgatgactgtatttacaattggtacaattattgcatctgtggcgggttcattcccgatcttgcttactggtcgtattgttcaagcggcgggtgcggggattatgatgccattacttcaaacaatcttcttgctaattttcccgcgtgaaaaacgtggggcggcaatggggctgatgggactcgttattgcgtttgctccagcaattgggccaactttgtctggttggattgtggattcgtatgattggcgcgtattatttcttattttaattccaatcgcggttatcgatataattctagcgttctttggaatgaaaaaagtagtgaagttaactgatacaaaaattgattttctttctattgtaatgtcttcgattggttttggggcattgctatacggatttagttcagcgggtaatgatggttggggagatacaacggttattacgatgttgattgttggtgtcgttgttattgcactatttgtttggcgccaactagttattgataatccgatgcttgaactacatgtgtttaaatatccggtattttcattgtctgttattcttggttcaattgtaacaatggcaatgattggtgcggaaattgtgttgcctctttatattcaaacaattcgcggggagtcggcgcttcaatcaggtctattattacttccgggtgcgattattatggggataatgagtccaattacgggcattattttcgataaaattggggcaaaatggctgacgattactggggttaccattttgactatcggtacaattccatttatgttcttaacgatggatacgccgctttggtatattgttgtattttatgctgtgaggttcttcgggatttcaatggcaatgatgccagtttcgactgcaggtatgaatgcacttcctaaccacttgattaatcatggttcggcagtaaataatacgattcgacaaattgctggttcaatcgggactgcggtacttattactgttttaacgaatgtaaccaaagacaatatgccaggtaaagcgcttatggcgactgatccagctagctttgctcaaaaagcgcaagatgctagtttggacggaatgcgtgctgcgtttatggttgcagcgatttttgcggctattgggatgatcttaagtttattcctaaaaaccaagaaacaagagccaatcgtcaaagaatatacgaaataa

SEQ ID NO: 794 - DNA, 456 bp, Listeria monocytogenes-EGD
atgtttaaaattattgaatcaaaaataaagtctcaaggacaattgtcttatttcaaagattcacatgagtttatatcagaaccaagaattaattctgatacaactattttagtaggttacatatacattggttttgattccgagtataacgaatcaacacaaatttggggatttcaccatgattttaattggaaatcgagtaagttgacacctcctaaatttatacaaggaaagattattttgaatgaagattttataaatcctggcgaaagtaaaagaataggtgcagcaaattcgtgggaaactatttatgatgaaagtagtgggtggcttagatttggaggagtaaataattcggttgaaacctgttatgtagaatttttccctaatactataatgggaattgatgaaaatggcgatatcacggagttatggttgtgccccactttgaaataa

SEQ ID NO: 795 - DNA, 447 bp, Listeria monocytogenes-EGD
ttgagaaaacttgatttcagctacaataatgctaattataatgcagaatttttaatgaaaatattaaccactttaaaagatattaccaaagttgagcagttcactatcgaaataatagatgcagttccaaatgatcaagagcaattcaaggaagaaaaaggactatttagcaaagaagtttttgattttaataatttagtaaaagaatcacatggcataaaaatagattttaaagaaataacaaatattttgaaacaatgtagaacagtttgggaacttagtatgttggttgttacatctgagaatgaattaaatgatagtggaaaagtcttatgtgaagtggagcttatagagggagatttgtttgcaattctttatagtgaagactttaatattgatttatttttagaaaaatttagcactgatgaaattactatagagggctaa

SEQ ID NO: 796 - DNA, 291 bp, Listeria monocytogenes-EGD
cttttttgttacctgaaaaacaaaaaaactttcatccgttatcgaatgagagtttatgcacagcaaacaagctatactacccgcatacgctttttaggaccccgaaaaagagttgcttccgtcttatttggcgagtatcctgacttggcttcatccaacaatcgaaccttcccatacgctaaaaacgtacagtggttatctcgattcttgtccaccttacagttgcgggggcagtttcggcatcgcaccgaattcctctttcagaaatgtacatacattccaccaacataa

SEQ ID NO: 797 - DNA, 1302 bp, Listeria monocytogenes-EGD
atgagaatggtggatattatttccaagaaaagggacggcaaagctttatcaacagaagaaattcagtttttcattgatggctatacaaatggagaaattccggattatcaagcaagtgctctagccatggcaatctttttccaagatatgaatgatcaagaacgcgcggatttaacaatggcaatggttggctctggcgatacgattgacctatctgaaatcgaaggaatcaaagtcgacaaacatagtactggcggtgtcggcgatacaacgacacttgttcttgctccactcgtagcagcagttggcgtaccagttgcaaaaatgtctggtcgtggcttaggacatacaggcggaacgattgataaactagaatctatcgaaggcttccacatcgaactagataagaaagatttcattgacctagtaaatcgcgacaaagtagcagttattggacaatcaggaaaccttacaccagcagataaaaaaatgtacgcgcttcgtgatgtaacaggaaccgtaaactcaattccgcttattgcaagttcaattatgagtaaaaaaatcgcagcaggcgcagatgcaatcgtacttgatgtaaaaacaggtgctggtgcatttatgaaaaccgatgaagatgctgaaaacctagcacatgcaatggtccgtatcggaaataacgtaggtagaaatacaatggcagtcatttctgatatgtcccaaccacttggcgaagcaatcggaaacgctttagaagtaaaagaggccatcgatacacttaaaggccaagggccagaagatttaacagaattagtccttgtacttggaagtcaaatggtcgtactagccaaacaagcggagacactagatgaagcccgcgccaaactaatcgaagtaatcgaaaacggtgcagcactagagaaattcaaaacgttcctttctaatcaaggtggcgatgcaagcattgttgatcaccctgaaaaactgccacaagcaaaataccaaatcgaagtacccgctaaaacatccggtttcgtaagccaaatcgtcgctgatgaaattggaatcgctgcaatgattctaggcgccggtcgcgcaacaaaagaagatgaaatcaatctagcagtaggtttaatgctacgtaaaaaagtgggcgatgctgttaaggaaggcgaatcactcgtaacgattttcgctgaccaagaagatgtcgaaaatgtaaaagcgaaaatctacgaaaacattcaaatttccgaccatgcaatagcgccaacccttgttcataaagttattacagaataa

SEQ ID NO: 798 - DNA, 234 bp, Listeria monocytogenes-EGD
atgaggtatcagaagatcagttttatagtgactggaataattgcagtagtagtagggtatcttattttcacgagcaactatcgacctgatgtcccgaactggctgctctttttatttttggcacttagtattgcagtagcagttagtcaatggagagaaaaaaggctaatttggagttgtattggcctatttgtggctattttaatcagtgtgcattacattttaactatatag

SEQ ID NO: 799 - DNA, 363 bp, Listeria monocytogenes-EGD
atgggcgcttggggttttgatccttgggatagtgatgaagcggcagattggtttggggagtttatgaaacatgtggatatcgattttatcatccagactgtagaagaagttgaaaataatgaatatgattatgaacgcattagagcggtctcatacatagtagaaatgcttggaaaatcatatatttggccagttgactattatgaagatctagataaaatggtggagaaactaattaatttgttaacgttaatgattgaaccagattctgattttttagatatgtggggaaataatcctgaaattataatagctgtacaaaaacaaatagatgtactaaaaaaaagacagcaaggaaaataa

SEQ ID NO: 800 - DNA, 5336 bp, Listeria monocytogenes-EGD
ttgaaaaagaaatttagtatagttattatcagtgtattgttacttggttatttagcgccttttgatactttgttagtaggtgcagatgaaacaacggtttctgaagatacagcagttaaaacggcagaagcagatagtgctactgaaggcatagaaagcgaaacaggttcagatgatgaaacggcagaagagccaaaagaagcaaaagaggcagaagcaagcaaagaaacgacagaaaaagaggaaaaagcgaaaacggaagaaccggcttctaatattaaaacggagattaatacagataaaagccagctgaaacaaactagcttaaaagcagcggtgccagcaggaagtacatataattctttgtttccagacgacaatcttgctaaaaaattagctgtgattatcacaggaaatgcggctgcaacaggtaatgaatcagtggatagtgcagctcttttagcaataagccaacttgatttgagtggggaaacgggcaatgacccaacggatatttccaatattgaaggattacaatatttagagaatttaacaagcctgaatttaagtgagaataatatatccgacttggctccacttaaagatttggtaaacctggtttcacttaacctttcttccaatcgaacattagtaaatctttcaggggtggaggatttagttaatttgcaagaacttaatgtctctgcaaataaggcgttagaagatatttcacaagttgcatcgttgccagtgttaaaagaaattagcgcgcaaggctgtaatattaaaaccttggaattaaagaatccggctggtgctgttttgccagaactagaaacattttatttgcaagaaaatgatttaaccaacttaacttcattagcgaaacttccaaaattaaaaaatctctatattaaagggaatgcttctttaaaaagtttagagacattgaacggggcgacgaagctccaattgattgatgcgagtaactgtaccgatttagaaacgcttggagatattagcgggctttcggaactcgaaatgattcaattaagtggttgtagtaaactgaaagaaatcacaagcttgaagaacttgcctaatctggtgaatattacggcggatagctgtgcaattgaagatttaggaacactgaataatttaccaaaattacagacattagttctttcagacaatgaaaatttaaccaatattactgcaattaccgatttaccacaattaaaaacattaactttggatggctgtggaattacatctattggaacgcttgataaccttcctaaattagaaaaattagatcttaaggaaaatcaaataactagtataagtgaaataaccgacttaccgcgattaagctatttagatgtaagtgtaaataatcttacaaccataggggacttgaaaaaattacctctattagaatggctgaatgttagttcgaatagattatcagatgtgagtacactaacaaatttcccgagtttaaattatattaatatatcaaataatgtcattagaacagtcggtaaaatgactgaattaccttcgcttaaggaattttacgctcaaaataacagtatatcagatatttcgatgattcacgatatgccgaatttaagaaaagtggatgcgagtaacaacctaattacaaatataggtacctttgataatttaccaaaattgcaaagtctagatgtgcattcaaatagaattacaagtacatcagttatacatgatttaccaagcttggagacgtttaatgcgcaaactaatttgattaccaatattggtacgatggataatttaccagatttaacctacgtaaacttatctttcaacagaataccgtcgcttgctccaattggtgacctacccaatttagaaacattaatagtatcagataataattcttatttaagaagcctaggaacgatggacggtgttcctaaactgagaattttagatttacaaaacaattaccttaattacactggaacagaaggaaacctaagttcattaagtgatttaacaaatctaacggaattaaatttgcgaaataatgtttatattgatgatataagtggactttccacgctatcaagactgatctacttgaatttagattccaataaaattgaagatatttctgcattgtctaatttaacgaatcttcaagagttaacacttgaaaacaacaagattgaaaacatttcagcacttagtgatttggaaaatttaaacaagctagttgtatcaaaaaataaaattattgatattagtcctgtcgctaatatggttaatcgaggggcaattgtaactgcgagtaatcaaacatatacattgccaactgtattatcatatcaaagctcgtttaccatagataatccggttatttggtatgacggcacactactagcgccatcatccataggaaactctggtaattacaaggacgggaaaataacttggactaatatgaccgctacgtctagttccactttatttaactttaataggttaaaagacggtttaaccttctcaggaacagtcacccaaccttataaatctgcagccaaagtaactgcagatgcagagcaaacttatacaattggtgatactatttcagaggagcagtttttaaaagatgttaatgcaaaatcatcagacggggcacctgttacaagtgattttgctacagtggtggatttaaacacttttggcgaatatgaagttactttaacttccgaaaaagatggaatccaaggggatagttgcaaagtaattgtcaaagttcttcacggagcgcctgtcatttcggcagaccaaacaattagttatgataaacatgcaactattacagagaaacaatttttagaagatattcatgccagcacagacttggatacagctattacaaccaattttagtacagcagttaacttgaataaaggcggagattatacagttgcactaaactctgaaaatgaggacggcgtgaaagctgaaacggtttatgtcactgttactgtaaataaagacccagcgccgattataagtgctaagacagaaatcacgtatgataaattctcgaaaaaaaccgaagcggcgttcttagatgatatagacgcagatacaaatgatggctctatagtaacttctaattttgctacagcagttaatttagataaagctggtgattatactgttacactgaattctattaatagtgatggtgtagcgggcacgccaacagcgattattgtgcatgtggagaaagagaaaatagcaacaattagcacaaatacggcacaacaatatgaaaaatatgcgaagattaatgaaacgcaatttctaaaagatgttcatgctagtattaacgcgagcccaacaaccgcagttttggaaagtgattttgaaacagtagttaaactagacgtcccaggaacgtacacagtaacgattactgctacaaatgaagatggcggagtatcggcacctaaagaagtttctgtcatagtaaggaaaattccagcaccagagatcactgcagataaggaaataacttatccgaaatttgatgaagtaagtgaagcagaatttttaaatgatattcatgcaactattagtgacaaaaatgtagcgattacaagtaacttcagcacagatgtgaatttaaataaagctggcgattacacagtaacattaaatgctacgaatgaagacggcgtaaaggctacaccggttgaagtaattgtacatgttcaacaaggagaacgccctgttataacagccgatgcaactatttcctatgacaagttcgctaacataacggaagcgaagttcttagaagatattcatgcaacaagtagtgatggtcaaagctctactgtaatcacctctaatttccagaccgcgacaaacttcaaaacagccatgagctacacagttacgcttaatgctgtaaatgaagacggcattagcgcagaaccagtagcagtgaccgttacaataaataaagaaccagccgcggcgttaaaagctgatgcagaagtaagctatgcgaaaaatgaagctgtaaccgaatccgatttcttcaaagatgttcatttagaaggaacggaagcgccaagtacagccaaagcaacaagtaattttgattccgtagtagatagaagtaaaacaggagattatactgttacgataaatgctacaaacgaagatggggctgtttctacaccaattgaagtaattgttcatattgaagcagaaagtgcaccagtaattacagcgaatgcagaagtaaaatataacaaacatgaacaaacagacgaaagaagatttttatatgatagtgaagcaaaaatcgatgaagctaatgtggaaattaaaaccgattttgcagaaaaagtagatattaataaagttggaacttatactgtcacactgactgctacgaatgaagatggccaagctgccaatccagtagaagtgagcgtcattgttagtgatgccgctgctgaaaaagtaaatgtgaaatatgtagatgaaaatggatcagaaattagtgcagcggagaccttaactggtaatttagatgaaacattttctattgatgcgaaatctatagctggatacaaatgtgatgcgactttaagcggtgtattttcaacagttgagcagacagttgtgttccattataaagcaatcaagcctggtgttgtaacgattaaatacgaagatacgaatggaaaagcagttgacgaagataaacaaatcactggcgaagtaggggatgattttgaagctgaggcgcaaacggtgagtggttattcatgccgagcaattgcaagcggtaagataacagaagaaccgcaaactattactttcacatacagtacagcaactccttcaaaaaaatcaggcgaaataacagttcagtatgtagatgagtcaggtaagaaattagctgattctaaaaaggttacagggaacattgatgatagttatagtgtagaagcaaaagcaattgaaggctatagcgtagttggcgatgattctgctaaaggtgtttttaccgaaaaatcgcaaacagttacttttaaatacaaaaaaaatacacaagttagtaaagatgaccctaaagttaaagggaaaacaaatcaaccatcaagtactgatacgaagctaaaagtagacaataattcgttgcctgcaaccggagatactgaaaatatgatattagcagttttaatcggttttaatatgctaatcgttgctagtatattcctttttagaaaaccaaaaacgaaccaata

SEQ ID NO: 801 - DNA, 525 bp, Listeria monocytogenes-EGD
atgaataaaataattatttattcaagtcaatacggcaccagtaaacagtatgcaacagagcttagtcagaagaaagctattccaatgtattctgtggaatctattcctgaatcaatcgttgaagccgatgaaatcatttatgttggttcaatctatatgggaaaagtacttggatttgataagttttctaaaaagtataaaactttgtcgagtaaattaatcgttatttcagctggaatgtatgatccaacacgcaaggaaaatacggataacatcgaattaacggtcaaagaaaaccttcaaaaaactaattttttattaaaagatatattttgtttgaaaggaaaactagatacacagcaactccgcttgaaacataaaatattagtcaatgctttgtataaaagcgcgaaaagaaaaaaagagagtgacttaaatgataatgaaagagatatagttcgtgcttatgaagacgattcgcagattgatttgaataagttagatggtgttttagatagattgtaa

SEQ ID NO: 802 - DNA, 1476 bp, Listeria monocytogenes-EGD
atgagccggatagatattgccgaattgaatgactttctccacggtttgcgaagtagtaatgcggaagctaaagcgatgattagaaagataaaagaagcggcaatggattatgcccaagacaaccgtttaaaaggggaagcagttagtacctccaaacagtatttttctagcacctatacaagtatttgccagagcatcatcgaggcattggatgagagtgaggagcgactggcgcaatatattcgcgagttcggaagccaggtggatagttcgccttccgctagaattgatgcagaaatcttacaagaagcgatggcgaaagtgagccagttgcagcgaaaagaagaagatttgcaccggcaattgacggcaccgaacacgaagccagatatgcaacaagtttatgcagtgaaatcaagaagcgttcatacccaattgctgaaagccatcgaacaagagaacatcctagaaaaatatttagctttcgaacaaagtcatggccagttttttagtgcattagatgaacttattcgagcaaccgcacgtgcggtacaagaattgctacatcatgtgagttttaatgacaaaacagggacttattctgtgccgaaaagtgcggcaaacagcttattgcttatgaaaaaagcacgagataaagcacgaaaagaaaacgacaaagatccgtatccgaaagcttttgaagattacaccgtgttagcttatacttatgtcaatgatcaaggtgaaaccgtgacgatgtggctacttgaaaaagatggaaaacgggtagaaaacaaggagttgcaagatttcttagaaaaacatggtcaggaattagacccacttctttatacaaacctttctggagaagaactcgaacgaaaagtgaatgattcttggaaagagggtatcaactatttaaatggtcaaaaagtatctggagtttctggagccacactaagatcatccgcttatgtggctagtatgaaagattggacagacgatgctgggttgacggatatggcattaggtttaggatttgggattgcagcagctagaaataagcctgtgattaaagaaaaattaaatcctgccgaaacgaagcaaacggtaaatggtgagaaatggaataattattttaaagaaaaatatggtgcggggaatgttcaatggaagcctagttcatttgaggatattataataaatccagaaagattgtatggaagtacaaaaaaagaagttaggcagatgttgggagaagggtggaaagaggaaacatatggatctgcaggtaatggttggaaattcactaatgaaggagatggaatggtgttttaccaccctggagagggaatacacaaaggttcctattatggattctcatcaggagacactggtaaagtaaaaattgttggaaaagattatatagatttttcaaaagataaagcaacaattataaaatttggtggtgaataa

SEQ ID NO: 803 - DNA, 381 bp, Listeria monocytogenes-EGD
ttgaaaaagttaactgtaggtggaaagtttgattggtacatagatactttagaaaaaagtggtatgttcattttggaattatctaatgaagaaatagaaacgttcatttttgaagacttcatagttggagttacctctttttttagtaaaaacaatttgagtgaactgaaggcaaatgaaataattgatgaagatatggaaaaaaatgcttatcttcttagagaaaaagtactaaaaattgataatacggatttgtggaatattaatagcgtaagacaaagttcagagtggctagatatatttagaaggtctgatgaattgaagcgtcaacttaaggaaagatggtctgatgaagaaatagagtatttgaaaacattataa

SEQ ID NO: 804 - DNA, 333 bp, Listeria monocytogenes-EGD
atgaaaaagaatactccagaggcgcttatagatttattcgaggaattgaagaatttatttgagacggatacttctttaaataaccaaaattcgtcccgactacaagaaattttgactacagctaccatcagagtcagaaaagcctctcaaacagtcgaattagaagctcgttctgtctttcaaaatatccataccttatgcttcgtcgaaaaaatccatttaaatcctgaggaagcaaacgtattaaaagagatagagaaaatcgctctttcaaaaggcttttggggcggaatgaacactttaaatgtgaccaatcaatttccaagcaattaa

SEQ ID NO: 805 - DNA, 1815 bp, Listeria monocytogenes-EGD
atgaaagaagtcaactaccgagaagacgactggcgtgaagccaaaagtgccctcgctccatttgccgcagcgaattgggtaggcggtttattcaataatttagaaaaagtatcgaaaaatatggaagaagcggaagaagatgtccaagagttggactcagaccacgcgatttcgtttcaacacaccaactatcgcgggaagtacagcgctatcgaagacgatttgatggtattgtataagtttagttgtcatgcaggggaaaagatggaaaccctggtagaccaaccgttctatgagaagttagacgcgtttgtggatggcatgcaagatttgagtatttcgacgtattctaccaccaaccggattggtgcgaagtcgaaacaaacctatacaactacatctggcggttcgcaagtcatcgagtccatcaaagaaggtgcgacgatcgaagatttgatgaatggcgataacttctacgcaaaccaaatgcaactacaatacagggactggcaacgagcgaatccagatcaagatgtgagtaagaaagactttcaaatgggaatgttacatagtcgggcatttgaatataaatcaattaaagatgaacaacaagagaaagaattttgggtcaacattgtggcaaccgtggtgattgtgggagtcagtattttctgcccacccgccggccttgccttagccgtaggatacgggagtttagaagctggttcggcaatcagtgggaaggactgggtatctggccgtgaactaagtacagaagaacgagcgcttcgtggcggtttagcactgctagatatcgttccaggtgtgaaagcattgagcacaggagcgaaagctgccagtgccggctcgaaacttgtccgcgtaggcgataatgttttagcaggtagcaagaacgtcggcaaaggaaccatcgacaatggcattcaagcaggaaaacaagcgatggatctccggttagccaatgcgaaaaaagtcagcgaagctgtccaaaagaaactcaccaaagaccttgacgatatcggcacgatggccaaaaccatccaaaacaaaaccaaagaaaccttcacacttccaccgagagagcaactcgcctttgcgagaggaggcagtattccggaacaaagcgccaccggagccgccgcgatagccgcgaagaaaaagctgaaagatattatgcagaacatggataatttgaatgtgaagggcggcgggaaagatgatataattgaacaaaataaaagccttaagtttacttcattagaggaatccgagaaatggggaattgatggtttttcagtatggagaaactctttatcttctcgtgaaatccaagctattagggactatacagacatttggcattatggaaatatgaatggttatttaagaggaagtgtcgaaaaacttgccccagataatgcagaaagaattaagaatctaagcagtgctttggaaaaagcagagttacctgataatataattttatatagaggaactagttctgaaatattggataactttcttgatttaaagaatttaaattaccaaaatttagttgggaaaacaattgaagaaaaaggatttatgagtacaactaccataagtaatcaaacgttctcaggaaacgttacaatgaaaatcaacgctcctaaaggtagcaaaggtgcatatctagctcattttagtgaaacacctgaagaagcagaggtattgtttaatatagggcaaaaaatgttaataaaagaagttacggaacttaacggcaagatagaaattatagttgacttattataa

SEQ ID NO: 806 - DNA, 408 bp, Listeria monocytogenes-EGD
atgtttaatcaagcgaaacgaatctccacatttttcacttttaatgggaatggcgaggaagcgtttaatttttatttagatacttttcctgacgcgaaaaaagtcggcctaacttacttcacgaaaccagagcaaggtggcgatatcggtaaagtgctgaatgctacttttgagatgaaaggggcatctttcatgattatggatatgactaacaatgcctccccgaactttagctgggccacaacaaccctttattttgcagatacggaagatgaattcgacaccctttttgaaaaactggctaaagaaggcacggttatgatgggaccagaagcagtagaagcgcttcgaaaagtggcttgggtcacggataaatatggcattacttggcaactcgcattcgtatag

SEQ ID NO: 807 - DNA, 420 bp, Listeria monocytogenes-EGD
atgtatagattattaagcattgcattttttggaatagcagtaatttgtttgttattcccttggatgtctagcgggatagatgcagcaacatttgaattagtatatgagcctgcttataaattaatttggatgcaaccaataattattgttggatatttgggatttttatgtactatatttattccgaaatttcagcgaggtaaaaatagaattgtaccatttataggaattttaatattggttttaggtttacttaatttggcagttcggccattatttggatttgattcattcaactttagtattatagatgcttatgtctctgaattagtagaaccagcatttctcatcgcggtgtcagcaagtattttatctttaattatgtatgcgatatatttaaaaaagtcggagaatctatga

SEQ ID NO: 808 - DNA, 240 bp, Listeria monocytogenes-EGD
atgcaagaggttaccattaaactaaacgaagaactaaaaacaatcaacgtatctctcgtatttgcttccaaaaaccctcaaaccaatcaaactaatgtaaacctctcttactctgaaaaggacgagcaaaaatggttacaattattttatgtggaggaagaaattgaaacattaatccccggaatacgcgaagggaaaataaccgatttaagccagtatgtcatacaagaaatagattaa

SEQ ID NO: 809 - DNA, 1209 bp, Listeria monocytogenes-EGD
atgaacgcaaaaagattttatccaacagcaatagcactttattttacttattttattcacggtattggggtatccattcttggccaatacaaacaagatttcgccggagtatggggagcagataagctttctgacggtacatttgatgtaagtatggttatcgccgttatcgcagcacttggtttagggcgcttgctgacattaccaatttctgggcctttttcagataaatttggacgtaaaccttccgcattaattggtgttgggttatacgcagtttatttcatcggtcttgcctttgcaccgaatatgtatatcgcttacgctttcgcttttgtcggaggagcagcaaactcattcttagacacagctgtaacgccatctgttttagaaattttcacaaaaaatggcgcgattgccaacatgtttactaaattctcaatttctatcggacaattcgtattacctttcgcaatcggtatggttgcggcggcaaatatgtcattccgtacactattcgttatcacaatggctttaatcgttattgacggcttaatcattgcatttatgccattccctccaatgaacaataatgttggcggcgaaaaagcaaaaccagaaaaaatgaaattcaatgcaactagttgggctattatcggtattggttttacttgtacctccactttccaactctggctaaactgtaaccaagaacttggaaaattatacggcatggctgatccgagtaaaattcaatcattttattcattaggaacaatgtgcgcaattttaattaccgctgttctcgtgaagaaatttattttgccagtacgtattctaattctttatccagcgattgctacattaatgctactgattatttatatcgtacaaacacctactatttgcttaattggtggatttgttatcgggtacgctgctgcaggtggagttctacaactagctgtatctacggccaatgaatttttcccaacgaacaaagggaaaatcacttcgattgtcatgatttcttccagcctagcaaactatatcgttttaaacgttgcaagttatattactaaagctggtggtatcgaaggtccaaaatatgtgttattattcaatgtagcgataactgttattggtatcctattagcaatttttgttaatatgcgttacaaaaacgaatctaaaattgctactaaataa

SEQ ID NO: 810 - DNA, 1152 bp, Listeria monocytogenes-EGD
atgatgattaataacgagatacgcgaagtgatcggattacatccgatttttgaaaatgaccaaaaattgactgtggaaaatgcagaagtaatcatcagaaatcatgtgctgataaaattgattcttgatcaagctgattgttacaaagaaatcgattataatatagagcttacagatacaaatgaattagttggccgaaaaaatgcaaaaccaaaagcattgacgctaaaagcaattttaaaagctaaaacaaaagaattaagactaaaaataaataaagtcagtcatcgaatagagctaaaactaggtgttcagcattttgaaaatatctattttgagaaagggatggttttcaccagagaaaatgttcaaacaaaaattacggaaaattatggtagtgactggttgggcacattagataaagcaaagctcaaagtgaaaacaagacaaaccattcagcaaggttccattttttcttatccaattggaaatgaatatggtttcgggcttgtaattggttgttttcagatgtttcggaaacaaaaaataatgcctcaagatagctcgcattaccttaatttaatgatgggagttccgcttgttattcgtagctttaactatacaagtaaacaaaatacagtcgatttaccacttttgaaaaaaaggcagctcttaaatccggaatttattatggatgatttagtgttgcgtggggattttccgattattggtagggtagttttggaagaagcggatattctctttccaatgaatttttcttttaatggagtgtctacaacttatgccggttatcaagcaatagatgaaccagatagggatattattaaaaagtacgaggaagaaattaccattcgatttgattggggatttggaagcaaaacgatgactgcgaaagagtttttgaagagaaggagtggaaaagagtcatttctgtcttattctggattaggaatgacgccaattgctggatattcaaaaaagttaatttctcctaaaacaatattcactccagaagaactaaaacaaatttatgaagttttagatatagatggggagatatcgtttgatgattttaatgaaaaacacaatgggattttggctcaaaacatgttatcaattgatgggaaataa

SEQ ID NO: 811 - DNA, 348 bp, Listeria monocytogenes-EGD
atgtatattaaagattttgccactaaaacggggctttcgattgatacgcttcgatattatgaggaagaaaaattattaatacctgctagaaatgaaaaaaattatcgtgtttatacggaagaagattactgctgggtacagcttttacttaaaatgaagcaaacagagatgacaataacaaacattaaaaattttgctacattacaaaagcaaggagataaaacactcccaaatcggatacaaattttagataatcatatggaaaacttgtatgaacaacagaaagatttagcagaaacgatttcttttgtggctaaaaaagtggatgggtatcgagagaagttataa

SEQ ID NO: 812 - DNA, 309 bp, Listeria monocytogenes-EGD
atgtatttaaaagaaaacacgaattatttatattgcacagcagttattcaaactaccggcaaagtttcttatgaacagctggttgaacatttggaggcgttacgcgctaaaacagtgaaagaaccaggttgtgttttattcgagattgttcctttagaaagtgcactcggcagatttgctttgtgggaaatttggcagaatcaggaatccttttattaccatcacgaacagaactatacgaaagaattttttgctgcggaacttgacacggttgaatttttcgaaagctcagagaaggtaaatttataa

SEQ ID NO: 813 - DNA, 1200 bp, Listeria monocytogenes-EGD
atgaataaatattttaagaacttagcaactatattatttactgtttccgttttaactacttctattattgcctcacctgccatggcatccgcttatgaagagtcacataatgtctcaactatatatactagccctttagatacgccccatgttggtgacacgaaaatcacaggaaaaaccacaccattatcatcttttagcattgcaatttatacctcagaaggcaggctaactggaacattttttggaaccaccaatacagacggcacctattctgttgatttatccgatttcaccgtttatcatccaagtggctatgtgactacaggtaaagtaatttatgaagaaaattcctttgttcgttcaggaacggaaacgggtggtgataaagtgataaaagtaaccgttagttacgactatattcaaactgctattaatgagctattcctaaataataaccccacaggaactattttaactataacagatcaaaatgctattaacgctgtgcaggaacaaattaatactgtaactagttcagaaaaagaatctttccaagaacaacttaataatgctcaacaacaattggatgcgcgcatagcacaagaacaggcagccatacaagctgtcaaccagcttttcttagaggacagcccagtaaactcgattaaagccgaaactacgcaggatttaattgatcaagctcaaacgcttgtcgatgttcttcctgcttccgagttaaaagatacgcttcaggccaacattgtaaaagctcaaacagaactagacgaacgctccaaacctgtaacaccaccaaaaaacgatccagaaccagataacccagaagaaccagtcacaccagtagacccggcaaccccaatacctgacgaaccatctacaccaacagatcccgcaacaccagaaaaaccagaaattaccactccagaaaatccagaatcaacggtagtagaagctgattctagcgaaaatgaaccagaaaaatccgccgattcaaaaatagtaaacaacccgattcaaattactagccaagcaactaaaacagctacaaagcaagcaaaatccagcgcaacaaaaacaaccctgccacttccaaaagcaggggacacggaaaccacatctagcattttattcggtacacttatgctctcttcccttgtccttttcaaacggaaaaaatag

SEQ ID NO: 814 - DNA, 747 bp, Listeria monocytogenes-EGD
ttgcgaaatatgggatacattgatcttcatgtgcatatagatttttattcagagccaataaagattgcaagagaatacgaaaggttgaagatatatgttatttttgttacttatttgccagaaatatttttgaaaactcgatatgaatatgataattataaatatgtaagattaggagtaggatttcatccagatatggtaggggaatatgattttgataagaatgcgtttgaaagagggctacagtacactagatatattggagaagtagggctggatttttctaaatcgaatcaacaatttaaagaacaacaaatagaaatatttcaacaaataactagcccaaaatataacaaaggaaatgtgtattcgatccactccagaaaagctgaggtagaagtactgcaaattcttaaaagcaacaatgttaaaagtgcaatctttcattggtatactgggggaaaacacatgctaaaagatatttcagattcaggatattttttttctgtaaatcataaaatgcttacttcgaaaaatggtattgatattattaaaagcattcctaagtcccaattattatttgaaacggatggtccttttgcgagaaaagagaaaagtattgtttatccaagcaattttaaacagatttatgcggattttgaggaagttattccaggatttgaaaagatagttttctctaattttaaaagactattatttcaaaaagatattgataaaattaattaa

SEQ ID NO: 815 - DNA, 1203 bp, Listeria monocytogenes-EGD
atgagtgaaatccaacatttttcagagtttatagatggggctacaaattattggtataagaataaatttgatcgctgtaatgcatgtgatatggttaacgttatgttaacagtgttcgatggagatatttctacaccaggtaaccaaagtaataaaattcctcggaggatatctgtatctgcaaaagtatatgatgtggatcgttggaatcaatctagagaggaattaatagaattacttaattgggtatcaggagacctatttgagatgtcttttgagaaaaatgaagaactatttgacgcctttccattagaactcccaagtcctcgaaaagagtgtatcacactattttcaggtggattagattcttttgcaggctcctattacaacttcttaaataatatttcaagtgattatgtaggatatgttaataaagccgaggaaagaacataccaaaagcgcttacagtctttttatagaaagattttttctgcaggtggtagtgaggttgatatcaggaataaatatcaaaagcctaaaattttctactttcaatcaactagatctttactatatttatctctagcaatatcaaaagctatttctaattctgtcaaagaaattagaatgtatgaaaatggtatactatctttaaaccctgaatttggcagatacacaacaaaaactacacatcctaagacaatttttctctacaataaacttttagatactcttggatatgatattcgaatagtaaataaatttgaatacgaaacgaaaggtgaaattgttgaaaatatgaatctggaatttaaatcacaaataaaaaatacttttacatgtggaaaaagtagggtcggaaaagagtataaccacacaggacaatgtggcgcgtgtattccatgtatattaaggaaaatatctttggcagcatatgataatgagcattttgacgctaaatattttgtgggttataaaaacgtagcttctgcgtcagaaaaatatttaaaggattacattaacaatatagggtatttcgatgcttatgttgaagcaattaaaaatgaagagatttttggtgaaatatcaaataaccagcataaattccataaggaaaataattacttgagatatcaaaaagtaatgtttgataaatttgcatctgaatacgaaaggtttattgcgaaatatgggatacattga

SEQ ID NO: 816 - DNA, 621 bp, Listeria monocytogenes-EGD
atgggaactaatagagctagaattgataagtctattgaaaatattcttaaaggaaagaatattgaagaagctaaactacacttgccggaaataacaagcacaataaaaactggttttattgaaaaagaaatttcggaacaagtctatcaaagtattataggtgttgtaagcgggaagctttcaaagatttatgacctagatgaagataagtgtaaagagattacaagtgattttattaaaagagaacaatggataaatgagataatggagttggttgaacaggataatgtaactggaatatcagatgttttgttgaaggccttaaaaatagcgctaggagaaactgttaaagctgaacaaaatgaaacttactttgtagagaaactattgtatgaaatcatttttttatctttagaaaacactatgcaaggagctttggaaactttggaggaagggataactattccacaaattcgaaaagaatttataaaacctcttgctgataagctatttgaggaagatataaagacagaaattccagctttagtattaggtaaaacaactttagctgtaataaataataaaatcgctgataagttaaaaaattttggtggcttttaa

SEQ ID NO: 817 - DNA, 1476 bp, Listeria monocytogenes-EGD
ttggaacaaacaaaagtaaaagccgttaccatcgccgtatttgtcgcaacatttatggcagctattgagggtaccatcgtgagtactgcgatgccaacgattgtaagtcagttggacggcatagagttaatgaactggattttttctgtttatttgctaacatcagcagtgacggttccgatttacggaaaactgtctgatttgtatggacgaaaaaatatttttgtgattgcgacaattatttttattattggttcatcactttgtggatttgcacaaaatatggaacaattaattatttttcgcgcgatccaaggtattggagcaggtgggattttaccatctactatgacgattatcgcagacgtgtatccatttgaaaaacgagcaaaagtacttggcttcatgggttccgcttggggtatcgctggtgtatttggaccacttgttggaggatttttagtagaccaactttcatggcattggattttctttatcaatgtcccaatcggcattttgacaatcctacttattttgctttatttacgcgaaaaagtggaacatgtgaaattaccgattgactatttaggtgcctcgctctttaccgtggcactacttggtttattatttgcgttacagcgagccggggaatcgctcaactggacagaaccgctcgtcgttattctttttgccgtttcgattgtgttatttattgctttttattttgtcgaaaaacgtgcaaaagatccgattatgccatttgtattatttaaaaatccagtggtgttaattgggaacttaattggtttcttgattagtgccttcctaattgggattaacgtgtatattccaatgtgggcacaaggaatgcttgggcacggggctacgattgctggatttatgcttgcaccgctttcggttacatggataattggttcatttatcggcggcaaacttttaatgacgcttggaaatcggcatacggttggcattggcgttttaattacggcggcaagtggattaattttagccttattccccgcttccacaaatgacatcttcttctatttaaatagtgcatttatgggatttggttttgggataatttttaccacgacaacagtcactgttcaagatgctgtaccgcgattccaaactggtattgctactgcttctaatacactttttagaacagttggtcaaacaatcggtgtggctgtatttggaactatcttcaactcagttcttacaagcgagttccgcgccgcagctggcagtgaagtgaatcgcagtaatttaaaccaattaattagcccacaaacttcgggtaacgttagtacagaccttgttgatccacttcgagatattttatatagcgggcttcatacggttttctgggtaatgtttgcttgctgtatcgttagttattttattcattttatcttaccgaaaaaacatatttccggcgaaaaataa

SEQ ID NO: 818 - DNA, 408 bp, Listeria monocytogenes-EGD
ttggatcaaaaaataaaggatatctatcatatagatgactctttttctattgataatgaaaaatacaataagtggctaaaatcattgttgaataaaactagaggcgaaattactgaaaatgatgtatatacgatgcttttgcaacaagaactagaggatttagctatagaaaaagcgattgaattcattaaaatagacccattagctggagaaatgtgggatggacaatttttagaacagctagcaggaatctcggtcgataaattggtagcttacaaagaggagttgcaaaaattaataccttatatggataatcaaattaacgaaatcttgtgggattttgaaactgaaaaagaggaattcctatttagatatgcgaagtttaaagataaagtagctaatttatga

SEQ ID NO: 819 - DNA, 366 bp, Listeria monocytogenes-EGD
atgaataatatagatagtattatgtctaaatacaacaaacaacaagttagtaaaattaaagattttctattatctgaaatagattcagacaatatagaagaaaccattgattttgtaaaaagtaacaatcaagagaaaatgggtaaatttcaagatattctgtatgatggtggaatttattcaggtttatttatagaaggaaatcaatatttgatttctagttctaatcgtaaagtcttaataattgacgcagttagcgaagaaaatggagtggataaagagcttactcgaatagaatgttcgcttgaagactttacttttttactgaggaatataaaagatgtcctgagatatgaggagttttag

SEQ ID NO: 820 - DNA, 618 bp, Listeria monocytogenes-EGD
atgtgggtgttaatgaaaaatggtatagtagatgtagaagcaacgaacgcgtataatgctgccgtgctcggcgggaaaatgccgcatgaaagcaatgaagcgcaggaagaagctgagttgttacaggcagttgttcaatcggtgaaagaaggaacagacccggttactgggcaagagataagtaaggcgcaagggtttagtattataagtggcgttatcttttactacgctggtggtgggtataaagggaagaagattaagattcctaagaagtggttggatagaagaaggaatgtcaatagaattgattttctgcagagtgttaatattaaagactttgtagttaaagacaagcatttacgtaattctacggcaaagcgtgcaagaaagtttgatgcagaaacctcagaagaggctaatttgatagtacaagatgcattgaaaaatggtaaagtcaaaaaaattgaagataatggcctaggaagtcaaaggcaaaaatcttattctgcaataatagatacggaaaaaaatgttggaacaaaaggcgagtcgcatattaaaattgtatatgatgaattaaataatgtgtggactgtatatccagttccggcaccatga

SEQ ID NO: 821 - DNA, 351 bp, Listeria monocytogenes-EGD
atgttgaaaaattattatacaggtttcgaaggatatccagaaattgacttttatacttatataaatggtgaaaaaacaggtatagaaatgtgggaaggctactttgacaatattatgaatgaatttagtccagttgatggtagatgggtttctttagcatattattatcatttatatgaaggttggtatgatgaaagcccttgggtgattccagacaacaaaaaagccttggaacaatttggaacaatcgatataaaagtattggataatgttacacaagagattatgatgaaactaattaagttattaaaagataacttagatagcgaaatttttatagagtattcttaa

SEQ ID NO: 822 - DNA, 438 bp, Listeria monocytogenes-EGD
ttgaaaataaaaaaaatattaccacaaacaataaaaagtgaagtttattttatagatgaaattaaaaattttgatattgtaactgaaaaaatgaatgacaatttctacacctacagattaggaagtaacgttatgatgtggttgaatgatgaaggggtaatcggggagatagagtgcattttccccgcacaaatagataatttaatcaccttatgggaagaaaaaaatactgtagtacaaaatggatttccgatgattgatactgatattgttgagaacaaaacttttattccaaaagtaagaatttttaaccatggtgattattttatactatatttcagtaatatgtataaatacaataaagaaattatttctgaaaaccttactttttatgcgaaggatacagaattaattgcaattaaagcggaattaacctga

SEQ ID NO: 823 - DNA, 444 bp, Listeria monocytogenes-EGD
atggaagaacaagagatcattgaaaaagtagaaatcttaccaaataattttagtgaaaatgacagtatttatatatcacaagaaaacattaaaaatttggttttattttcaaaagaaaatcaaacagttttagaattgttgattactccttttctaatttgtgtaaatagtgggttaaaatatgagttacattattatgaaatttcaacagaaattagtaaaaatgatacagaaatcataggttttccttttggaaataagctaccaaaagaaattacagataatatttctcctaaactttttgtaagaagagaagattattcagcttttgagaattttttaagtcagtattttaatgcaatgaagagcatgggatttgcagatgataaacaggctataggtatgattgaacatggtgcaaccttattctacgaagtattataa

SEQ ID NO: 824 - DNA, 177 bp, Listeria monocytogenes-EGD
atgaaatatttagaaaattgcgatgcggataatttatattggataagtgaaatctttgaagatatttctgccaatttgaaaagtcaaaagtttattgattacttgagaaaactggataagaaatttccagagttagaaatgacgcaagatattgatattgctgaaagttatttttaa

SEQ ID NO: 825 - DNA, 357 bp, Listeria monocytogenes-EGD
atgattaatagtaggttttatgaaggttttgaaggagaagcagagctttccttcgttgctggtgataataaacttttaatttggaacggttattttgagactattttagataacttattagattgtaatgtagaaagagagggagttctgaaagaatattttaatcatgagggatggtatgatgattcaccgtggatgattgaagataactctcttaccattattcaattaaaatgttttgatattaacaaaatcaatcagacttccatgaaagatgatttagaggaagtagttaaaacaattatttcatttttggaaaataatcgatttagtaaaatctatattgaatacgaataa

SEQ ID NO: 826 - DNA, 1389 bp, Listeria monocytogenes-EGD
atgccaacaaaaaatcaccgcttgccgaaaaaacatctaccaattagaaaatcaacaacaagatttacaaaaggagttgttacagtgagccgaattgacatcggagaaatacaaacctttgcgtatcaactacatacagccaatgaagcagcgagaaaaagcattaaagacatcaaaaatgccgtgaaaaactataccgaagatggcagtttaaagggaaaagcgattgacgcgtcaaaaaattattaccaaatgacctattttcctttgtgtgatgcgataatcgaagccatgaacgaaagcgaagaaagattagcgcaatatatagctgattttcacgcccaagtggatagttcggctgatgcgagaattgatgcggacggcttatacgaactcgggaaaatgattgatcgcatcgaagctaaaaaagaagcgctggcccagcggatgaatactggaacggaaggacagatgcagagctaccgttcccagctaagtatcgcctacaaacaagaaaatattttagaaaaatacttggcttttgaacaaagtcatggcggcttttttgataatttaacggatctagtccgaggaattcagcaaaccattcgcgaactccagtcgaacattcaatttaacagtaaaacgggcacctatgatatgagcaagctgaatttcaccaccgtgacccggatgcaaaacgcctcaggaaaagcattaaacgacaacgcaaaaacattcaattttgacgaatatcaaaaaacgtatcgtggtcaaatgtgggtgttaatgaaaaatggtatagtagacgtagaagcaacgaacgcgtacaatgccgccgtgctcggtggggaaatgccgcatgaaagcaatgaagcgcaagaagaagctgagttgttacaggcagttgttcaatcggtaaaagaaggaactgacccggttactggacaagagataagtaaagcgcaaggatttggtattataagtggtcttattttccgctatactgctggaggttataaagggaagaagttcaagattcctagggattggttacacagaaggaagaaaaataatggcgtagaagttggaacggactttgggaagataggtaaattagttaatcatcctaatattaaaataaattggtctgaatacgccgaacatggaatgtctagattgaaacaacgtggtctttccaagagtcaagttgacgattttgtggagcatggaaaagttttatcccaaaatgaaggagaaaaatttgcttttataacagaagacggtgttgcaattgtcagcaaagatggcaaattagttactgcttggggtaaaaaagattttgatgaaggaatgaaaaaaataataggaaaattgtatggaaagtag

SEQ ID NO: 827 - DNA, 285 bp, Listeria monocytogenes-EGD
atgagtgaaataaaagttaaagaagcaacattagcaaagtacgcaacaaagttagagtctaaagggaaatcaaccgaatatttaccgatgaaaggtggcaatatgtcctatagccaagccaattccatcaaccattttcgaacagcactgtttgatttggtagacgcggtggacaattttcaaggtgtggtaggaacggatgccaaaagattgaaagaattaggcgcatcatttactcgcaaagaccaagagcttgaacggagcatgggattggggggtaaataa

SEQ ID NO: 828 - DNA, 534 bp, Listeria monocytogenes-EGD
atgttgattccatcctatttgaaaagcacagctaaagagctaagtattaatgattttcttaatgtagaaattgtaacaataaataaagaggaaacttttgagattttatattgcggaacgcttaaagaaatagaaggcgatcagttaattactggggaagcgtacgaaatcccattaaaaattatagcgaaaagcactttatcggggaaagaaattttgctttatgatggcgcatattatggctatgatagtatgttttgtgatgagtttgaggaagaggctacacaaaatagagaattaaaaaaatatcctataaataatttatctaatattcgtttatctataggaattggcattgattatgaatcagagaaagaagaatatgaatttgatgaaaatggtcatgtagttttaattgacgataggcatataccatgggaacaagtaaaaacggacggttttgattttctagaaataacggcaacagatgaaaatggggactctttattaatcttgaccgaagaacttgcgtaa

SEQ ID NO: 829 - DNA, 2382 bp, Listeria monocytogenes-EGD
atgagtaaaaacggaaactttttaaaaaaagttgggttagctttcttaagtattttaatcgttgctagcacaatcttccaaacgacagttgtgaaagcagcaacgagttatggttctcagtttttaaacacagtagaacttttagacaaggacggtgtgccgcaaacggattttggctactatgacaacatggatgtgcattacacttggtctatccctaattcaacaaacgtaaaagcgggcgacacaatggatttcacgctgccaagtcaattggcgctggcaaccgatctcgcttttgacgtgaaagatagtaaaggtcaagtagttggaacggccactgtaaaaaaggcaacaaatcaagtaacactagttttcagtgattatgtagaaaaacattccgatgttaagggcgaactggatttctggactgctttcaaccaaaaagtaattactggaaatgaaacagttgatttagtattccctcttgaaaatggaacaaccgtaatagatgtagaagttggtgaaaaaacaccagttagcccgacagaaacgcttttcaaatatggttgggtagatgctagtaatccaagtttgattcattgggttgttcgcgtgaattacgctaaagttaatatcccaaatgctgttttcaccgacatcattggcgcaaaacaaacattaaattttgattctattaaagcctttcacggaacgtactcagcggaccgagtatttacagcaggtgcgccgatttccagcaccaatttttctgcgacaagtgacgggtttagtgtagctttaggaaatctaactgattcagtgcaaatttcttacacaaccactactacagatggtgggaagtccactcagtatgataatactgctaaattagccggaactgattttgtgacaaagcaaacgtctacttggacaccagcatcaggcggtggcggtgaaggaggaggaacaactggttcagtaacacttacgaaagaagatgcgaaaacaaaagcaaccctcgaaggtgcggaattcaagttggtggattcaaaaggcactgtgctacaagaaaacattacaacaaatgcgagcggacaacttagcattgctgacctgaaatttgacacctaccaattaatagaaacaaaagccccgacaggctataaacttgatacaacaccagtagaattcactattggtgaaaacaaccaagcaattacagtaacaaaagaaaacacacttaatacaggctccgtagaattaacaaaactagatgccgcaaccaaagcgaccttagccggagcaacatttgaattacaagataaagaaggaaatacgctccaaacagacttgaaaacagatgaaaatggcgttctaaaagtaactgatttagtaccaggcagttaccaatttgtcgaaacaagtgctccaacaggctacaagttagacaacagtccagtaagttttgaagttatcgctggtgagacagaccaagtagtaaaagtaacaaaagaaaacacactagaagttggctccgtggaactaacaaagttagactcggcaaccaaagcaaccctagccggagcaacatttgaattacaagataaagaaggaaatacgctccaaacagacttgaaaacagatgaaaatggcgttctaaaagtaactgatttagtaccaggcagttaccaatttgtcgaaacaagtgctccaacaggctacaagttagacaacagtccagtaagttttgaagttgtcgctggtgagacagaccaagtagtaaaagtaacaaaagaaaacacattagaagttggctccgtggaactaacaaagttagactcggcaaccaaagcaaccctagccggagcaacatttgaattacaagataaagaaggaaatacattacaaactggtttaactacggacgaaaatggcgttctaaaagtaactgatttagtaccagggacataccaatttgtggaaacaaaagccccgattggatatgaacttgatacgaccccagttagttttgaaattgtcgctggtgagacagacccaatagtaaaagtaacaaaagaaaacacattagtaccaccaacaccagtaccaccaacaccagtaccaccaacaccagtaccaccaacaccagtaccgcctactccgttaccaccagtaccatatgaaccaactgtgccaccaacaaaaccagaagtaccagttacgcctaagaaaacagaaaacagcgaggatagtccaaaaacaaccccgataagaataactcaaagtcttcctaaaacaggagatacaaatagttttgctggcttaggagtaatcctgatagccttgtcattaagcggtcttctgctgaagcgcaaatag

SEQ ID NO: 830 - DNA, 2754 bp, Listeria monocytogenes-EGD
ttgaaaaaattagtaaaatcggcggttgtttttgcaagccttgtttttattggcacctccgctactatgattacagaaaaagcaagtgctgcttccattgatccggtgcaaaaagtagacggtcaagctacttatatccccaaaggagttagagatgggactgcaacggaagaacatgacggctttgaagatggaactaatagcgtactacagcaagtccctttgcttcgcgcaacaacaggataccctgatgttaatgcctatattaaatcaaacaaattttcaacagcaaaaatagaaaaacaattaaaaagccaatttcctaaattcaactatcgtaatggttacggcaaaccagaaggaatagttattcatgaaacagcaaataattcatctactattacaggtgaaatcaattacatgagcaccaattacaacaatgcctttgttcacgcttttgtagacaagtctcgtataatccaaatccatcctactgaaaatggtgtttggggagcaggacaatatgctaatgctcgttttatccaagttgaattagttcgttcgaagactttcgatgaatttgctcgttctattaataactatgcctattatgctgcgtaccttttagatcaatataaccttcctgttgatagcgcgcacagtgatggcaaaggaacagtctggtcacatgatgcagttacacgttatttaggcggaacaacccatactgatcctgtagcgtattttaatcaatggggctataacttcaataattttgttagtttgattaacgaaaaatataaagcaatgcaagtaaattatgaaaaaatcgaatatgataaagcaatcactgcctatagccgagtcaaaacagcaacaggcaattctgtatggactaaaccaaataaaacagagggtgctaaattagtaaatccactttcatcttattctggtaaaaatttgcgtattatccgtgaagcaaagacatccggtggtacaatctggtatcaatttagcattggtggaaaaacaattggatgggtagactccaaagcccttaatactttctacacaccaagtatggaaaaaacaattacaggtactcgctatgtcctaccaagtaaacaaaccgttcattactacggactacctgtagaagactctgcgattgaccgtggaccactttcgaaattcaatggacaagctctaacactccaacgagaagctacgattgaaggacaactttggtaccgcgtaaaagatcttggctgggttaaagcggctaacttaacaactaccaaatatgatttaatcgaatacgacaaagccatcactgcatatagtcgcgtcaaaactgccgctggtaattatgtttggtcaaaaccaaataaaacagaaggcgccaaacaaggcagcgcactttcgacttattcagggaaaaacatgcgcatcatacgagaagcgaaaacatcaagcggtacaatttggtatcaatttagtattgacggaaaaacaattggttgggtagatacaaaagcactcaataccttctatacacctagtatggagaaaaatttaacggcaactcgttacgttgctcctggtcaagaaacacaacattattacggacttcctgtcgctgattcagccattgaccgtggaccactttctaaatttgcaggtcaaacactgactgttcaacgcgaagccactattgaaggacaactttggtatcgagtgaaagacctaggttggacaaaagcttccactttaactgcaacacaatatgacaaacttgagtatgataaagcaattactgcctacagccgagtcaaaacagcaacaggtaactcggtttggacgaaaccatatcgtacgtctggctataagttagttaatccactttcatcttacgctggtaaaaacttacggattatccgcgaagcaaaaacgtccagtggcatttggtatcaatttagcattggtggaaaaacgattggatgggtagactccaaagcccttaatactttctacacaccaagtatggaaaaaacaattacaggtactcgctatgtcctaccaagtaaacaaaccgttcattactacggactacctgtagaagactctgcgattgaccgtggaccactttcgaaattcaatggacaagctctaacgctccaacgagaagctacgattgaaggacaactttggtaccgcgtaaaagatcttggctgggttaaagcggccaacttaacaactactaaattcgatacgctttcgtatgacaaagccatcaccgcatatagtcgtgtcaaaacagcgacaggtaactcggtttggacaaaaccaaataaaattgaaggcgctcaaaaaataagcgcactttcgacttattcaggtaaaaacatgcgcatcttacgagaagcaaaaacatcaagcggtacaatttggtatcaatttagtgtcggtggtaaaacaattgggtgggttgaaacgaaagcactcaataccttctatacacctagtatggagaagaatttgacagcgacccgttacgttctgaccagcaagaaaaatgagcattattatgggcttcctgttgtagattctgctattgatcggggtccactttccaagttcagcgggaaaacgttaaccgttcaacgagaagctacaatcgaaggacaactttggtatcgtgtgaaagatttaggttggacaaaagctgctaacctaagtgctaaaaagcaataa

SEQ ID NO: 831 - DNA, 414 bp, Listeria monocytogenes-EGD
tgtaaaaacaagcacaatgaagttgaagaaatgaggaattcaagcatgaaattagacgataatgcaaaagaaataatccttaaaaaaagtgaatttctactccataataattttaaattaatagaaataacggacgctactatcacattttcaaacaagaaaattgcttttgtcatcggttatgaaagatatgataatgtaagtaatattaatataaagtttttggaagaaaatgaaatgtttaatcttggatggattgcttttgtaagaagaaatcagacgccgcttcctcagaataaattagataatatattagagttacttgattatgctgaaaaaaattatgctaaagttattaacttacaattttgccaagaaagtagaggaatgatagaagacttcttgaaagaataa

SEQ ID NO: 832 - DNA, 417 bp, Listeria monocytogenes-EGD
ctgactatatggacgttaataaatatatctttatctggcataaagttaaaaacgagtccatgggagactacgacggttttagggacttatgtttccgatactcaaaatgtactaacagaattaggcaatataaaatcattagattttggaatgaaaaaaaatagattcaatcttttaaatgcaccggatgaattatatattaatccaaaacaattttgggaggagtttaatcagcctttcctagataaagcgattcagcgaggagatgacgtagctatggctacaaagccgactgtagaaaacttatacatcgctgggactaaacaacttacgggttttggccgtgaatataaatacttactacaacatggttatgcttatgatgtaaaaacaagcacaatgaagttgaagaaatga

SEQ ID NO: 833 - DNA, 858 bp, Listeria monocytogenes-EGD
atgaacccatctccactaagatatcctggtggtaaacataaaatgtataaatatataaaaaaactagtagcagttaatgatattgatacctacatagagcctttttgtggtggttctggtcttgccttagaacttctattgagcaaagatgtaaatagaataattataaatgattatgactacagtatatactgtttttggaaaagtgtccttgattatacagacgaattaattgatatgattaattcgtctgaagttactatcgaagagtggtttagacaaaaagaaattcgaaaagatatttatgaccattctgtagttgaagtgggattttcaaccctctttctcaatcgaacaaacagatccggtataatcgataaagctggaccaattggtggatatcaacaaacaggaaattatcttattgattgccgttttaataaggaaaagttaatagaaaaaatattaaaaatcgcacaagtgaaagataaaatcgaaatttataatttagaagctttggattttattgatgatgtaataaaagttgagaaaaatggatttactttttttgatccgccctactatcaaaaaggacaaggcttgtatactaatttttatagtactggagatcatcaaactttatctcaaaaaatcataaatgagttaaaaaataaaaaatggatagttacttatgatttagcgccagagattagcagaatgtataataaaatagatagtatttgttttactttatcttataccctgcaagaaaaaaaaagaggtgctgaatttttattcttctcaaaaaaaacacgaagaataaaagatagtgaatatttacattttctggaggtataa

SEQ ID NO: 834 - DNA, 1266 bp, Listeria monocytogenes-EGD
atgaacttagtggcattattaaaatacatgcaagaaaactatggggagcaaagaaccaattatccaatggctgggaatgaagtcgcaaaaaaatttaagcaaggtgttaaaacagcctttgaaaccaccttattaggagaagattacgaaatatctgcatccattggtacaggcggttgggcaaatgtcccttggatagctgtgcatgataaagaaattagcacaagtgtacaagagggagttaatctagtttatttgtttacaaacgattaccaaggtgtttatttatctttaaatcaaggatatacatatgtaaataaaaattataaaaatactaaattgactttaggaaaaattgctcgtttttggcagggaaatttatccacgttaaaatctgaaaatggttttacaattgacccaattaacctcggccggaaggaatctcgttatactaatcttgtgaaaggttatgaatcttgtaatatttatagtaaatattatgatattaaggatttggaagaaactgataatgatttattatcacaagatttgctgcaaatgctcactgtatttaaagaattaaaaggtcatttaatgttggatgacaaaaaaggtatagaagctacaattgatttcataattaataatggaactttcaatgaattaagcgaaaaagcaaaatcagagaaaatcgttgaaatagaaaaaaagcgcaaattagttttaggtaaagaagaaacgcattcaagaaattcggtagttaaggaagaaaaagtaccttatatcaccaaaagagattatgcgaaagaggctattagaaatacggaaaaaggattgcaaggagagtatttggtaattaattatgaaaaagagcggctaataaagaactctattacaaaaccctatgcagataaaatcaatcatgttgctgaaagtggtgatgggcatggatatgatattatttcctatgacataaatccagatgcgccaaatgaagtaatagagatttatattgaagttaaaacaacaactggaaatagagatgctccattttatttatcagataatgaattaaatgttgcgagaataaaaggtgagctttataaaatttatcgggtatatgattataatacagtgccaaaactgaagattattgataatttattcgatgagaccctagaaataaaaccaatcaattatatcgtaaaaggagtgaaccaaaatgacaaacacactaaaaaccagttaccaaaaaacaccttataa

SEQ ID NO: 835 - DNA, 555 bp, Listeria monocytogenes-EGD
atgagcaaaaagttagtaagtattattttcttagggatttgtcttttgttagtgggttgtggtaaagaggttgttgatagtaagtataccggaaaatggaagttggaatcgtcggggattggtatgagcgatggatcaaattacaaggaaacggatgcagcgggtaaagttagtcttgacttggacattgatgcagagggaaatgtaaaagaattgtatattgatgatgcagttgctataactaattcttataaattaaagaaaaaaggtgacgatgaatatcaatatgatggtacattgattagcaaaaaagtatacagttatgaaactgaaagtgataaagagaatgtagaaacaatgctaaaatttcttaaatccaaggataatgtcaaaataactaaaaatgaacaaaaaggggatgaatatcacatagatgtcaaagcagatgaaaaggatttcgtattctctttagaaatgcaaagtggaaaattaattttcaaaaaagtcgatactaaagagaaagttttgattaaggaaacctacaagaaaaattaa

SEQ ID NO: 836 - DNA, 975 bp, Listeria monocytogenes-EGD
gtgtctttatacatgttagtatcaacatttgcagtggcttttatcattacggtgataggtgtcccactatttataccattcttggtgaaattaaaattcggccaaagtattagagatgaaggcccgaaaatgcatgaaaagaaatcaggaacaccgacaatgggtgctgttgttttcattaccgctatgcttattagcttcttagtcttttcgttcatcagtggtgaagttagtgcggcaacgtggctactatttatcgcgctggcattatttggcgcattaggtttcctagatgactatatcaaagtagttcaaaaacgtaatctaggccttacttcaaagcagaagtttttaggccaagtggtgatttcgattttattctatcttgtgtatcattttaatgattttgccgagacgcttaatattccatttacgaatatagaagtggatcttggttggttctttgttatctttattttgttctggttggttggtttctccaatgcagttaatttaacagatggtttagacggtcttgtctctggcctttctgtcattgctttttctgcttttggtgtcattgcattttaccaagaacaaatggatgtcgcgattttctgttttgcgattgtgggtggaatgcttggatttctactatttaataaaaatccagcgaaaatcttcatgggagataccggttcgcttgcactcggtggaagtatcgcagcaatttctattttagtacatcaagaatggctgttacttttaatcggaattattttcgttattgaaacagcatctgttatattgcaagtattttattttaaggcaactggagggaaacgaatcttccgtatgacaccaattcatcatcactttgaacttggtggctggtccgaatggcgtgttgttttaacgttctggggaatcggattagtcggagcaattatctctgtctgtgtagtcattttttaa

SEQ ID NO: 837 - DNA, 1281 bp, Listeria monocytogenes-EGD
atgggtgatagcgaaatttatgtaagtttagacattggaacagcttctgtgaaagtaatcatcgcagaaatggctgacgatagactcaatattatcggtgttgggaatgtcgaatcttccggaataaaaaaagggattattatcgacatagacaagactgtagaatccattaaaaaggcaattgaacaagcagaaagaatggttggcgttgaaatttctcaagtaatagttggggtagtatcgagtcaagtgcatttagaagcttgccgaggaattgtggcagtaggtagcgaaaaccgtgaaattacagatgaagatgtctggaatgtaatggatgccgctcaagttgttcctctatctcctgaaagagaaattattaacactattccagatcaatttgttgtagatggattaactggaattacagatccacgtggaatgattggtgttcgtctagaaatggaaggtacattaatcactggttcaaaaacaattttacataatacgttacgttgtgtggaacgtgcaggacttgaaatttctgatattgctttacaaccacttgcggaggcatctatttccttgtcagaagatgataaagaatttggaacagcactcgtgaatgttggtgcaggaactacaactgttagtgtgtttgagcaaggacgactaacttatactggtgtcattccagttggtggagataatatcaccaaagacttatcacttggactaaacacttctactgcaaatgccgatcgcgttaaattggatcatggctatgcattttatgatgatgcttctccagatgaagtttttgctattgatgttatcggtagtgaccaaaaacaacattttacacaagtagaagtagcagatattatcgaagcgcgtatggaagaaattttccaattagtagtggaagaacttactcgtgtcggtaaaacgcatcttccaggaggttatgtactaactggtggttcgatggctattccaggggcaattgatttggctggaaaaaccttagcagcgcatgttagactagcgattcctgattatattggtgttcgggaaccttcctttacaaccgcagtaggcttaattaaatatgcttatcaaatggctgaattagaaggacgcgacgtaagcagttcggcaaacgaacctcgttacgacgacgaagcaccaaaacaaaaacaacctaaaccaaaacaaaagaaatcagatgacgaaaaagtatcaacgaaaatgaagaattttttcggcgcattttttgaataa

SEQ ID NO: 838 - DNA, 1104 bp, Listeria monocytogenes-EGD
ttgaaaaaaatattaacgggtttaagtacaacattgttgttaactgtcttattattaaccataactggtggagatctaaaagcaaaagctgcatccgatttatatccactacctgctccaattattgatgtctttccagatgaaggattagccaaagatatggctaaaaacttgaacaaagactctgtgaatgacgttattgaccaagatgatttggatgcattaactggcttaggatttgaaacagaaacaattacgaatgattccatgcaattactagagcgtgccatgtttaacaacgtcaatattgttagcgttatggaatttggagaagatctaacggagttccctgatatttctactattccacatctaaacacattattctttaatactccacctgaaggggtaactagaaacttatctcttccagactaccaaaattatcctgaaatggtcaccattaccatgagcggaagcaacttaatcggagcaatcccggatttcactggcatgcctgacttaagccagttatatatggccgacatgatgattacaagtgatgatgtgccagattttcatactatacccaagttatctacgttagatttaagtcacaatcaattaaccaatcttcctgattttcaaaacttaactaacttagctgaattaaatttaagctttaacaatttaacgaataccatgaccaactttaccaatttatccaatttgaataatttaaatctagattataatcacttaaatgaactcccatccaatgtgttaaattcgatttttattgaaaatcaatctgggaccgtgccagatcaaataattaagcaaggggaaacgtgtacaatccaactacctatttacttccaattggcagagattaatatgttggttaatcctacagtgcttggtagttattcagcagatattccggtagaagttgtaactactaccaatgcggatacagaatctattactcttgacacatcagaacttagtccgggtgtatacaatttcaacgttcaattcaatgatgcataccctattactcaagaaggttgcgtatatgattgggtacttacggttaattag

SEQ ID NO: 839 - DNA, 1881 bp, Listeria monocytogenes-EGD
gtgaaaaagaaatttgtatatctcctgttgttggtattgttcatgacagtacttcctttccaaatgttagaggcacaggcagcctccacttcatggattgaacaggagctagatggtaacgagccttttattgccgaaaccgaaaagattttatccaaaaataggcaagacattactctagctgatttggaaaccatccaaaaaatacatgtatttggtgcagattcaatcccaaataaaatatcggattataagaacttaactgctttagaagctaactatggcactattacagaagtgccagagagtgtagggagtttaaaagaattagtcactttaaatgtagatgagaataatttacaggagtttcccatggtgatattccaattacctaaattagaagtcttatatatcagtaggggtaatattacagagatacccacagaaattactacgctagcttctcatttaaaggttttggatgtaagtaatcaaaagttagttactattcccgatagtattttaacaactaactggaaagcaatgcatgatgggaaattaggtatgtctcttgctggtaatcaaattgcttctgatattccagctaattatttggacaattttaatagtgggggaaacatgttggaattttatgataacccaacaatagattatctccaaaaacaagatcaattgacttatacaggaggaactatagaggttcctttaaatactgacttcaaacaattaactcctgataaaacaaatctaggattgaaatctaatatacctctttttagtcaacatgaatttatgtattatgatgatgggacttctgctaatatactcactaacggcgtagcgacagacgtgggggatggttatatcacgattaaaagcaccttatcgacgaactctaatccttttgcaaaagtgagagttccaattaaagttaccgcaccactaaaaggagcggatgttaccgtgcaatacctggatagtaatggagatacgttagccacaccagatatcctttctggtaatgaaggagatgcttatgcttcaacgcctaaaacgatagatggctatacgttgacacaaacacctacgaatgcccaggggacttttacagaggagcctcaaacagtgatctatgtatatacaaaaaatagtgtcgctgcagcaccagttaccgtgaaatatctaaatgaagagggaaaaatattaacagcttccgataacttaactggtaatgtagatgatccataccaaacgaaagcgaaagaatttgctggttacacattggatgaaagcaaattgccgacgaacgcgagtggtgttttcaaaaccaatgcacaaacagtaacgtatgtgtacaaaaccataccagcttcgattaaagcacatgattctacaatgaatgtaggagatacatggagtgcaaaggacaattttgatagtgcagtagattcactcggtgtcgcggttcccttcgatgaggtgaaagtagacggttcggtagacactacgaaagcaggcgtttatccggtaacctatagttttgccggagattctgttacgattaaggtgactgtaaaagcaacagttgttccagcgccaccaataacaccgattaaacctgtcgtaccagcaccagctaacccaaacacaccaagtacacagcaaacacccacgaaacaatccggaactttaaaaataaaagcaacacatcaggaacaaccgatagtagcgggaaatttaaaactaccaactactggggataatctttgggatagtgtgttgtatagcatatttggtttcatcaccgtgtgtctatcttttgttttattctttcgacttaaaaagcaaaaaaatagctaa

SEQ ID NO: 840 - DNA, 450 bp, Listeria monocytogenes-EGD
ttaattggtgaaaaatatttgaagaaatcgaccttatcatttaagccagccataattcctaaaatatatgttaagaacacaagcgcaagtgcaactggagaagcttgcttagcggaacgaagcaccgatgaaaccataaaaccagcactcataaatacagcagccaccagcaactcactagaaaacactcgtacaagctccatcactaaattaccaccgtcaaccccactcggcttcaagaaaagaactagcgccaccgatgctaaaaaagtaatcacccaaaaagccacaaatgataataaattcccaatcattttccaaaaaacaaggctagaccgcgtaattggctgcgcatataaaaattcaattgttccatctgtttcttcttttatcaaggcctgcgcaccaattagtgctgcgtacacacaagctgcaataaaaatatactga

SEQ ID NO: 841 - DNA, 744 bp, Listeria monocytogenes-EGD
atggtgcaatcagccaacaaaataataaacatgacacgagatgaagtggaaaaagcgataactgattttccagtcgcaattttaccactcggagcaacagagcaacatggacatcatttaccacttggagttgatatatttttagcagaccatttagcagaattagtatcggaaaaaacaggagcagtagtcattccaccaatgccatttggctattcttgggtatggcgtgatattccaggaacgatctctattcaacaacatcatgtcgaagcaattattaaagatgtcgcacacagtgtttctcgctatggtgtcaaaatgcttgtcttaataaatggacatgattctaacaataactcgatgaaatatgctgttagagaattagcagatgagttagaaatgcctgttatgtatctattctatccatctctttctgaagtaatggaaaagaattgtgagtctggtacatggcacggaatgattcatgcctgtgaatttgaaacctctttaatgcttgcgactaaaaaagaattagtgcaaatgaaaaaggcagttagagaatatcccgaaaaaccaactctttatgggaaaacaactatttcgctaggtgatttaagcaaaagtggtgtatatggtgatgctagtcttgccacagaggagaaaggggaacagatgatagaactgtttgcagaaaagatgacagcacttcttttagaaggttatggttatttaactaaataa

SEQ ID NO: 842 - DNA, 609 bp, Listeria monocytogenes-EGD
ttgttaactatggagaaagaccaattgatggcaattattcgggatgtagcaaaagaagattttattccgattgtagaattacttttagaagaaggaattacaatgctggaagtctcattaagtaatgaaacaaaaggattagcttgtttagaagccgtaagtcagcatttttcagctaagcaattgacaattggggccggtacagttgtagaaaaaaaccaaattcaaaaggtgaaacaagcaggagcaacgtttattatgactccaggctttgaaaaaagtattgtagaagaatgcataaaacaagacatagctgtttttccaggagtattttccccaggcgaaattatggaaggaatacaattaggcatagaaatttttaaagtttttccggctggaacacttggaccgacttacattaaaagtttaagaggtccattccctaatatccatctaatggcagttggcggggtggattcaggaaatatcgcagaatttaaagcggcggggtgtgattcttacgctattggaagtgagcttgttccacgtggtgccacaaaggctatgctcaatcaaataagagaaaatgtaaaagcttttcaaagatag

SEQ ID NO: 843 - DNA, 918 bp, Listeria monocytogenes-EGD
atggaaaagaaaataagaacggttcttggtgacatctcgaaagaaagccttggtttcacatactcacatgaacatttgtggtgttgtccaccttcagtacagaaagaccgtgattttgaattaacagattatgagtcctccttagaagaattaaaaacatttcaatctattggaggtcaaacactcgtagatgcttcgacgctggattatggtcgtgatggaaataaactaaaaactatgtctgaagaatctggcgtgaatgttcttggtgttacaggatttaataaacatatttatttcccggattgggtacaggaggaaagcatcgaacaaattacagatcgattaatttatgatattgaaaaaggaatggatggttccgatgctcgtgcagggattttgaagtcaggttcatggtacaacctcattcatccattagagaacaaagtaacacgagctgttgcatgggctcaaaaagagactggtgcaccaatttggttgcatacagaagctggcacaatggggcaggaaatgcttgctatcttagaagaagaaggcgtgaatatggagctggtagctgttggacatagcgatcgcaatgcagatccgtactatcatctgaaattagctgaaaaaggggcttatgttcagtttgatggttgtggaaaagtaaaatactatcctgatagtacaagagttgaactagtgaaaaatatgcttgaaaatggttttggggataaattactcatctcgggagatatgggaagaaaaagttatctgcacgcatatggtggcggtccaggatttcgttttataaaaacaaaatttattccaaggcttttagaagaaggcgtaacggagcaacaaatacaaactatattttatgataatccagccaactggctagccaaattttag

SEQ ID NO: 844 - DNA, 1275 bp, Listeria monocytogenes-EGD
atgaagatgcttactttcatcacagaaattttttctacgccagcttttattttaggaattatagccgctattgggttaattgccttaaggaaaaccggttctgatattgtaaaaggaacattaaaaacgatttttggttttattatgctacaacagggatccgcgattattgttggaagtttaattccatttagcacaatgtttgaaaatgcttttcaacttaaaggggtggttgcagaagataatgctattgcagctgctgtccagcaaattttaggaacggaaacgtctttaattcttgtatttggttttattattaatgttattcttgctagaacaaccagatggaaatatattttcttaacagggcatatgatgttttccttcgcagctacaatggccatagtattcgatcaaatgggctttaatagctggcaaattattttgtttggttctatcgcacagggtatttcgagtattgtttttccagcactcgcacaaccttttgtacgcaaagtgacaggaaatgatcaagtcggttttggcttttggggcagttcccttgtctgggcgaccggttggcttggagggaaattaggaaataaagctaattctacagaagacttaaaagtacctaaaaaactagattttttgaaagaaatgtctgttttaatggggattgttatggcagtgatttatatatttacttctttctttgtggatgaaccggtgatgaaagaattagctggcacacaaagtaatgtattattcgcaatattgcaatcattcacttttgttgtcggaatattgatactacttcaaggggtccggatgtttttaggtgaattagttccagcgtttaaaggtattagcgagaaaattgttcccggcgcaattccagctcttgatgttcccgttttctattcattcgcacctactgcaacgaccattggttttttatgcgcagtagttggagggcttggagcgacactagtttctaccatgcttcccgttgtcgtacttccgtctgttatcggattgttttttatgggcggagcggctggtgtatttggaaatgcaatgggtggtagacgaggagccattattgctggtttattattaggatttatttttcaaatgattgtagcaattgcttatccaattttaggattagatggttatggcattcaaggattatggtttgcttcgacggatgcaatcattgttatcgtcattattcgattaattggagcattatttggaatagcactttaa

SEQ ID NO: 845 - DNA, 444 bp, Listeria monocytogenes-EGD
ttgttaccaattactttagaacaaattgaattggatgtggaggtagaaagtccggtagatgctatcagagctgccggaaatctcttagtaaaaactgaaagcgcttcatctgattatgtagatgcaatggtagctagttatgaaaaattaggtccttatatagtcctagcaccacatattgcaattccacatgcgcggcccgaacacggggtgaaaaaacaatgcatgtcaattgttcgtttgaaaaaaccgattaaatttgggcacccagccaatgacgatgtgagtctggttatcgcaattggaggtgtagataccaatttccacatcaaaatgctccaagcgcttagtgaattattaaccgatgaagataaattaaaaagattaaaaacaagtaccgataaagcggaaatcttatgcaccattaataaggaggaaaaatag

SEQ ID NO: 846 - DNA, 750 bp, Listeria monocytogenes-EGD
atgaaaaaattaaataaatcatcttctacaccactttatatgcaactgaaaaatcaactacaagagaaaattgaacaagatatgtctgttggagatttacttttgacagaaacagaaattgaaaagatgtatgatgttagcaggatgacagttcgaaaagcgatagaagagctggtaaatgagggaattgtaagtaaacaacaaggaaaaggaacgtttgtgagtcaaacaaagactacacaaggacttggacggatttttagttggtcagaggaaatgaaactacaacataaagaatctaagactatcagtgtagaaatttctgcagcaatcccgtcaaaaaaaattcgtacagcactccaattaggcaagcatgaagaagtaacttgtattagacgcgtgagagaaattgatggtgaacctgttgcaattatgattaattatttacgcgccaaatatgttcctggtttactagagaatggtttgaaatcagattccctttaccatgatttggaagaaatttatcatattagtttagtacatgcagatgaaattattacagcaagattatctaccccgattgaatctgccttgcttgcagttccagaagactctgcggtgcttcatgtgcgacgtacttcctatatgaaaggcaataccccagtggaagtggtggatatggtagctcgcggagataggtaccaatatttggctgaattagaaggtagaactaaaaaacatatcatatag

SEQ ID NO: 847 - DNA, 1872 bp, Listeria monocytogenes-EGD
atgagaaatttaaaagatagagtactcaattcattaaaaggtaataaaaaagatattaaaattagtgttgttgtacctacatataatacagaattagaaggtcttaaaaacttaatggcgtcaattgataagcaaacaatgaatccagatgagtatgagcttgtttttgtagatgatggatctacaacagatacatacgaacgtttgcaagagtttgctgaaacacgtccaaatatgaccgttaaacaaattgaaaactctggttggggaagcagaccaagaaatattgcaactaaaatggctaaaggagaatatatcctttatttagaccatgatgacacagttttccctgaaacatttgaacgcgtatataatttcggaaaagaaaacaatttagatgtagtgagcgggaaagaagtaagaacaaatggttggtcatggggatggaagcaattctctgagaacaatccgcatgcagaagaaatgggtattgaatgtttacttccaatgactccacacaaattttataaaagagaattcttgttagagaatgatattacatttgatgatggagctcgagttctttgggaagatgtatattttaactctaaggcgttcattcacggtgcaaaagttggtattttagccgattatcctacgtactattggattgcaactggtgcaaataattccagtagtttcggacgtgatccgcatgaaaaatggaaccaaattaataaattatttaatttctttaaagacaatatcaaagagcaacgtgacttagattttatgctaactcattggtatcgctcacgagttcttgggattttagggcaatggctactaaaaaacaacaatgaacgtattgatattgaatttaactatgcaaaaaaacttgccgaagaattaataccagcctatattagcgaaaacttagataaaaacaatcaagtaaaagattatttattaagacaaggtgatttagattcattaaaaaaacttgctcaaatcgatgctggaattacagcgcttagctatgtggaagatgcttactttaaagaagacaaactattcttcaaaacaagtacaaaaatgacatatgaagacaaagaagatttctttattgaaaaaacagcagatcgaatggaacgtattttaccagaagaaatcaaatcgaaattgccaaaagaattctttgattatagtgatgatttagctgaatttacgtatgagccaagtattaaaggacgtaattcaagagctacctggaaaatcgacggttctactagtaatgtagaagttgttaataaaaaagcaaatttgtataaaatagaaggtgaaatgtctttttctgttcaaattaatgattatatattagatgcagctgataaaaaacaaccatgggatattgccacacgctttaccggccttgggtatacaagtcaccgagcattaaccattggtaaaattcttatcaaaacagcgttaataaataacaaaacaatgattgtttataaaaatgcatctggtttaataagtctggatgttggaagtagcgttcgttcaatcgtggaagattctggtgtgaaacgtgaacaaattcttattgataaaacatctggaaaagtaactattccattaaatgaaattcatgtgtttggtgaaagccttattgaaggtaatgcagaattaaaaccggtgggaattagtgatgcggatccaattaatgtaaaagctaaattgattggtgaagctaataaagcaagagtagaagttcttttgggtgatgaaaaactatctggtgaatatcatttagtaactaatatccaaggtaaaaaagataaacagcaaattaaaataacgctttaa

SEQ ID NO: 848 - DNA, 867 bp, Listeria monocytogenes-EGD
atgaaaggtataattttagcaggaggaagtggaactagactttatccacttacaaaagcaatttcgaaacaaatgttaccaatttatgataagccgatgatttattatccgctatcgatcctaatgttagcaggtattaaagatattttaattatttcaaccccagaagatactccacgctttgagcaattattagctgatagcgatcaactgggtattaatatttcttatgcggttcaagaaaaaccggaaggattagcacaagcgtttattattgctgaagattttattggggatgattcggtttcgcttatacttggagataatatttattacggacaaggtttatccaaaatgcttcaaagagcatctgctaaaaaagctggagctactgtatttggctaccacgtgaatgatcctgaaagatttggagttgtggagtttgatgaatcaatgaaagctatttccattgaagaaaagcctactgaaccaaaaagtaattatgcggtaactggtctttatttctacgataatcgcgtagtggaaattgcgaaaagcattaaaccatctgaacgtggtgagttagaaatcactgatgttaataagcgttaccttgaactgggagaactagatgtagaacttatgggcagaggatttgcttggttagatacaggaacacatgaatctcttcttgaagcgtctacctttattgaaacaattgaaagaagacaaaacttgaaaatcgcttgtcttgaggaaattgcttatcgaatggggtatattgatgaggctgcagttgaaaaattggcagaaccacttaagaaaaatgcgtatgggcaatatttaatgaaattaattaataaataa

SEQ ID NO: 849 - DNA, 561 bp, Listeria monocytogenes-EGD
atggaaattgttgaaagtaaactagctggtgttaaattagtaaaaccaaaagtgtttggagatcatcgtggttttttcatggaaagctataatgaaaaagcattccatgaagctggaatcgatatgaagtttattcaagataaccactctctttctgtggaagcgggtgtacttcggggtatgcattatcaaacgaacccaaaagcacagacaaaattaattcgtgttgcgacaggcgcaatttatgatgtagttgttgatatgcgtaaaggttctcctacatacggtgagtgggaaggttatattttaagcgaagcaaacaaacatcaacttctagtaccacaaggatttgctcatggcttttgtacgattaccgaaaatgtgaatgtgctttataaagtagatcaattatattcccctgaaaacgatgcgggaattgcctacgatgatccggatttaaatattacttggccaacagataaattaattttatcggacaaggatacgaaacatccacgtttaaaagacgctgaaaataattttgtatgggagaataaataa

SEQ ID NO: 850 - DNA, 987 bp, Listeria monocytogenes-EGD
atgaatttattagtaacaggtggggcaggttttattggcagtaatttcgtacatcatattttaaataagcatgatgattataaagtcgtaaacttagatttgctgacttatgcaggcacaatgagcaatttagaggatatcaaagaaaatcctaatcatgttttcgtagaaggaaatatttgtgattatgatctagtgaaaaaactagtaacagatcataaaattgatactattgttaacttcgcagcagaatctcatgtagaccgtagtattatcaatccaggtatctttatcgaaacaaatgtacaaggaacgctaaatcttttaaatgttgcgaaagaattaaatgtcgcaaaatatctacaagtatctactgatgaagtgtatggttcacttggagaaactggatatttcactgaagaaactccaattgctccaaatagtccatactctgcaagtaaagcttcagcagacttattagttcgttcatattttgaaacatacggcttaaatgtaaatattactcgttgttctaataattatggaccacatcatttcccagaaaaattaatcccgctaatgatcacaaatggtcttgacggggaaaatttacctatttatggtgatggtaaaaatattcgcgattggttacatgtgtcagatcactgtgcagcaattgatttagtaatccataatggtaaatctggtgaagtttataacgttggtggacataatgaacgtacgaataatgaaatcgtgcatatcattgttgacgatttgaatctttctaaagataaaattgtatatgtagaagatcgtcttggtcatgatttacgttatgctattgaccctaagaaaatcgaaacagagcttggttgggaaccaaaatatacatttgatacaggaattaaagaaactatcgaatggtatgtaaataatgaagcttggtggagaccactaaaatcacgcgcaaagttgggtgaataa

SEQ ID NO: 851 - DNA, 831 bp, Listeria monocytogenes-EGD
atgagtattttagtaacaggagcaaatgggcagctcggaacggagctagttcaattattaaaagaacataatttaaccgtgactgagtgggacaaagattctgtagatattgtggataaagcagctgtaaaaaaagcaatgcttgatttaaagcctgaatggattatccattgtgccgcttttactaatgtagaagcagcagaagatgaattaaaaaacgttaactgggaagtaaacgtggatgggactgaaaatatcagtgaagctgcagaaatagttggagctaaacttgtatatatcagtacagattatgttttcgatggtactaaaaaagaagcatatttaccagatgataaaacaaatccacttaatcaatatggaattgctaaattagcaggagaaaaagttgctttagaaaaaaatagccaaacttatgttattcgtacttcatgggtgtttggtaaatatggtaataattttgtatacagtatgcttaaactagctgaaacgcataaagaactaaaagtagtaaatgatcaattaggtcgcccaacatacacatatgatttagctgacttcattcgttttgttattgagaagaatccggcatatggtatttaccaattctctaatagtggaactgcgacatggtttgagtttgcaacagaaattttgaaagataaagatgttactgtgaatccatgtacttcagatgaatttccacaaaaagctgaacgtccaaaaacatctattatgagtttggaaaaagtagagaaactaggttttaacattccaacttggcaagatgctttagttcgttttaaaaaataa

SEQ ID NO: 852 - DNA, 2031 bp, Listeria monocytogenes-EGD
gtgtataaattactctatgaacaaaaggagccggatattttgaacgattcaagggacttacattccatttgttttgtttctacagaagtggaagataagaacaataacgtacattttatagcagaatctgcagatttattggcagattgcttagtgctattagagaaagagaataaacactatttaacttttatgaaagaaaatttgaatacaattgcgttagccgagaaaatcgaatatgcaccagatatcatttgcccaaataaagttttgaaaggtagtttgtatacaaatcctgaatgcatagataacagccttgctggtagtactttctccaaagatttacttaagagagtagcaaatgaaatgaagcaagaagtatttgaattaacaagctttaattattattgttatcatttggcggagaagattggtcatttgggagaagaagctagctattcgctctctttggcggacttagatgactcggttacacgtttacttgatattaaagataatcattaccgaaaagattggacaattttatattatgtaaataagtttttaatgatgcatttagaaaatttaccgaaaatttttgaagaatcagatgaaaaatttcaaattaattatttagaaaaacttactgaacttattgcgaaactgccggatgaggttatttttgagttagatgcgctcgattatttggttcaaaatatattaaatgattcatttgaatggattaaatacgaagcatatccagcttgtttaactttagctgaaataataagtcaccgagcagcaccaaataaattcacggatactaaatggctgtgtttagaaaaatgtgtccgaaaaggttctgtaaatccgctaagaaacaaaaaaaatccaactgttttgacaccaataaaaaagaaatttgtttctttttttagccgtaaagtggtgtttacaattgcaaaactgttacctgttgcgaaagataatgttttgttagtttcgaataaaattagtgatttagatgctactttcatgccgatttaccagacaattaagcaaaagcatcctgaaaagtctgtgcgtgcgtacatgaaaatgcgaccagaagataatcatgcaatgtattatttaacatatttttggaatcttggaagagcaaagtatgtgtttttagatgactattattatcaattgtattctattagaatgaggaaagaagcggaagttattcagctttggcatgcagcaggagcgtttaaacgattcggtcatagttctctaggatttaaagactccatatcgcttgattttgaaacaagagcgcaccaaaattacacaacgagtgtcatatcatccagtgatttaaaaccgatttatgcagaagccttccatatggatgaaaccaaaattgaagcatttggtctaccacgtttatggaagttatttgatcaagactacaaggaattcagactagattatttccaaaaaatgtacccgcttcttaaagggaaaaaagtgattacttatgcaccaacttttcgagggaattcagaagagcgaaaagcattccaactcgaattaaatttacgtaaaatgaaagaggaactaggacaagaatatgtagtagtaattaaactgcatccattagtaagcgttgaaacgcaagttccagaagatttagctgattttgtacttgattttagtggaattgaaatgaatgacgttctaatcgtaacagatattctaataactgattattcgtctgttatttatgattactctatcttgaatagacccattattttctacgcatatgatcttgaagcctattcattagaacgtaatttttatcatgattatttggaatttgttccaggtccagtggttgctacaactgaagaagcaattaaacttattcaaacaaatcaaatgataacagggaagttacaggactttgcagagaaagcatttgaatatcatgatggtgatgccgcagctcgaattattgattatgtaatgcaagattga

SEQ ID NO: 853 - DNA, 1161 bp, Listeria monocytogenes-EGD
atgatagtgaaaaatatagcgatttctatgtacatgtttctgttaagtctattttctttttttagtcgattttttggcgtgaaaaaacgagtattgattatggcctcattcccagaaaatacaacagcgattttgaatcaaatgaaaaaaatgggctatactccgaacacaatttgttttcatacagagagagttcaattcaatactaaagaacttgattttgttcgtttttcacctaataatttggcgaataaatggaaattaatgttttacttaaatacatcaaaagtgattttagtcgataactattaccctgaactagcagcggtttcttttaaagatggtgtcgaatgtattcaattatggcatgcaaatggagctttaaaacaatttggatgggaagataattcgatttcagaacgttcagatgcggacaaaaaaagatttaaagcagtatatgaacattttctaaaagtagtagttggttcagacgagatgggcgaaatttttaaaagaagcttcttattaaatgaatctcatttattaaaaatcggtgtacctcgaacggatgtttattttgaagaaagcctacaacagcaaaaaagaatagaatggcgtaataaatttcacgctgaaaataaaaaagtgattttatatgcaccaacatttagagataatgagcttgcggaagccaagttagtaatggattttaacgcaatggaacgagctttttcagaggattacttactggttttaaaattgcaccctgcagttaaaatagatgtacaaagtctaaatacagattttattattaatgtagataaaaatgttgcacttgaagaacttttagcggctgttgatatacttattactgattattcctccattccatttgaatttgctctttttgaaagaccgatatacttttttagttatgacatggagaaatatgataaagagcgcggcttaataaaaaattatcaagaaattatcccaggaccgatctcccaaacaacggcagagcttattgagcaaataaaaacgaaggccacaagcgagactttagcacttttttcgaaaaaatggaataaatattcggatggtcatgcaagtgaacgcatggttgtttatatgaaacaattaatggaggaggctaagtaa

SEQ ID NO: 854 - DNA, 984 bp, Listeria monocytogenes-EGD
ttggaacctttagtaagtgtaattattccagtttataatgtagaaaagtatgttaaacgatgcttggattcagttcttgagcaaacatatcataacctcgaagttatcgtagttaatgatggagcgactgataattcagctaaagtcataaaaagtatctcagataatcgaattcgttattttgaaaaagaaaatggcggacaagctactgcccgaaattttggattagatgtggctacgggagattacatcgtgatggtagatagtgatgattacattagcaaaaacctagtagaaacttgtttggatactgtacaaaaaacgaatgctgatttagtcttgtttacttcatataatgtgaatcaggaaggaaaaatgcagtatataaagcgtgataaaggcatcaaagttttagatgcaggtccaactccatggaacaaattttatcaagcagatctatggaagggttcgcgttttccagtaggttattggtatgaagatctaggaattattccagtcgtcacgctaaaagcaaaaaatccagtgaaaatccaggacgcactttattactacataactgatagagcggattcacaatcgaatattcaacaagtagatcactttttagatgtggttattatgttggaaaatgttgaaacagaattaaaaaaactaggtatttacgaagaatcaaaagatcaacttgcgtacctatatatagaacatctaatttatcgtttagttttacgaaaagcgatttacattacgaataagcaagaacgaaaaaaacttattaagaaaattagtacaattattcaagagaagttccctaattggggtagttatccttatcaagcgggtggcaaactaactgcaacattaaagaaaaaagcattatggctttatttacatcatttgtacttgttgggtgatttagtatggaaatatccattttctatcagaagtaagcaaacagggttttaa

SEQ ID NO: 855 - DNA, 1014 bp, Listeria monocytogenes-EGD
ttgcataaattaagtgtggtcattgccgtatacaatgtttctgagtatatagaagcatgcttaacatcagtcttagaacaaaactacaagaatgtggaattaattattgtcaatgatggttcaactgatgatacctttcaaaaagtagaaaaactagtagacggacatacgaatgttattttgattgatcaagaaaaccaaggtgtttctgctgtccgaaataatggtgtaaaagccgctacaggtgattatctaggctttgtcgatggagacgatatcattgctaaagatatgtttcaaaaaatgatggattcttttgaaatgtcggatgcagatatggtaacaattggtgtggcaagactttcaggagataaagtatacccttctacattacacgaaagatatatggtagaaaaaaaagaagccacaacaattgaagaaacaccggcacttttatatgatactacttcgtggaataaagtatttaaaaaatctttttgggataaacaccatttggaatttccagagggccaaatgtatgaagatatcgcattaatgattccagcctttttgtatgcagaaaaggtaaatattattcctgatgttggctattattggcgcagtcgcgagggtggagcaaaatcaatcactcaaagacgaaatgacattgccatggtgaatgatcgtttacttgctttgaaaaaagtaaatcaagtacttaatgagaaaaatattcagggtgatttaagatatcaaaatgaacgtaaaaactttgaaattgatttgttttccatgattgaatgggcatttttagcgccgaaggattactatttggctcttcaaccacttatcaaaaattatgttgagcaagaaatgaaaacaactgctttgaatgatattccaaaagaaaagaaacgacttttcaaagctttgttagcaaataatcgtccggcttttctcctaaatagttacatttattttggtaagaaagctgtgaaaaaaataacgaaataa

SEQ ID NO: 856 - DNA, 1203 bp, Listeria monocytogenes-EGD
atgactaatgaccaaattaaaaaagcaaaaaatggaacgtactatttccgtgccaatttaggctatgacgtaaaaggcaaaaagattcaaaagtaccgtagtggcttcaaaacaaaaaaggaagccagagaagaatattctcgcctattgctaatgaacccagatgatttaaacgagaataaagataaaatgatgtttgagtattatatcaatgaaattttccttccttggtataaaacacaagttaagctaagaacatatgagaatcgaatccctactattcagaagcactttccatatttttataaaatggcggtatctgatattgagccaatcaatgtccaagattggcaacttaaaatgacaaagaatctcaagccatcttatgtgagagctgtacaaggtctattctctgttgcaatggatagagcaatcgttttaggtattactactacaaacccatcaaagattattgggaacgtaaagaaagtgaaacctaaggtggagttctggacaaaagaagaatttgagaaagtactttccttaatatataaggaggattactatcaaaattttctttttatctcattatggttcttgtttatgacaggcatgagaatcggtgaagctacagctattcaatgggaagatattgattttgaaactggagtagtatctattacaaaaaccttatattataaaagtcagattgactataaatttgtagagccaaagacaaaagcaagtgttcgtcacattgttcttgataaagttactttgagttatcttgctgattggagagaagttcaacaaaatgtagtaaagacaaattttgtaatgagctacaatggtattccaactcaaaaacatacgattgctcatgcaattgaccgattttccaaaatggctggcattcaccgtattaagatacatgccttacgtcactctcatgcttctttattgattagtatgggtgaaaatcctctaattattaaagagcgcctaggacatgaagatatcgaaactacactaggcacttatggacacttgtatccaaatagtaattttgaagttgccagtaaattaaatggaattatttcctttcaacccgctgagcaaaatcttgattcgtcaccaaaaaatcagttcacagtgaactatcgacaaaacaagcaaccaaatagtgcaataaaagtgcaatga

SEQ ID NO: 857 - DNA, 420 bp, Listeria monocytogenes-EGD
atgacaacaacttctaactatgaaaaaactattgaacatcaatttgatagtttctgtaaaacagttgtacgtaatttcgctagagatatctacgatgagaacaaacgacgcaatgaacgtctgatatctcttgaagcattatcaatggctgaactaagtcaactaagtatttttgatgattacgattcaaactatatcataatggcttcttatgactatgacatacgaattgaagatgtattgatagctcaagcaatcggtaaactaacaaaaagaaaacaggatataattcttctttcattcttccttagtatgacaaatgcagatattgctaccttaatggatttagcggaaagcaccgtacattatcacaaaacaaatgcattaaaagagttaaaaaaactcatggaggaacattga

SEQ ID NO: 858 - DNA, 906 bp, Listeria monocytogenes-EGD
gtgaatcagatagaaaagactggggagttatcggcgagtagatttactgtccgtgattttaccgagcttgtgaaaattggtatcgtgaattccaatacgattactgcttttacaggaatgtggttagcctttcagttaaatggaatttcttttattcaaaatgtagacgtgatattttttactatcgtcggttcagcacttattgtcgctgcttcgggcgcttttaacaatgtcatcgaccgtgatattgacggaattatggaaagaacaaaaaacagaccaacaatgaccgggaaaatttctggtaagcgagcgctaatggtcgcgcttgtgctaggtgttgtcggtacaattatgttatttatgacaacttggcaagcaggagttcttggcgttattggggtctttttgtatgtagtcgtttattcgctttatgcaaaaagaaaactagttagtaacacagtaattggtagtttttcaggtgctgtaccgccattaattggttggtttgcagtcgaaccaacatttagtattgtgccaattatgctgtttctcgtgatgttttgttggcaaccacctcatttttatgccatcgcgattaaacggaaagaggaatacgccgctgctggaattccaatgttgccagtagtaaaaggcattgaacgcacaaagaaaagcatgtttttctgggtgattttattaactatcctgccattctttatgtttgatttaggtattgtatatgttattttagcaacattacttaatatcgggtggttagcacttagtatttacggctttaagatggaagatagtatcaaatgggctaaatggatgttcgtatactcattaaactacatgacaattttattcgtagcaatggtagttatttcgattttcctataa

SEQ ID NO: 859 - DNA, 1167 bp, Listeria monocytogenes-EGD
atgagatacttaacggcaggagaatcacacggaccggggcttacaacaattattgaggggttaccagcaggaatgcctctactagcagaagatgtaaacaaagaactaaaaagaagacaaggtgggcatggtcgtggggcgcggatgcgtatcgaaaaagaccaagtacaaatcacggcaggaattcgtcacggaaaaacattaggcgcacccgtagcaatgtttgttgaaaataaagactggaagcattgggaaacggttatgagcattgaaccagttccagaaaaaaatgaaaagtctcgtcgcgtatcccgtccacgtcctggacatgcggatttggttggcggcatgaaatatggtcataacgatatgcgtaatgtactagaacgttctagcgcgcgcgaaacgactgttcgcgtggcagcaggagcagtagcgaaaaaactattgcacgaacttggcattgaagttgccggccatgtacttgaaattggcggaacgcgtgcgaatttaacacgtgattacgcggttgcagaaatccaagaaacatccgaagcttccccagttcgttgtctagacggcgtggctgcagaagaaatgatgcaaaaaattgatgacgcgaagaaaaatggcgacacaattggtggaattgttgaagttgttgttggcggcgtgccagctggacttggtagttacgtacaatgggacaaaaaattagatgcgaaaattgctcgcgcgattgtaagtatcaatgcatttaaaggtgctgaattcggtgtcggttttgaagccgctagaaaacctggtagcgaagtgatggatgaaattttatggagtaaagaagatggctacactagacgtacaaacaatcttggtggattcgaaggcggaatgaccaatggtatgccaatcgttgttcgcggcgtaatgaagccaattccaacattatacaaaccacttcaaagcgtggatattgattcaaaagaaacgtttaatgcaagtgtagaacgttcggatagttgtgcagtacctgctgcaagcgtagtagctgaagctgttgtcgcttgggaagttgcagtagctgttttagaaaaatttgatggtgatcgttttgatacgcttaaaaaacatgtggaggaacaccgaaacttaacgaaggagttttaa

SEQ ID NO: 860 - DNA, 468 bp, Listeria monocytogenes-EGD
atgagtaaagtactagaacaagtagaagcaattgttgcgccaatcacggacgaacttcaactagaactcgtagatattgcctttgaaaaagaaggcccaaattggtttttacgaatttttattgacaaagatggtggcgtagatatcgatgaatgcgcagccgtgagcgaaaaagttagtgagaaaatggacgaaaatgaccccattacacaaaactactttttagaagtatcttctcccggggctgaacgtccgctgaagaaagagcaagattttgaaaatgcggtaagtaaatatgttcacgtcacttcttatgagccaattgacggtcgtaaaatgtgggaaggaacgcttgttagttatgacggcacaacactcgttattactatcacggacaaaacacgcaaaatcacttgtgaaattcctaaagacaaagtagccaaagcaagactcgcaattcaattttaa

SEQ ID NO: 861 - DNA, 753 bp, Listeria monocytogenes-EGD
atgtcagccacttcgctttatcgcttgtttgcgcctcaaattgaatttttaagtcctgctgaaaaacaagttttcttctatattgacaaccatatttctatcattgaaaaaatgtcactcacatctctagcggagtccaccaatgtcagtactacaactgttattagaatgtgtcataaattaaagctttccggtttctctgagctgaaatttttacttcactcggataaaacagaaacaaaacccctttccaaagactattcttctacatttttagaaaaaattcgtttaggaattgagcaacttccaaaaaaagaaattgagcaagttgcgacaagaattgcttatgcgcctaaaatctatattgcctgtctaggtatgacgaaaacattaggagaatatttttccaaaagtcttgttacatcgaaaaagaatgtagtttttacgtatgattcattcattattgatattttgccacaaattgttgaaagagatgatttaattattattatttctgaaagcggtggcacagaaaatacgctttcgctcgcggaacatttaaaatataatttgtcgaatgtcattgctatcgtgaataatcctaatgcgcagatttctcaatatgtggagacgattatttatgcttcaagtgaggagtttggtgaagattcatttaaacatcatcatgccccgcttttaattgtgattgacttgattctaaatatttttgaacagcaaaaaaaacttatttaa

SEQ ID NO: 862 - DNA, 1959 bp, Listeria monocytogenes-EGD
ttgaaattaagcgatattacatcggagccactcatctttttagataaagattggcgcactaaagaagaagtatttgatggattaattgatgctttacacaatcaaggagttttgtcagataaaaatgaattcaaaaaagctgtcttagaacgcgaaaagatttctgaaactggtttagagaaaggttttgctattccacatggtaaatctaaagccgttaaaaaagctgcttttgcatttgctcgtatcaatcaaccaattaattcttggggcagcattgatccaacaaatgaagtaaaatatatctttttattagctattccagaaaacgaagccggatcaactcatttagaacttttagcggcattaagtaagcgtttactagaccctgcttttattgagagcatttctaccgctccgacagtaaacgaatttatgaccgtactagattctgaacaacaagaagatgaaaaagtagattacacacgaaaaatcgttgctattacagcatgtgcagcgggtatcgcccatacttatatggcagcggaagcccttgaactagctggtaaagaacttggtattgaagttatcgtcgaaaaacaaggtgcgaatggtattgaagaccgcattactcctgaaatccttaaaggcgcagaagcagtcattttcgctacagatattacggcaaaagataaagaacgtttcgccggaatgccttttatccaaagacgtgttgctgagccacttcgtagcggtaaagaaatgattgaaacagtattgagcaaaccagatggctatgtaaaagctgatacagatggttcggaacaacaatttgataataataagagcagtattttctcacaaatttatcgtggtattttaactggtatttcttatatgttacctgttattgttgcaggtggtttaatgattggtattggccaacttggcgcaactgcctttggtcttgaaaaagttattggtaatccagagtatgcaacaaactctaaccagcttattgtaatcttccattatctcggtttatacggaaatatgattatgaaattcatgtatcctgttttcggtgccttccttgcttactcgattgctgaccgtcctggacttgctcctgggtttatcggtggtgctttcgcagcggggctacattacaccttctggggcgtagatggcggtataccatctggattcttcggtgttctaattttaggtatcattgccggatttgttgctaaattcttaaacgaaaaaattaaactacacaaaaatttacaagctatgaaaccaatgttcctgattccagggattaccgttttagtcttgttcttcgtcaattactatgtggtcgacccggtattcgggggcttaaacgcatggttacaagaactaattattcaaaatcaagatgcaagtgctgtactactttcgacaattattgcttgtttgactgcatttgacttaggtggaccagtcaataaagcagctggagctatcgcaatcggactcgcagcagacggaatcttcccgctaactgctcgtgttttagcaatcgttatcccgccaatcggacttgggcttgcgactgtattagataaatatgttgttaaacgtcgtgtttttgatgaaaacctacgtgttgcaggtacaacctctattttcctagggtttattgccataggagagggcgcgataccgtttatgctacaaaatccgcttatcacgattccaattaatatgattggtgcttctcttggtgcggttactgcagtattacttggtgcagtacaatggcttccacttccagcaatttggggttggccgctcgttgaaaatttctgggcctatgcgatcggtttaattgtaggtatcgcctttattacattcgcgaatatcttcgtacgctacggcttaatcacacgtaaagaaaataaaatcaaataa

SEQ ID NO: 863 - DNA, 2649 bp, Listeria monocytogenes-EGD
atgaaaaaaaataaaattgtacatgttgttgcacattcccactgggatcacgaatggtatttcactatggaagattccaatatcttattaattgagaatttagactatcttttaaacgttttagaaacaaaagattcatttgctagttattcctttgatggtcaaatgtctgtcattgagcgttatttagacattcgtccggaaaataaagcgcgcgttcaaaaacttatccaagatcgtcgtctgttcgtcggtccttggtatacacaaaccgatagcttgttagttaaaacagaagctgtgattcgtaacttactttatggttataaaatgggcgaagaattcggtcatagcatgagtatcggttattccccagatatttttggccagcatgcttatctgccagctatttataaatcatttaatatggaacatagcattttccagcgtggtgtttataatgatcaagtacaagaggaccttaacttccactggacttctccagacaacaagtccatcccaaccaacaatattttcttcggttatggaccaggtaaatttttaagcagtgaaaaaagttatgtagaaacgcgtcttctgcctattttagatcgacttgctgaaatgaacacacatacagatgtccttcttttaccagcaggcggcgaccaagtacttgtgcgcgaaaacttcccagaaattgtcgcggaattgaacgagatggacttaggttataccttcattctgtccgattacgaagcatttatgaatgatgcttggacttctactttcccgaacgaaatcactggcgaattgcttgcttgccaaaaatcacgaatccaccacacatgtcgttcagaacgctacgatattaaacgtcttaattacttagtagaaaatagattagtcaacattttagaaccacttgcaacaatggcaaacaaattcggcatcaaatatccaaaaccttggttagatatcatttggaaaaaattatttgatagccatgctcataacggaattggtgcttcgaattcagatgacgcgaaccacgatatcgtcgttcgcctaacaagcgcacttagaatgacagatggcttaattaaccttttgaaaaaacaaatcacgaaggccgttagtcaggaaatgggcgacgaaaatattgcgctactattcaatactaaccctgtaccagaagaaagaacggcaaaactaacattatttactcctgaaaaatcattccaacttttctccggtgacaaagaagtgaccttcagcgttgtacatcaagaaaaattagatggtggacggaaagtaatcgtaactgcaaaaggtgaaaaagaagtcgctgttcccgattattatcgtacagaaatctacctgaaaaccggcccaatccctgcacttggttacacaacattgcaagtgaaagccgttgctaaagagatggaccaattaatcagcatttccaaacaaacaattgaaaatgaaaaaatcattgttcaattcgaaaacgggaaaatcaatcttttaaataaagaacaacaaagcattattaatgacctaattcgcttcgaaaatgtggctgacgctggggattcctttgacttctcaccacttgaaggcgaccaagccatctatatcgaatcaagcgaattactaaccgttgaaaaaaatcatctatatagcaaaatgatgttaaaacatactgctttagttccgaaagatttagaagcccgcgcccaaaaaacaagtacagaaacagttgaaattttaacagaaatcgaactttttgacggcgaagaatttgttcgtgttcgccatactatcgataataaagtaaaagaccaccgcattagagcattgatcaaaacaaatgtagcagaacctaaattttcttacgcagatcaaggttatagcctcatgaaacgcagcgtcacaaacccttaccttgcaaactggcgcgaggacaaattcgtggaagcacctgtgccgattttcccagtggaaaatatcgtcgctgtttctgaagaagacgcaacacttgccttgttagttggcggtatcaaagaatatgaaatcttaccgaaaactgctgaaatcgcattaactcttttcagaagtaatggtttgcttggaaaagatgatctcatgtggcgtccaggccgcgcttccggtattaataacaaagtcgttcctacaccagacggtcaaatgctcgaagaaatgatttttgaatatgctgtgtacgtacaacctgagaaactaaatgaacaaactctctacgcgcaatctaacatttttgaaggtcatacagaaacctatcacttacaaaacctaaatacatttgaagagcgcctagaacgttttgaagtagattatccaatcgatcgtctgccagctcaaaattctatctttgaattagataacccgaacgtattcatgagcacttgcaaaaaatcatgggatggcactggcacaattatccgcctatttaacccatcagacaaagaagaaaccgttcgctggacaaccaacgcttccagttttgaagtttcactagcggaggaaaaaatcgcagaactaaaagaaaacactatctgtattcctaaaaaaggatttgcaactattttgttggaaggagaataa

SEQ ID NO: 864 - DNA, 1683 bp, Listeria monocytogenes-EGD
atgcaaaccgaactggttaatcaaatagaagtaaaactaagaaaaatttatcaagccgcataccaacccgcatacttggaaaaaatgctcgcatgcgctgaaaactattctaataatacgcgtggttctattgatactatttccgaaaaaaatgtctatcttattgcctatggcgacagcattttcgaaaaaaacaaacatccgttacaaacattgaatgaattcctacaagaatatgcacaagatgctattacagacgtccacttactaccgattttccctagtacgtcagatgatggcttctctgtcacagactacaagcaaattgacgaacagcttggcgactgggatgacgttcaaaaaatgtctgagaacttccgagtgatgcttgatttcgtagccaatcatatgtcgaaatcaagtgattggttcaagcgattctccgataacgaagcgccgtacaatcaatttttcatcgagaaggacagccaattcgattataaaaatgttactcgcccgcggacttctccgctgttccacaaatacgaaaacggcaaggaactttggactacttttagcgaagaccagttagacttaaatgtccgtaatatcgattgccttgtagccttaacagatgtcctgcttttctatgcatccaaacaagcgacaagcattcgtcttgatgctattggatttttatggaaaacatctggcacgacttgtatgcacctaccagaaacgcatgagatcatttcgctttggcgtctgctgattgatgagctatatccgaatctgcaaattatcacagaaaccaacgtccctcatgaagaaaacattagttattttggcgatggcaaaaatgaagcaaatatggtttatcagttcccgcttccgccacttgtgctccataccttcacttgccatgatacaacgaaactttcgaagtgggcgaaatccatttcacaagtttctgacacagcgacttattttaacttcttagcaagtcatgacggaattggtatgcgccctgcgaccggaattctttccgacgaagaaatcaattctctcgtccaaaaagcggtccaaaacggtggacaagtttcctataaagacaatgcagatggcacgcagtcggtatatgaacttaatattaactacggtgaagccttgcaaaatctagacgaagacacaaccgaagaactcgtaacaaagaaaattatcgctgctcacagtattttactaacacttcaaggtgtcccagcgatttactatcattcccttctaggctcaaaaaacgaccttgttggttatgaagaatcaggtattaatcgtcgaattaaccgtgaaaaactggaaaaaaatcaattggttcatgaacttaaaacagacacttatcgcaaaaccattttcacatcgctgaaaaaattggtgcaaatcagacgaaaccacaccgctttttcaccatttgcaacccaagaaattttagatttaggaccagatgtttttgcgataaaacgggaatctgagggagaatgcatttatggaatcatcaacgttacttctcacgatatcagcaaaaaagtcgctttctctggcactaatttgttagccaatcaacccgttacgagtgagctcgaattaactgcatatgaagttgtctggattaagaaggcggtccaatga

SEQ ID NO: 865 - DNA, 1134 bp, Listeria monocytogenes-EGD
atgaaaatcgtcatcgcacctgattcattcaaagaaagcgccactgcggtggaagtagcaactgccattaaaaaaggctggactaaagctcgtccagccgatcaaataagccttgcccctgtttctgacgggggtgagggttttcttactgttttaagtgagtcttccgaggtggaattgttccaagcagaagtaaccaacttaaacggtcacaaaataatggcctcctacggtattcacgcccgccaagaaactgcgattatcgagtccgccaacacgattggattagatttaatcccagcggcagaccgtaatccagcccatgcaagctctgctggcgtcggtgaactaattttggcatcactggatcacaacgtcaaaaaaatcattatcggccttggtggaagtggcacaaacgatggcggcgctggactaatccaagctttgggcgttgcactacttgataaaaacaaacagcctattccgcccggtggcattcatttgcaagaactagcctacattgatgccagcaaccttaacccaaagctgaaaaacattcaattccaaatagcctgtgacgtgacgaatccacttcttggagaaaacggtgctacatttgttttcggtgctcaaaaaggggcaagtcccgacatgctcgttaaactagagaacgccatgcagaactacggagcaaaactcgaccaattttcttctcaaaaaatcaccacaaaaaaaggagctggagccgctggtggtatcgctgctggactaatgaccttcctaaatgcagacttattaagcggttcaactcttgttatggaactttctaatatgaaagataaaatgaaagacgccgatattgttattgttggtgaaggacgaatggacaagcaatcgatgatggggaaaattcctgttcaaatcgctcaagaagctaaaaaacaaggttgcttcgttctggctattgtcggcagccttgcactcgaaaacaacctagcccagcagcacggcatcgatgcttttttcccaaacatccctgaaataacagatttacccactctttttgaaaatacgacgaaaaacctcgaacgtacggcggaaaacatcgccaaactaactttaattggcaaataa

SEQ ID NO: 866 - DNA, 345 bp, Listeria monocytogenes-EGD
ttgaaggggacctttaatggtttcctttttatttgtaatatagtaatttttatacagaaaacgacaataatagtgaggcaattctcatctttcttatcttcgtcacaaaaaatctatatttatttacttgcttttttcaagaacaatagtaaaataagttataggatagagttttacctcgatgaaagtttcatttttactaatgtgattttcatggggataagaccctatcatggttataatgacttttggtgtatccatcttccaatagaatggcaactagtcagacatctgtttagacaccaaaatcattatttgttttcattcatctcattggccgtgtag

SEQ ID NO: 867 - DNA, 348 bp, Listeria monocytogenes-EGD
atgaatcaaacatttatcgtgaaaaaagagcacattagccaataccctaatccgctttttgtaaataaaaatgagtctatttgggtgtttgaagaagatacagaatatccaggttggattttttgtaaagtgaagtcgtctggaaaagaaggatggattccgaaacaaatcattcaaataagtaatgatggaaagagtgggaccgtatcagaagattactctgcacgtgaactaaatgttaaaccaggcgataaattagaaagtaatcgtgaacttaatggttgggtttggtgcgtgacagaagaaaatgaagctggctgggtaccacgagaaaatttagaagtataa

SEQ ID NO: 868 - DNA, 1029 bp, Listeria monocytogenes-EGD
atgaaaaacaatgtattagtaacaggcggaactggatttttaggaatgcatattatctttcaattattgcaacaaggctatcaagtcaaaacaaccgtacgctctttaaaaagcaaagaaaaagtaatagaaatattgcaaaataatggaataacggattttacgcatttgtcttttgtcgaacttgatttatccaaagatgaaggttggaaagaagcaatgctcgattgtgaatatgtgctaagtgtcgcatctccagtatttttcggcaaatttaaaaatgaagaagaattaataagcccagcaatcgaaggtattacaagaattttacaggccgcaaaagaggcaaaagtaaaacgagtagttatgacttcgaattttggcgctattggttttagcaacgcggataaaaatagcattacaacagaagcatattggaccgatgaactcgctaaaggtttatcagcatatgaaaaatctaaactaatcgcagaaaaagaagcttggaaattcatggaaaatgaaacagaattggaatttgctaccatcaatccggttgccatttttggtccatcacaaagcaatcacgtctccggaagctttgacttattaaaaaatctgttaaacggttctatgaaacgcgtcataaatattccgttaaacgtagtagatgcacgagatgttgccgatttacatattcgcgcaatgattaccccagaagcaaacggagaacgttttattgcatcagctgacggagaaattagtatggcagatattgcgcatttgcttcaacgagaacgtcctgaactagtggataaaatgccgaagaaaacattaccaaatgcagctataagagcagcagctttatttagtaagcacgccaaagaaggagagttgatgattaatatgaatcgccaaataagcaattcaaaagcgagagatgttttaggatggaagccgatttcgacaaaagaagaggccgttcttgctgcagtggatagtttggcaaagtatggtttattagattaa

SEQ ID NO: 869 - DNA, 438 bp, Listeria monocytogenes-EGD
atgacttattctattaaagaagtatctaaaatatttaatttgtcgatttatacattgcgttactatgataaacaaggtttattgccgtttgtttctaaaaaccaatccggctaccgtgagtttacggaatcagatttaaatttaattcatacgatttgttgtttgaaaaatactggaatgccactaaagcaaatccgcacatatattgattattgtatggaaggtcccgtttctattgaagctcgtaaacagttactcttggatcatcgggccgccgttttgaaaagtttagaggatttaacagaaaatctaaaagaagtcgatgttaaaatagcgaaatattcgtctcctgatgcggtagaaatcattactgccgagagaaattatgtcagtatggaaaagaaaaagcatgatttgatttatccgtataatatataa

SEQ ID NO: 870 - DNA, 2589 bp, Listeria monocytogenes-EGD
atgacgacctatattatggttttagtaaccatctgtggaacgttttttacttcttcaacatctgttcacgcaagtgatcttgtgttgaatgaacctacagcttacagctatacaggagtaagtccacatttaggatatgctatcactcacaatccaatctacgttatgaagatggacggtaagaaagtattctgtgtagaatctggaatattcactacgacaggtggtggttatattcctgaatcgtatatttcccctaaaaaagatatcttatcaaaaatagcttattacggatatacgaatacaggtcaatctcattatgattatgttgtaactcaagtcatgatttgggaagaattaggcgaccaatatgtatcgtcaactattccaaattaccaacaacgtaaagctgaaatcatggctatggtaaatcgccatgataccttaccttcttggcataatcaagaagtaaaagtaacagttggagaaagtatcactttggcagattcacacggtgtccttagtggaatgagcttagaatcaaacaatactaacgccactttacaacaagatggaaacaacatcacaattacgccaaatgctaactcaaatgatggttctattacttatcgtaaagtaccacaaaatgaagttggaacatctattgtctatacaaagccacaacatcaaacacttgttgagtttcacttagaaagtgcaaagcaagccacagtgaaagttgatgttatcaagttaggtaatgttcaaattactaaagttgatgaagaaactggtagaccattaccagatactacaatgaagtttgagtataacggtacatctacagagttagttacggattcaaacggtattgctttaattaaagatattccagagggaacaaaaattactatcacagaagtgaaagctcctaatggttatgtaaataaaggtgtatcgcaagttgtaacaattgaaccaaacaaaacaattgagcttacttttgataataaagaacagctaggtatcgctacccttacgaaagctggagaagaggctaaagaaatcgaagtcacagaatccgaatatggagatgttcatacattcaagtacaacgcaaatgtagtagcaggcgttacctatcgtattgaagcgacacaagatattcattcagttgatggaacattaaaagctaaaaaaggcgatactgtcgctactgtaacaactgatgaaaaaggacaatggcactctcctaacttatatcttggagaatatcaagctgttgaggtatcagcaccagcaggatatatcttagatacacgccctattccgttctctttaacttatgcaggtcaagaagttgaattagcttctacagcaatcaaagcgacaaacgagtttcaaacattagacctacgattatttaaagatgaagaatctatcctttcatggaataacaatcaaccagaaattgaagttatccaaggacaagaaaaagtattcggtgtgttcactcgtgaagcgcaagccttaacagatgaagtacacgtaccagcaaacgcgctgttaggatatcaaactgtaagtgatggtgttgcttcttttgaattgaaattaccacaaggaaaatattatctaaaagaacttgaagcaggaacttctcacgttttaaacgatacagaatacgattttaagtttacagcagaaaataacaacgctacctaccctatttatatctaccaagatacagtagctgttggcaacgagactatgcttaaaattgcacgtactcctataataaataaattacattttaatgagtttattatcaagaaattgaatgaacaagctatcttcgataaagaatctggtgttgagtttaattatgatggacttggtacaggtgctattttcacattagaaaacgaagataacgaagtcattcaagaagtaacgattgataaagacggacaaggaaactttaaaaacattccagttggaacattctatttaaaagaaaagtccgcttcgtctactcattatcttatgtccgaaaaagtcattcgtattgaatcaacaaaagatggaatcaaagcctttgatgaagatgataaactgcttggagaaaccagttctacagatgaagaacctacaattctactagaaattgaaaacgaccttaagaaaggtacagcagaattaacaaagaaagatgtatctacaggcgaattgttaccaaacacaggtattagaatcttagatgaagaaaaaaatactattgctgagggtcgcactgatgataaaggtatctatacttttgaaaagctaccagcaggaaaatactattttcaagaatatgacgctccaactggttaccagcttgatgatacccctatgctatttgaaatcactgaaaatggagaggttgtgaaatgcgaaatgacaaataataaaatcccagaaaagattacttcattgccacaaactggagataccacaaatattactatctttgcattaggtatgttgttatctgttagtacattaggagttctatacttccgccgtaaaaaagcaaaaattgaataa

SEQ ID NO: 871 - DNA, 315 bp, Listeria monocytogenes-EGD
atggaattaaaacacgtaatacccaacatggaaaaaacatttggacaattagaatttgcaggagagggtaaagttgaacaacgaagaattaatggtaaacctaccattctctctcgtagctataacctttattcaaacattcaaagagcagatgatattgtcgtcattctccctgccgaagctggagaaaaacattttgaaatcgagcaaaaagtaaaattagtaaacccacgtatcacagcagagggctataagattggtactcgtggattcacaaattatgttatgtatgcggacgatatcgtcaaggtataa

SEQ ID NO: 872 - DNA, 375 bp, Listeria monocytogenes-EGD
atgagattagccgaaggaatcgtaattgaaaaagaaaaaacttttggaacgttgaagttttccgctctgcgtagagaggtcaagattgttgatgatgagggtaatgtaaccgaacaggtcaaggaacgaacttttgacctaaaatgtaaagaacaaggacgtatgatacaagtaagtattcctgcttctgctggagtaaaaaactttgactacaacgccgaagttgaaatcattaaccctattgctgatacggtagctactgctacatttcaaggtgcagatgtagactggtatatcaaagccgaagatatcgtcttgaaaagaccagcacaaaaccagcaagccgaccagaaacaaaatcacgataagaaatag

SEQ ID NO: 873 - DNA, 1401 bp, Listeria monocytogenes-EGD
atgagaaaactatttcagtatcgtggaaaaaagataaagcaaagtgacaaacacttactgtctaacttctttaccgtttcaatggttaccttattctctcttgtcatgataccgtttcacttaaaagctatcatggcggtggattgggaaactgtaacacttgatgattttattaaacaactacaaacaccatacttcttgggtagtgtaatcactgccctttttgtatgtcttattgtaggatttctttattactattataagattgataacatcaaacagcttgaacacagacaaaagctcgcaaagatggttctacaaaatggctggtatgaagctgaacagattcaatcagagggattctttaaagacctacccagctcaaagacaaaagagcgaatcagtcactttcctaagatgtactactatctcaaagatggacttattcacatcaatgttgaaatcactatgggaaagtatcaagaccagcttttacagcttgaaaataagctagaaactgggttgtattgtgagcttgtagataaggaattaaaggattcctacattgagtacaccttactatatgatactatcgctagtcgtatccagattgatgaagcaacggctcatgatggacgcttaaagctcatggattctgtttattgggaatatgacaaactccctcatatgttgattgctggtggtactggtggtggtaagagttacttcattcttaccatcattgaagccttgcttcacaccaatgcgaacttatatatactagaccctaaaaactctgaccttgcagacttagcaactgtcatggacaacgtctactttcgtaaagacgatatgcttcaatgtattaatcaattttatgaggatatgattgcacgaagtgaagccatgaagcaacacccaaactataagacaggagaaaactacgcctatcttggactacctgcaaattttttaatctttgacgaatatgtagcgttcatggatatgctaggcagagatagtgccgaagtcataagcaagctgaaacaaattgttatgcttggtcgtcaagctggattctttttaatcttagcttgccaacgtccagatgcaaaatatttaggcgacggaatccgtgaccaattcaatttccgtgtggctctaggtcgtttgagtgaattaggatatggcatgatgtttggaaatgatacgcaaaaacaatttttcttgaagcccatcaaagggcgtggctatgtagacactggtacaagtgtcataagtgagttttatacacccaaagtgccaaaaggatatgacttcctaaaacaaataggtaaacttgccaataagtcgctggctgatccagtggcggacgaagtgaaagccacaggttcagactag

SEQ ID NO: 874 - DNA, 1185 bp, Listeria monocytogenes-EGD
ttgaacaataaaacctcttggattgaagaactaaaagaaaagcgtatggcatatggactttctcaaaataagctggcggttgcttctggtattaccagacagtacctatcagacattgagaatgaaaaagtcattccaacagagcaagtcaaaacggctttgcttgattcacttgaacgcttcaatccagacaatccgctagaaatgttattcgactatgtgcggattcgtttccctacggataacgtagaaaaaatcatagaagaaatattgcacctcaatatagactatatgattcatgaagattttggctactactcttatccagagcattaccgctttggcgacattatggtaatggtttcttatgatattacaaaaggcgttttgctggagctgaaaggaaaaggctgtcggcaatatgaaaacttcctactggctcaacaccgaagctggtatgacttctttacggattgtttggaagtcaacggcgtattcaaacgcttggatttagctatcaatgacaaggtcggtatcttggatattccagagttggctcgtaaatcagaacaggaagaatgtatttctatctttcgtacctttaagaattaccgaagtggcgaactcgtccatagagatgaaaaatctgatatgggaaacaccttgtatattggttcactcaaaagcgaagtgtacttttgtatctacgagaaagattacgagcaatttattaagaatgatattcccttagaggacccagaggtcaaaaatcgctttgagattcgtttgaaaaatgacagagctactcatgccattcaagacttgttagcttatagaaatgctgaaaaaacagcttttgaaatcattaatcgttatattcgttttgcggataaggataccacaaaacggcgtagccaatggcaaacaagtgaacgctgggaatggttcattggtaagaatcgtggcgagctacgtttgacaacaaaaccagaaccatacagctatgagcggacactcaactggttacgccatcaagtagcccctaccttaaaggtagccagtatcttagatgtgcttaatgaaacagacatcataccagctatgatacgtgacgccaatcttacagagaaacacgaaaagctgatagagcaacagaatctagcagttgaagatgtgattgtatga

SEQ ID NO: 875 - DNA, 291 bp, Listeria monocytogenes-EGD
atgagtggcttaacggctgaactctatgagcttggtttcaactgcgggattgagttagaaatctacattcaagatacaggcatatatacctctctcattattgaggggtttcggaaaggagttgatgaaccatatcaatatgacttttacaagcaaacattttatcctcattatcctaacaaggtaacagtttatggggaacatcttagaccctctcaactgatagaacgtgttgagaggtattttattaaccgcaagaaatacatgagtgaaaggagaaacaacacatga

SEQ ID NO: 876 - DNA, 501 bp, Listeria monocytogenes-EGD
atggaagaaatgagaatctatgttgccaaccttgggaagtacaacgagggcgaacttgtcggtgcatggtttaccccacctatcgactatgaagaaatggaagaaaaaatcggcttgaatggcgagtatgaagaatacgctatccacgactatgaattgccattcgatattgacgaatatacaccgattagtgaaattaatcgtctatgtgaaatgattatggagctggacggttcgcctatctatgacgagctaaaagacatacaaggtatgtggtttagtagcctagaggaattgctagaaagcaaggacgatatcatctgctacagcgattgtgattctatggaagatatcgcttattactatgtagaagatggtttgatgggagaaattccagagcgtctacaaatgtatcttaactatcaagccattggtagagatttagaaattaacggcaatttccttgtaacctcacatggggtatttgagtattgcaattaa

SEQ ID NO: 877 - DNA, 396 bp, Listeria monocytogenes-EGD
atgaaaaaaataagaagctacaccagcatttggaacgtagaaaaagtaatctacgccatcaatgatttacaactaccatttcccataacttttacgcaaatgacatggttcattgtttcactacttgttatcgttatgtttggtagcctaccgcctttatcgcttattgatggggcgttgctaaagtatattgggattccagtaggcttggcttggtttatgagccaaaagacgtttgacggcaagaaaccctatggatttttaaagtctatcctcacgtattttatacgggcaaaaactacctatgcaggaaaagccgtgaaacttcaaaagcaacaattcaatgaagcaataacaaccgtaaggagtgaactgtattatggcatatccaattaa

SEQ ID NO: 878 - DNA, 2451 bp, Listeria monocytogenes-EGD
atggcatatccaattaaatatattgaaaataatctggtctttaacaatgatggcgaatgtttcgcttattatgaactgataccttacaattacagctttctaagtccagatgaaaagtatcaagtgcatgataacttccgccagcttgtagctcaaagccgtgatggaaagattcatgcgttacagcttgcgacagaatccagtattagagcgacacaggaacgctcaaagctggaagtgaaaggacgactaaaagaagtcgctcacagaaaaattgatgaacaaaccgaagcgttagtttctatgattggcgacaatcaagtagactatcgcttttttattggattcaagttactgctgaatgaacaagaactttccattcaatcggttagtcaagaaatcaagaaagctgtgcaggaatttctaaatggtgtgaaccataagctcatgggcgactttgtgtctatgagtaatgcagagattgaccgattctcaaaaatggaaaatctattggaaagtaaaatctccagacggttcaaaatccgtaagctagataaaaatgattttggttatatcattgaacatatctacggacaaactggtacaccttacgaagaatacgaatatcatttacctaagaaataccaggataaagaagttctagtaaagaaatatgatatcctcaaacctactcgttgtctaattgatgaaagccagcgttacttaaaaatcattcatgaagatgaaaccacttatgttgcctacttcacgattaactcaattgtaggcgaacttgattttcctagttctgaaatcttctattatcaacagcaacaatttacctttcctattgataccagcatgaatgtagaaattgtagccaacaaaaaagctcttacaaccgtgagaaacaaaaagaaagaattaaaagatttagattctcatgcttgggaaagcgacaacgaaacaagcaataatgtaattgacgctttggattccgtgaatgaattagaaacgacactcgaccaaagtaaagaatccatgtataaacttagctatgttgttcgtgtatctgcaaaggatctcgacgagttgaaaaggcgttgtgatgaagtcaaagacttttacgacgacttatcaatcaaactcgtgcgtccctttggagatatgttagggctacatggcgaatttatccctgccagtaaacggtacatcaatgactatattcaatacgtcacatcagattttttggctggacttggttttggagcgacacaaacccttggcgaacatgagggtatttatgttgggtacaatctggacactggaaagaatgtctatctgaaacctgcccttgctagtcaaggtgtcaaaggttcagttaccaatgcgttagccagtgcatttattggttcattgggtggtggtaaatcattcagtaacaatatgcttgtttattatgcggtactatttggtggacaagcggttatcgttgaccctaaagcagaacgtggcaaatggaaagaaacactaccagaaatcgcccacgagataaacattgtcaacttaacgagtgatgatgaaaacaaaggactgcttgacccttatgtcattttgagccgtaaaaaggattctgaaagtttagctattgatattctaacgttccttactggtatctccagtcgtgacagtgataagtttccagtgcttagaaaagcgattcgtaatgtaacccaaagtgaacagcgagggttattacttgttattgatgaattacgaaaagaagatacttctatcagtaacagcatagccgaccatatcgaaagttttgttgactatgattttgcacacttactttttagtgatggaaatgtaacacagtctatcagcttagaaaaacagctgaacattattcaagttgctgacctcgtattgccagacgctgacactagctttgaagaatacactactatggaattattgagtgttgccatgctgattgtcattagtacctttgcattagactttatccacacagaccgctctatctttaagatagttgaccttgacgaagcatggtctttcttacaggtggcacaaggtaagacgttatctatgaaactagttagagctgggcgtgccatgaacgctggtgtttactttgttacgcaaaatgcagatgaccttttagacgaaaaaatgaagaacaatatcggtctaaagtttgcgtttcgttccactgaccttgtggaaatcaaaaagaccctgacattctttggagttgacccagaagatgaaaacaatcagaaacgactacgagaattggaaaacggacagtgtttaatctctgacctttacggtcgtgtgggagtaatgcaattccaccctatttttgaagaactcttacaagcctttgatactcgcccacctattagaaatgaggtggaataa

SEQ ID NO: 879 - DNA, 2160 bp, Listeria monocytogenes-EGD
atgcggactaaggaagaacgaaaagcaaggaaaatagaaaagaaacaacgaatcaaacagctacccatctataaaaaaatcattcgctatgtactgatagcgattattttctttgtgatactcattatcatgttagcaagtgttggaacggttgctcatgcagctggtctagttgatgaaactatcaacaccagcaatgagtattctaagtatgggcttggcaactatcaacttgacttctatgtaaataatgattggggctggttgccttggaactggtcggacggtatcggaaagtccgtgagttatggtttatatgccattaccaattttgtatggacaatctcgctctacctatctaacgctacaggctatctggtacaggaagcatatagcttagacttcatcagtaagacagtggattccataggaaaaaacattcagaccattgcaggtgtcacaaaaaatggtttctctacttctggcttttacgtgggattcttgcttattcttatctttatcttgggaatctatgtgacttatacaggactaatcaaacgagaaaccaccaaagcggtacgagcagttctcaactttatagttgtattcattctatctgcttcattcattgcttatgctccagactatatcggcaacatcaatgacttttcaaaagatattagtacatcagctcttgatgtaggaacaaaaatcgttatgccagatacagacagcaaaggtaaagatagcgttgatatgattcgtgatagcttattttctgtacaggtaaaacaaccgtggctattgctccagtacggcacgactgacgttgattcacttggtgctgatcgtgtagagagtttgctatctacaagcccagacaccaacaacggagaagatagagaagatattgtgattactgaaattgaaacatttaacaatgccaacctttccattagtaaaacagtttccagattaggaacggtattcttcttatttatctttaacattggtatatccgtctttgtctttttacttactggaatgatgatattttcacaggtactctttattatctttgccatgtttctacctatcagtttcttattaagtatgatacctagttttgatggcatgggtaaaaaggcaattatgaaactgttcaacgttattatgacaagggctggtctaactttagttatcacagtagcctttagtatctctactatgctgtattctcttgctggctcttctccattcttcatgattatgttcttacagatagtaacgtttgctggaatctacttcaaactaggggatatcatgaatatgttctccttacagagtaacgattctcaaagcatgggacgacaaatgttccgtaagcctagaatgtttttaaatcgtcaatcaaggcgattacagagaaatgttagccgagcaattggtaaaaatagtcgctctggtaaagagaaagaagctcctactcctactaagacaacgaaagctaaccatgaacgacaaaatgagaatgggaatgaatcaacagccaaccgtcccacttctacgaaacagaatcgttctgctggaacacgagcaggtgaaaaaatgggcgacttgatggaagccaaaaatcgaatggttgataaagctggggatatgaaagacactatcaaaaatgctccaaccaatgcgaaatatgctgttcataaaggcaagcgtgaccttgtgcggaatgtaagtgaattctctcaatcatttgctgacacaagaaatctgcaacaacaagaacgtgctacaaagcggaatgaaaagaaagcgactgtcgcacaaagacgtcaagaaatggataaggcaaaagctgaaaaatccaacttagaaccttatgcttctatgcaaaaacgacaacgtgattatgaggaacgcaaacaaccagtacctcgtactgctccgacaccagcaccacaagctagtacgccaaaggcgacaccagaaagaacagcttctacgaatcagcaacatgaacgacctttgcagaaacaaaagaatacaaccaaagagcaagtgaaagccaacaaacgagagaacacttctactacctcaaaaaatagtaaaactgaaaataaaataacaaaaaccactacgaaaaggcgtaagtaa

SEQ ID NO: 880 - DNA, 1011 bp, Listeria monocytogenes-EGD
atgaagctagtaaaatacttcgccatctttggagtggttttctctatgttctttagtctgttgctatttgtaactatcgtttttgcagaggaagatgatacacgtagtagcagagaagaaatgattcaacaaggtggtctaaatgtatcagcagaggtactggcacatagaccaatggttgagaagtattgtaaggagtttggcattgaagaatacgtgaattacattctagcaattatgcaggtggaatctggcggaactgccgaagatgttatgcaatcctcggaatctttaggacttccaccgaacagccttagtacagaagaatccatcaaacagggttgtaaatactttagtgagctattagctagtgctgaaagcaacggttgtgatattaacacagtcattcaatcctacaattatggtggtggctttatcaactatgtagctagtaatggaaaaaagtacagctatgaacttgcagaatctttttcaaaggataaagcaggtggtgtgaaagttgactatcctaaccctattgcaattcctgtaaatggtggttggcggtacaactatggaaatcagttttatgtattgcttgtttctcaataccttacaccagtccagtttgatgatgaaaccgtgcaagcgattatgaatgaagcactgaaatatgagggctacccttatgtgtttggtggttcttctccctctacttcttttgattgtagcggattgacacaatggagctatgcagttgcagggattcaacttcctagagttgcacaagctcaatatgacgcaacacagcatatccccttatcagaagccaaagcaggcgatttagttttcttccactctacctatgacgctggtagttacgtgacgcacgttggaatctatgttggtaataaccaaatgtaccacgcaggtgatcctattggttataccaaccttaccgacagttattggcaagctcatttaattggagctggacgcattatcaaatag

SEQ ID NO: 881 - DNA, 918 bp, Listeria monocytogenes-EGD
atgaaaatcaaaattgaacgaaaagaaaaaccagacaaaccaaagaagcaaaaaaagattcccactatcaaagtgggaacacataaaaagctcacaattgccttatgggtattactaataggaagtatgagctttggtatttataaaaactttacagccattgatatgcacaccgtccatgaaaaagaaatcattgagaaacaggttgttgataccaacagtattgagagctttgtagaatcctttagcaaggaatatttttcatggcaacagtcgcaagattcacagagcaatcgaattgaacgcttaaagaattatctgaccgaaaacttacaacagctaaatactgaaatggttcgttcagatatccctactagttctatcgttaacagttttcaagtatggagtgtagaacaaagtagcgatactgaatatgatgtactcttttcagtaggacaacagattacagaaagtgagaataagaagaatatcacttccacttattctgttactgtctatgttgatgaagctagtaatatggtaatcattaagaaccctaccattgacagcaaaccacaaaaggcaagctatgagcctgtactttccgatagtgacggaactgtggacgcaaatacgacagaggaaatcaatagtttcctagatacgttcttcaaactctatcctactgcaacagaaaaagagctatcttactatgtaagtaatcaagctcttgatgtaattaataaagattatgtatttgtggaacttgtaaaccctgtttacacacaagcagacaatcaagttacagccattgtaacagtgaaataccttgataaagaaacaaaagttacacagctttctcaatttaagataatcttacaaaaaaatgagaattggataatcataaaaaacaattag

SEQ ID NO: 882 - DNA, 336 bp, Listeria monocytogenes-EGD
gtgaatgacatttgtgaaataacctgttttgatgaggaaaaggttcaaaaaattcaaacatcattagaagataaaaaaattagcgatattagccaaatttttaaagccctatctgaagaaactaggttaactattgcctatgcattaactttggaaaaggaattatgtgtctgtgatatttcaatcattgtgaaatcaacagtagcgactacttcacaccatcttaagatactaagtaaagctggagtagttcaaaataaaaaaataggaaaaatggtctattattcattaaataattctttagttgaaacattaatcaaagatattgtactttaa

SEQ ID NO: 883 - DNA, 1014 bp, Listeria monocytogenes-EGD
atgaaaattgctgtagatgcgatgggtggagatcacgcaccaaaagaaattgttttaggtgtgatgaaagctgtggcccaatataaagatgttgaaattcttctttttggagacgaaacaaaaataaatgaatatttaactgataaaacccgcgtaaaaattatacataccgatgaaaaaattgaaagtgatgatgaaccagttcgcgctgtaaaacggaagaaaaaagcttccatggtacttgctgcccaagcggtaaaagacggagaagcagatgcctgtatttcagctggaaacactggtgcactaatgtctaccggattgttcgtcattggccgtattaaaggaattgaccgtccagcacttgcacctacactaccaaccgtgacaggaaaaggctttgttatgcttgatttaggagcaaatgcggaagcaaaaccagaacatttactacaatttggtttaatgggctcggtttacgcagaaaaagtgcgtaaaattgatcgtccgcgcgtagcacttttaaacattggaacagaagaaacaaaaggaaatgatttaacaaaaaaatcattcgaactcatgaaaaatcaagatgcttatgaatttatcggcaacatcgaagcgcgtgatttattaatggatgtagcagatgttgttgtaaccgacggatttactggtaatatggtacttaagtccatcgagggaacaggtgccgctttcctaagtatgctaaaaatgagtttactgaatggctttaaaaacaaagtcgctgcaagcttcttgaaaaaagatttaatggctttaaaagcaaaaatggattatagcgaatatggcggtgcttgtttgttcggtgttcaagctccagttgtaaaagcccacggttcatccaatgctaatggtatttttaccactatccgtcaagtacgtgaaatggttgaaaaacaagtggtcgaaacaattaaagcagaagtagacaaagtaaaagtaggaggaacagaatctaatgactaa

SEQ ID NO: 884 - DNA, 468 bp, Listeria monocytogenes-EGD
gtgcaacaaataaattggaagaaaaatgtatcttttagaagcggctcacctgctttcactcttcttgaaacaatcttgtctattacaatcattttaagtattagcttgctcattccattattttttcaatgctacaacaagactatccaacttagcaacattgaccagacaacagaatggcaactttttctcattcaaactcgtttagaattagaaaaagcgactaatattcaaattgatgggaataagctttcttttagtaatggcaaagaccttatcacctattccaaatataatgatttagttcgacgacaagtaaacggaaaaggacatgaaccattgcttactaatgtgaaagattatcaattaatcaagaaagaaaaacaacttcatttaacggtgcaagactctaatactcagatatatacatctgtattcgcattaccagaagtggtatccaatccatga

SEQ ID NO: 885 - DNA, 342 bp, Listeria monocytogenes-EGD
atgacttcggaacaatttgagtatcacttaacaggcaaagaaattttggaaaaagaatttaaaactgggcttcgtggttatagtcctgaagatgttgatgagtttttagacatggttattaaagattacagtacatttactcaagaaatcgaagcgcttcaagctgaaaatattcgacttgtacaagagcttgataatgcaccgcttagaacttcaacacaaccagctccaactttccaagcagcggcacaacctgctggaacaaccaactttgatattctaaagcgtctttctaatttagaaaaacatgtttttggaaataagctggacgataacgaatag

SEQ ID NO: 886 - DNA, 717 bp, Listeria monocytogenes-EGD
atgagtgaacaagttagagtgcttgttgtggatgatgaggaccggatacgacgccttcttaagatgtatcttgaaagagaaaactatcgtattgaagaagctagtgatggtgatcaagcattaagcatggcgctgaacaataattatgaagtaatcctacttgatttgatgatgcctggtaaagatggcatcgaagtttgtcgtgaactgagggagtttaaatccacacccgttgtcatgttgactgcaaaaggagaagaagctaaccgagtacaaggctttgaagttggtgcagatgattacatcgtaaaaccatttagcccaagagaagttgtgcttcgcgtgaaggctgttcttcgtcgcgccaaacaatcctcagaagaatcagcaggaggcacaccgggagacattattaccttcccacatttaaaaattgataacgaagctcaccgtgttattgtcgatggaaaagaaatcggtttgacaccgaaagaatatgacttgctttattatttagctaaatctccggataaagtattcgaccgcgagtcacttttaaaagaagtgtggcgttatgaattctttggcgatttgcgaacgattgatacacacgttaaaagactgcgcgaaaaactgcatgatgtatcagaagacgctgcgagaatgattgtaacagtttggggtcttggatataaatttgaagttccagaagattaa

SEQ ID NO: 887 - DNA, 909 bp, Listeria monocytogenes-EGD
gtggaggaaacgcttatgaatgatttaattgaagattttttacattttttaattgtagagagaggtttatccgcgaatacaatcaaagcttatgaacgagatttacactattttgtttcttatatggatgtaacgaaggagttaactgatccgaatacacttgaacgaagcgatatagttggttttatggcatttgcaaggcaagaaggaaaatcaccaagaagtgtagcgcgatatattgcttcactgcgatccttctttcattatttaatgcatgatgggaaaatgtcacatgacccaatgattcaaattgaaacgccaaagcaagcccagggattaccaaaagttttgaaccttgatgatgtcgagaagttacttagctcttctgatacaagtacacctctcggactgcgtgatcaagcaatgatggaaattttatacgcgacggggcttcgtgtaaccgaacttgtcagcttgaaaatggacgatttgcaccttcatatgggttttatccaaacgattggtaagggggataaagagagaattatcccactgggaaaaacggcaacaactgtgttagaaaagtatttagaggaagcgagaccgaaacttcgtagaccgaaataccgaaatgattttgtctttttaaatcatcacggtcaaggacttacaagacagggtttctggaagattttaaaaggtattgcaaaagaatcgggcattgaaaagccgattacaccgcatactttgcgtcattcatttgccactcatttgcttgaaaatggggctgatttaaggtcggttcaagaactccttggtcacgccgatatctccactacacaaatttatacacacgtaacaaagctgcgtttgaaagatgtctacaaacaatttcacccacgcgcttaa

SEQ ID NO: 888 - DNA, 702 bp, Listeria monocytogenes-EGD
atgactaaggagaaagtgttatggggttacgatgaaaagactgggccagaaatgtgggggcatatctgctctgactttgaaatcgcacatactggaaaggcacaatcgccggtagatattgaacaagctgacgttgtgaaattaaaaccatcaacaatgaaattctactataaagaaacagactatacgattagaagaattgaacaatcggtacatgtttttccgcatgacaaagaacaagggctacgctttaacggcgaatattatccacttgtatcattccatgcccatattccggctgagcatttgcttgacggttatatatatccgattgaatggcattttgttcatgaaaaaccagacggcacaacgcttgttatgagtgcttggatggatattgataatacaaataatatcgaatttaaaaatttaccaacctatttcccagaagtgtttgctgattttgaaacagaacgggaaattactttagatgtgaatgaatttatgccagaagagcgtgttttctatacgtaccaaggttcacggacgacaccaccaaccgtggaaggcgtaacttggatcgttttaaaaaatgcgaagacacttggccaagaagatttcactgaatttgaaaaagcaattggtaatacaagtcgaccagtgcaagatttaaatggtcgtgaaattactttttacaattaa

SEQ ID NO: 889 - DNA, 378 bp, Listeria monocytogenes-EGD
atgaaaaagtataaaaaatggtggataacgattggtatcatatttctgcttagtgttattggatacgtttattggtttgcgattcccgaacatatggcgaataaagcagtgggtaactatctagcagaacaaaaaatcaaatctagtcaaattgaaacaagagtgataaagaaagattggaaaatgggtggttatcttacaacgataatatttaaagatgatccaaatctaaagtatgaatatagctatgatgaaagaatagacttaccttaccatgtttttgtggacgcttataaagatggttcgggacaaacagaaggtgagatgaaacacccaccattagaagaacaattggaggagatgaataaatcgaagtag

SEQ ID NO: 890 - DNA, 378 bp, Listeria monocytogenes-EGD
atgaaaaagtataaaaaatggtggataacgattggtatagtgttaattctttgcgttatcggatatgtttattggtttgtaatccctaaacatacggcgaataaagcagtggataactacctagcagaacaaaaaatcaaatccagtcaaattgaaacaagagtgataaagaaagattggaaaatgggtggttatcttacaaagatagtatttaaagatgattccgatttaaaatatgagtatgtttatgatgaaagatacgaatatcctcatcatatttacctcattgcatttaaagatggctcaagtcaagaggataaccagatgaaacacccatcattacaagaacaattggaagagatgaataaatcgaagtag

SEQ ID NO: 891 - DNA, 360 bp, Listeria monocytogenes-EGD
atgaaaaagtataaaaaatggtggataacgattggtatagtgttaattctttatgttatcggatatgtttattggtttgcgattcccaaacatacagcaaatgaagcagtagatgattacttagcagcgcagaagataaattcaacgcaagttaaaacgagggatattcaaaaagattggactagaggaggatactatgtcacgatagtgtttaaggatgaccctaatttagtgtatgaatacaactacaatagtaaaaggaatacgccttaccatattaatctacttgtttttaaagatggctcgagtcaagaggatgaccaagtgaagcatccaccactacaagagcaaaaggattaa

SEQ ID NO: 892 - DNA, 978 bp, Listeria monocytogenes-EGD
atgaaaatgacagacccgctgtacggaacatttgaaatagaaccagttttggctgaactaatccaaagtccattggtttcccggctagcacacgtgcatcaaggtggttcgagttatttagtaaatccactttgggaccttagccggcttgatcattcgattggtgtgatgctttttattagaaagttcggtggctctttggaggagcaaattgctggattattgcatgacgtatcgcacactgctttttcgcatgtggtggattatgcgcttgattttgaagaggaagattatcatgagcagatttttgaggactttgtaaaaacttcgacgattcctgccattttagagaagtatggttattcttttgaagggatttttaatgatatttcgaagtggaaaattttggagcaagaagccccggagctttgtgctgaccggattgattacacgcttcaagatttgtatcgccatgggaaaattagtttggctgaggtgaaagaatttttgcaggctttagtaatggttgatgggcggctttatttggcaaatatcgctcttgcagaatggtttgttgcgcaatattattcggaagtgattgattatttttatgatccgctgaatgtttatagttatgagattttggctgaagcaatgcgcattgcgtttcagcaggagacgattacgacggctgatcttcggttgactgatgctgaattattggctaaattgaatgcgaattcagatgctcgggagaaaattcagttgctcgcgagtccccatttggaagaaaatgaggtagactttacttatcatcataagaagaaaatgcgtttgattaatccgtctgttttggtggatgggcggcttattccggcggatgagctttcagaaaaagtacgtgaaatgaatgattgggcatctgagagaagtaagcacggcatctacataaaagcaaccaaaaaaagtaagcagtag

SEQ ID NO: 893 - DNA, 243 bp, Listeria monocytogenes-EGD
gtgaaaagaataattttaacaagtacattaatcgtttggacaatagtatgcatttacatgagtatttctatggttagtaataatactggcattgcttttccaatttggcttcacatcattcttttaatctgcttcttagcgacaagtatagtaaatgtgaagaaaaaagaatatctttggagcactatgttatttgaaggcgagctagtagttctattaagtttaattattgtattagtctaa

SEQ ID NO: 894 - DNA, 348 bp, Listeria monocytogenes-EGD
atgcaaaacgatatgtataataacattcgtttgagtgtaatccaattgatagattcaaaaaaagaaaatctgaaggagaataatataaaattaacaattataaagaatgaaaaagacggttatgttgtagaactggataatgacaaatgcatggcagaaattgtagttgaagaacctacttataccccatatcgctatatttcatttgaagtagtttctttgatggatggaaaagttaaaattatctattcttggtatgatgatgaaacaagtcaatggagcgatattgagaaagaattaaataaaggaattcaatttctaaataattttaaaacgatggagcaataa

SEQ ID NO: 895 - DNA, 1050 bp, Listeria monocytogenes-EGD
ttgacggcaccaaatacgaagccagatatgcaacaagtctatgcagtgaaatcaagaagcgttcatacccaattgctgaaagccatcgaacaagagaatatcctagaaaaatatttggcttttgaacaaagtcatggcccgttttttaatgcattagccgaactcattcaagcgactggacgcgcggtgcaagagttgctacatcatgtgacttttaacgataaaacaggcacttacgctgtgccgaaaagtgcggcaaacagcttgttgcttatgaaaaaagcgctggataacgcacgaacagaaaatgataaagacctatatccagatgactgggaagattacacggtattagcctatacatatgtgaataatcaaggtgaaactgtcacgatgtggttacttgaaaaagatggaaaacgggtagagaacaaggaattacaagacttcttagaaaaacatggtcaggaattaccagctatttcttatatagaactttccggggaagaactagaacggcgagtaaatgatagttggaaagatggagtaaactatttaactgggcaaaaagtttcgggattttccggtggtgtattaagatcctcagcttatgttgcgagtgtgaaaaagacattggattctgctgaacttattgatattggtctaggattgggaacagcagcaatgcgatatacaccgctactagctgaacaaattgaaaaattgagattagccaaagtagggcgttggatgtcagtagatgagtttgaaaaaatgcttgaaactggtaaggtgcaaatgtcgagaaatggaaacaggacttatgtggcttatccggcagataaagatgcctttccatccgcagcagatgatgcactatacgctgaatttaaggtgaatgaaaaaacgatttatccagctggtaaagaaggctgggcgcaaataccagggccgggctcattaatcgacaggtttaatcaaaaaaaaggattacctggaataactgaaatgccagatgctcttgatattaacaacttaggaggaaaataa

SEQ ID NO: 896 - DNA, 888 bp, Listeria monocytogenes-EGD
ttgatatatcttgctattttaggtaaaatatacaatgaaaaaagttactttaaaaccgatgtacttagaattatgtctcaagaaatatttaagtacgaaataaaatttgatgcctatttaagagaatgtgccaaaagtacagattaccagcgcattgcagaagaaaatttaagcaaattggtacaggaagataataatcagaatgtattagcaaatgttcttagttttaattatactcatattccttcaaaagtgactagcgaagagggtgatgagattagtattaaagtgaaagataatgttcatggtaaattagggaatgaaattatttttggaattgatcacggtactatagataatgatacccctttgtataattttacaaaaacttataggaaattatatgagaataaagactccgaagaatctgtactgagcatagatataaaagtgataaagatttacggtcactctctaagtaacgcagattatgcttattttcaaagtatttttgattttttaaatatctatgaaaatccaatcaacattatcgtatactataccaaatacaaggaaaatgaagcagaaatcagacaagaactttcaaatgctgttcaaaagctcattagtagatatggtcagtctatggataacaaagaaaaaggcaaaaatttattgcataaactattattggaaaatcgtttaactataaagaaaattaacctgaaggaagcatcgaaaagaagaagatttgcaccggcaattgacggcaccaaatacgaagccagatatgcaacaagtctatgcagtgaaatcaagaagcgttcatacccaattgctgaaagccatcgaacaagagaatatcctagaaaaatatttggcttttga

SEQ ID NO: 897 - DNA, 1011 bp, Listeria monocytogenes-EGD
atgaagagaaaattttcagaagaattcgagctacaaggaacacaaaaagactttcagtttgtagatattaaactttggacagaccaagcattgtttatcgacccatctctaatagcgaatgctcaacacaaggaaaatcaaaatgggagtatagaaacgaattatgccacaagggctcataattctttacaaagctttttttctacattttttgaaatgttcaaagatattagtccttctaaattaataaagaaaaaagatcaaggaaggaaaggtattaatcgggatgaaatgattttaaatctattacaatattcgacagaaaataatgccttgcacttgggctatactgctgatgaatcaaagggaacaggttgttccccgaaaatgatatatgattttttctccaatatgaaatttaaacatcccagtatgtttgactttgtaaatgagccttttcatgcaactggatttattaatgaaattgggaaagatagatcgacagatttaacggtatctattattttagatgtattatgtgatttcacattgtctatatgtactcagtattctattcctaccaaagaatttgagaactatagacactattgggatccaaacgaaaaaatgtggaaaacacgaaattatgatttacctaccaataataatggggagccaattgtgctggtacctaaatccttcgtaactaataaatttcaatacgatgcagaatatgtgctaaagaattatatcttagaagaaaaattggatgaattgcgagcacaatatccttcaaaaagattgattaagagcgacgccttaaaaaaactccgattagagcatccggatgcatttaataaagaccttgttctagagtattttgtagagaaaccaggttcttataagaattttatgcaacgtgtaaataacggtatcctcggaacccatcgtggattgttaactgacgatgaaatagaaaaggcaacaagcgagactcaagaaggagattga

SEQ ID NO: 898 - DNA, 630 bp, Listeria monocytogenes-EGD
ttgatagacttagaaaaattatggatacagtatgatcgaataattaaagaaaatggggcaattattttaaccgcacaaacaccgtttgataaagtgctaggagcaagcaatatagataatttaagatatgaatggatctgggaaaagactgcagcaacaggacacttaaatgccaaaaagatgcctttaaaagcccatgaaaatatattagttttctataaaaaattaccgatttacaatcctcaaaaaacggtaggtcacacagctgttcattcctatacaaaaaaacaaactgatggatcaaactatggaagaacaaaagctggaattactggaggcggtagtacagagcgttacccacgcagcgtgttaacctttaagtcagataaacaaaagtcaagcttacatccgactcaaaaaccggttgctttattcgagtatcttattaaaacgtacactaatgaagggggactggtattatataattgtatgggcagtggtacaactgctatagcgtgtcttaatactaatagaaaatatattggttttgaaacagatgtgggtcattacgagtcttcattatcaagaattgctaatcattgctgcatgcttaaagaagtgcagatttaa

SEQ ID NO: 899 - DNA, 873 bp, Listeria monocytogenes-EGD
ttgagtgatcctataaatataattttaaataattgcggatttggagaaaatctggaggatgaacaagaaaacgatttgtacaatttaatggaagaaaggctagaagagaaggataaatatgtgttaagtgtagctttcattcataaactaaattcttatagtaattgttcattagaggaatttttaatgttagagttgaataaatatgaaaaatacttttcggactacataaagactgaagtaactaataaatatgaggagtaccataaaacaagaaataatatcctgactaaattaagtggtggcctgggagctacacatagtataagcgttatgaattttaactttacgcctaatcaatttagtgattcagtaaagttaaatgaaaaaattggacttgcacatgtaaacgttcacggttcctatctagcaaatagtatctttggcatagatactaagagcctagaagatattgatactattggaagcggctataggtttacaaaaacatataggaaactaactcttaaaacgaaacggtctacagagatactttatcacgatataacagatattatcttctatggtcattcacttggccaagctgattatgcttatttccaaagcatttttgattatctagatatttataataacaccattgtactaactttttattactctgattataaggaaaatgtgcgtgaggaacagacaatagcagttagaaatttgattgaagaatacggaaagacttttgataataaacataaagggaaaaacttgttacataaattattactggaagagagaattagtgtaacagatttagagatttatgaagaagattatagttcaaaggacatgaaataa

SEQ ID NO: 900 - DNA, 630 bp, Listeria monocytogenes-EGD
atgggtatgttacttatattattagttagcttatttatactcacattcataggagttgttgtggggattattttgcttattgtaagaaaagagaaatgggcgggcattattgttgcgggattatccgtgggaatcggctttttagtattagtagccggactcaatataacgacgattaaattatttgaaggatttaataatcctctttctattcataattacaattcgagcaatgacccatttacaaatgattattcagaagactatgatgatgattactatgacgactacatagacgtaagttacggagaatctgttgagatagaaaatgatagcacggttaccatttataaacctgagctgttccaaataaaggaaagctacgatatttataaagtaaaagtgaaatacgcaaatacaagttctgatccaataagcttctattccgaagacattgcgctttatgataatgcggatgatgattatggccaacaaattacagaagaaggctttgcaggagaaattcaacccggtgagacgaaagaattaacgctttactatgaagtgtataaccttggaccatatgacgtagaatatgataactataactggactacaagtaaagaataa

SEQ ID NO: 901 - DNA, 1218 bp, Listeria monocytogenes-EGD
atggaacaagcgccacaagcaatacaagtgtctttttcgacaagacaatacttcaattttctacgcttcctttctaaaataactatttgcagccagattttttctttttctattgtaccatattttgaaaaagtttttttcggaaaaattaatgtagaacaagtgtttctgtgttatgattatggtacaaaaaaaggtggtgggcaggtcttggataagctggataactatattgtgacaattttagaaaaaagtattacacctagaaaattaccatttttacatactgttttagctggaagaagaaccggacaagctgttcaagatatccatctttttcaaatgcaacatttatttggactagtgccaaatttaaaagcaaactatttagaaaaacgacttttggaattagtgcaccaaggtagcattatttctactgaaaatggttatgtgacacaaggacaactagtagcgacgtttgaaaatgactacccaaactttcaaggttttacatttcaacggcaagcttttgcttttttttcccatttgcgactcgcagttcaagttgttagtaacattcatcatcatgaaagctattatttaccagttattcgtgataagaaagcccaacaatttattaagcattggttgaagtaccaagataaaactaatttagcggataagttatacggtgaactctttgcatggatgaacaaattagcagttgctcggccagcgtttttagtggaacgtttttctgggggcgaattaatgggctatacaacagaacaaattgcctcaaaataccaagtggagaagtgggacgtttattttgaggtgctccatgaggttcaccgtttgcttactgagatgaaaaagaagcccgaagaatggccgattctagctagtcttgtaccggatgagctcaatggattaactagttctgccatgcaaacctatgtattatggcaaaatggagctgatttagaagcaatcgagcgaattcggaatttgaaaaagagtaccatccatgatcactttgtagaaatccgagctactttgaaagaagcgaatgttccttatttaccagaagaggcaatcatccaaacgattattacaaagaaatggaatttactgcgtgaaataaaagcggaatttccggatttggattactatcaaattcggttagcagttgttagtagggagggcgagcagtga

SEQ ID NO: 902 - DNA, 1116 bp, Listeria monocytogenes-EGD
atggattatgaaaaagccttagcgtttataaaatcaaatagcacattagaacaagaagaaggaaccgaagttatttttaaacaggcacaagaaacagctcgagggaatttggatccttttttattaaaagacctgaaacaacatcttggcggtacgaatgatgcgataaaagaagcgccgcaagaaatccaaatgccagatttttctaatttggaaatagcaacggcagctgcactacaaatgcgagcaacaatgggaagtccgaatattgatttatcaaacggcgtaactacggagtatcgggttgttgaaggtgattatggcgatattccggtacgaatttatcgtcacgaggaagcaaccaaaccagttcccgcattcattttttatcatggtggtggctttgttggtggaacgccagctgtagtggagaatttttgtaaaggtatcgcggaaaagttaccggcagttgttattaatgtggactatcatttagctccagaattcccggcgccagcagctccaaaagattgttaccgggtgcttgaatgggtagtggaacaaagcaacgaacttggcatcgacgcttcgaaaataggtgtttccggagatagcgcgggcggaactttagcagcggcggtaagttatatggattatgaagcagagacaaattatgtaggatttcaagctttactttacccagcgctaactttagtagatgaagataatgataagtatcagtgggatatttccaagtttggggcatccgaagatacacttccgctcgttgcgccaggtatcattggaatgaacagctctggcgaattactgcggaaagcctatgttagagatgaaaatcccgcagcgccaatttattccccactatcggctgtagataaaagtatttatccgcctacacttatagccagtgcggagtttgacgcgttacgagcttttgcagatgtttttgctaaagaactgcgagcaagtggtgtacaaacaaaagcaatcgtttaccaaggaatgtgccatgcttttattgataaatacgggattttccctcaagcggaagacgtggcagatgaaattgttcaaatgatgaaagaaatattttaa

SEQ ID NO: 903 - DNA, 1416 bp, Listeria monocytogenes-EGD
ttgtcgatacaaatttttaatacgttaaaacgagagaaacagccttttaaaccactcaaagatggtgaagtgaaaatgtacgtttgcggacctactgtgtataactacattcatatcggaaatgcgcgaccaattattgtttttgatacggttcgacgttattttacgtatcgtggttatgatgtgaaattcgtgtctaattttacggatgtggatgataaattgattcgtgcggctaatgaacttaaattgacagttccggaagtggcagatcgctttattggtgcttattttgatgatgtcgatcagctgaatgtggcgaaagctagcgtgaatccgcgtgtaacggaaaatatggatgaaattatccaaatgattagtacgctaatcgaaaaaggctatgcgtatgagtcggctggtgatgtgtatttccagacgaaaaaattcaaagattacgggaaactctctggccaagaattatcggaattgcagcacggggctcgggttgaatataatgagcgtaagcaagatgagcttgatttcacgctttggaaagcggctaaaccaggtgaaattttctgggaaagtccgtttggtaatgggcgcccgggttggcatattgaatgctcggcgcttgcgaaaaaatatctgggtgacacgattgatattcatgcgggtgggcaagatttagtatttcctcaccatgaggatgagattgctcaatctgaagcggcaactgggaaaacgttcgcgaactactggatgcataatgcctttttaaatattgatggggaaaaaatgtccaaatcacttgggaattttattacgcttcatgatgtgctgaaagataatgacccaaatgtgattcgtttcttcatgttatctgtacattaccggaagccaattacgctgaatgatgcgattttagaagatgcgaaaaatggtttggaacgattaatgattgcataccaaaatattgatcatcgtattcaaacagatgacggtgaatatgtggaagaagcgcatgaggacgagtggctagaacaactaacggaattaaaacaagcttttgaagatgatatggatgatgatttcaatacagcaaatgcaattactactttccacgaacttgcaaagcgtgccaatatttacttggcgaaagaaactgtttctatcaacgttctgcgcgaattcttaagcatgatgcgtttgtttgcggaagtgctaggtttaaaattagagaatacgcaaacagattcgctggacgatagcgaggtagaagcgttaatcgaagaacgtctgcaagcgcgaaatgaacgcaattttgcacgtgctgatgaaattcgagacattttaaaagaaaaaaatattatcttggaagacactgcgcaaggcacgcggtttagacgggggtaa

SEQ ID NO: 904 - DNA, 5136 bp, Listeria monocytogenes-EGD
atgaaaagtaaattttttataggcatgatgacttttttgctatcattaatttgtcttactggaatgaaagcagaagcaaaatcggtgggagatatttctccagatgatatttcaccggagatttcagataatcgctttcaatctgcagaagggaaagttttgcctaattttgaggtggatatgtcgattagtgatcaaaataacgggaaattatcgattgatgaggattttgagttaacctcagatggcgatattattttgattggaacagtgcaaggtcaatacatacaaggaacccccattttaaatgaaaatgggcaattaaataaaattccaaaccgtgatcaagggattattatgcgtgtcgatcgaaccacaaaaaaagtggagtgggcacgtgttgttaactatgaggacggtaattacaattcacaatatgcagctgacaaatggtttagttcgtataaatcgattacaaccaactcgagtaaatcgactttttatgttggtggggaagtagtcaattactacggagactcaggtggaggtagtactttaattgtaaaatcaattgatgcaaatggtaacttccaaatagcccataaatcatacgttagttacggtgttccatcaagatcagatctaacctatgcctattttatggatattcaaatggaaggtaatacattaaccatgtcagcttcagctcggtatgctgcgcaaggtaaacagtttattcgttatactttagaaccagcctcattatccattacaaaaaatgaatttaacccattagataatactttctgggccaaatatcaacggacagatgtccttaaagtagataataaaggtctgatggcttataacgcggatgtaaatggtgccaaccaacttaaaatgtccattcgtgaatcagaaaataattataaagaaattacattgtttgattctgttcctgaaattttagcaaactcttccccttatatatttatggaagatcgtggcgatgggaatgtgtttgtggtcatgtcaacacccactacctggtatatcgcgcttgttaatatcgcgtcagaacaagtagttgagactaaaaaaatgacgatgaactcctccacgacgctaaatagtgtgatttacagtgaaggaaaaggtctgcttttaggtggtagtacacacgcggaagaaagcatttttggtagtgagccattaaacaaaaataacggatattatttagcgcttggaaatgatttgaacgtaacggatagccagattttaagaacgaatcaacataattcattgacaactattattaatggcgtcggcaataaagtagatggtttctttagctacgatggattaaataatgatggatatatccaaaatgtagaatatcctaacacctatgatgtgaacccgaatggggcgatgatatttgcagaatttaatttgcaaccagctccagtactagatacaggtaatccaatcttagcattttaccaaggggaacgtcgtgcagattttgatgaactagaaggggtgaaagcgtactctggaattgattcatctgatgtaacaaaatctattacaaaaaatacgtttgatttatatactgtaggcgtacaacagcaactttatcaaattgaatatttgccaggaagtggtaataaaaccactggtacgcgaaatgtccaattgattcacccacttgagactccaaaactagagaaaagctacgcagatagccatggggcttttaaagttggcgaagtagtccctgcaaatgctattcatgcatttaatggtttagatagtgctaataatgtgacttatgtagttaccgcagtagatgatgagaaaataactgtagatgcttcaattaagcgaacagaaggaacgaaaacagctgtaattaataaggaaattacacttatgacttcgactgctgacgaaactgcagtaatcgatgtgacgagtgtagctctagcagctggaaagtatacatccttaacagatgttcgaaatgaagggcattttcatatttatgcagaaacaatggatagcgtgtccatcgatcctaagtacgttaaactaacagaagaccctgaaaacccagttgactggaatgcgccaggtgtttattatgtgactgcatcacttgacccggcgagtggatatacagcgaaagatgtgaaagtaagtgttgctgtagttgatgttggaagtccgaaagttatttctgtaaacatgaaaccgtacaatccaacaaccgctcttgtcgttgcggaagatgatattaatggcgcaggagtgtataaaatcaactgggcaattaaagatgcaaatggacttattatccagcaaggtgtggaagagagtggtgctaccattcgagttcaaaccccagttccaattgatctctctacattaaatgatggaaattatacattgtcagtatcagcggctgacagaattggtcatacatcagaagcttcagaaaaagcgttcacagtagacagacaagcgccagttgtgacagctgacgacaagatcacgtatgaaataaatacaaagaaaacggaagaggaatttttaaacgatgtaaatgtaaaaacagaagccggcgcggtgattaaaaccaattttgatacgatggtgagaatggattcgccaggtgattatacggttttagtggaagctaccgatgcagctggtaaccaatctgatcccatttatgtcatcgtaacagtggaagatacggtagcgccgattataagtgcagatgaagcgattagttataatcaaggaaatatacgaacagaagcactattcctgactgatattcatgcaacgacagatgaaccagcaacgattacaagtgattttgcggatcaagtgaaatttgacacaccgggagtctacgcagtcacattaaaggcaaacgatattagtggaaaccaagcaatcccaagaacagtaaatgtcacaataaaagatgtgaccgcaccagtaatcactgctgatgaagccattatttacgaaaaaggcataaccaaatctgctactgatttcttaacggatatccatgctactacaaacgatggctcagcaataacttctaattttgcaactgtagtagatttaaatacacccggggattacgatgtgacacttagctctaccgacacaggtggtaatatatccgatccagtcaccataacagttaccgtacgtgatacaaccccaccagttattacagcagatacaactatcacatacgaaaaaggaaccacgaagactgcagctgcctttttaacggatgtaaatgcaacaacgaatgacggttcagcagtaacttctaacttcaacccaattagtttgaagcaagtagggacttatcaagtaacattaagttctgttgatgaaaatggtaactatgctttgccagtaaaagtaaccgtcgttgttcaagatacacaaaaaccagtaatctcatccagcgcaacaagcattacctatgagcgaggagaaaagaaacaagaaacaggcttcttccttgatttagctattaaaacagatgacggcactccggttacaagtgattttgacacagccgtaaatctggacacggcaggaacttatacggtaacactgaattcagaagatgaaagtggcaataaagcagacccagtcactattactgtgaccgttgctgatacagaaaaaccaattatcacagcagacacaaccataacctacgcaaaagggacaaccaaaactgtcgcacaatttttaacagatattcatgctacaactaatgatggatcaaccatcattagtaattttgacccaaccgttcttgcgcaagaaggaacctacacagtcgtattaaatgcaaaagatgagagcaacaatgaagcagatccggtaactgttacgattacagtggtagatacaaaaggaccgattatcaatgcattaaatgcaatcacctatgaaagaactatcaataaaaacgaagctgatttcttagcagatattgaggcaactacagatgatggatctacaatcacaacggattttaatagtaaagatcttgatacggttggaacctatatcgtcacattaaatgcagaggatgcaagtggcaataaagcaacacccgtaaaagtgacaataaaagtagaggataccatccctccaatcattacagccgaccaatcaatcacttacgaaagaggcattacaaaaacagagcaagctttctacacagatattaaagccgcaacaagcgacaatagcccaatcagctctgatttttcgaaaattgatctaacaaaaaccgggaattatgaagtcttactccgagcaacggatcaaagtggaaacaaagcattgccacttaaaattaatgtgctagtccaagatactatcgctccggttataaaaacaaccagccgagaaataacggccgaacgtggcacgccaatgaccgaacaacaactactcgcaaaaattggcgccaatacagatgatggctccaaaataacaactgattataacccggcaattgtcaacacatcaggagattatttagttcatctatacgctgttgacgctgctggcaatcaagcaataccggtagaaataactattcatgtaaaagatacaactgcaccaataattaaggcagataaaaaaattagttacccggtcggaacggttaagacagtaacggaatttttacaagacattcatgctaccacggacgatggttctaaaatcacgacagattttgacccgaatatgttaaaaacgccaggaaaatatactatccacttaaatgcagtagatgcagacgggaataaagctaaaacaatcgatgtaagtcttacagtagaagagaaggtgacgccgcctaaaccaccgacaccagatgatggcggaaataatacgaatggcagcaatgggacaaatggtagtaacaccgatataacggtaaatcctaccaagcaaaatactacggctacaaatgaaagcatcccagcattaggtgatacaaaatcaactattccagttatcgttggtatgttccttttagctacttcactcgttcttattagacgcaaataa

SEQ ID NO: 905 - DNA, 903 bp, Listeria monocytogenes-EGD
atgtattttgtatacgatattggtggaacttttgtgaaatttgcgttgatggaaaataacggtacggtgaaaatgaaagataaattccctacaactgccaaaagtgcagaagaacttgtagctcaaatggtcgaaaagtggcgcccctataggacagaagtgaagggcatagctgtgagttgtccgggagtggtagatacggaaaaaggcgtgatttaccaaggtggctcgctattatttatgcatgagaaaaatttggctgaaatgttagcgcgtgaatgtcatgttcccgttgtcttgcaaaatgatgcgaagagtgcagctttagcggaactttggttaggtgtggcaaaaaatgtacatagcgcggcgattttaacgcttggaagtggcgttggtggcggaattattatggatggtaaattacaatctggttatcatttgatggcgggagaagttagttttatggagacttcttttgatacgaagaaattgcgaggtacattctttggaagaactggatcagcggtggagttaattaagcgcattgcatcaaagaagaatttacccaataaaaaagacggtgagcacgttttcgaattaattaaccaaggtgatgaagaagcgaatgctatttttgatgcgtatatttatgaattagcatctcaaattttaaatatccagtatttgattgatccggaaattattgcaattggtggtggcattagcgcccaaccggttgttgttgaaaggctaaacgatgctgtcgcagaaataaaagcagctaatccttatcatgccgcacaaccgaaaatcgtcacttgtcatttccaaaatgatgcgaatttgtacggagcattgtataatttctttttacaaatggatgcgcaaaataaaaggtaa

SEQ ID NO: 906 - DNA, 573 bp, Listeria monocytogenes-EGD
atgttaaagctatacaaaaaagaacaaaatcaaatcttgtatgctgagtactggattaataatgataaggcaatcgtgcattacggtaaagttggtaaggtaggagagaaagaagaaaccagcaactatctggaaaaatacgagaacaaagctgcatttcatgaggcgtttattaaccgatttgtcccacaaggttatagcgaatatcctccaaacgaaaatttctggatattaattcaatatccgcttaaaagtttaacaggaacaaaacgagatatttggttgaaagatcgagtaacagatgttttaaatgacaatttgggttggaagggcttaggaatcgtagatggttttgacataggacaaaccgcgaatcccaacaagcaatttgctttaaatatattttgtgtcgttgttgatgaagaaataggtatcaaagtaattaaatcagctctaagaaataacagttgtgattatactagcgtaaaaattgcttccagaccattttcggatgatgctgaatatacgttgaaattttcagcgaagaagaaggatgtaactttttatgtatga

SEQ ID NO: 907 - DNA, 471 bp, Listeria monocytogenes-EGD
atgaaaaactatcctttcttcaaatataatatgaatatcaaaactttttttacgttcatcgttgccttagctatcttgggtcttggtctttacttgtttattacttatgaagtcctgcgggtttggcaattttggcttttatatgccgtttttgttatttcaactattaacatcttctccacgtatgttaatggtactgtctctattaataatcacgcgctattttacaaaagaggattttcggataaaaaatatccttttagtcaatatatgctggaatgtgatactctgttgcacggtcggaccatttcttttcttccctattacactatcaatattcttaacttagaaacagggaaagaagaaaaaattaagctcagaaatgccgccattgttcacaaaaatggcagaaagaacttccatttggaaatagaaagtctcgctgaacaattaaaaaaaatacaagcttaa

SEQ ID NO: 908 - DNA, 1941 bp, Listeria monocytogenes-EGD
atgaaaaaattatgcaccgtaatattatttttgactttgttattaaatggctttgttccgaatgcgcatgcgaagactgaatcaccatcagctgataataatttacaagtagcaccaccagctgcaattaaagatctttttccagatcctgccatggctaatgaagttttaaaatcattgaatcttaaaaaattaaataaaaaaagcactagtgatacagtaacgcaaactgaattaaatagtcttactggatcttttcaagcaattaataaaggaataaaatcaatagaaggtgtggagtatcttcaaaatataactgaactagatgtagagaaaaaccaaataacagatatagcaccagttgcaaatcttaagaaattgaccacattgctaattaatactaatcaaataacagatatatcaccagtggctgatttagctaatttaactactttctattgcggaaataaccctataagcgatattagtgctgttcaaaatctcactaaattgtctatttttaattgttacacagctaatgtagaagatattagtcctgttaagaatcttgttaatctaaaaacattaagtttaggaagtaacaacatacatgatattagtgatatagaaaaattaactgctctagaatatcttagttttagtaataatccagtagaaaatccagaagttatcggtaatttaacaaacttaaatacattatggttatataatgcacagattagaaatattgatttcacagcaaatttacctaaattaaaaagcgtttatttgtataataatcaaattagtaacattagtgaagtgagtaattgggcaaatattgagtatttagaactgaataacaatcagatcacagatataactccagtagccaatctaactacgcttaagacactaaagttaaatgaccaaattattactaatcgagaaataccttttcaaaaaaatatttccattgaaaataaagtaatggataattttggtaacatagtaacaccaaataatattagtgataatggaacgtataatagccctactttatcatggaatttaaacgaaacaaaagacaatctttcttatgactttactacaaaaataacgattttaaatataaatgcgacttattcaggaacagtaatccagccattaacaaaagacagtactcggccgataattacagcagatggaaaagtcagctatccagagggaacaacgaaaacgactaccgaatttttaacagatattcatgcgacaacggatgatggtagcccgattgaagtcgatttaaatgcgttggattttggtacagcagggagttatacagtgacactaactgcagtggatacagcaggaaatgaggcaacaccagtagacgtcactattattattacatcagtagatacaagtaaacctgtcattacagcagatgaaaaagtcagctatccagagggaacaacaaaaacggctgccgaatttttaacagatattcatgcgacaacggatgatggtagcccgattgaagtcgatttaaatgcggtagattttggtacagcagggagttatacggtgacactaaatgcagtagatacggcaggaaacgaggcaacaccaatacaagtaaccattattattactaattcgaaaaaaatagatccaattattccagttgaaccgggagggaatgatgtaaaaccagaaaagccaaatgaaataattattcttccaaaagattcggaaatacctttatccattattccaaaagataatatcgaaaaaacaaattcaatcaatgttatcaaaatgatagaaacaaatgaaataaagaataaaatgctccctaaaaccggagacaaattacctcttacagtatttttagggatgcttattactttagcgggtatttcttatcttcgaaaataa

SEQ ID NO: 909 - DNA, 762 bp, Listeria monocytogenes-EGD
atgaccgcttatccacaattcgatgttattttaaaagcattaaatttgtctagtgtaggagtaattatcacggatcctgagcaaaaagataatccaattatttttgttaacactggttttgaaaatattaccggctatgctaaagaagaagcacttggctccaattgtcactttttacaaggagacgatactgacaaagaagaagttgcaaaaatccgtcatgccattaacgaaaaatcaactgcgaatgttttactaaaaaattaccgaaaagatggaacttcttttatgaatgaacttacgattgaaccgatttacgatgatcatgaacatttgtattttgtcggcattcaaaaagatgtgacaacagagcacgactatcagctggaactcgagaaatcattaaccgaaatcgagaaactttccacgccaattgttccgattaaagaaaatatttgtgtattaccactgataggctcgctaacacacgaccgttttcagcatatgtctgaatatgtgagtgaatacatggatcacggcaaagaagattatttgattatggatctttctggtttagccgaatttaatgaagatgcagtaatgaatcttgtaaagttccacggatttatgaaattaactggcgtagaacttatcatcaccggaatttcgccaaaattcgccatgacattaattcgctacgaagaaaacctagccagcttaactacttacagcacaatcaaagaagcattacaattttactaa

SEQ ID NO: 910 - DNA, 285 bp, Listeria monocytogenes-EGD
atgcatacattctttttcagcaagatagaggcaacaccgaaaattgaaggagtgataacaatggcaaaagcacatgttggagacattattgaatttaaggatggccttacaggaatcgttgaaaaactcaatgaaaattccgttattgtcgacttaacttatatggaaaattttaaagatttagggattgaagaaaaaacagtggttaaccacaagaattaccaaattattcattctgtagaagaagacgatgaagttgaaaatgcagaagaaacagaagaataa

SEQ ID NO: 911 - DNA, 978 bp, Listeria monocytogenes-EGD
atgtgtacgtcaataacttatacaacgaaggatcactattttggaaggaatttcgattatgaactttcttacaaagaagttgtggttgttacgccgaaaaattacccgttccattttcgcaaggtagaggatatagagaagcattatgcacttattggtattgctgctgtgatggaaaactacccgttgtattacgatgctaccaatgaaaaaggccttagtatggcaggactcaatttctcaggaaatgcggattacaaggattttgcagaaggtaaggacaatgtgaccccctttgaatttattccgtggattcttggtcaatgcgctactgtaaaagaagcaagaagattacttcagagaatcaatctcgtgaatattagttttagtgaaaatttaccgctgtctccattacattggttgatggctgatcaaacagaatctattgtagtggaatgtgtgaaagatggacttcacatttatgataatcctgttggcgtgttaacaaataatccaacatttgattaccaactatttaatttaaacaattatcgcgttctttcgagtgaaaccccagaaaataatttttccaaagagattgatttggatgcttatagtcgtgggatgggcggaattggcttacctggtgatttatcttctatgtctcgttttgtgaaagcaacttttaccaaattgaattctgtttcaggtgattctgaatcagaaagtattagccaatttttccatattttaggctcggtggaacaacaaaaaggtctttgtgatgttggtgggggaaaatacgagcatactatttattcctcgtgttgcaatatcgataaaggaatttattattatagaacatacggaaacagtcaaattactggtgtggatatgcaccaagaggatttagagagcaaagaactagctatttatccactcgtcaatgagcaacgactaaacattgttaacaaataa

SEQ ID NO: 912 - DNA, 1659 bp, Listeria monocytogenes-EGD
gtgagtatatatcagttagactcagagaaatttgcagcaatgatagcgcttggagcagagaatttagcaaaaaatgctgattttgtagattcattgaatgtcttcccggttccagatggcgacacgggaacgaatatgaacctatcgatgacaagtggagcagaagaagttgcgaaaaatgacaaagaaacaattagtgccgttggagccaacttggctaaaggcttactaatgggtgcccgtgggaactctggtgttattttatcccaacttttccgaggattttctaaagcgattgaaaacaaagaaaccttaaatgcggaagaatttgctggtgcttttgttaaaggcgtggaaactgcctacaaagctgttatgaaacctgtggaaggaacaatcttaaccgtagctcgtgaagccgcaaaagccggagttgcagcagcaaatgaacatcaggatatcgaattagtgatggaagctattttaaaacaaggaaaagtagctttagaaaaaacaccagatttacttccagttttaaaagaagttggtgttgtagatagtggtggtcaaggtcttatcattatttatgaaggattttatggcgcactaactggcaaaatggccgaagctcctgattatatggcatctatgggtgaactaatcaatgccgaacatcatcgtcatgtgcaagactttatgtcaactgaagatattcattttggttactgtactgaaattatcgtaaaaatcaatgaaaacaaaccaggtcaaaaaccttttgatgaagaacagttccgtcaagatttaagtaaacttggtgattctttacttgtagctgcggatgatgaagtagtaaaagtacatgtccatgtggaacatccaggtgaagtgctaaactacggccaacaatacggtagtctacttaaaatgaaagtggaaaatatgcgtgaacagcataatgaaattgttggtgatgacaaagcaccagcgaaagaaaaagcggcttacggtattgttactgtttcagctggagaaggattgaagaaactatttgagagcatgggtgtatctgttgttctttcaggtggtcaaacaatgaatccaagtacagaagatattgtaaaagcaattgaatcagccaatgcagaacaagtttttgttcttccaaataataaaaatatccaaatggctgcggaacaagcagcgcaaattctaggagatgataaagtgcaaatcatccctacaaaaacaattccacaaggacttactgctgttctttcattccaagcagatcaagatttcttagctaatgcagaagcaatgaaagcagcaattgaagacgtagcaagtggccaagtaacgacagccgttcgtgatacaacggtagaaggtgtagaaatcaaaaaagacagcttcatcggtatggtcgaaggtaaaatcaaagttagctgtgcaacattagaagaagccgcttacgaaacactagaaaaactacttgatgacgatagcgaaatcgttacaatcattgttggtgaagattcagatactacaaaagcagaaacacttgctgataaagtaacagaagcattcccagatgtcgaagtagaaattcacgaaggtgaccaaccagtttatccgtatatatttgctgtagaataa

SEQ ID NO: 913 - DNA, 918 bp, Listeria monocytogenes-EGD
atgaaaaaattcttgaaagtttggtctgtactaacgattatttgtatgacggtcgttgtgtttggcggagcgctcgtaacgaaaactggttcagctgatggttgtggtaatagttggcccctttgtaatggacagctagttcgtttaacagatgttactccggaaaaattaattgaattcatgcaccgaatgacgacgggaatcagttcgatttttgttattgttttagcgatttgtgcttggatttatatgaaaaaccgtcgcgaaacaaaaccacttgcaattattgctgttctgtttctaattattcaagcgttaatgggaatggcggctgttgtttggggacaaaatccgtacatcatggcgctgcactttgggatttcgatcatttgttatgcttcgattgtattgcttgccttgatgatttttgaggtagaccgaaaattcgatgctagaaacctcgtgatggggacgaaattacgcgttaatatttatgcgctcacgatttacacgtacttagctgtttatactggcgcacttgtacgacatgaaaaagcaagtatggctgttccggtttggccttttgaaaatgggcactttataatgcctacttctgtacaagattatgtgcagtacttccaccggttagccgcatttattttaattgtttggttattatatgttacttggcttgtgttcagagattatagaagatatcgcgtacttacttttagcatggtgttgtcacttgtgtttattgctcttcaagccgttactggggcgctttctgtttatacaggagtgaacttgtatatcgcgcttgcccatagcttaatcattacgatgttgttcgcactactttgctacttatgcttactggcatcgagaagtaaaagtaatcgactacgaattaaataa

SEQ ID NO: 914 - DNA, 1029 bp, Listeria monocytogenes-EGD
atgaagctggaagatattgcacgattagcaaacgtttcgaaatcggctgtttcccttgcgctgaatggaaaagctggcgtaagtgaagaaacccgtttacatattctacaaattgtcgaagaaaataattacgtcccattacgaaacaccaataaaaaaatgaaaaagaaatcaaccattcgttttatcgcatgcaaaagtcctaatttgattaccgaacaatatcagaacttaccctttttcagtgagctgcttagctatttatctgctgaaattgctagttacccatatgatttggttatctctacctttgatgcaacaaccatattagaagaacttgctgaagcagaaaaagagcaaccaacagcaggccttattttacttggcactaatttaaacgctgaagaaattaaccgaatacagcaagaatatcctaaaatcgttgtcttagatacacaccatccgcatatctcagccaactttgtttctattaataattttcttggcggatataaagcagctgactaccttttacaactatcacatacaaaaattggttatgtgatggggctaccacgcattaaaaattttgatgagcggaaaagtggcttttttgctcgtttagaagaagccgatatttcagttcctgaagaacatgtctttcatctatctgcaatgcaaatccaagaggaagcttcggtaaaagaagccattgctgaattgcaagatttaccttctgcccttttttgcgaaaatgattacatggctattagcatgattaaaatgctgcaaagtctatcgatcaaagtacctgaacaagtttccgtattaggttttgacaatatcaatgaaagtaaagtaattacaccagaactaacaactgttcatgttaaaaaacgtgatattgctgaacaaacgcttgccctcttgtccaaacaaattaaagcagatacgaattttgaaaccagacaaatccaagtgaatacaagcttaatcgagagaactagctgtgttccgttccaaaaataa

SEQ ID NO: 915 - DNA, 345 bp, Listeria monocytogenes-EGD
atgaaaaacaaggcagaaaaacaaagaattgccactaatttgtcactttatatgaaaataaatggatatactcatagaacattcgcgcttgcagtcggaatttcccagaatacgctaaaagcattaatgatagggaagatgagaaacgaaaataaattccaaaaatacatatcgcaaattacagaaagtttggcacttgaagaaaaattctttgaacaaccgaaagaagcgattacagcagcacctatcacttttcaagatacaaacaaaatgcatcttggagatgaaaaattcaatgctatcagcttaatgttgaaaattggcgagattcattacgaatcataa

SEQ ID NO: 916 - DNA, 555 bp, Listeria monocytogenes-EGD
atgacgaagaaactgattaaagaagtcgcgttaaccctttttgcggaaaaaggctacgatgggacggcgctttcggaaatcgcgaaagctgttgggattaagacaccatcgctatatgcccattttgcatcaaaagaggccctttttttggaagtttatcaagatagcatccagatggaattaacagaactcggacgagtagcggagcgagaggatttagttggggaagagaagctacaatcaattttctttgtggcaacagatttttctagcaatcccgatgagaagaaatttttccagcgcgccgtcttttatccacctaagtcactttttcaagaattaaaagaagaaacaaagacatatgaacaactgacgaatcgaatattgcgcgaaacgttagaaaaaatagtatccgaagaagcacttgtaagatggatgcacgttttttatgcacttcttgatggactgagtgtggaacacggcatttatgatgaaacggaatttgagttgcgaagaaaatctgcttgggcagttcttgcaagtttactcaaatga

SEQ ID NO: 917 - DNA, 633 bp, Listeria monocytogenes-EGD
atgacttttttagaattccatcaattggtcaaagaagatttgttgatttattcatggattataaaaaattttcatcttacgcgtcaaaaattaatggcgggtggggaaataacgatgaatcgtgaacaagtgatagttatggagaaaggtttactagtacaagtaaatgaagaaggcaaaaatgatctgtatcgtgtttttatcgatcaacgaataatttttacgacaaaaggggatattactttaacggcactagaagatacctcttatagcatcattcgaacagatgagttaattgggaaattagaagatcaacatttattaccaacttttttcttacaaatagcggaagactttgagaagggtttagactggcaaagaacactaatttctgttgatcctgcagaacgtgcggaaatgattttggtgaaaattatcgagcgttatgaaataaattcagagaacaaaccagagtttccaagatggttaagaataaatgtactcgcaagattcgccaaatgctcggtgtctacgatgtcgtcagttgtaaacgaactagtcaatgaaggtgacttaaatataaaaggaacaccttggttactgactcgaccttatcaggcatcttgtgcttaa

SEQ ID NO: 918 - DNA, 1719 bp, Listeria monocytogenes-EGD
atgattaaaaaagtttttcattttatacttgtactgatgttaagtgtaagtataatacctctattccatgctaaagcagctgaaacaactaatggagtagatagtagtgaacaggaagataataccgaagttgcgcgtgaagaaatgcctccagagtctgaggaaccagtattctcgcttgaacaaaatagagatgatgctatggctgctttagtcgtgcctcaaactagaaatagttttttgagagcagctagtactccgacatttcaacaaacatttataaattccatttccacgcaagcaatggatttatgtaaaaagtacaatttatatccatctgtaatgattgctcaagcggctcttgagagtaactggggaagaagtgaattagggaaggcccctaattacaacttgtttggaataaaaggatcatataatggcaaaagtgtaacaatgaaaacttgggaatatagtgattccaaaggttggtatcaaatcaacgcaaactttgccaaatacccatcacacaaagaatctttagaagacaatgcgaaaaaacttagaaatggcccaagttgggactctagttattacaaaggtgcatggcgcgagaatgcaaaaacatacaaagatgcgactgcatggttacagggacgttatgcaacggacaacacatatgcttctaagctaaatacgctaatttcttcatataatttgactcaatatgatactctgtacgatacgattaaacaacaaaaaaatgtttctgaagatgctaaagtagttaaagcagatgggcatggtgtttatagtggaatttacaatacgtctgcagccagtgcgaaaaagttatctactggagcgccttacaacaataaagatgtaaaaattttaaaagaaggcactacaagcagaggaacgtgggtccaattttctctcaataataaagtaatcggctggatggataaacgcgcatttgtctattatccaaaagcaacaaatgtaaaaacgcttaacctaacaggtaaaatcactgctggatctactaatggtttatggtctgaggttccaggtacagtgaatgcgaaaaaattagctacaacagctggtgcttaccaaaataaagatgctaaaattattaagcaaggtcaaattagtggccgaacttactatcaattccaagtaggcggtaaaacaattggttggttggacgctcgtgcatttcatgtttatgataaaatccaaagccagtcaaatgtaaattggaatcgaactattttaaatgccgataagcacggtgtgtactcgggtgtttataatacttcatcaagtagtatgaataaactaagtacaggcgcgaaatataataataaaaaagtaaaagttattaagcaagccaagaccgcgcgtggaacttggtatcaattccaagtaaatggcaaaacagttggttggatggattatcgtgcattctttgacacaattacctcccaaaaaacaatgaataaaacagttactgtgggtaatgccacgaatcatggcgtttttgatggggtttatcgaacctcgccaacggtaaaacgaatttctttggggaaaccatacaataataaaaaagtaaaagtgctcaaagaagctgtaacagaccatgccacatgggttcaatttaaatacggtaacacaactgcatggatggacaaaaaagcatttaaatattaa

SEQ ID NO: 919 - DNA, 1689 bp, Listeria monocytogenes-EGD
atgagcaacagtaaatttattattacagaattatactgggaaagaattcaactacatgtaaagggtaaaatagaaaatatttcgttagagaactatacgttttcatttaggactttaacagatgaatttcatttttcaccaacgggaatcaaattggaaggaaacacatttgatcttcgtttcaatattgctattttaaatgatgggaattatttaccaagtggggattatctcttatccttatataacagtgaaacagcggatgaaattgttgcccaaccggctgctgaactatataaatttccagaagatgaagatcttttagaagaactaaacgaagctaaaaccgaaaacgaaaaaaacaatgtgcttttagcaggtttaagaaaagaatttaaacgcggtggggcgaatctcaagtatacgtataaagtcaccccaatgatttctgcagatgtaaatgaatttgttttctctgtttcatttacaatccctgtaccaaaaccaacaaagtggcaagtattcaaaaataaaattaaagaaatgtatcatactttcagttttaattttagaactggtttgtttaaatctattttctatacctcacaagccctagtacctaaaaacggaaaacgaattcttttttcttcagattcccgtgcagaaattggtggtaattttgagttcgttctaaataaaatgaaagagatgggtattgataaagattataaaatcaaaatgacctttaaacccaacattcgtttgagaagagcttttattgagaaatttagatttccatttttgctagggagttcagatattatttttattgatgattatcatccgatgatttatacaattgacttcagcgaaaaaacacaagtaattcaattatggcatgcatgtggggcttttaaaacagttggattcagtcgttcaggtaagcaaggcgggccgttctttgatgatagagcacatcgtaattatacacgtgctattgttgcttcagatacagacataccattttatgcagaagcttttgggataaaagaatcttctattttaccaactggtgtaccaagaacagatattttctttgatccagagtacaaaagaaatattgttactacgatggagcagttgttcccagaaactcaaggcaaacaagttattttatttgctccaactttccgtggaaatggtgcgaatcaagctcattacccatattttaaaattaatctggctaagtttgctgaatactgtcgaaaaaataattcggtcgtaatctttaaaatgcatccgtttattaaaaatgaatttattattccagaacaatatgcagatgttttcattgatgctagttcttatcgtgaagtaaatgatattctattcattacggatatattgattacggattattcatctgttattttcgaattctctaccttacaacgcaaaatgctgttctatgcatttgacttggaagattatgtttctacgcgtgacttttatgaagaatatgaaggttttgtgccagggaaaattgtatatgatttcgaagcattaattaaggcgcttgaaatgaatgattttgaacaagaaaaggtaaaaccatttttagataagcactttaaatatcaagatactaattctgcaaaacgaattgtggaagaaatctttaaaaaataa

SEQ ID NO: 920 - DNA, 2859 bp, Listeria monocytogenes-EGD
atggaagatgttagaaaaaaatggaaaaaggtacagtgggataatgaaattacgtataaaacattccttacatatagtgttctctttgtcttagtaacaataagtatttacttacttttttggttaagaggttattcatttatttggtctcatgatggttttaaccaacactatccgattttaaaagaatttagaaatatgttagtagatttcctgaaacacccaactcaagtgccggaattatggtcttggcaaattggaatgggaggcgatgtggtcggtagttttggctactatgttctaggtgatatttttgcttatttagtagtactatttccagcagatcagatggaacttgcatacacaacattaattctattacgcttgttttgtgtaggtattgccttcttagctctagcgaaaaactttaaaattaatcatattgctgcagttacaggttcattagtctatgtgttctctggttatttatttgtttcggcaacaaggcatccattttttattacgccgatgattcttttaccgctactttgtctttgtgtagagagagtgcttcaaaagaaatcaccagttccgttaattcttgtgatttgttggacattagttagtaacttctattttgcatatatgcttgcgattatggtttgtatctatacagttattagatactttactcattacaaaaagcaaggaattccgctactaagtactattggaaaattagcggtctatgcaattactggctttttaatggcatgtattttatttttacctaatttaatcgcctttttaggttcttccagggcaaatggagagtttgcgaatgggctatggttctatgatttgtcctattacttatcgcttggaaaaatgtacattacaaccgaaagcgctggttattgggcaaacttaggtttcgcagcaattgctgtgtttgtacttccgtttatttggcagtatcgaaaaaaatatccggttgtatttattagtttggttttaggacttggcatgatgctatttccgtttttcggggcattatttaatggtttaagtagtccttccaatcgttggatgtttgcagttgctcttcctgtaagtattggagtttcctttttattaacagactataaaacattaacgaaaaaagatatgcgtaattttcttattacacttattatctttatcgttgtttcatggtggggaccgaacttcaatatttatcaacctatcttgttagttcctttaacattaatgcttttaaccttttttgttttctttttacaatttattaatttgaattatattaagaagaaagcttataatggcttgttttactttttgattataatgttagtatgtgtcaatttagcttatatgggtaattatatgtttagtaaaaacggggctaataaagtacaaggtcaattaaattctggggttgttgaacgtaaaataactgaactatatgggggagcagataaaaagattgataagagctctttctatcgtaccagcctttctagtgggtataatggattttatgataattcagatgcaaacattttgttagatgtaaatacggtgaattcattttattcgattactaatggtgcagtagctgacttagcttctgaattaaataatagtcagtttcgcatgacgttgccgcttgggcaaatggataataggactatttttacgaatatacttggaacgacttacttatttgcacgtgatgatcaagctggcagaataccatatggctttaaaaaaattgattctgctgaaattgaacgagtagataaaccaggcattagccatacagatgtatatgaatctgaaaatagtgttccattgatgtatatgaactaccatacggaagatagagaatcatatgaaaagctctctccgcttgaaaaagaggaagcactttcttataatgctatcattgataataaagacacatccaaacgtgagtataaatcgaatattaaagaacttgaatttgaaacgagtatacctaaagttaatggcaaagctcctgcaaaattaacgaaagacaaaatagaggtttctaatgctgaaaatagcattcaatttaaattgaaaaacccggaagaaacaaaaaatgcagaactttacttttatattgatggtttagatttcacgccatacactttcaaacaaagaaaagatattgcgtttgctaaagatgagtataaaacaaaaaatatgcgttataattattaccggaacaaccttaccaaacgtataaaagaagactatacattaacagccaaaacatctaaccgtgtagtttcagcgagccaagtggataaaagtgagctttctgggtattttaaacgggacaacatgcttttaaatggtggtttttctgaaaaagctcggaaacaagtatctattaatttgagcggtcttggtacgtacgactatgataatatcaaaatttacgcggttccatttgatgattcttatacgaaaagaatgcaagaactaaaaaaacaagctgcaacagacttgaaatttgatacaaacaaagtgtcggctaaggtttcagcaaaacaagatggtgtgttagttacaacaattccatatacaaaaggttggaaagtaaaagtagatggaaaagaagtatcaacagaaaaagtcaatacaggatttattggtttttccttagataaaggactccatacaatcgaaatgaattatgaaacgccaatgcttaaagctggcatggtggcgagtggcttaggtgtcatcctttttgctggaattatcgtggtgtatcatcttagaaagcgcaaaaataaaacacaataa

SEQ ID NO: 921 - DNA, 1023 bp, Listeria monocytogenes-EGD
atgtatatgacgattgcagaaaagcgaaaaaaatcgcggcggatttggacgttaattattttaagtgtgttgattttttgtacatttacatatagtgtcaatgctggttattcgaaattgccatttttggaagtgattaagtcgttttttgggatggcggatgctgggacacaacttattgtgacggagtttcgattgccgcgtatagttattgcgctgttagttggtgcgggacttgcggtttcgggaacgattttacaagggatctctggtaatggactagctgatccgggaattcttgggattaataatggagcaggacttgcagttatgctttatatttccttttttccttccactatggacgttccagtgttatttatgccttttatcggatttatcggagccattttaaccgcgtttgttgtgtatggactttcttatagtagaagcgaggggttacttcctaatcgattgctacttactggtattgctgttgcggcggcaattgcggcacttataacgttattaacggttcggcttgatccacaaaattatcaacgctatgctgaatggatggcaggaaatatttgggcttcaagctggcagtatgtttttgcccttttgccgtggcttattgttttaggggcaattgctttcatgaaagtaaaaacgttagatgtgctctcttttggagaccaagtagcaactggtctcggggttcgggttgagcgagaaaaatttgtgcttttaatagtagcagttggtttggcagctgcctgtgtatccgttagtggtggtattgcatttattggactgattggtccgcatattgccagaaagttagttggctcagcacatcgctgggtgatggtaacagcagcgctttctggagggctattattactacttgcggatacaattggtcgattgattattcaaccttctgaaatctttgctggtatcgttgtggcaattatcggtgcaccttatttcttgttccttcttgcaaaagctaaataa

SEQ ID NO: 922 - DNA, 207 bp, Listeria monocytogenes-EGD
atgattacgtactattttaataacaaggccgatgacaaaggtaggcacgaggtacatgaaagaacttgtagatatcttcctgaaaacaaaacagaaattggtgtcttttcatcatgccaagatgctataagacaagcaaaattgcaacattttcagaaagagtttgatggttgtttttggtgctctcgctcttgtcataagggataa

SEQ ID NO: 923 - DNA, 1689 bp, Listeria monocytogenes-EGD
atgcaaagaaaattaataggtagttttttcattctaatggtgttgcttattattggaagtacttctgaaaaagtgcaagcttctccaacatcttcaaatggctggcagttaaaatgggctattaaaaataatgattttgaagatgttgatatcacagattacggtcaaaatgctggtacaacaaatgtatggatggttaatcaagctggtgtagatgcctggggcacaactaatccaactggaaatatagaagtatggcaaaatggtaatggatataatgtgcctgctttttcgggaaataactttattgaattaaattcagatggtattggaccagtttatcaggatattcggacaatcccaggttcgaatttaacatggaagttttcgcatcgaggtcgtactggtgtagacacagccgatttgcttattggttcacccgaaagtcaaacggaggtatcgagagtttctaatggggaaacgtgggggagttttgaagggaattatacggttccagctggacaaactatcacaagactaacttttaacccaatttcaactgcaaatggttcacttacaagcggaaattttttagatgatgttcagttatatattaatgtaaacggtgcaaaaattggcgatgttgtttggtatgattttaatggggatggtattcagcaagatagcgaagaacctgctcctggcgtaaaggtagatttattaacgaaagatggtacgtttaaagaaagtgcgaccacaaataatatcggctcttatttattcacagatgttttgccaggggactatcaagtgaaatttagcctaccgaataatgattttattttttcaaaagcaaatcaaggtaatgacaagagccttaattctaaaccagataaaactggtattgcttcagtaaatgtacctaatttaaaaagtgagaattttgatatagatgcgggaataacgacgaatggtaaagtggaaattcaaaaactttcaggagataaggcactgagtggagcggtttacgcaattaaagataattctcaatcagaagtagcaaaaataacaactaatcaaaatgggacaggaactgcagaaggactgccaccagggaattatacagcaaccgaagttacagcaccccttggatatcagaaaaacacaacacccaagaaatttactatcacgtacggcgatacaaatcctgtcaaactcacttttcaaaacgctgagaaaacaggatcaattactatttttaaacaagatgaagcgaataaaaaaggtctagcaaatgccgttttcgacgtaaagtcaatagatggaacgacattaaaaaaagtaactacaaatagtaaaggttatgcacttgctgaaaacttacaacccggaacttatgtcataacggaagtaacagcaccacctggttatgaaaaatcagccaatgaaattcgcgtaacgataccatttaatcctcaaaaaactattaatattacttttagtgataataaaataatggtacctctaaaaccaactccaacaaaggggagtacagtggtgaaggtaagtggagaaacgacaaaaattaccgctctaccgcaaacgggcgatagttcaagtagctcaacgatttttacaggattgcttattgtcgtagctagcgggttatttgtttatagaagatattaa

SEQ ID NO: 924 - DNA, 4593 bp, Listeria monocytogenes-EGD
atgattacagtgaaaaaatatccaatgttattaatgagttttttaatcgtagggatgattattttttgtgtacctcatcatgcccaagctacagagttagataatatcattgatggtgttcaaattttagatagagatggcaagccgatagatagtgaaagcgattctgacagagtagtagatagtcaagaggatattgtcgtcgtttacaattggtcgattaaggataatcaaccagttcatgcgggagatactgttcatatccaaatcccaaaagaatttaaaatctatacgacagttcaaggggagttagtcataagtgatggaggggcttcttgcggagaattcgaaattacaacagatgggatgatgacgattaccttcaatgactatgtagagaatcattctattagtcacggcatagtagaagtctatacgaattttgatttagaagaattagacggtgaaacaccaactacaatcgttttcccaatcagcgaaaacgactccgaagaatttacaataaaaataaaaccagataccactaacgcttttgagaaaaaagggtcaacggttcaaaatgcgcaagtgattgactgggaaatcaaaataaaccaagaattagcaacgcacgaaaatgcttcagtagaagatttcccgggaaatggtcagaaaattctctttgactcatttgaagtgcacgaaatgaatatgcatatagatggcacttacgaaataggcgctaaagtggatccatctgaatatactgtaactaaaataaacaatacttctggtcaaacgggatttcgattaacgtttgaaaatccgattgattcagcatatcaaatcacctatcaaacagaaataacggattttaataaagcaactttttcaaatacagcaacatttaattctgatgaaacggaagaagtaatggattcagatgtagtaattcctcgagatccaattattcaaaaatatccattattgtttgatacaacatctaataaaatttcgtggaaagtagaatataaccaagggcattacgcactagacaattctgtaatggtggatacttacattgatgaacaatcctttggtggaattacacgtattgtaaatggagatacaggaataccgctacttccaaccgaatataccgtaacagatatggggtcagctggttttaaaattgagttgccagatgacggttactacacgatttattttgaaacaatcgttccagaaggcaccacgggaatgatttccaacaccgcatcaatcatttccccgaacatccctgataacgaggcagaaggtgactattttatccccgatccttcaccgacagaggggctaattgataaaaaaatcgaaaattttaatgcgaaaacaggggaattaacgtgggaaattattatcaataaagacggcggaacgcttcataatccggttattacagacgaatttcctgacggcggattaattttccatccagcgactctaaaaattatggacagcgagcaagtgaaattagactcggcggattacgaggttgttccattaaatggcgatagtagctgggaaaaaggatttcaaatcaattttaaccgagatattactgggcaacatgttattacttataaaacccaagtgaatccaagtactcatacaagtggagacaatgaatacactaataatgcaaccattaaaacggacacagcagaagcatccgactcggatacaaaatggattgataaagtcatcgatgcagacggatataaaaatggtgtgttcaattacaaaacaggtgaaattgaatggaaattaattttcaatgatagttccaaactaatctccaagccaacgatagaggattcgcttaattcaggacaaacattcattcaagactctattgaaatccacaaaattgatctttccgcaacaccacaagttggggaattaataccgccggaaaattatgatgtcacttttacgaaaaaagaaaatggtaacgagcaaatgcttattaccttcaaaaaaccattaattcacccagttgaagttacctacaaaacgaaaccagtaggcatcactaagccgctttataaaaataaagcagttataagtgacggggaagaagtgctcgctgattacgaagcagaagtaattgatgataatgcaaataaatatgttaataaatcgggtgagcaagttggagataatatcgattgggaaatttatgcaaatcaatctggatcaacggtcagtaatgcaactgtaactgacacacttggtacagggcaaaaactagacacctctagtattaaggtatacaaatcgcaaacttctgttacaggcaagatgttgcaagagagtaacatgccaatttccccaggtgaatatgatttgaaaacaggtgtagatgaggaaagtaatttagaatatttccaagtgaaatttaaaaatgaaattaatcaatcctatgtgattaaataccagacagcgattaccttgacctcggatacagaaacaacggcgcaaatcggcaattccgtcacttttacaggagataatattacaaaaggcgaaactgaaaaaactaaaaatattgaagttaaaataacaacgggcgacggcacaggaaccggggaaactgggaaaataattttaaataaagtggataaagccgatccaagtattccgctagaaggcgcgacgtttgacttgtacgcgaatgatgaaaaagtggatacacaaacaaccgataaaaatggcgttatcgagttcgacgatttggtatacggagactacactttaaaagaagtgagtgcaccagaaggatacacattaccaaccgcttcgacagagaatatccaagtgaagttagagcaagacgaaaaagtcgttcaagtcatgaatgaaaaaatgccaatcaaagaaactggtgaggttcatttagtgaaaaccgacaaagcaactggagccacgttggcaggagctgaattttcactatatgataagtctggagccgaactacaaaacggactcacaacggatgaaaatggcgaactaactatccataatttagacttaggtagttattatttaaaagaaacaaaagcgccagaaggatataaactctcggaaaaaacatgggaattcagcgtggaatcagggcaagtagatgcgatagaaatccaagcagaaaatgaaaaagatttaggagaagcagtcttaactaaagttgatagcgagacgaatgctaagttatccggcgcgaaattcaacttattaaatgactctggcgaagttattcaaactaaccttgtctcggatgaaaatggagaaattcgtgttcaaaacctagagccaggagactacgcattccaagaaacggaagctccaacaaattatgatttagcgacaaatacatggccatttaccattgtggcagggcaaacgagtgctacaatggtaacagctgaaaataataaaacagggaaaccagatgtcgatactggcgaagttattctcgtgaaacaggatagtgcaacgggtgaaactttagaaggagcagtttttgatttgatgaccgctgatggcgctatagttgcaagtaatttaacaactgatgctaacggggaaatcacagtgactaatttagcaccaggtaagtattcctttaaagaaacaaaggcgccagaaggatatgagttagcgactgatgtgtgggaatttactattgctccaaatcaaccagaaaaaataacaattacagctgaaaatacgaaattggcaccaattccagatgcgggttcagtaaaaattattaaacaagacagcgaaaatggcgttcgattggcgggagctgagttttcgctaatagctgaaaatggcgagacgctacaaacaaatttgaaaaccgatgaagctggagaacttgaagttaataatcttgctccaggaaattatcgtattcaagaaacaaaagcgccagacggatatcaacttgaatcaactccatggcagtttgaaattgtagcaaatgacacgagtcaagttactgttatagctgaaaacgccaagctggaaccagatgtagctgaaactggtgcggtgcgattaatcaaaacggatagtgaaaccggaactagactaagcggcgctgtttttagcctcctagatgaatcaggaaaagtcatccaagctaatttaacgaccgatgagaatggtgaaatctttatagatggcttaacaccaggaaattattcgctaaaagaaacaaaggcgccagacggatatgagttagcagaacagccatggaatttccaaatagttaaggggcaagtagatgcagtaatcataaaagcagaaaactcgcctatcatagcaaatggggctatttcatttgaaggcgatgaaacggataaacccgaatcaattgaaattccagtaaggaaaactgatactttagcaacagaagtaaccaaactaccgcaaacaggagataaaacgtcatttcctagagttattttaggtggaagtgcagtgttaatgagtttgttataccttagaaaaaaatcctcataa

SEQ ID NO: 925 - DNA, 432 bp, Listeria monocytogenes-EGD
atgaacagaaagatgagattattaaaaggactaatggctttcattgtaggtataagcattatagcaaccccaatcattacagtctatgcagcaagtaataaagtagccatttcgatgaaccgtcgagctgtaaatggtgctacaaatggaaaatatcattcattgaacaaaggaacggttaaattgaacgtttcggctaaaggtttcgggaatagtaaccccaactcgacggtaactttgcacaaagagaaatttggaatagatgattactttggcagagtcagtatttcttcaggaaagaattatttttataaaaataagacaaaagaatttccaacaaaagcaaatgcgaaatcaagtaaatactatttaaaagctgaaaaagcgatggattggtacacagtgaaaatcgaaggaaccattagtaactaa

SEQ ID NO: 926 - DNA, 498 bp, Listeria monocytogenes-EGD
ttgagtgagtggaaaattttgccgatgcaaaaagaacactattcgggagtagctgcagtccatcaagagggtattgaaactggaaatgctacttttcaagagaagacactatctttagaagcgtttgatgaaaaatatttaaacacttgtcgattagttgtccttatgaacggcgaagtgattggctgggcagcgctgttaccattttcaagtatgcatgcttatcgaggagtagcagaattaagcatttatatagcaaaaagcgcccgtggaaaaggcgttggaaaagcacttatgcatgaaattatccagacaagcgagcagaatgatttttggactttgcaatctttgatttttccggaaaataaagctagcattgcgcttcatcatacatatggattccaaactttatgcatccacgaaaaattaggcgaaatgaatggcgtttttagggatgttgcactattagaacgtagaagtaatagaaacggagaataa

SEQ ID NO: 927 - DNA, 984 bp, Listeria monocytogenes-EGD
atgaaaaagagacaattaggaaatgctggcttagttacttcagagcttggattcggctgtatggggctaaattatcatcgtggacctgcgaaagatcgaaatgaaatgattgaagtcgtacgcactgcaatggatgcagggattacgatgttcgatacagctgaagtgtatggaccttatactaacgaagaacttgtcggagaagctttggttggcaaaagaaaccatgttcaaatcgcaacaaaaggtggttttaaaattaatggtttaaataacgaagtcgatagccgtccagaaagcatcaaggccgcggttgaaggctctctcaaacggctaaaaacagattacattgatttatattacattcatagaattgacccctctatcccaattgaagaggttgccggcaccattcagaatttaaaacaagaagggaaaattctacactggggactctccgaagccagcgcaaagacaatacgccgtgctcataaagtagagccactagctgcggttgaaagtgagtattctatctggtggcgagaagctgaaaaagaagtattcccggttttagaagaacttggcatcgggcttgtcgcatacagcccactaggtcgtggttatttaactggaaaattagatataaatgctgacttcaatgcaaacgacaaccgtggtggcttaccaagattccaaaaagaagccatggaagccaaccaagtactactagatttcatgaaagaaatcgccgacgagcaaaacgtcacaacagcccaacttgccctcgcttggatacttgaccaaaaaccttggatcgtgccaattcccggaacaacaagaccaagcagaatagaagaaaatatcgcctccactgaaattcattttgatgatggagcacgacaaaaaatagctgatgctttatcgcagattgaaattgttggtgatagatactcagccgccgaaaataaacgtatcggaaaataa

SEQ ID NO: 928 - DNA, 816 bp, Listeria monocytogenes-EGD
ttgttagtagaagagctaaaaacaaagtatcttgtcaaagatatctgtcagatactacaagtacctttatctacctattatcgctggaaaaagaaagatttctcacagagctcattggagaaaaaaatagggcagttatgtaaagcatatcagttcacttatggttatcgaaaaatcgccgcattaatgaaacaagaagaacaagttggcatcaataaagtacagcgtattatgcaaaaatatcagtggcaatgtcaggtaaaagtaaaaaagaaaaatcgaccaggctccgcctactatcagacagaaaaccacttaaatcgaaactttcaagctagtcagccgctggaaaaattaactaccgatatcacctacctttatttcggagactgccgtttatatttatcaagcattatggatttgtataatggagaaatcgttgcctactccattggcgaaaaacaagacacagaattagtgctagatacattaaatcagttgtcccttccagaaggaagtttacttcatagcgatcaaggttcggtgtacacatcttatgaatattatcagtgctgtaaaaagaaaaacgttatccgcagtatgtcccgaaaagggacacccgcagacaacgctcccatagaatgtttccattcctcgctaaagtgcgaaacattctaccataaaacagcgtataaatacgctaaatctattgtaatccaaatcgtaaaagattacattaaatattataacgaaaaacgaattcaacaaaaattaggctaccaatctcctattaatttcaggaaacaagcagcctaa

SEQ ID NO: 929 - DNA, 273 bp, Listeria monocytogenes-EGD
ttggatgcacttttaaaatctagaaaagtaaatggtgatgcattaataaatgcaaaatatgcggtatcaagaagtttatcattacttatagttgcattaggattgtttatattcaagtcagatgctttcttagtcgcattatctttagtaatgattggagcacaactttttgacgggattatcggaataaaaataagtacttttaaaacagttggtccacttttaactgcggtagggaatgtgattatgttaatattattcctaacgatctga

SEQ ID NO: 930 - DNA, 369 bp, Listeria monocytogenes-EGD
atgtccttttctatcggtgaattttccgaactagtaggcatccctagcagcacccttagattctacgaaaaagaaggcttaataacccctgaccgcgacaagaataatttgcgcacatacagtgaagaagacgccaattggttgaaatttttgctacatttaaaaggcgccggattatcaatagaagaattaaaacaatacaccatttggcgcacagcaggcgacagcaccatttccgaacgattgaatatgttgaaagagaagaagattgttttggagcaagagattgaaaacttgcagaaagatttggatacagtggttaggaagattgggatttatgaggagaaggttgcgaagctggatgtttag

SEQ ID NO: 931 - DNA, 327 bp, Listeria monocytogenes-EGD
atgaaaaaactaaaacagctaactaatcaattatttacatcaactatcttcctagtcaccatgttatttatcatacccccaacatttgcgatagctgatggaagtaaagtgagtttttatgaatatatatatggagcacctttaagatggctaactgtaattagtacaactgagaagaaaggtgcatttttggagatgtttttctcggagaacgaaggaataaatatccaatggctcaacctaataataaacttcctcctagttttccttgtaataacaattatcttctcactagcaaaaaagttttacaataaaaagaacgcctaa

SEQ ID NO: 932 - DNA, 891 bp, Listeria monocytogenes-EGD
ttgaaaaaaaataattggttacaaaatgcagtaatagcaatgctagtgttaattgtaggtctgtgcattaatatgggttctggaacaaaagtacaagctgagagtattcaacgaccaacgcctattaaccaagtttttccagatcccggcctagcgaatgcagtgaaacaaaatttagggaagcaaagtgttacagaccttgtatcacaaaaggaactatctggagtacaaaatttcaatggagataatagcaacattcaatctcttgcgggaatgcaatttttcactaatttaaaagaacttcatctatcccataatcaaataagtgaccttagtcctttaaaggatctaactaagttagaagagctatctgtgaatagaaacagactgaaaaatttaaacggaattccaagtgcttgtttatctcgcttgtttttagataacaacgaactcagagatactgactcgcttattcatttgaaaaatctagaaatcttatctattcgtaataataagttaaaaagtattgtgatgcttggttttttatcaaaactagaggtattagatttgcatggtaatgaaataacaaatacaggtggactaactagattgaagaaagttaactggatagatttaactggtcagaaatgtgtgaatgaaccagtaaaataccaaccagaattgtatataacaaatactgtcaaagacccagatggaagatggatatctccatattacatcagtaatggtgggagttatgtagatggttgtgtcctgtgggaattgccagtttatacagatgaagtaagctataagtttagcgaatatataaacgttggggagactgaggctatatttgatggaacagttacacaacctatcaagaattag

SEQ ID NO: 933 - DNA, 603 bp, Listeria monocytogenes-EGD
atgtttaaaacaatagtagatacactaattgctcaaagaagggacagaaaaattaaagaatcagaacggagacaagaaaattaccgagcgaaaagagaaaatttaactgaagtatatagatctttaatcttaatagttaatctatttccaaatgaatcaccaactgatattattaaaaatattaaatacggtccctattatagcttagagaactacaacgggatttttcgcaccctagattataaaattgaagattatgagaagcgaaaaagtttttcgaatcttgattatgaagaaaagaatgatattgatattgaaatatcaaacatagaatatgctaaagataaacttgctaggaatcgtaaatcatatcaaaaggctgtaaaatgttttaatcagtttaaagactcagataaagcgatttttgatctttatgcgggtacacatgttcagaattgtcttgttaattttgaaattaccataaacaatgtttttatttctgggatgagtgtgggtattccagatagtccttatgagaatagtatcaaaatagctagtcgaaaattaattagtgctatgaaaaaagatattggaattacttga

SEQ ID NO: 934 - DNA, 399 bp, Listeria monocytogenes-EGD
atgagtaaaacaactcaaatgaatagcgaaattttccaaataaatttagagaaaactttaaaagagataatggtggcaaaagggcttcaaagtgatgaaatcagatttgtgatagtccccgtagaagaaaaagggaagatgttagatggtagtgatgaaatgatgaagcgattagttttgactaaagaaaatataggtaataaacaattagtactaaaagatgttgtagatgttttaggtggattattccctaaagctcctatttggataaatgtttcttttttagaaatgaacggagaaaaagctatatttaagctggaaacgagtttgcgttttagaaagccgacactattaaggaacgctgaaacagggcacgcaccatttaaagcgataacttaa

SEQ ID NO: 935 - DNA, 1479 bp, Listeria monocytogenes-EGD
gtgagtagaattgacatcggagaaatacaagcttttttataccagctacgtgcaaccaatgaaccaggaaggaaaactatccaatctatcaaagcggccgtgacaaagtatgtgggagataatagtttaaaaggaaaagcagttgatgcatcgaaaaattattatcaaatgacttatttccctctctgtgatgcaataatcgaagctatggacgaaagtgaagaaagattggggcagtacatccaagattttcatgccgaagttgatagctcaccagatgccaaaatcgatgcggacggtttatatgaactgggtaaaatgattgaccgaatagaaagcaaaaaagaagctttagcacagcgaatgaacagtggaacagaaggacaaatgcagaattaccgttcccagttagctattgcgtataaacaggaaaatattctcgaaaaatatttgtcatttgaacaaagccatgctaacttttttgaccatttgattgacttggttcaagcggttcagcagaccatccgcgaacttcagtctaatatccagttcaatagccaaacaggcacttacgatttaagtaaactgaatagtgctacagtgagtcgaatgcaacaagcattgaataaatcacgaggtatcaaagaagacattataaaagaactacgggactacacagtgcttgcagtggtatatttagatagtaatggaaaagaacaagtcatgtggttattagaacgagacggcgtaggggtagagaatgcggaactcaaagcctatttaacagaaaatggaaaatacttaaacccagaagactacacgattattacgaatgaagaattaaacaagaaaatcaaccaatcttggcgagatggtgtttattatctaaatggtaataagtatgatggactaactggcggcgtcttatctacctcggcatatgttgaagctggaaaaggatatatagataaaagcgggtttgcggatgttgtactggggcttgggttgagtacggctgcgattagaggtagcctagtatataagaaagttaatgggccatataagcaaaacataaaaaacagatatcctaatgaggttcaacaagggaaaattttcgattatactttagaaaatggacaagtgaaaattcgtgatggcattaaagaagttgattttataatagatctacaaggtaatttaaaagttggtagaggacatgctcacttgtctaatggaggggatgtgcaagcagcaggtaaattaaaagtggactcgaatggtaatgttagaagaataactaatgaatccggacactatactcctacacttggacaggcgaagaactatcaacaaatttttgagaataccggaataaacactaaaaatgcttggttggaaacatatcaactagatgtaactaaatctggttatgtagacttagcaaaattgaagagaatagattccgtaaaattaaagtaa

SEQ ID NO: 936 - DNA, 1077 bp, Listeria monocytogenes-EGD
atggcaaataatttaaaacaaacactaagaagtggtgagatgtatatggtaaggaaattttttggatatataggaaccagaagatttaatatatacgaagcattagtttatagaaataggtatagtttaaagaataaagagaagttaattttttatgatggaacaagtaaaataaagcaaaagattgcaccgaaaagtggaagcaaaaatggaagaagtcctcattttgcatattatccaaattcgtctcatgatggagtaggaaaggaaatgactgttacacataaggcataccaagaggctatatctactttgaaaattttttgtatagaaacattagatggtgaagtaattatacttgaagtagaagaggctaaactggaatattatattaatgatgaaggtcagtattatttagttgatattcttatagtattgaaaagtacatatccattctattatttttataagtgggagggaatattagctatagaaatctgggtaagccataaaacagagcaaaagaagattgaagcgctaaacaggaagggtattccaactatagaatgtaagatatctaaaaagttgttattaaatgaggatatccaaagcgataaggaatacttaacgaatgttcaaaaggtaattaatcgttactcagatataaaatttcatttatacggaagatttatttctgatgcaaaaatcgatgaaacttcagtgtggggagagaagtacttggaatttaaaaactatcataatgaaaaaaaaagaatggaactgcacttcagaaaactagaaaaacaaaaattagaactggagaagaaaaataaggagctaataagtgaaaattataatctggatttagaaataaaaaataaacatactgtaatagagaaattgagtaagaataagatggaagttgaagctaataaggaattattgaaaatatgtaaaattgaaaatggaaacctgataaaaaaagtgtcagcattgaattttgaattagtaaaaatgaaagagtataaagatcatccaataaaaactttctggaaagataagatccgattcaaataa

SEQ ID NO: 937 - DNA, 408 bp, Listeria monocytogenes-EGD
agtaatgatgcctactatattttggtttgtagctaccacgtcatttactgccaattaaaacaaccgcacagcacgaagcatcagatcgttaggaataatattaacataatcacattccctaccgcagttaaaagtggaccaactgttttaaaagtacttatttttattccgataatcccgtcaaaaagttgtgctccaatcattactaaagataatgcgactaagaaagcatctgacttgaatataaacaatcctaatgcaactataagtaatgataaacttcttgataccgcatattttgcatttattaatgcatcaccatttacttttctagattttaaaagtgcatccaaagaaaagccaaaactgactaacgcactaatgaatgtatataatgcacaaatataa

SEQ ID NO: 938 - DNA, 945 bp, Listeria monocytogenes-EGD
atgaagacgatatacttacatcatccgattacaacggacgagtggactgacataaacaaagtaatggcacttggtttttttgatggcgtccatttgggacatcaagcagttattaaacaagcgaaacagattgccggacaaaaaggacttcaaactgcagtgttaacctttgatccgcatccatctgtggttttaagcaatatacgaaaacaagtaaaatatctcacaccacttgaagataaagcagaaaaaatggctaaacttggcgtagatattatgtatgtagttcgctttacaacacagttttccgagctatctccgcaagcctttgtggataactatttagtcgctttacatgtagaacatgtggtagctggtttcgactattcttacggtaaaaaaggtgaaggtaaaatgaccgatttggctaaatatgctgatggtcgctttgaggttacgattgtcgataaacaaactgccgcaagcgacaaaataagttcaacaaacattagacgtgccatcacagaaggcgaactagaagaagcaaatcaattactgggctatccttatacaacgaaaggaaccgtgattcatggggacaaacgcggcagaacaattgggtttccaacagcgaacatccgcgtaaatgaagattatttgattccgaagcttggtgtttatgcagtgaaattccgtgtgaatggggaaactcacttgggtatggcgagtattggctataacatcacgtttaaagatgaccaagcactctctattgaggtgtatattctagattttcaccgcgaaatttacggagaagaagcagaaattaaatggtatcaatttttccgcccagaacttaaatttaatggtgtagaaggtttgattgctcagttagaaaaagacgaacaagatacaagagctttttttgctaaattagaagattaa

SEQ ID NO: 939 - DNA, 267 bp, Listeria monocytogenes-EGD
atggctcgaatcgaatatggagaagaaattcaaaaaagcctactggttttatactctagggggtctaccatagactctatctgcaaggagtatggtatccctcgttacgaatttcacaaatggatgaagttacatgatgccgataaacttgaaacaaaagaggtgaagactttgctacagataagagaattaaaacagcaaaaaaacaaattagaagaagagattttatttttaaatgaagcaatcaatctgttggaaagtccttga

SEQ ID NO: 940 - DNA, 450 bp, Listeria monocytogenes-EGD
atgtttcaattgatgatatttatgataataagggtattttattttgctatattttaccttcttgaaaatgaaatcttagtaactgctcaatttattaccaatgcttatattacattatgcattatatgggtaatttcgtttgctattttttcttttcgttttaagaaaaaattagataaaggcggttatagaaaagattcgaaattgcaacagaaacggagtaatttaggtttaaatttaagtaaaggaacctattttctaattttaggatcttttggtttgtttattctaataagaatgttaattggtggagaacttgaagaaattataataagtctatttcttattgtatgtattcttattggtatagctggagtatccttattcccagaacaccttttcactgcatactgcaagtttaattttaaggaatttcatatcgaagaatag

SEQ ID NO: 941 - DNA, 285 bp, Listeria monocytogenes-EGD
atgaaaatagatttagaacaaatatacatattagatttcacaatgggcttaagatttcatccactaattatcagaaaaaatttaccgcttctttatgtagcgtttatttttctgatttggatacaaggagtcgttatggctggattgcctggagattttgacacaacggaattagatgttttattagcagcaattccagccctgcctttacttatattatatcctaaaaaaatggcaatgaaattccaaaatgttcaatatttattgtatgtatgtttcaattga

SEQ ID NO: 942 - DNA, 222 bp, Listeria monocytogenes-EGD
atgactaaacctggtaaatacgaagctctcttttttccaacgaaagatggcttgctaaaaatacatgcttatggctttaatccctgtggttcatggggcgaagtatttgcaacaattggtgatcaaacaatatgcgttaaaggcttcaatcgccataaaacaatcgtgcgggctacaaaaatgattataagcgctactgctaatcgaaaaaacgaattttaa

SEQ ID NO: 943 - DNA, 258 bp, Listeria monocytogenes-EGD
ttggcagaagtagataaatcgactattggcgaggtagaaggagtcacgtttcaatcatactttttaatcaaaaatatgttgcatactagagttgttggtgatttggagaagcggctgccggttactcttgagaaaatggtagaatatgtggaaagtaataggaaagaaattattacgcctattttcatagtattgaattatgtgggaaatgtgccttatgtggatgtgtatgttggaattgatccttatgatgagtga

SEQ ID NO: 944 - DNA, 234 bp, Listeria monocytogenes-EGD
atgagtacagttttaacggtcttactcatcatcgtatcagtactgttaattacagttatcatacttcaaccaggtaaaagtgctggcttatccggcgccatctctggtggagctgagcaattattcggtaagcaaaaagcaagaggactagaacttattctacatcgtacaaccatcgttctatccgttgttttcttcgcaatactaattgcactggcatactttgtacagtaa

SEQ ID NO: 945 - DNA, 723 bp, Listeria monocytogenes-EGD
gtgaaaaagaatttagaacagatatatgctatagaatttacaatgggtttaagatataggccaatgcaaattaggcataatataaagttgattttcttattgcttttatttgtgacttggctacaaggtgactttatgaataggcttccgggaaatctagatataactaaagtagatatgcctttagtcctactggctttgctttgttatattattttgtatccccaaaaaatgactataagatttcaaaaccttcaatacctattatatatttgttgttttcagtttttagtatttatggttataagatacttttattctaacttgatttatggtattcaaaacatggttagtttaacagcccagactctggttgcctcatatgtatttttattagtattatggatcttagctttaatttttttctattttcattttagaaaaaaattaagaaatggagactatagaaaagattctgaacttcaaaaaaaacgtagtaacttaggattgaagttaagtaaaggatcttacatattaataggagcattttttgtttttatattgtcctcacaaattgttggaggaataatggtagatataatgattatttctatagaaattgtaggtatcgcattgtgttctatgggaattgtcatatttccagaacaactttttactgcatattgtaaatttaaatttaaggagtttcatatagaagaatag

SEQ ID NO: 946 - DNA, 1731 bp, Listeria monocytogenes-EGD
atggtgaagtatactaatccaaaaattgagaaattaggggtaaatgcagtaagcaactacatagtggaatcagattatttatcagattttcttgcacaacagagcaccgagcctgcaacagatggaactataaggatttataatggtcctggagagcgtaaacgtgatttaattggaattgtgcctgtccaagtcaaaggaactaccactaaaaatattataaagtacaatagacatgaaatcgatatagtagacctaacctattattataaagtaggaggagttgtctattttgtggtatacgtcacaaataaagttcctaaaatctattatcgtgatttacttcgaatagatattaaggaaatcctaaaaaaaaatgaaaaacttcgtggtaagaaagaaaaaggaacaataaccatcgattttcgagaagtaccagttaatgtagaggactttcgaacggtgttattgaacttccataaggatcaggattatcaaacaaaagattatgtggaattaggttccataaatgagataagtagagacttgacttttacaattattgcaccaaatagtaatattgttgaagcgctaaaatatgtttcaccagtactatataaaaatgaaggtgatttaaaaattcccgtaagaagatttaaaattggagaactaagcgtttttacaaaaagtgagttttctataggcattaagggagcaaatagttatattgctactgtgatggaaggtgaagaagaaacagaaatacaaattggtagtttgcagcaattaatagttaaatttaaagaaggcagatttaaagtagattttgaagcaaaaggaaaaatccaagagactatcgaattactagaaatattactaggtatagtcactggagtaaatttatatattgacaataaaccagtcactgaattttttattgaagaggtaaacgaagattttattagtcgtgttaatcacgctttagaatcttttaagaagacacaagaagctttaaaccattgcaaagttccgtcgaattttcattatgaagaattaacagagaatgatatagatgtaatcaatagcataatggagctataccaaacatcaattgataatacttgggggaaatttgaattcaataatcggttagtgtatttgttgaagcataaaggtactatatacaatttattggattcaaatgttgcccttgaaataaatttttggtcgaaacgtgaagacggaattcaatatacaacgacgcccctaatattgatagatgatttttctaaaatgaatgatactgaaatttgcaatattaaaggacctattgaaaaattgattccaattcatgaaaaagcatgttctgatattaatttaatatgtgtaagactaattgatgcatatgatcaaacgaataataatcaatttctgctagtagcttttgaacttctagaattaataataccatttactactaacaatgaaatacatcttatttatttaaataaataccagataaaaaaacgttgggacaatttagtaatggaagacataaatcatttagtatccatccaaaaagagtttgaagaagataagagaatacacttagcaacgttaattttgttgagtgctaaaaatgatgcagctcaacttttaagtgaactaaagaacaatgagggttttagtttagaagatatgcctattctaaatttgttggaaaagaactag

SEQ ID NO: 947 - DNA, 294 bp, Listeria monocytogenes-EGD
atgacagttacatctaatataaatagtgaattagcagatggttttcaaggatatacagatgtaaggaagattacagtgaattcaacagttgatgtgggtgtttcaggaagtttaacagcagtacttggacaagtaggtagttcttttgggcttccaggtgcaataggtggactaggagttggactagtgttggatacgattctgagcttaaacggtacaaaagatacttggaaaaatagtattaacgaaaaaatgcaagatttggaagattggtttagggtggaagcgaaatag

SEQ ID NO: 948 - DNA, 462 bp, Listeria monocytogenes-EGD
atgaaaaaatatcgctttttaaaattcaatatcaatgcaggtagtgttacacttttggttatgtttagttctttttttattttgtcagtaatcctatctactctactttctatgacatgggaattttatgctattctttcagcattagtcattgtttgtttttttaatttcaagaaatttttccctggagaagtggctgttagtgaggaagctttctactacaaatcaaaagcatatccttacagcaaatacattatcgaatgtgatgcaaaattaattcgttttaagagtcctagtgcgagagcaataccttattaccgaattgttattatcaataaagatacacgcgcggagaaactaattaaagtacacaatgcagctcgtagatacaaaggcgcaaatacacagatgcaagtggaaatggaagaattacgtgatcaactcaagcaatatcaatcttaa

SEQ ID NO: 949 - DNA, 306 bp, Listeria monocytogenes-EGD; identical to SEQ ID NO: 723

SEQ ID NO: 950 - DNA, 990 bp, Listeria monocytogenes-EGD
atgcgaggacaagaagaaatagataaagaacaataccaagttctctttattaaagaaagactaattccttgtgttttaggcgcagtaattggagattgcttaggtgtcccagtggaatttaaagacagagaatacttaaaacaaaatccgattgttgaaatgataggatatggaacatacaatcaacctaagggaacgtggtcagatgatagttccttaacgtttgcattaatggaaagtctaatttctgggtatgatattaaccgcattgtaaataacatggttagttttatggatgatggtttttggacgccgtatggagaagtttttgatattggaagtgtaacgcgagaatctttaaatagatataaaaatggtgtatctgtgtttgagtgcgggggaaaagacaattttgataatggaaatggcgctattatgcgtattatgccattggttttttatctgggtaaagatttttcgttcggtaaaaaaaataaaattactgaggaagtaactagaattacccatgcacacccaagatctatactgggcagttatgtatatattgaattgcttcaaaatttgtttgctaacatggataagaagttggcatatgaagaaatgcaaaattatatcaggaaaaattatagtgattatccttttaaagacgaattacaatactataacaatattttagaagggaatttatatgaattgaaagaatccaatattaaatctagtggatatgtagtggatactttagaagcatctatttgggcatttttaaccacgaattcatataaggaagctgttttaaaagcagtgaacctaggcggagatacagatacaatagcttttattacagggagcctagcaggtatctactataaaatggaacaaattcctgttaattggattgaccaaatcgctaaaaaagaagatatcttaaacttatgcaatcgttttattgaatccttgataaagcaatga

SEQ ID NO: 951 - DNA, 780 bp, Listeria monocytogenes-EGD
gtgattgatgtacctgtaacagtgtctgccggtggtggtgagttgaatcttactaaaaaagaaataaaggaagagttagcatatcagaaacagctagttgagaaactgagaaatgcggatgataatgaggaaaagattgttaaggagtatttagccgataatgataatgctattgctaataagataggtaattctgaggattcaacagaatttattgatacatatattatcaatgatgaaacacaattgatttttactgatacagaagttatgctagacacaactgaaatgtcaaatgagaacgaagcgacttcagaagaggaaaagttattaagagaagaagattcaaatgaatctattatttcaagtattaaagagtttggtgaaacagttttgtttggtcagaaagtatatgctgctgcgtcaaaaacagtatctgctcgacatacacgtactgtgtatgctaaggtttcaggtaataaactgttcactgctggtattggcgccaagttcacttataatggtgctaaggtgactgcacaaactacagagaactatgttaaagtgaatggtatttctggtgttgtttggtcggtgcataataaaaaaaatggtgtacaaaaaccgagtatcaagaaaagggtagtatatcaacaagctaccgctaaatcgggcttaacatataaaggaaatggacttgtagtggaggagaaatatattcgagtaaatctggaatgtaatcatttgggcaaggtgagtaagtcatctgtagttcgataa

SEQ ID NO: 952 - DNA, 237 bp, Listeria monocytogenes-EGD
atgagtcttaaaaagatattggaatcagacgaatccatagaaaagaaagaacaacaaatagattcttactaccaatcggaactcattactagagtcgaagcttgcgaattattagatgtttctacaaagtctttagacagatacataaagcagaataaattatcgttccagctaaactcattactcatccctcatttctgtttaatcgttcttttaatgcctcttgcaatactttag

SEQ ID NO: 953 - DNA, 324 bp, Listeria monocytogenes-EGD
atgtatcaaaaagcttcagagaagatgaaagaaacgatgaaagcgaatattgcacttgttgagagtataaggatttctagtatttctaacaagaaattgcaatcagataataaaagtggacacacggtggttacctttaaagacaataaatgggtggctagaatatgtgtatctggagtagaacatcaactaggatcttttgttactaaagaagaggccattgatgctaggatagaaggggaaaaatattttcaacctttgataaataaatataataatagactggatgtgttttatagtgaacgtagacccttttggacgtaa

SEQ ID NO: 954 - DNA, 336 bp, Listeria monocytogenes-EGD
gcaataactctaggtttcttcttagacataaatacaaacatagaggagttgaatgaaatgaaaaaagaacaaatcagtactcagttttatgaagtaaacccgcacacaatgattatttttccaaaaaaatctggaagtatagtctattcagaaatttatgaagttgattctcattatacttctaaatttaccccgtttgagctaattaaaaccagctgtaactttttcggatcaagctatgagggaagaagaataaacgagataccaaaaaagaacatcctctcaaaaggatgtctttatttttactattatatagaagaaacattatttatgtga

SEQ ID NO: 955 - DNA, 501 bp, Listeria monocytogenes-EGD
atgaaaaataagacaattatatcaaagcaaaatttagttctaatagttataatggtaggtgctacccttacagaccagttatcaaaaatttggataacttcaaatttgcaattaggagaatcaattgaaattatcccttcttttttcaagataacatacgctcaaaatacaggtgcagcatggagcattttagaagggcagatgactttcttttatgtgataacattagttgcattgatactattaggatggtatttttatcgtcttaaagactatcaaattattcaaaaaattggagtagcgttaatggtttctggaacattaggtaattttatagatcgactactttttcaatatgtccgtgactctttagactttcatattttaggttacaattttcctatctttaatgttgctgatgttttacttatttgtggggttttattcatcattatcgatgaagttttaaaatcttttggtgttagttacaaaaaaatgtag

SEQ ID NO: 956 - DNA, 387 bp, Listeria monocytogenes-EGD
atggcaattaaatctatatcaaaatctgaattagaagtaatgaagattatatgggattttggaagagcggttcagtatgctgatgttgctggaaagctagaagagaaaaattactcgtggaagaaaaatacagtactaacttttttaacgcgcttggttgagaaaaatttacttagtgtgaagaaagttggacgcaaaaatgaatattatgcgcttgtaagtgaaaacgagtatttagaacgacaaacggaaacctttgtggaagagatttatgaaggcgatgtaaaaggattaattacgaatttagtacaaaatgatttaatttcaccagacgaactagaagatttacaacaattttggaaaaggatgaaatcacctaatgaatga

SEQ ID NO: 957 - DNA, 243 bp, Listeria monocytogenes-EGD
atgtatgaaaaagtagaaaaaataataaatgattgggatccaatagagctgtttcccttagctccaaaagatgaatatagtcaagaaatcaacaaaataattagtattgttcaagaaaatcctaacattgatatgaatgtattaggtaaaggtataagaaaaattttcatagattcgtttggagaaaatttaatatttaaaaataacgaagatgaaatagctgaaaaaattttagcgctataa

SEQ ID NO: 958 - DNA, 417 bp, Listeria monocytogenes-EGD
atggaaacatacttagaaattgaaacattgattaagcgaatttttaatagttttcgtcatgaagtagaggcagtactcgacaaaaggttaagtggtagcgagtatcgggtcttgagcttgatttcaagtggacttacgaaaacatcggaattagctaaaacgcttgatgtttcagccagtcacatcacagccattacggatactttagtcgaagaagagcttattacacgacatcgttcggaagtagaccgccgaattattgaactgaaattaaccccaaacgccgaggaatttgtcaaagaaattgataaaaagaaaaaagaaatgattgtaaaacgttttgccgttttttctgagtatgaacaagcagagttccgcaaactgctcaaaaaattagcagacggatcaattaaataa

SEQ ID NO: 959 - DNA, 363 bp, Listeria monocytogenes-EGD
ttgtatgaaacgatgattgcaaaagcaggtgtccgtgagcttctcgggatggatactagtctgatttatggttcatttgcttatgaaatggaagacgaatggatggatttaacagggctttggatttcgaatgagaatgcactgattttttacttagaaaatgaagatgtctatttactgaagaaattcgcttatgaaatgatagacagtttagaacaaaaagtgagtatcatttccatgacgaaaaaattgattttacatcttaataataaagaaagctatacattactagtagcaaacggtgaagctaaactatttgctgctagggtaaatgagcgcatagaaaaagtgagtctaggatga

SEQ ID NO: 960 - DNA, 306 bp, Listeria monocytogenes-EGD
gtgaacgtagacccttttggacgtaaagtagaactgatgattattggaaatggactggatgttaaagcaaatctggcatcaactttcgtagattattataaacatcgatgcaaactaatgaggctagaatataatgaagatgatttctatagactaaaaagtaaaaattactttcctatgaaggtgaaaatgcaacaatttccttcaataagacgttgcaatattgaaattctttcgatagatgctgaaactgccataaacgaaaatattactttttgggatttagttctttttttttgcctttaa

SEQ ID NO: 961 - DNA, 282 bp, Listeria monocytogenes-EGD
gtggaaattttaacggtttgcggaatgggatttggaactagcttgatgttactcatggaaattcaagatatggcaaaaaaacatggctttacagttggaggggaggcaacggatttaagtagtgcgaaggggagaaagtgcgacatgattgttgcttccagtgaaatagccaaagaattagcagaggaagaagtcaaagttgtcccaatcattaatattctcgataaaaaagaaatagaagaaaaagttttgccagctatcaaacaatactttgcttcataa

SEQ ID NO: 962 - DNA, 285 bp, Listeria monocytogenes-EGD
atgagagaaataaaagtcgatgaaaggaccttccaacaacacgcaaccaaattggcaagtgaaagtactggaagttatttgccgctgaaaaacgggaatatggcatattccaaagccaattcgattgatcaattgcgctcggctttgattgagttggtggatgtcgtggaagatttccaacatgtgaccaaaaaagatgcgagccggcttaagaaaatgggtattgcttatgctaaacaagaccagttgatgggacaaaaaatcaatcagttggaggtgcgttaa

SEQ ID NO: 963 - DNA, 219 bp, Listeria monocytogenes-EGD
atgcaaccaccgaaaaaggaggcggaaaaaatggatgaaagatttgaaaaaatttatacacaagggaaactcaacattatggaaatttgggttgataaagaaaccggtgtgcaatatgtttaccattttgctggttatgcgggtgggatgtcgccgcttttggacgtagatgggaaaccgttacttgcagatttatctaaacttaatggcgctgagtaa

SEQ ID NO: 964 - DNA, 204 bp, Listeria monocytogenes-EGD
ttgaaagtccgtaataaagtgaaacagttgcgtgaagaaagaggaatcgggcaaaatgaattagctttagcattagaagtttcaagacaaacaatccatgctatcgaaaaaggtaaatataatcctagtttagagctaagtttgaagatggcacgctattttcgtttaacaatagaagagatttttcaactggaggagaattag

SEQ ID NO: 965 - DNA, 276 bp, Listeria monocytogenes-EGD
atgaaggaagagctactgcaagcaatcgaagtcggcaagccagttttacttgtaacagcaatcgggtatattgtaggaattgtggaagcaaaaggagagcttattcgcttaaacgatgtgtatatcaattgtgtttcagctagcagagtaaatcgtttcagccgaggcttagctgtgaatatcaatcaagtcatcgggatgcaactattaagtaagtcggagaaagacgaaatgattggcggctggaaggcatacgttgcacctacagctggatga

SEQ ID NO: 966 - DNA, 210 bp, Listeria monocytogenes-EGD
atggcccatgagaatttaagagaactagaagatcaattgattgagttgcgacaaacatatcaagaggtaatcagcgaaacaagagagtttgaagacccacaactccaaaatggaccaattaatgcagcggaagttagattaagtgcattacgtcacgaaattgccgaagtagagaagaaaatcaaaaaagcagaaagcaaaaccgaataa

SEQ ID NO: 967 - DNA, 210 bp, Listeria monocytogenes-EGD
atgtatatcgaaatttataccgtaaatggtgaatctattcgccttgacgacgacgcaaaaatcaacaacatcagcatccacgaattatcaaaagcagacttgaaaaatctttttaacgaaaaatgtatcgagttaacaaaatatgacttaacgtattttattaataccaaccaagtgaattggttccttgtaagcgaaggaatccattaa

SEQ ID NO: 968 - DNA, 228 bp, Listeria monocytogenes-EGD
atgaaaaaagcaattttagatcggatagaagatggcaaagcagtttttctattagaaccagaccaaacagaatggcaaattgacaaagaaaagctcgattcatccataaaagaaggggatatcgtcactatttcagaaactaatgaaataatgaaacatccccaagaaacggaagaaatgaaaaataggattgcagaaaagctagaaagattaagagggagaaactga

SEQ ID NO: 969 - DNA, 231 bp, Listeria monocytogenes-EGD
atgaaatcaactaaagaggtattaccatttgtagtaattcttcaagctgtaaatggtgatgtaaatgcaatcaatcaaatattgaaacacttcgagcattatatcattcgtctttctcaaaaaacactatttgatgaatatggcaatgcctatattcatgtagaggaagaaataaagcgaatgttagaaacaaagttaatcactgctgttttgaagtttgaattatcttag

SEQ ID NO: 970 - DNA, 222 bp, Listeria monocytogenes-EGD
atgaattttggacaaaacttatacaactggtttttgagtaacgcacaatcccttgtcttactggcaatcgtagtcattggactatatttggggttcaaacgagagttttcaaaactaatcggattcttgattatcgcactgattgccgtaggactggtattcaatgcagggggcgtgaaagacgtactgctgaacctattcaatcgaatcattggagcttag

SEQ ID NO: 971 - DNA, 1518 bp, Listeria monocytogenes-EGD
atgggtgtaaaatatgtagaaatcgaaaaaattgataactatattgaaaatcctaggcatgaagtaggtctgaatgaattagatactttaaaaaagttatttgatgtttctggatatcaaaatatgattaatttggcacaagatatctatactaatggtttggtaaatgcaagtctagttacaattgtaaaactcaataatgccgatagatatactgtatatgaaggtaatagacgagttgcatgtataaaactaattttacatccagaaaaatttagttttttaccaaagaaccaaattgatcgaatcaaaaaaatgaaaagtgacactccttcaaaaataaatctctctcaaattgaatgcttaataacagatgaagaggatgcttttttcattatgaggcgtatacactcaggagaagataaaggtaggggtcttaaatcctggaatactaaggaacaagaaatctttaaacttcgaactaatccaaaaaacagtacatctattgcaaagattattagtgacaaatatgaagaattttttaaagaagatattcaagaagaaatggcatatactaatatccaaagattatttaataatttggaagtgagagagtcactaggcattgaaaaagacaatatagattctttttcatgtgaaagattatatttaattaaaggtgttattgaaaaagtaaaccagattgctaaaattgaaaatttatctatttctcgtaaatttaataaaaggaaaataattgaacaaatagtaatacccattatagaagaattaaaatctaaacagttggaaagtaaagcaataaattctatacatattgaacaaaaaaataaaagtaataaattatcaaattctaaagaacaacaaacacaaaataaagaagcaacttcaaacaatggaattagtgtacgagaagatactggtttgaaaactgaatataaaagcatagaatctatatcatccactctaaaaccaaaattacccccaaaaatagggagcggaaaacttctaagtagtactatgccctttacaaatttatatcattctaatgtgcgtataaatactctagtaattgagattaatcagattagatataaggattttcgtttagctacacaattcttattaaggtctcttatggaagtatatggacatgaatatattgattactttgcaaatttagactatcaagatgtccagaaaatgaaggctatagcaaaagaccgtataaaacgaaatcaaacagtaaatgaaatttattcagagtttattagtaaccacataactaaacattttcctaagtatgccgaacaagccgaattaattaatatatcattatcaaaaaacaacaatagttctctaatgaaaattttgaattttatggttcattctcaaaatcatattcctgatagtatcgaattaatagaagcttggtacaaagttaaatctatcgttgaagcaattgataatatattgcatgaggttaagcataactactaa

SEQ ID NO: 972 - DNA, 216 bp, Listeria monocytogenes-EGD
atgaaaacagtagacaccagaagaattaatacaacaaaaattcgagaattacgattgcagcgaggaatcacccaagctttcattgcgcgacggatgggctataggtacacatcaggttacagtaacattgaaaaaggaactgttagactatcacacaaaaatgctgttattctaagtgaaattttaatgtgcgatttgaaattcttttatgaataa

SEQ ID NO: 973 - DNA, 171 bp, Listeria monocytogenes-EGD
ttggtagcgagcttagtgttcttgttaggatacgctacaagcatgccgtattttcgtgattcggagattggttggatatggactactttgattgcggggattattacgctatttttcacctttttcaatgattttttagaaaagaaaaaagcgcgctcgaaagttcggtaa

SEQ ID NO: 974 - DNA, 489 bp, Listeria monocytogenes-EGD
atgcctgctgtaattggtgtcattatggggagtacctcagattgggatacaatgaaaaaagcatgtgatgtattagatgaattagaaatagcttatgagaaaaaagtggtttctgctcatcgtacaccagatttaatgtttcaatatgcagaacaagcgcgggaacgtggtttgaaaattattattgctggtgctgggggcgcggcgcatttgccaggtatggttgcggcaaagacgactttgcctgttattggtgtgccaattaaatcaaaagcgttgaatggaatggattcattactttctattgtgcagatgcctggaggtgttccggtagcgacagttgctattggagaaagtggtgctgtaaatgctggacttctagccgcacaaattttatccataacagacgatgcaattactaacagattacaaaaaagacgtgctacactagaagaaacagttctagaaagtagtgattatcttggataa

SEQ ID NO: 975 - DNA, 207 bp, Listeria monocytogenes-EGD
ttgaaacttattggaaaacatccttctggtcgtgccattattattcgcttgaacaatcaagagtaccactatgaaactgcaaatagttttggaagcgcgacttcattaacacgagcaaaaacagaagcaagagctgatagttttacatctagtgaaatggatcaaggtttacatattggtaattggcactggaaagaacttggatga

SEQ ID NO: 976 - DNA, 222 bp, Listeria monocytogenes-EGD
atgaatcttgaaaccccttcgcaggaaaacttgaattttatgttaactgaaattactactaaactaaaaatggtgaatgttggtgtttttgaaaatctcgagcttgactctgttgattataacgcacttgtcgatatttatcagctaattaaacgcaaatccacttttagcccgcgtgaaatgcaattatttgcagaagaattacgccgggttcgaaaataa

SEQ ID NO: 977 - DNA, 276 bp, Listeria monocytogenes-EGD
atttctgttggtaattggcataatgcagctaattcttctccagataattcacctgatgcaagttttcctgatgctgttttcttacttgcaatcgtaccgcctgttgtaattagtgctacttttgccatgattatttccccctacattttccatttaaacaaacaaatgagtctcggaagcgtttcccagacccattcagtgttgtttattactgtggaattgttagaactgtaccaactggaacattgtcacttcctagtccattggcttgtttaa

SEQ ID NO: 978 - DNA, 192 bp, Listeria monocytogenes-EGD
atgcttcgttatatcgaattgtttttcatgtttgcctttgttacgctcatcacgatgtggattcaagcactcttggcaaaatggcaacctactattcttcgttctttctggcttcgaacactcacatttattattattggctacgcattaatggcgccaacgctatacataggcagtttattgctaaaataa

SEQ ID NO: 979 - DNA, 204 bp, Listeria monocytogenes-EGD
atgaaaaattcattaatgaagcaaagttttttatattttgcgctgggtcttgtatttgtatattttgttgttgttcgtgtggctgattatggttatgatgtgcttgcatatatactaattatcatgacattaatggattttggcattggcatcggtctgattatcactggatttaaaaggcgtaaaaaaacctgtagaaagtaa

SEQ ID NO: 980 - DNA, 228 bp, Listeria monocytogenes-EGD
atgcaattaaatgaaactgctgtcggtgaaaaagttcgcatctcagaattaaaaattgagaacgccatgcttaaacgtcgcttacttgcacttggttgcgacgaaggttgtgatatttgtatcaaacaaaaaggactatttggtggtccctgtacttttgaaacaaaagggcaatatatcagcattagacaatgtgatgcttgcgccattatggtggaacgcagatga

SEQ ID NO: 981 - DNA, 231 bp, Listeria monocytogenes-EGD
gtgcgccaacaacaaatagattttaaatggcttgaagaaaacttcctgactgcgaatgaagccgcgacttacttaggcatatctaagcaagcactcctttccttagcgaaacgcgatgtacttccctttacgaaaaaaggaaatatggttcttttccaccgaatggacattgaacttcggcttgaaaaacaacaaagcttgcgcgaaaaataccgtccatttgaaacatga

SEQ ID NO: 982 - DNA, 177 bp, Listeria monocytogenes-EGD
atgaaactagctggcttagtgttacttctgattggtttgattggttttggcttttcatttagcattaccggacttatcggttttggtgtatgtatcatttctattattttagttatagcaggaatttttacaatgattcgttcaaaaaaacgccgtaaacgttcttattcttattaa

SEQ ID NO: 983 - DNA, 189 bp, Listeria monocytogenes-EGD
atgcgttacgtggtgactgtattttgggtattcttactttctttaatggcagaattcgttctttcttccatgttatatgtatcatttgatatgacgcgggctattattttaacagtagggttatccttcttcattattttaatcactttcttgatgcctaaagatagcgaagtttatgactttaagtaa

SEQ ID NO: 984 - DNA, 210 bp, Listeria monocytogenes-EGD
atgacgaaaaaaacgacctctgacgcgcagttgaaagcaaataaggcatggcaagataaaaacaaagaacatgcaaattatttaaaaagtcgttcagctgcgcgatcttttattaagaaaaaagccactttagaagacttggaagaactagaaattgcaataaagcaaagaaaaactgaaataatttcattagacaatagccctgaatga

SEQ ID NO: 985 - DNA, 165 bp, Listeria monocytogenes-EGD
atgcaaattgaaaagttaaatgtatttacaagagaaacaatttgtgacggaaaggacgtagaaatcgctaattataatattgaatttgaagcaattagtgaagaatcttttattgatacagctgaaaaggttgagaaaataagggagtttatcgaaaatttataa

SEQ ID NO: 986 - DNA, 180 bp, Listeria monocytogenes-EGD
atgaagtataaaatcacatatttatctcaagaagtgtacgaagttgaagctgagaacgaggaagaggcgatacgaatagcagagttcaatcccatgtatcgaccagatgcacatataaaattaattgaagatgaaaatttgcttgattgcgaattgatgaaagagagggaagacgaatga

SEQ ID NO: 987 - DNA, 198 bp, Listeria monocytogenes-EGD
atggaattatatgcaatagttgacgaggatttacaggttgctaaacatcgtagtaaaggaactctagcagtgtttaaagacttagaaatgttaaaaaaacatgcttggagatataaagagagtggaaaattgtacaaaattgcggagttagaacctattaacttcttttcttttgaggaagcggagggtgaagcatga

SEQ ID NO: 988 - DNA, 195 bp, Listeria monocytogenes-EGD
atggataattttaaaacgattcattatggctttaaagtcgtgatacatgattatgacgatgaattaacaccgctttataacttactaaagaagcaatcaactaacttagaaggatctaaactatttgatgaattaattgatatacatgaaaaactagctaaaaaaattgagcagagagaaggcgtgcaagcatga

SEQ ID NO: 989 - DNA, 216 bp, Listeria monocytogenes-EGD
atgagcgaagttttagtatcggctagttacgaaggttacgagtcgaagagtattaatttcacagaaataaacaacattgtaaaagagcgatttaaaaagattgatgaagttgagcgcaaaaaaagagctgaaacatttaataaaaagtatgaagtcacaaaagagcttgtagatggacatctacgcgaaattattataccgaggcgcacactatga

SEQ ID NO: 990 - DNA, 243 bp, Listeria monocytogenes-EGD
atgaggatttggttgaaaaaaataagagaagaaaatggcctaactcaacaagatgtagcagaattagcggatgtggaaagaacaacttacgcatcaatcgaacaagggagaagaaatccttctgttgtaaatgctatgcgtattgcatcagttttagatttcgaatggactattttttttgatgataaagtacgcgaaaagagtcatttttatttaaatgaaaaacaggaggctagaaaatga

SEQ ID NO: 991 - DNA, 162 bp, Listeria monocytogenes-EGD
ttgatggagaatgatagtttgtgtggtgggcacattttacaggaaggattacatgttcgctttgctcgcatgcatatttgggccgtaactcgttacacttcgaacgggcgaatgggaatgcggattttcgatagatggtggatggattttggtggaggatga

SEQ ID NO: 992 - DNA, 204 bp, Listeria monocytogenes-EGD
gtggttgttacaaatatagttaaaattataagagaaaagaaaggtattactcaaaatgaattagctcattcattagatgtttcacgccaaacaattcatgccattgaaaagggtaaatacaatcctagcttagaacttagtttaaaaatagctaaatttttcgatttacctgttgaagaaatttttaacttggaaggagaataa

SEQ ID NO: 993 - DNA, 201 bp, Listeria monocytogenes-EGD
atgaatagtttttggaaaatattttttacagttattttaggatttatcgcacttaatatcgtacttgatatcgttggaatcactcttcacttcttatttccagtccttatactaggtggtattggatatctactttatcgtatgtggggtaattctccaaaacgcccaagtcgcgataatgaagaccgttacaactggtaa

SEQ ID NO: 994 - DNA, 207 bp, Listeria monocytogenes-EGD
gtgaaatttgatttagagaatggatatgtagtgaaagcagatggagaaatgttagttggaggtaaatttgttgtatttaaagattctatgaagaattgggaacctccatatgaaaataaaaagctttctgaatctgaagtgcaagaaattattcaacaggtaaaacagagcacaaatgaaaatacagtacaaatttcatttgaataa

SEQ ID NO: 995 - DNA, 204 bp, Listeria monocytogenes-EGD
gtgaagttaccgccagaagcagattatttaaatgatgaaaccttagaagtgtatgagaacgataaaaagaagtatgaccagacaaatcaactaattactaacaattcagttacaattctattaggtgatttttgctattatgagtcggcatggagcagtaggtggagggataataggttttggattgggagtaaagtaagttaa

SEQ ID NO: 996 - DNA, 1041 bp, Listeria monocytogenes-EGD
atgaatgaactgcttaagattttcttatcaatggctttaacatcagttatattaataccgctagtctggatattacggagaatattcaatcgttatttgagtaaaggaaaaatttattactcatggctgattgtttttttctttttaactattccttttgcctatatcttctttagttttacaaaagataatgcgtttatgtggagaaataaaacggaatttgatggggttacttctatcgtaatggatcaaagtgggattgtattacaacatgattttaaaactgttttttggatgacggtacttgattatatatgggtagcttggctcgtgatatttttactaacttttatttaccgtatagcttcgtatcgtaatttcaaaaaatatgtattttctggtgcgcgaagagtagatgatttggaacagctagatatattggcggaaaccattgaggaattgaatattaaacgaccggtagagttgatgataaatccacttatttcttcgccgatttttcttgggctaaaaaagaatgtaatagttataccagatgaaactttttcaaacgtggaattgcattatatttttaagcatgagctcgttcattgtaaacgtaaagatatgtattatgtttggatggtccaatttttcacttgtatctattggtttaacccgttgatgtatctgatgaataagcggattcaaatggatcgtgaattagcgtgtgatgaagctgttttagctacattgtcgaaaagtaaatatattggttatggcgatacgttgctttcgtcacttgctaaatcaggaaattacaaggaatcttatgtagccgtatcgcttcatgaaaatacgaaagctttaaaagaaaggcttatgtttatcgcgaactataaagcacaaaacaaaaaacataatatattgttctcgatttccatgattgtattatgtattgtaggcgtcttatttagtgcttttcaagctgatgtgtttacgctggaaaagaagaaaggcattacaattgaacgaagaaaataa

SEQ ID NO: 997 - DNA, 774 bp, Listeria monocytogenes-EGD
atgaaaacgaagatgccggaaatgctttctttcatttcagaagaagctgttagtagaaaaatgacaagtgaggaaattgctgctcactttggttatgataaacatcactttagtcgaaaatttaaagaaattaatggattcagtgtggttgaatttctttctagtttaaaagtggaaaaggcgattattgaacttgatgaagaagtacgcatactcgacttacaagaacattcaggttttgaaagtagtggtagtttcacaaatacgtttaaaaaatatacaggtagttctcctagaaaatacaaaaccgaaatgaatgatattttttatgatatgaaacgttttgaaaatgataataaggataagtcaatagcgcattttcaagaaaataatgattctttttgcaatgtaactattgatgtacctgatgaatttgagaagggtatcatatttattggacttttccgtactcttataccgaatcatatgcctatatcgggattagctactaaaaatttaataggaaatcaattgaaaaatattccaagcggagactattatttattagcttgtgcgataagccagtctaataacattctatcttattttaacttaagtaatagtttgagagggaaagaagatgaaaagctatcttttcctaaatgttctggcaatcattacgcgattaagctgagaaaaccaataccagaagatccaccaatattagctaatgtgggaaaaattttaatctcctgtttgaagaacacaatctag

SEQ ID NO: 998 - DNA, 357 bp, Listeria monocytogenes-EGD
atggctttaaatgcaaagagtatcactataggactaccagtaagtgatttggagaaatctgctagttggtatgaaaaactatttatgagtgatgaaaaattaacaccagttgaaggggttattgaatatcaaattggttcagtttggattcaactttttgaagaaaaaataaatgtttcagaaaacgttttacgcttaggggtagaggatttagatgtggaatttgaacgtttaaaaacacttggagtaataactgacgaggtgatagaagatgtacctggtattattcgatattttgtcttctctgatccagatggtaataagttgtcattctattggttgtatgaagaggaatag

SEQ ID NO: 999 - DNA, 225 bp, Listeria monocytogenes-EGD
aacaagaagaagaacctatctcgttacttgagaaggttcgtaaactgtttaattaagttttccgcttactatttaggaggtcgatttatgctacacatcatcactctgtcactcgctattttgatggcgttacaaacaatctatttcttcattcgtaaaaatgtcaatatgggcgttatgtttttactcataacagctgcacttcttttactcagtacgatttaa

SEQ ID NO: 1000 - DNA, 219 bp, Listeria monocytogenes-EGD
caaaaggatgaggtgagtaaattggataaaacacaaattgcattaattatacccgtaattcttctttatttagctttattattaactgccattattgatttaacaaaaaactggaatacacgaaaaaatcctattatttggctaattgttatcatcgttattaatatttttggaccgattgcctactttatttttggccgcaaagaggaagttaactaa

SEQ ID NO: 1001 - DNA, 216 bp, Listeria monocytogenes-EGD
tggaaaggagttttaatggtaacagtcactaaacaagacttaattaagctaggatatggaaattcattttcagctgatattatcaagaaagcaaaagagctgatgatatcaagaggacacacctattatcaatcaagaaaattggatagagtacctcgtgaagctgttgaagaacttctaggtatcaagttttcaaatgaaaacaggtctgattag

SEQ ID NO: 1002 - DNA, 363 bp, Listeria monocytogenes-EGD
atgagcgatgaatttgcttggatacgggaggaaatcagtggtcttaaaggagtccagtattcttttaaagaagaatggggagcggagcgctatcatgtcttggatcagctaatggcaatgcgcggaacgaataaagatgggcatcccattttaaccttgaagtgcgatgccgaaaaaagtgagcaacttcgcgcagaaaatccagccatcgttcccggttattatatgaataaacgagtttggatttctgttttattggaagaagaacgagataaagacttgattcgcgcattaattcagcatgcgtactcagaagcgaagaataagttgccaaaatataaacaagcagaactttttgactaa

SEQ ID NO: 1003 - DNA, 369 bp, Listeria monocytogenes-EGD
atgattaatgaatttgtttgtacaaatatttccacacaagatccggcggcgttggttgcgttttatcacgaaaaattgggaattccgatagtattcgaagggtacgacaattatgacggagcgaaattaggtttttctgaaaaggctcccgggattattgtttggaataatagcaaatggggcgaagcaagcgaatctaaagtggagtttgttttctcgtgtgatactaatttggatgagatgtaccgggaacttcaaacagcgggagtggagacaccagaaccttgtgtggctgagtggggcggacgtgaactgaatttacttgacccagatggcaataagattatgattttggagcccgcacaatga

SEQ ID NO: 1004 - DNA, 348 bp, Listeria monocytogenes-EGD
ttggaatttggagaaaaattaattcatttacgaaagaaaaataggttaacacaaaaacaactggcggcgaaaatcgggacaactgcatccacaataagcaagtatgaaaatgataaccaccgaccgccaatttttattttggctaaattagcagaaattcttggaacaacaaccgatttcttattagatgatgtagctggtttgcgagaaaagaattcggtaaacgcctttcctttaattggaaatcctgaactcgagaaatggtatttagaactaccttatacatactcagaggatgagttattaatgttaaaacgaattgcagatgcgattgagaataaaaaatga

SEQ ID NO: 1005 - DNA, 681 bp, Listeria monocytogenes-EGD
atgaaaaaagggatagctttattagcgggatttatgttagcttttagtatttttttaacaggatgtggcggaacagataatacaagaaaagaaaatcattctgatggcagtgccgaagtgaaaaataaaaaagataataatacatcagatgaatatgtagaagatggtcttttattgaaagtgggagaatggactaaagataaagattacgatactaaagtgactcttgaaaagattgcaactccaaaaataaaagtaggtttaggcgacttaaatatgttaattaaggatgtaaaaatctttaaacgagagaatgtcagtgacgcagaaaaagaggaatttagcggtggaaaagtccctgtcacagatccttactacacaatacaagttaaatatgatttagaaaacactggaaaaaatgtgctaaattttaatggaattgattatatcatcacagaccaaaaacaacaaattgatgttatgactgacaacattggtataaatggcgtcttcactgtacaaccagatgtcatagttgaagatgaatatgttatttgtatattaaaaaaagacaacgtggataaaataaataaagtaactataaaaacatcaccagtctataacagtgaaacgtatgacgaaattactaaatcgatgactatcaatattgaatttaaataa

SEQ ID NO: 1006 - DNA, 282 bp, Listeria monocytogenes-EGD
ataaaatgtgtcaaaaagagtattaatttattgacatgtgtcaaaaagcgtagtaatataaaagtacgcaatacgacacaattagagaaaggagatatttatgaggatttggttgaaaaaaataagagaagaaaatggcctaactcaacaagatgtagcagaattagcggatgtggaaagaacaacttacgcatcaatcgaacaagggagaagaaatccttctgttgtaaatgctatgcgtattgcatcagttttagatttcgaatggactattttttttga

SEQ ID NO: 1007 - DNA, 285 bp, Listeria monocytogenes-EGD
atgaacagaagatatctgagcaacaaaagaagtgaacagaaagattgtgtttttaaaaccaaagacataccaccagaaaacttaaaatcattaaatattaagatgcaaggagatagaaactgttgttatggagtattagaaatcaatggaaaacaattaagaaaaggaattacagcggtcaagttagatttaaaagcaggatcattaccagttgtacaagtggaatatcacccattcacgatcagcgaagaaatgcaaagactaatatggtctggaaaatactaa

SEQ ID NO: 1008 - DNA, 777 bp, Listeria monocytogenes-EGD
atgtcaaatttacaagtaattgcaaatgaaatgttgccagttttagaaaatgaacaaggcgaaaaatttgttgatgcccggatgcttcatgaaaagcttttagtaaatacaagatttaatgattggatatatagaatgattggaaattatggttatgagaatggtttagacttttactcaactttgagtaaaaccaatgggcgaccatcaacaaattattttttgactttagatactgctaaagaattagcaatggtgcaaaacaacgaaatgggtcgagcaattagaaaatacttcattgaagtagaaaaacaagcgaggaaattagcaactgaatatcccgcattttcatacatgatagaagatccagtcgctagagctaaaaaatggatagaggaacaacaagaaaagcaagaggtgttaaaaaaacttgaggaacaaaagccgaaagtagtttttgcggaagctgtgcaaacgagtgagaacacaattttagtaaaagatttagctactattctaaaacaaaaaggattagatataggacaaaacaggctttttgaatggctgagaggaagcggttatttgctaagtaaaggtgcttattacaacaaaccgtcgcaaaaggcgatgaacttaggattgtttgaacaaaaaacacatattcatacagatagaaacggcttaatgaaaaccacttatactccacaagtaacaggaaaaggacaagtatatctattaaacaagttattagaagaacacaatcaagtcataatttaa

SEQ ID NO: 1009 - DNA, 477 bp, Listeria monocytogenes-EGD
atgaaattatacgaattgactcaagcatacaatcaagttttagaaatggcggaggaattagacacagaaacgctacaagacactttagatagcattagagagccgatagaagaaaaggcagagaatattataaaaatggtaaaaagcattgatgctgaggctgagggattagctaaggaagtagagaggttaacgaagcgtaaaacagcgttagatgcaaaagctaaaaacatgaaagagtatttagagagcgaaatgttaaaagtggatatccgtaaaattaaaagctcactatttactattagcattcagaagaaccctcctagcttgcgtttagaggacgaagaaaaactattcatgtttttagtagagcaacctaaaaaattagataagaaagctattacaagcgctctaaaagaaggaagagacgtaccgggcgctaaattagtacaaaccgaatcattgagggtgaggtaa

SEQ ID NO: 1010 - DNA, 807 bp, Listeria monocytogenes-EGD
atggctaagctagaaacgttttatcccattgtagctacaccaaagcgtgctggctataaagaatatctaccgagtgcagctcttacaggctatattcgctgtttttgggaggcagatgataagaatttcccgggaaataatttagtggttcctgatttatgtgcggatattatttttacaattgatagtaaaacagggctagtgacggatgctatatttgttggcgttagtgatgcatcgtttgagtctgacgatgaaagtaataccgagctttttgccgtgcgattttatgcgtggtcgttatttttatttgtcgaacaggacttgactggtagcatgaatcgggtaaaagagccggaagagatgtttgctggatttgtttcgttttttcaagagaggtttgctgaaatgacgacgaacagtgaaagaatagctttattagaagaatttttactgcgaaaattaatgatgcttggcaagcaagtccatcctgattttttaaacagtattgataagttactacaaaaccccaatcaatttgtgttaggagctgtatctgttcggcagttagaacggctgtttcaaaaacacatgggacttgcacctaaacagacagcaaaacttattcgtttccaaaaagtattacaggcattatatgagaatccaagtgtgccgggcgctgaacttgcttatcttcatgggtttacggaccaggctcacttaattaaacaatttaaacgatatagtaatcataccccagaagaaatgaagcaaatttttctgcaaaatgtcgcaaatatacaatga

SEQ ID NO: 1011 - DNA, 699 bp, Listeria monocytogenes-EGD
atgaaaaaatctgaaagtattggggctatagcgaaagccatggcggctattcaaaaagaagtaaagccgttagaaaaatctgcggctaatccttttacagatagcaaatatacaccactcgataagattgtggaagcaatatttaaagttgctcctggtcatggagtctcctttacacaatggcccattagtggtgataacggaacgataggtattggaacaatgttaatgcatgaatctggtgaatggattgaatacgatccactatacatgacagtaattaccaataagaaaatgagtagcgcgcaagaagctggtgggaccatcacatatgcaaaacgttatgttatagcagctgtttttgggattgtgtctgatgaagataaagatggaaatattcaaagttcccctagcaaatacccaaagaataacagttataaatctaataattacaatcaaaatagtaatagtcagcaacaaacaaaacaatcacaacaaaatgataatttagcatcaccggcacaaaggaaggcaatatttgcgaaagcgagcgttataggtgaaccgttcgggcatgatggcacgtttgtactagaaagctataaaattacggacacaaaatcaatgagtaaaggtgaagcttctgcactaattaaaaaactagatgcagaaatagaggcgcaaaaacaagttaattaa

SEQ ID NO: 1012 - DNA, 975 bp, Listeria monocytogenes-EGD
atgtcggggattcaatggataaagttatccgtcaatatgtttgatgatgaaaagattaagttgctcgaaaaaatgccagagggtaaccaaatgcttattgtatggattaggcttctagctttagctggaaaaactaacgacaaaggacgcatttatttaaacgaaaatgtaccgtatacggaagacatgctcgcgacccttttcaaccgtgatgttgggattatacgtgtaacgttacatacgttacagagcttcggaatgattcaaaaaacagaaaatggattgattgaaatagaaaattgggaaaaacatcaaaacgttgatggtatggaaagggttcgtgagcaaacaaggaaaagagtggaaaaacatcgagaagctatgcggcagaacagaatagcgagtggtgacagtaaaggaaataaagagtgtaacgttacaagtagcgttactgttacgcaaagtaacgcaatagatatagataaagaattagataaagatattaacaacaacaacagcgatttaaatttcaaggatttttgggaacaaaacggattcggaatgatgcttccagttgaactagaaaaattacttgcttgggtagatgattttgcaggtaatcgagaaattgtcatgaaggctttggaagttacatcagagcaaggagctaacaaacgtaattacgcttacgttaataagattcttaaaaactgggaaagcagaggatttaaaacaatagctgatgttgatgcagcggaaaaacaacgacagatagagttagagcaaaaatataacaagcccacttacaacaaatataacaaaccagttaaagaagaagtattgccggactggttcgacaaagaccagaaacaaacaaaacaagaaacttcaacaacaggatcaagcgaagacttagaaaaacaagtcgctgaaattaaagcgcagttagcggctaggaatgaggtgcaggcgtga

SEQ ID NO: 1013 - DNA, 597 bp, Listeria monocytogenes-EGD
atgagatttaaagaaggcgataaagtgcaatttatagaaaataatgaacttatcattggcacaataaaacgtgttaacaacgatgttggttgggtagacctgaaagtttcagatttaagttggtttttccggaaattagaggatgtcgttaaggtaaaagagccggaattgatagccgttcctcggtttgccgcggattggataaaacactgtaaacaaagagaatacgatttagcttgtttgttagactatgaagattctgatatgtctgctgaaatgtacgaatggttaatttcatcagctgataatcaagaactactcgcccgcgcttggcttgacggctacgaagtcgagaaagaaccgctttattatgtaaggttgccgctttcaacatggaacgatgacgcagccgaattagaagtgattaatatgtatgttttgttaaatgtacaatctgatgaaacatctattactggatcaattatcaatgaaaataaggaatggagaaccaaattaacagaagcggaaattaaaggcatacctggaggcgaaatatattggcagtttgctgttcttgttgaggaagcggaggcgtaa

SEQ ID NO: 1014 - DNA, 444 bp, Listeria monocytogenes-EGD
atgagagcgattggatttagagcgtttgtaaaaagaaaaaagaaaatgcttcctgttacggatttgtgctttaacgaaacagaagctgtaggtgtgagcggttgtggtaatgcgaaatgtacgctgtgcgtcgactggtacagctttgatgatgtcgtgcttatgcaatacacaggtttaaaagacaaaaacggcaagaagattttcgaaggggatgttgtaacggcattttcaaatatcaataaatacacagattcatttgcgggagatgttgagccaacattctgttttacatccatcgtttatgacggagcatgttttaaaacaacatacaagggcgagcctagttatgtgttgaaccaaaatggcagttcgttagtaaagcatatggaagttatcggcaacatacacgaaaatccggaattattggagggaacggaatga

SEQ ID NO: 1015 - DNA, 471 bp, Listeria monocytogenes-EGD
atgaaacaagaagagttagacatcatattagagaatcatgggaaatggctgttcaacgaaggtggcgatagagcggatttaagtaatgcagacttaaaaaacacaaatttaagatttgcaaatttaagacttgcagatttaaggggtgcagatttaagttatgcaaatttaagatttgcaaatttaagtaatgcagatttaagttatgcaaatttaagtaatgtaaatttaaattgggtaaactggcaacatgtagaaggcttgacagtaatctgcgtacaagtagatacgacacgtaaaaacaatcaaatagcatatatcaaagaattagacatatggataacaggttgtttccaaggaacattagatgaacttaaagcgtctgttgaacaaacgcatggagataacgaaaagcttagaaagagatattacagagtgattgattttattttgaaagaggtggcggaatga

SEQ ID NO: 1016 - DNA, 462 bp, Listeria monocytogenes-EGD
atgaaacacggacaatggatgttaaatggtacagatggtgaaagatggggtgcttttgaacgatttgacacaaaagaagaagcaataatttatggagttgagttattaactgaatacaatagtttagatgatgatgaacgcagagattatgatttatctgatggattaaatatgcgacctttggattatgaaaacatttatacatttttcgttggtcaaatagaagaagtcgaatttcctacagaagtagatactttgcttgaaaatatagctcaatgcgtttatgacgaagttggagagtgcggggaggaatatttgaatgacgtaactcaagaacataaagaacaattatcagatttgatatatgaatgggctaaacaacgagattatttgccagcgtgttttaagattgaaatggtggaagaaattgatattagaagttttgaagaggtggcggaatga

SEQ ID NO: 1017 - DNA, 594 bp, Listeria monocytogenes-EGD
aaattgagcaggtggtttttatttggtatagtgaaaaataaaagggtgttgcaaatgagttttatactagaggttgggagtttagctgactgggtaagtgggttagcgacagtaggagcattgttttgggctataaaattaaatagtaacgaaaatagaaaaaggctaaccatattatttagacattcatttgttagcaaaaagaacggtataattataagtgatggaaaaccgaaagtttttataattactcctgtaaataatagtaaatttagcttggaaattaattttagacaaatattattagtgccaagtttgatggatagattattatttagagcagaacccaaaaaattatcaaacatagaagctcttttaaaacagttggagaataaagcgaattggcaaattattaaacctaatttatccggcgaaccaataatgtttgattatgaatttattgttaaacaaattaaaaaatatgcagatggcaagagatttaattttgcaatcgaaatacaatttatagattcaacatcaaaaatatttaaacataaagagaaacttgagttaagaaaaataaagggcctgtga

SEQ ID NO: 1018 - DNA, 795 bp, Listeria monocytogenes-EGD
gtgaaaacggaagagaaatataaaatctttgctaaaacctatgtaatgaatgggtttaacggtaaagaagctgccatatcagcaggttacagtactaagacagcagagcaacaagcttctaggttgttaaggaatgttaaggtgctggaacttatagatgaagaaatgaaactactttcaaaacgtatgcaggatgacgcttcgaaaatatatgctgaattatggaaacaggttagaatgattgacgataaaatggcgaagcatgaagaagcatctcgcaagttaagtattaccgatgctcgtaaaataactgcgatagctgatattaataatttaaaggcgaaaataaggcgaactgaatccaaaattaaaaaaatggatggaaggaaagctgatgaaggaaaatttaaaaaagagttattggaagaatatgacgaactaaaaattcaactagaagagcttgaggatagtgtaagtgaaatttatgaagagaacagtacatcgaagcgggatttattgtggcataaagattggaaagaaatactatctttaagagcgcaaatacttcaagacttattcgatagatcgggctataaagaaacaaaagacatgcaggataggcgtgtagctcttcttgatgcacagattaataagcttgaattagaagccaaaaaagattgtaaggattctggctttgcaacaattatcatgtcaaatgttgacgaaatgcaagcctaccttgataaaaaggcaggtggcaccgatgaacgcgacgatacacaaacaactaattga

SEQ ID NO: 1019 - DNA, 1002 bp, Listeria monocytogenes-EGD
atgggaaatgaaatcacaaaattattagacgttgtaacaccagaggtttttaatgcgtacatggataacttcacatctgaaaaatcagcaattatccaatcaggaattgcagttgctgacccaagcgttgcacaaaatatcacagcgggcggattacttgttaatatgccgttttggaacgatttagatggtgaagacgaaactttaggtgacggtgaaaaaggactagaaacagggaaaatcacggctagcgctgacattgcagctgtaatgtatcgtggtcgtggctggtcagtcaatgaacttgcggcggtcatctcgggagacgaccctttgaatgctttaatggggaaaatcgcttcttggtggatgcgtcgtgagcaaactgtactaatttccgtgttaaatggactatttgctaaaaacggtgcattagcgagctctcacttgctatcaaaaccaacatctgcaatttcggggaatttggtattagatgcaaaacaattactcggggattctgcagatcgtttaaacttaatggttatgcattcagcagtgtatacagcattgcaaaaacaaaacttaattgcatttatcccaaatgctcggggagaagttaatatcccgacttatttaggataccgtgtagttgtagatgatggagtaccttccacaggaacaggcgcagcaaaagtatatacatcgtatttattcgcaactggttctatcggaagaaacacaggtaacccagctaagttaacaactttcgaaacggctcgtgatgcatccaaaggtaatgaccaagtatttactcgacgtgctttcaccatgcatccatatggagttaaatttaaaaatgctgttcgtgatgctaacgaaatcactccgacgaatgcagacttagcgaaagctggaaactgggaaaaagtttacgaagataaacaaatcggtattgttggtattcaacatttagttgaagaattgccagctggcggggcttga

SEQ ID NO: 1020 - DNA, 312 bp, Listeria monocytogenes-EGD
ttggttgccgcatcgcttatgatgaaacacctacggttacaaaaccctgaggagagcccgtccagcgtcgaagtggaccacaatacaattaccgttaaagtaggagaaacatttactattaatgcttctgtattgccagtgggagctagtcaagaagtaacttacacttcatctaatccaccgaaggcaaaaatcaatagcgtgggtacaggtgaaggcgtagcagaaggaacagcaaacataacagttgcatctaaagaaagtacttctatcaacaaagtagtacaagtaacagtagaagcagcagattaa

SEQ ID NO: 1021 - DNA, 819 bp, Listeria monocytogenes-EGD
atggctacatcgctggcattagtaattgaaggtaaaacatatatgcttaatgaattattcgatttagaggtaggagaagtgagcagagaaccgccgcaaatagttaataattatactgaattcgctggttctgacggcgctagaacgacagatagtaactttagcatgtttcctatctcgattttgtgccattttagaacagaatcagcagacttatatcacgttaaactagatgagttattggaacttatttatcagagaaaagaatactttttagttcattctaaaacgcctggcaaaaaatatagagtacatccgagtggcgttggtattgaccgcaaagcgccgggatacgcagatttgacacttgaattcgatgtgtttcgaggttattcagaatcgctaagttctacgcttagcgattctgaaattgattgcgataaatggcagttcgggcaaggtctagcaatggaggattatagatatactcacactaaaagtcgtttcatcatttataatggcggtagttttgacatagacccgcgcgaacattatttagcaattactttgcgtggtcagaatgaaggagaattaacaattaataatattacgacaggcgatagatttatctattatccatcgttaagtacaacagacacattaattattgattgcgctacacctagaataaacggaaatccctgcggtcgtaacacgaatcacgggttaataagtttgaaaaaaggagagaatcttatcgagattagcaatactagtcatttagatacgaagtgggatttctcctttttgtacaagtag

SEQ ID NO: 1022 - DNA, 1029 bp, Listeria monocytogenes-EGD
atgttaaatcttgataaatggggaaatacactttttgattctaataagtatcagcagtttaatgctaatatggaaaaattagaaaaagattcattagcaaaagatgtagatataaatgcaactaataacagaattgataatgttgttttagaagctggcggaaataatattactgaagtagtagatgctagaactagcaaaaacggtcaagtctacagcactttaaactcgcggctaaatggtgactattcagcaattgcaagtgatttagctgaatcaaatgcgctacttcaaacagtaaacgaagaaaataaagtattaaaaagtaaactagatgaattgtacggtaattctgcatcaaatattgagtattatgttagttcaacaaacggaaatgatgtaacaggaacaggagctattgatgcaccattcaagacgattcaaaaagctgtaaatatggttccgaaagtaaaagtaggaggctttatttatatcttttgtgagccggggcaatataacgaagatgtagtagtacagtcgttcagcggcgcagaatgcttttatatccagcctacaaatttagcaacaatcgacccgacaactggacaaacaggtttttttgttaaaagtattctgttttctggcatcatgtttcagtgcgtggtacaaggacttaattctatgagtacggcagtgaataataattctacggtaattcagtttgcaaggtgctggtacggcacagttactaaatgccgatttgacactaatttgaaagcaactaatattacaactgtgcaatacaatcaatctcgaggtaactgttatagcaactattttaaaaatcaaaacattattatgtcgtccgagtacatgggacatgctttatttgcatcaacaaatacatgcgaagcaacttcgaatgtcggcttaaaagctgctagcggaggcattttggttaagtctggtacgccagttttaaacgctactaccgcagaattgaaacaagcgggaggtcagatattctaa

SEQ ID NO: 1023 - DNA, 1074 bp, Listeria monocytogenes-EGD
atgacaaatcaaatctttaaatcagctattcttgatttttctgttagtgcacagaacgctaaagctaatgttcctcagataaggtttagtacgcaagactcaggagggactgcgcgattaaagtttactgcaaaaaaagatgataacaatttaccactttcaagcgcggcagaggtaacgcttgctatggtattgtctgttggcaaaaaatacgaaagtagctacattgttaatccagaaataattaacagaacaggaggcgtttttgaatactcattgactgatgagcaaataagtcacgacggacaagctaatgcagaattgtacgttaaatatccaaatcaaacaatgcaaatcaatcgttttagttttgttattgaaaaagcgatgattgatgataattttttgcccgttgctacctattatgttgaaaaatgggatgattacgagaaaatatttaacgaaaaagtggaaattcttcaaaatgaaattgatgatttgcaaggacaagctactgaattaaaaaacacattcgatagtcttaatccagaccaatttccccaaaaagcagattttgaaaatcatataaacaacacaaacattcatgtgacgatgactgataaaacgaattggaatacaaaagaaaataccgcgggatcacaagcaaaagcggatagtgcattaaactctgcaaaagcatatacagatagcaagatggatagttacggagcgtggataaatgtaccccttgccgctggttactcaactggtgacagtaatacacctcaatatcgacttgtagcaaaacaaacttctaccggtttgaaaacttttgctgaatttagaggtgctatagctggaacgttttccagtaccgcaaatagtacggttgggacaatgccagcgggaacaagaaccgtggtcactgaatattttgctgtcgcatcaaacaatggtaacggaggacgtattgctattcccgttgacggaaaaatgttacaagtatcatcaacggataatgctaatcctagctatataagtctttctggtattagctatgaagtcgggaactag

SEQ ID NO: 1024 - DNA, 318 bp, Listeria monocytogenes-EGD
atgaactataaacagttttacacatatgatgaaaatggcgattatctcgaaacaatacttgtgtttgaagatgaaaaaggtttaatcaatcaaccgaaaaattctacaaatattgaaccttcaataatcgaaaacggcatagcaagagcaatgtattatccaagctgggatggaagtatttggaaagaagacaagaaaagatgggaatcagaaaatccaatcataccagcagaaaaaactgaaatagaaaaattaagagaggaattactactcacccaagaggctttagccgcactatttgaaagtaatttagggtga

SEQ ID NO: 1025 - DNA, 846 bp, Listeria monocytogenes-EGD
atgacaagttattattatagtagaagtttggcaaatgtaaataagttagcagacaatacgaaagcggcagctagaaaattgctagattggtctgaaagcaacgggattgaagtgttaatctacgaaacaattagaacgaaagaacaacaagccgcaaatgttgctagcggagcgtctcaaacaatgcgctcttatcatttagtaggacaagcgctagatttcgtcatggcgaaaggtaaaacggtcgattggggtgcttatcgttcagacaaaggcaagaaatttgtggcaaaggcaaaatctttaggttttgagtggggtggtgattggtctggatttgtagacaatccgcaccttcaatttaattttaaaggttatggaactgatacttttggaaaaggagctagtactagtaattcttctaaaccgagcgcaaatgcgaacacgaacagtctaggattagtagattatatgaatttaaacaaactagattcaagctttgcgaatcgcaaaaaactagcgacaagttacggaattaaaaattacagtggaacagcaacgcagaacacaacattattagcgaagttaaaagcaggaaaaccacacacaccagcaagcaaaaacacatactacacaaaaaatccgcgaaaagttaaaacactagtacaatgtgatctatacaattcagtagacttcactgaaaagcataaaaccggtggcacatatccgccaggcacagtcttcacgatttcagggatggggaaaactaaaggcgggacacctcgcttgaaaacgaaatctggttactatctcactgctaacacgaagtttgttaaaaagatttag

SEQ ID NO: 1026 - DNA, 591 bp, Listeria monocytogenes-EGD
cggagcactttatttttatacagacgggatgagtgcttagtggatgaagcatcagcggaatatagatttgagttattaacactattaaacgattttactgagaaatttcatggtaaaagcattattcttacaacaaaaggaatagggcaaatagttatctcattatatgatgataatttgcctcatttattaggtattaacaaagtagtaaaaagaaaaaccgcaaccgcaatcctcacagaaattagaaataataaaattacgttaaatagtattatggtacataaagattatgaaaagatatcagatagggtgaaaagttattattttttacatgacgttttcatccacaaaagcatacaaatatgtgtaaaggtaaaccctattgataatcaaggggattatatgaaactagatttagttttttaccgaaaagatcgagacaagtgcattgtcttgggagcgcagaaaacacgaaataataatacatatagactttgtacattacatgtaaaaaaaactaccaaagagccatacattctctcaaaaagaggtaagattgtagatataattatatcggatacgatataa

SEQ ID NO: 1027 - DNA, 813 bp, Listeria monocytogenes-EGD
atgcataaaacaatccgtagcgtagacgtttattatgaaaaatatggtgaaggaataccgataataatgattcatggctttgctcctgattcgcagctgatgattggttgtatggagccagtctttgataaggaaagctcgttctcacgcatatatttggatttgcctggaatgggaaaaaccgagaattacgactcaattcaaaatgctgaccatgtactcacgcttttactagaatttattgaagcggtaattccgggcgagcaatttgtactcgctggagaatcgtatggtggctatttaactcgcggaatcgcggcgaaaatgccagatagagtactcggagtcttgcttatttgtccagtcatttaccctgaaaaagaaagaagaacgctacccgaacaaaaagtcatgtaccaagacgatacctttgtccagtcactatcaaaaggagaccgagcatacttttcaaaaagtggcgtcattttaacagcaagaaactggaatcgtttcttggcagaagtgatggctggaatgattaatgcagatggagaatttttagaccgattatctgcgaactatgagctgagctttgatccagacgaaaaagtgcaattcgatgtacctgcattattcttatttggtcgtcaagatgatcacgtgggttatgcagacggactcacgttgctcgaaaaatacccacatgcatcgattgctattcttgattttgcaggtcataatttacaaattgaacaaccgaaaatcttcacgacgatggtgcaagacttcttattccgcgtaaaaccagaataa

SEQ ID NO: 1028 - DNA, 498 bp, Listeria monocytogenes-EGD
gtgaacaatcatgttatagatttgacaaataagaaatttggaagattaacagttaaagagtttgttcgttctgaaaatgggaatgcggtttgggaatgtgtttgtgtatgcggcaatgaaaaagaagtattagctcaacatttaaaacgaggtcatgttcaatcttgcggttgtttagctaaagaaaatgggcgtgaatatgctgaaaaaaatttaaggacagaaacagcacagaaaaacgcccttaaaagaaaactagaagtagacgcagtcgatggcactatgaaatcagctttaactagaagactatcagcaagaaacaagagtgggataaaaggcgtgcgttgggatgagaaaagaaataaatgggaagcttctattacctttcaaaaaaaattacattttttaggcagatttgaaaagaaagatgatgccataaaagcacgtagagatgcggaagataaatactttaaaccgattttagataaaatgaattga

SEQ ID NO: 1029 - DNA, 402 bp, Listeria monocytogenes-EGD
acttatcaaagtaactcatttttcttctcttttaacacggtgatagcattttctaacgctttacaaacatctttttctatatttacatgttcttcgttttcaaatctattgaacgtaaaaggaagtacttcaatattagcagactcaaactctttgattaagcagtataattcgaattcttgtgcaggaaatgagagtttgtacttgtctaacaggtgtttaaatcctgcaagatcgtcagaatttttttctatgtcttctaattcaaacaaaacatctgatacagataaacccgaaatcaacgatagcgagcgtagtattgaaacagtatatttatttaacggtttttcgttctggtcttttaaagtgttttgtgagataccagtcagtttgcttaactga

SEQ ID NO: 1030 - DNA, 1119 bp, Listeria monocytogenes-EGD
atgaaatcaagaaaaaaagggattatcttagtactgtccgttattctaatcttttccattggtttattagtgaacaacctcatgacaaacaacaaagatactgctaagccaaaaaagaaaaccgtcgctgctgttaaaaagaaaaaagagacacctccaaaaccaaaagaaccatttaacattgattttacaggtgatattatgtttgattgggatttacgccccgttttagcagagaagggaatggattatccttttaataatgttcgcgaggaactgaaatcgagcgactatacatttgttgatttagaaacagctattacaactcgaacaaaaaaagtcccctaccaagaattttggattaaaagtgatcctagttctttaacagctcttaaaaatgcaggggttgatatggttaatattagtaataaccacattttagactattacgaagatggattactcgacacaacggctgctttacgcgccaataacctagcctatgttggcgccggtaaaaatgaagatgaagcctatcaacttaaagttgctgacatcaaaggaaacaaagttggtttcatgtcgttttgccactttttcccgaatacgggttggattgccgacgaagatactccaggggttactaatggttatgatttaaaccttgtcgaagaaaaaatcaaagaagaacgcgcaaaaaataaagatattgattatatggtcgtctattttcactggggagttgaaaagacgaatacacctgtagattatcaaacccaatacgttaaaaaactcgtggatgataatttagtggatgcgattgttgctagccatccacactggctccaaggttttgaagtatacaaagatgttccaattgcttattcattaggtaatttcttattccctgactatgtttcaggtcattcggcagaaacaggtatttataaactgaattttgatcaaggtaaagtaactgcccattttgatcctggtattatttcaggcaatcaaattaatatgcttgaaggttcttccaagacagcacaattaaattacctgcaatccatttctccaaatgcaaccattaatagtaatggtgatatttccgcaaaataa

SEQ ID NO: 1031 - DNA, 1026 bp, Listeria monocytogenes-EGD
atgaacaaaaaaagagattttatcgacacaaaagatttttctaaagaagaaatactatttatgatagaaatcggtcgcaaaatgaaagaatctattaaaaacggtcattacccacaacttttaaaacataagacgcttggtatgatttttgaacaatcatcaacaagaactcgtgtatcttttgaaacagcaatgacacagcttggtggtcatgcgcaatatttagctcctggacaaattcagctcggtggacatgaatcagtaggcgatacagccaaagttctttctagattagtagatatattgatggcgcgtgttgaacgtcatcaaacagtagtagaacttgcaaatacagctgctattccggttattaatgggatgagtgattacaaccatccaacacaagaattaggtgatgcaattactatgtttgaacaccttccaaaaggaaaaaagattgaagactgcaaaattgtctttgtaggagatgctactcaagtatgtgcatctacaatgtttatggcaacaaaacttggaatggatttcgttcaatttggaccaaaaggatttcaattacgtgaagaacatttgaaagttgctgaagaaaattgcgaagtatctggcgggagctatttaattacagaagatgtagacattgcgttaaaagacgcagatttcatttatacagatgtttggtatggcctatacgaagcggaactttccgaagaagagcgaatgaaaactttctatcctaaatatcaagtgaataaagaattgatcagtaaagcggctccacacgtgaagtttatgcactgtttacccgcaactcgtggggaagaggttactgacgaagtgcttgatgctccatactcagttgttattgatgaagctgaaaatcgtttaacagcgatgagagcactgcttgtatactttatgaatccgtatgtgaaagaagcgggttttgcagttgcggaaaaatatgatgctgaactagagttattacttagaaatggcgctggcttataa

SEQ ID NO: 1032 - DNA, 1386 bp, Listeria monocytogenes-EGD
ttggaaaaaaagaagaaattcagattatttgatgcggttcttatggctgtatgtgtcgttttggttgtggaatctgccgcgccagcagcggcgataggatcatctcaatttttctggtggattgcgttacttattttatttttcttaccatatggacttgtttcggcagaacttgggacaacctatgatgatgaaggcggaatttatgattgggtaaaacgggcatttggccgaaaatggggtgcacgtgttgcttggttatactggattaattatccgatttggatggcgagtttagcggtattgtttgtagaagttattacgcaaattttcccggtttcatttgggacgccagtttcgattttgattcagctcatttttgtgtggattgttgttattgttagttgttatccagtgagcgatagtaaatggattcttaatatcgcggctttctgtaaagtcgcaattatgctttgccttggtgtacttgggatttattttgcgattacgaagggattggcgaatgacttttctggaaaagcattacttccaacttttgatttagagagtttatcatttatttcagtcattttattcaatttcttaggttttgaagtggtaacaacgcttgcgagtgacatggaaaatcctaaaaaacaaattcctcaagcaattatttatggtgggattttgatcgcattcttctatttactagcagctttcggaatgggggcagcaattccgacttctgaactttcaacgtcaggcggccttattgatagctttattatgctgattggcggagttaacccatttgttattattattgggattatgtttatgtatacattagtagcaaatttagtgtcttgggcactaggcgtgaattatgtagcaatgtatgcagcgaaaaacaaagatttaccagctgtttttggaaaaacaaatccgaaaaatgatatgccaacgggtactagtatattaaatgggattgtagcttctgtattaatcgttgcggcaccacttattccaaatgaaaatattttctgggcattctttgcattaaatgtagttgctttactaggttcatatatcctaatgtttccagcatttttgaaattacgtaagttggatccggaccgagaacgtccatttaaagtgccaggtggcaaaatcttgctttacttaatgactttcgtaccaatgattttactcatcattactttgattttctctgcagtaccattaaatggttcaagtgcagaattaaatgaaaaaatcccaatcttaattggaaccattgtagcggtgattgttggtgaaatatgtatttggcttgctggcaaaagaaaagacaaaggagagataaaaaatgagaacgattga

SEQ ID NO: 1033 - DNA, 1092 bp, Listeria monocytogenes-EGD
atgagaacgattgatagttcttctaaaaaagatggatttagaatgcctggggaatttgaaaaacacgctggttgctatattatttggccagaacgaccagataattggcgcttaggggccaaacctgcgcaaaaagcttttgttgatgtggcaacagcgatttctcattttgaaccagttactgttgttgcaagttctagtcaatatgtaaatgcgagatatatgttgtctgatgaaattcgcgtagtggaaatggataacgacgatgcttgggtgcgcgattctgggccaacttttgttgttaatgattctggtgacgtacgtggagtggattggtcatttaactcttgggggggattggtcgatggtttgtacttcccgtgggataaagatgatcaagtcgctcaaaaaatatgcgaattagagcgaaaagatcgttatcgcttagctgattttgtgttagaaggaggttccattcatgtcgacggtgaaggcacgcttgtaacgacagaagaatgcttattatcagaaggtcgcaatccacaactttcaaaacagcaaatcgaaatggttttaaaagagtatttaaatttagaaaaaattatttggttaaaacgaggaatttatttagatgaaacgaatggtcatgtagataatattttcaattatgtacgcccaggtgtagtagcgcttgcgtggacagatgatgaaactgatccgcagtatgaaatttccaaagaatgctttgatattttatcgaatgaaaccgatgcaaaaggtcgcaaattagaagtgcataaaataaatgtaccaaaaccaattttaattaccgatgaagaaagtaaaggtgtagatgctgtggaaggaacgctaccaagggaagaaggcgaccgactcgcagcaagttatattaattactacacagccaatggtggagtgatttttccgctatttggggatccaaatgatgaacttgctcgcgaaaaattacaacaactttatccaaactgtgaagtggttggtgtaaaagcaagagaaattttacttggcggcggaaatattcactgtattactcaacaggtgccaagatga

SEQ ID NO: 1034 - DNA, 942 bp, Listeria monocytogenes-EGD
atgaatcaaaaaatagtcgtggcacttggtggaaatgcaattttatcgagtgatgccagtgctgaagcgcaacgaagtgctcttgaagaaacagccgaatatttggtgcaatttatcgaaaacggggatgatttaattatttcgcatggaaatggaccgcaagtaggcaacctgatgctacaacaacatgcgggagcttctgaaaagaatccagcaatgccgcttgatacgtgtgtcgcgatgacgcaagggagtattggctactggatgcaaaatgcgctagataaagcatttttaaaacacgggctagataaagtagcggtttcattaattacacaagttgttgtggataaagatgatcctgcttttgaaaaaccaaccaaaccaattgggcctttccttaataaagaagaggctgaaaaggaaatggcagaaactggtgcaatctttcttgaggatgctggccgaggttaccgtaaagttgtcccatctcctcgcccacttagtattaaagaacatcagattattaaacaattggttgatagtggcgttgtgactatttctgctggtggaggtggggtttcggtcgttgaaaatggccttgatttatctggggtagaaaccgtaatcgataaagattttgcttctgaaaaacttgcagaactaattgatgcagatttgttggttattttaacaggggtggaaaatgtttatatcaattataatcagccaaatcaaaagaaacttgaacaagtgaccgtttcagaattggaaaaatatattgatgagaaacagtttgcagcaggaagtatgttgcccaaaatcgaagcagcgacagcttttgtcaaagaaagaccacatgccaaagcaataatcacatcgcttgaaaatattggcgccatgctagaacgtggggcaggaacagtgattgttgcaggctag

SEQ ID NO: 1035 - DNA, 1110 bp, Listeria monocytogenes-EGD
atgggacaactgaaagggttgccggtagaggacggattcagaatgccaggagaatacgaacctcatattggctgtttcatgatttggccggaaagacctgataactggcggcttggtgggaagccagcgcaacaaaactataaagaagttgcagtcgctatttcaaattttgagccagtcactatgtttgtatcaccaaatcaatataaaaatgctcgtaaagaacttccggataccattcgtgttatcgaaatgagtaatgatgatgcgtggatacgcgattatggacctagttttttggtggacgataagggagatatgcgcggcgttgactgggggtttaatgcttggggtggtcttcttgatggtctatattttccgtgggataaagataatcaaattgcaaaaaaagtttgtgagttagagcgaatcgactactattcacagaaagattttattttagaaggttgttccattcatgtagacggtgaagggacacttgttacgacagaagagtgccttttatcagaaggaaggaacccgaatttaaccaaaatagaaatcgaacaaactttaaaaaaatatttccatgcacaaaaagtaatctggcttaagcatggcttctatcttgacgaaacaaacggacatgtagataacatttttaactttgtggcacctggagaagttgttttatcgtggacggataacaaaagtgatccgcagtatgaaatttcaagagaatgttatgatattttagctaacaaaacagatgctaagggaagaacttttataatacataaactacattgtccagatccagtacttattacgcaaacagagagcgaaggtgtggaagcgattaatggaactttccctagacaggctggagatcgattagctgctagttatgtaaattactatacagcgaatggtgccattattttcccattgtttgatgatccaaaagataaagatgcgcaggaattacttgaaaagttatatcctgatagaaaaattgtggggattaaagcacgtgagattttgctaggcggcggaaatattcactgtatcacgcaacatctccctgataaaagtacgatacgtgaataa

SEQ ID NO: 1036 - DNA, 780 bp, Listeria monocytogenes-EGD
atggacttttacgaaatttccagtaagactgtagcttccctaactcgaaatgagcgaattttatttgactatgtcgttaagaatatgaatttaattaaaaatcaaagcattcgagaagtttctgcagaatgctttgtttcaacaacaacatttttgcgctttgtaagaaagcttggatttactggttatagcgagtttacaacggtcttaaagttcactttacttgggcatacagagctaaaaccgtccccatttgtcgtagaacagtcggattatcgtgaagaatatttaaaaaacattattgaatctgtccgagttttagaaccaagtaaaatcaagaaaatcaccaaaaaactagtaaacaaaccgcgaatttatttttttgctaaaggactgagcaaacatgctgcgaaatacatcaaatatctctatacaatgagcggatttttggtagagtttcctgaagattatcaatatcgccaagctgtattgccgcatattggtaaagatgatttagtttttatccttacgtacggtggacatgatattgaattaatccaaactgcccaaaaactaaaaagcagaaacgaaacgcctatgttgatttcgattaccggggctgataataacattattcaaaatatgagtgatattaatttatatatttttacagatgaaattgaaatgaacaatttagacatcacttctcgcatctctacaattgcaattatggagctaatcttataccagtttatggaagatgaaactagtagcttttaa

SEQ ID NO: 1037 - DNA, 300 bp, Listeria monocytogenes-EGD
atggaacaagtatttcaagtagaacttcctgaatgggaaccgaaagaaacacctcaagaaggacgcgaaaaaggctctattcgccaagttgacaatattggcgttaatttaatcgtccgtcttggaaaaaaagaaatgccagtaggggacattgccgagttaagcattggcgatgtcctcgaagtggaaaagaaacctggccacaaagtcgaaattttcctcgatgaaaagaaagtcggcatcggtgaagcaattttgatggacgagaacttcggaatcgttatttcagaaatcgactaa

SEQ ID NO: 1038 - DNA, 324 bp, Listeria monocytogenes-EGD
atgtttaattggtacaaaaaataccgcgaagaaaaacgagattataaacagtacaaaaaacgaatagccgctttgccagaagattataaaaccgcaatgaaagctatcgaaacctatttatggaactttgcaaaaggtgctgggatgtttgaaatcctaaagaatgtactcgagatgttcgaaaacgccgccgccgacaacctagaattaaaagccgttgtaggagatgacctagcggaattcgccgacaacttactaagtgaatttccggaagaaacatggatggataaacaacgtcagaaattgcgagattcgattaaataa

SEQ ID NO: 1039 - DNA, 1449 bp, Listeria monocytogenes-EGD
atgagtaatacgaagtttccagatggctttatgtggggcggggcgaccgcggctaaccagtttgaaggcggttataatttaggcggaaaaggacttgcctgtgcggatttattcactggtggaacgcatacagagccaagaagaattaccgcacaattagaagaatccactttttatccaagtcatgaagcagtggacttttatcaccattataaagaggatattaagttaatggcagaagctggatttaaagtgttccggatgtcaataaactggactcgtattttcccaacaggaaaggaagcagagcctaacgaggaaggattgcagttttatgaagatgtttttaatgagctgaaaaaacatcagattgaaccgttagtgacgattgctcattttgatattccgctagcattaacaaatgaggtgaacggctgggcatcacgagatttgattgattactatcttcatttttgtgaagtgatttttaaacgttataaacatttagtaaaacactggttgactttcaatgaaataaatactgcaacaatggaaattgggaattatttatcgcttgggattcgtcatgcggagggggattttcttcatcaaaaagatgacccaaaagtgagatatcaagcgcttcatcatcaatttgttgctagcgcaaaagcggtaaaactaggacatagcatcaacccagacttcatgattggctgcatgattgcttatatgccacgctacccgcgtacttgcgaaccatccgatgttttgctagctaagcagacggaagcaatgcacagccatttctgcggcgacgttcatgtcaaaggttattatcctttttatgcaaaaacgttttttaaagataatggcattgagcttgaatttgatccagaagatgaacaaattttgcgagaaggcacggttgatttttacacatttagctattatctaacgctttgtgcatccaacgatcctgcctataaaaattcgggaaaaagtgttatcggaggggctgaaaatccttatttaaaaacaaatgattggggaatgcagacagatcctgtagggcttcggattgcgctgaatgacttatatactcgctataatattccgcttatggtagttgaaaatggtttaggagcctttgataaattggaagatgatgggacgattaatgatccgtatcgaattgattatttcaaagagcatattcttcaaatgcataaagcgattcaagatggtgttgatttgattggctttactatttggggttgtattgacttagtgagcgcatctacaggggaaatggccaagcgttatggcattatttatgtggataaatacgatgatggaaccggcgattattcgcgtaaaaagaaagcatcctattattggtataaagatgtgattagttcaaatggtgaaattggattggaagagtaa

SEQ ID NO: 1040 - DNA, 1854 bp, Listeria monocytogenes-EGD
atggactacaatcagttagcaaaagaaattttacaagcagtcggtggaaaaaataatgtaaatgaagtttatcactgcattaccagactacggtttcaattaaaagatcaatcgaaagtaaatgaaaaacaattaaaaggtttggataaagtgatggggacgaacgttgcggggaatcaattccaagtaattatcggaaatgacgtacccaaagtgtttgacgcattagcagcagaaaatcctgcttggaaaaacaaagaaacgacgaataaaacgacccggcaaaaaggaatcaaaggatttttctcaaatatttttgatgcgctttcgggcgtttttgcaccaattcttcctgcgattgcgggagctggtttaatcaaaggtttcatggcattatttgtttcacttggttggttagcaacagatacagaaacttaccgtatcttgttagctatcggtgacggggtattttacttcttgccaattttagttgctgtaagtgccgcgcgttactttaaagcgaatatgtttgtcgcgcttggaattggagcggcgctactttatccggatttaactgctttacttagtgcgggcacaacgccacactttatcgggttaccagtaactccagtgacgtatgcttactctgttattccgattttacttgcaatttggattatgtcttatgtggaaaaatgggtggatcggattattccaacctcgttaaaattgctgtttgtcccattaattacaatgtttatcgttgttcctttgacgcttgttgttattggaccactaggtacatttgttggagacggtgtatctggcggaattaactggttattaaataatggtggagctattggtggtatcttgattggtggtgccatggccattatcgttatgactggtatgcactatgcaattgttccatttgttattagtaatttagcaaaatatggttatgataaatttttaccgttaacttatatttccaatatgagccaagcgggagcgactttcggtgtatttttccgagcaaaagataaaaaactgaaatcattagcattttcaactggtttaactgcattaatgggcgtaacggaaccagcgatgtacgggataaacgtggtatataaacgtcctttcatggcatcgttaattggtggggctgctggtggcggctttgcaatgatgtttggtgtaaaagcgtatgtcttaactggtaacggtggtattccaggacttccaggtcttgtcggagatacttttgtttatgcattaattgcgatggccttagcatttatcgtagctttaattttctcttatattttcggtattgatgagcaaatggtagaagcaacgcctgtagcagaaaaaatagcagcggggacagaaattttgcaagctcctgttactggtgaattagtaaaaatgagccaagtaaatgatactacttttgctgatgaaattatgggtaaaagtattgcgattaaaccaaatgaaggtaaactttatgctccagctaacggcacaatcatttcgcttttcaaaacaaaacatgcgattgctatgaagtcagataatggcgctgaaatattattacacgtaggcattgatacagtgaagcttgatggtaattacttcacggcacatgttgcgacgggtgatgtagtggaacaaggagatttattagtaacgtttgatatggaaaaaattgcagaaaaatatgatacaaccacgatgatggtaattacaaataccaatgaatacgcagtggtagaagctaaagagaatggtattgtaacgaaaggtaatcaagtaatggaattaaggagtgagcaaaatgagtaa

SEQ ID NO: 1041 - DNA, 840 bp, Listeria monocytogenes-EGD
ttgagaattgagaggattttaaataataatattgtgagtgcgattagcgaggatgcgcaggagttgctgattttgggaaaggggcttggctttaattctaaagttggtgatccaattaatgaatcgaaaatcgaaaaagtttttgagttgaaagatgatacaatggataagtttaaaatgattgtaaatgaaattccaatacaatttttagaagtaactgatgatattgtgaagttattcaaaatgaaaacagcgaaagatattagtgatgtcatctatatttctctttcggatcatctgtactttgccacgcaacgattgcaagaaaatgtggttatcgaaaatccactctcgtgggaagtgaaacgcttttatcaggaagaatatgcagtggccaaagaggctgctaaaatggtggaaagtaagcttgaaatagagctgcccgatgctgaaatttctaatatagcgctacattttgttaatgcggaagtagatagtgatatgaacgacgtcacacacattatgcagttaattcaagaaattatctctattattaaatatcattttaacatcgaatttgatgaagaaagtacgaattattatcgttttatgacccatctgaagtttttctgtcaacgcgtaattattggcgagacaattgacgaaatggatgaatttctttatcaaacggtgaagaaaagtagaggcgttattttcgactgtattgataaaattggcgtgtttttggaaaagaattatcaatttacgatgagtcattcggaacagttttatctcgcacttcatattgaacggcttttaaaaagaaaaaataaccaatag

SEQ ID NO: 1042 - DNA, 417 bp, Listeria monocytogenes-EGD
tttgaaagagaggagaatacaatgaagaaaaaagtatgtgttttagcgatagcattgcttacagtgttatcaccgatgggcgctttagctgctcaaaatctaaatgaaggagagactagcttagattcattaatgagcgcaaataaaacaggtgaaaaagtgattttttctgagaccacaacaggaaaaaaacctctattaaaagcagcgcaatcagctggaggcggcactttctgggttacatggggacaagatagacattattcaaattatcagcatactaaaaaaacgcatagatcaagcgcttctaactatagagcgacggaaagaagtagctggaaagcaaagaataatctagctactgcatggattaagtcatcattatggggtaataaagctaattgggctacaaaataa

SEQ ID NO: 1043 - DNA, 309 bp, Listeria monocytogenes-EGD
atggaaggaatggaactcgcatcatttcaaataattagttctgttggcgccgcaagaagttgcattattgaggcgatgaaattgggaagacaaagaaaattcacagaagcatataaaaaaattgatgaggctaatgaatttcttagcgaaggtcataaaaatcatgtgcagctaattcaaaaagaggcagatggtggagacgtacaaatttctatcctcttcatgcacgcggaagatcaatttatgacaacatatacattacgcgatgtagcttatgagatgattgctatttggaaagaaatgaaataa

SEQ ID NO: 1044 - DNA, 2271 bp, Listeria monocytogenes-EGD
atggctgtttatttggataaggagaaaccagtttcagaacgtgtagaagacttactttccaagatgaccttagcagaaaaatgtggtcaactaaaccaaagaatgtatggctgggaagctttttcaagagatggcgaaacgtttcaaatcacggaaaaatttaaagaggaagtaactagatttgaaggtataggcgctttatacggtctgttccgcgctgatccatggtccaaaatgaataaggacacgggtgtaagtcggaaaaatgctggcaaagtagctaataaaattcaacgctatgtgatagaaaatacgcgcctagggattcctgtattattagctgaggaagttccgcacggtcaccaagcgttagatagcgaatcttatcctgtaaatttagctcgtgctgcttcttttaatccagagttgcaaaaacaggtcgcaagtgcgattacagaagaaatttccgaaaagggagttcatctagcacttgcttcagcattagatgtacttcgagacccgagatgggggcgcgccgaagagtgttacggtgaagatccatatcttgcagcggaattaacagcggcgattactgaaggttttcaagcgagcgggaaaattgctgttattttaaaacattttgcagcacaaggcgagccgattggtgggcataattctggaccagtttctattggtgtaagggaacttagagagattttcttggatccaatgcgtgctggaattagaagtggcgctcttggcgttatggcagcttacaatgagattgacggggttccatgtcacgcgaacaaagagcttttaacaactattttgcgagaagaaatgggtttttccgggattgtcatggcagatggctgtgcccttgacagattattaaaactaaatcctgatcccaaaaaagccgcgaaaatggctcttgaagccggtgtggatttgagtttgtgggatgaagtgtttccatttcttgaagaaagcgtggaaaaaggaatccttgatgaaaagatcgttgatgacgctgtaagtcgagtgctccaagtgaaattccaattaggtctatttgaacaaccatttgtggaagaagacattcaagaaccgaagtctgattggagacaactaaatttacaagctgctagagagggtatttgtcttttgaaaaacgacttcgaaacattacctttagtgggcgaaccgaaaaaaatagctgttgtaggtcctagcatagattcgctttataatcagcttggagactatacagctcctcaaaatgaatcagaatgtgtcactgttttagaaggaataaaaaatcagcttcctgaaaattgggaagtcctttctgaaaaaggggctgaaattcgtgaagagcttccggatggcattcaaagagcagaagtggttgctaaagaggcagatgctattgttatggtgctcggtggttcaagcgcgcggaattttgacatggaatttttaaataatggcgcggtaagctctaaaggcccgaacatggatgcaggtgaaaatgtggatgttgctgatatcacgcttccacaaccgcaattagatttgttttacgcaatgaagcgtactggaaagcctgtaattgttgtaatgattcaaggcagaccaatcgctattcctgaaattagtttggcagcagatgcaatccttaccgcttggtatccaggaagtcttggtgggaccgcgattgctgaggtccttttcggtcattacaatccatcaggtaaattaccggtcagcataccaagatcttctgggcaaattcctatttactataatcaaaaggcagtggagtataaagaagactactttgatttaactggtaagccgctttatccatttggttatggtttaagttatagcacttttgaatatcaagatttacagataaaacaagaatctataaaaatatcagaactccttggcgggcaatctgtagaggtgaaagtaaccttgaaaaacatctctaatgtagctggtgaagaagtcgtgcaactttatattcatgatatggaagcaagcattactagaagaaaaaaagaattaaaagcgtttaaaaaggttcgtattgcagcgaatcaaacaactacagtgacatttaagttagataaatcaagttttgaaatatggtcaattaacaataaatatgaggtggagcccggtggtatagaaattttcgttggtggaagttctgatactaaattaacagggcgagtttcaatcataggaggctag

SEQ ID NO: 1045 - DNA, 300 bp, Listeria monocytogenes-EGD
atgaaaaatattatgctgatgtgtaatgcaggaatgtctacaagtgttttagtaaggaaaatggaacgtgttgtagaagaacgtaatttagaattgactatctgggctatttcagaaacggatttcgaaaaaaattggcgtaaagctgatgcgattttacttggaccgcaagtaaattatatgaaagataaagtaatagacacagttggtgataatgtatcggtggcagttattgatatcgttgattatggccgtatgaatggtgaaaaagtattagatttagcaattagtttactataa

SEQ ID NO: 1046 - DNA, 1296 bp, Listeria monocytogenes-EGD
ttgaaaaagttcatcgagaaattaagttggttatcgcagaagcttggaaatcaaattcatttaaagtctatgcgtgatgcatttgctactattttaccttttattatgttagcaggattcatggttttaattaataacgttattattaagccggatggttttatgtcggcgattatcagttccgaaacacttacgacttggcaagggctaggtaacagtattgtaaacgggactttagggattattactattttaattggggcatcggttgcttactttttagcacaaaatcggaagtttgaaaatccgtttgcaccggcattaatgaccattgcactgattgttatttttatcccagctgtgacagaaattgtgccgattggtgcagagaaatctgtggaagttgctggagtattgccaatagccttgatgggttcagcgggaatgttcgttgggattgtaacagcactacttgcaacggaagtgttcattcgtctttctaagagtgagaaaatgaagattcatatttctggggatagcgtacctccagcagtaattaaatcgttcaatgtgcttattccgacaatgttaacaatacttatttttgcatttatttcattcttagtagtgacattattcagcttgaatttgtattccttaattagcgcgattattcaggagccattaacgttcctagttacaagcgttccaggtttcctaacgttaatgacgatttcacaaatgctttattctattggtattgctggaagtgggattttagggccaattatggacccagttcttttggcaaatatgcaagaaaatatgacagcatttgcgaatcatacagagattccacatattattaatactactttccgtgatgtttttggcgttatgggtggtggcggaaataccattgcgttattattagcaatatttatttggtcaaaacgaaaagattatcgcgaaatagctactttatcggcagctcctggtctctttaacattaatgagccggtagtatttggacttccgattgtatataacttgagtttaatgattccgtttattatttcaactccgctttgtttatgtttagcatactttgcgacgaaactgcatatgatttcagaggtagttgtaatggttccgtggacgacaccagtggttgcttccggcttccttgcaacaggtggggactggcgcgctgcagtattccaaattttcttgataggtgtctgcgtacttctttatctaccattcttaaaagccaatgaccgaattaaagcctaa

SEQ ID NO: 1047 - DNA, 1917 bp, Listeria monocytogenes-EGD
gtgagtgcttcaaaattatcattacctagatggaaacaaatagttcatatgctttatttaaagatggagtttattagtggtggagaattaggggaagctttagctgttaaccctcggacaattagaaatgatattaaagtaattaatcaaatactgacgataggcggaaacagaatcgaatcacttcctggtgtaggatatcgtctggtcattggtgatgaaaaagcgctgcgtgaagctcttttggatgattcggtgggaagagctaatatgaatatcgtgccgatgtttgcagaggatagagcagattatattattcgatatttattacttaaaaatgactatgtaaagctggagacgttgtcagaagagctttttgttagtaagtctacgataaacttggatattttagaagtgaaacgaaaactcaaagaaaatgagttgaaagtggaaaaacgagctggctatggaattagaattactggcgcagaacttgctatccgattttgcttttcaaggtatttgttagtggaatctacaagcccgcttattacagaaacggaaataaatttttttggagaagttaatttggaaatgatggagcagattgtcgtttctaatatagcgaaatataatattcacatgacggacatttcagttaaaaatttgattattcatatcgcaattgctgtatgtcgtgtaaaagataattgttatgtacctgcaacagatttggaggatattgaatttagtatgccagaactaagggcggctcaaggtattataaaagaaatagatctttcagaaggaattcgtttcccggaaagtgagactgcctatctgctgctacaccttagttcgaaaaacagaaaaagtgactttaataattaccgagaatatatcatcgtggataagatgttagcgaagattaaagagctgtatggttatgattttaagcaggatcagaaaatgatttcaaatatcgcattgcatttaaagccagctattaacagaattaaatttaatatgaatatacaaaacccgtatttaaaaaatctaaaagctaattatccactagcttttgaattagggttggttgctaaagaagtccttgagcaggagttaaaaacaaatgtggacgaagcggaagtagggtatttggctattcactttttatatggtttagataaagaaatagagtctgagaagcaaaaagtgttaattgtttgcgcttctggtttagggacgtcacaacttttggaatctaaagtacgaaaagagtttgagaatacgcttgaaatagtcggagtgtactcatttaaagaatatgagcagagtggaacgatgtgtgattttgttatctctacagtaccactgcgaatgaaattgcacccatttattcaagtgtcaccatttttgacaaaggcggatattcgtaatattactgctttgatgaagcaagatgagacgaagaaccaatttgaagtggacaaggtttttaaggaatcgttattcttaattagtgataaaaaggataaagagcaagttctcgtaaatttagcgagtcttttgctggaaaataatattgttggcgaggactatttaccgtcactttttgagcgcgaagaaattgtaccgacttatttaggtaatggacttgcggcaccgcacccaattgaggcaaacgtccaggaaacagctattggagtatgtatttgtgttggcggaggggtaaaatggaatgaggaagatcaggcgcaagtaattttcatgttagcggtaaaaaacaagcaacaacagcagcttgcgacggtgtatgagcttattagcaatttagtagaaagtccaaaagcaatgggagagctaaaacgtgtgacaagttttgaagaatttatgcgtgtgctacaaacgttataa

SEQ ID NO: 1048 - DNA, 984 bp, Listeria monocytogenes-EGD
atgaaaacaagggtttttggagttttagcgggtggagcactcggcgatgcaatgggaatgccgacagaatgttggtcgcaggaaaagataagagccatttatcctaatggggttgaaacgctcttgccttccgacgaaagtgatgcatttggaagaaaactggcggctgggtcgattacagatgatacgataaatgtgttgatgattgctgaaatgattaaaaaaaataatgggcaaatccgcgtggaagactatgtcgcggaattagtcgaatggaacgctaattcaggtgtttcggagttcgtctcaggtccttccacacttagagcattgaaacaaatctcagaaggcgtgccgatcaccaaaacaggtatttctggcacaacaaatggagcatcgatgaaaatagcgccaatcggcataatagctaattatgaagatatggaagacttggtttccaaagtgcatcaaatttgcctgcctacacataatgccaaaattgctattcagggcgcaagtgctgtcgcggctgcaattagttatgtggctcgaggtgggaacatagtggataaaatatgggaattagcttacgaagcaattgaggttgctagtaattacggatatgatttcccttcagcgtcgttaaaatttagaatggacaaggctcgcgaaattattggagaggaaacaggaccagcgactgcactgaaaagactatatgaagaaatcggctcaggaatggaaacaattgaaactattccctgcgcattcgctattgttgaattagcaaaaggtgacccagtagaagcggccaaattgagtgcatgcattggttgggataccgatacaattggagctatcagtgcggggatttgcggtggaatgtcccccacaataccggaaaattatatcgaaatgattgagcgagtaaataacattaatctcacgcaagttagtgaagatttatatatacatgttctttaa

SEQ ID NO: 1049 - DNA, 1923 bp, Listeria monocytogenes-EGD
atggggaagtatcaagcgttgtctaaattcatactggaaaatgttggaggaaaagagaacgttctaagtgtgacgcattgtatgacgagattaagatttacgttgaaggatgattcaaaggtcaatgaagatatactgaaaaagtcttcagagattatgacggctcaatttgctgggggtagatttcaagttgttatcgggacccatgtttcggatgtctacaatgaaatccaaggtgtgactggcgcagacaagatagcggaagcggaagttaaaaagactggtttgaatcgattgattgaaattattacaaaagtaatcacgcctgtgcttgggattttaacagcttcaggtttattgcaggggattcttgctttattaactattaccaatgtcattgatgtcaacgatggcggctacattgttctccatgctatggggcaagcagtgttttactttttacctgttgttttaggctacacgagtgcaaaagcgtttaatttgaatccttatgtagggatgatgcttggggcaacgctcgtaatacctgaactaatgacaaatcttgtaacagacaaagcgctttatacattgtttgatgggacgatgttttcaacgccggtatataatacgttttttggaataccaattctgttcccaccaaatggttaccagtacacagttataccagtaatttttatcacttttttaggtgcgaaggtagaaaaaatattgaaaaaaattgtacctcctttgttggcgcataatttaaatagctttttaacaatacttattacgtttccgttagcaattctaattattgggccagttacaaatgtacttagctcgcttatttcagctggggtttctggactttatgaggtttcaccggttattacatcggtagttgttgggctactttatcaaccgttagtaatatttgggttacactggccaatgagtgcaattgggattaacaacttggcgcagtatggagtggactatattttcccaatgtcatttacagcaagttttgcccaaacggcagtggtgcttgcggtttacttgaaaactcgttctagaaatcaaaaagcacttgcgatacctgcgatgatatcggggatgttctgtatcatcgagccggcaatatatggattcagtttgcccgtgaaaaaacggtttgcattctctatgattgggggagctgtcggatcattaattatctcgattttctccgtaaaaatgtatgcttttgcttttggggttctcggatttgtatcgtttattaatccagcaaacagtagtctgggcgggctatatgtagcgatttttgcaactattgtaacgatggcggtttccttctcgctaacattctttacgtttaaatctagtgaggatgtagtggacgaagagactaaacctttaattaagcaacaagaagttttagcgccaattgctggcacgatgcagccaatttcatcctcagcagacgagacattcgcttccaaaacgatgggtgaaggggttgttattttcccaacaggaagtaaagtggttgctcctgcagccggtgttgttactacggtgttcccgggaggacatgcgcttggaattactacggaaaatggaacggaaattttaattcatattggaattgatacggtggagttgaacggagaaggttttgatgtgcaagtggaagtggggtcaaaggtgaaacaagggcaaacacttgtaaatgtggactttgaagcaattgaaaacaaaggttataaatccgaagtattagtcgttattttaaacacagatgactttttagatattatttctgaagaaaaaacaactgtgaaacaaggcgggaaaatgctgacgttaataccttttaacggaaaagctactaatgatatggaggtttcgtattga

SEQ ID NO: 1050 - DNA, 831 bp, Listeria monocytogenes-EGD
ttgcttcgagtcaagagagtatttaacaacaacacaatcttggttcatgattcaaatggattggaaaagatagtgattggtaaagggatttctttcaataaacgagtgggaaatatcatttctgaagaggctgttgaaaaaacatttatagttgattctccagaaattacggaaagattcgtccagcttatcaaggaagtgcccataaatcatctagatttaacgaataaaataataaaagatgcggagtcagagttaaacgttacttttgatgaattaacttatcttggtttggcggatcatattaattatgcgattagtcgttataaaagtggtcatcaaataaaaaatgctttgcttcttgaaattaaaaaattctatccaaaagaattcaacgcagctaagaattccgttaaaaccatttcttattatgaaaatgttaagttactggaagatgaggcaggatttattgcacttcattttgttaacgggcagcaagaagggattatcaataatacgcttataacgacagaggtgttgaagaaggtattactgattctggaagatactttgtccataaaactggatgaagagtcactgaattatctaaggtttatcacgcatttaagattctttatagagcgaattaatagtgaaggcgcacgggaaaaagaggagcctgacatgattgagcaggtgttcaaactgtatccaaaagcttacgcgagcgtccaaattattagcgactatattcaagaaacgttgaattgtacggtttatgcagaagagttaatgtatttaacgctacatgttcagcgcctaattaaataa

SEQ ID NO: 1051 - DNA, 1167 bp, Listeria monocytogenes-EGD
ttgagaaaagttttaatgtttttaagcacagctttattattagccattctgtcactaagctttactggtttagatctgaaggcaaaagctgcttctgatttatatccactacctgctccaattattgatgttttcccagatgatggattagccaaagatatggctaaaaacttaaacaaagactctgtgaatgatgttattgaccaagatgacttggatgcattaactggtttgggatttgaaacaagtacgattacgaatgattccatgcaattactagaacgtgccatgtttaacaatgtcacagatgtaagtattatggaatttggggctaaactaacggagttccctgatattacaaccatcccacatttaaaaacgttattttttgctgatccacctggaagattaactagaaacttgtcccttccaaactaccaaaattatcctgaaatggataccattacaatgagcggaaataatttaatcggttctatccctgatttcactggaatgcctgctttaaaacagctgtatatgtctgaaatgttaattacaagcgatgaacttcctaattttaataatattcctttacttattacgttggatctaagttctaaccaattgacaactattcctgattttcaaaatataccaaatctcacatttttagatttaaatgcaaatttattaaccaatacacctgattttcaaaatttacctaaattaactgatttaaatttaagacataacaatttaactggtacgatggttaactacaccaacttacctagtttagaatccttaaacttagattacaattttttaactgaactaccgtctaatgtattagataccatctatgttcaaagtcaaaacggagagcttcctgatcaaactattaatcagggcgatacctgtactattgatttacctatttatttccaaatggaagaaactaatatgttagtcagcccagaagttacgggagaatatatcgggattagtgtaatccagcttccgacgacggttaatgaggaaggcaacaccataacagtggatacatccgctctaagtcctggtgagtataaattagatgtctcgtataatcacaattatgctactggaggcgtatgctcttatgattggaatgtaactattaattaa

SEQ ID NO: 1052 - DNA, 534 bp, Listeria monocytogenes-EGD
atgaaggaatttttattttttgctgtatttacttttattatgacaataggagtaggtgtaatcaatgctagcgcttccgaaatagagaatccagacaatattcaagaagcggaagtagaaacatttgatttaaatgggaatatagctcaagagaaagaaattgttttggaagacgggacagaaggaactttaggtgtaatgccaatcattgacgaaaggcctcttttaaaaggaacttattcgctagcaaatggaacaagtacatggaaaatatactggtatagtggtgtatataattgttcgtttaatgctaagattaatgttagtaagggtaaaggtaaaattacaagtgcttataatccatggtatcaattttatagtccaggacttgatgtgaaaaaatctaaactttcaaaaactagctctggttcaagcgctagttatgtatttgattgtaaaaataagatttctaactggaatgttacgttaaaagcatcagtaagcgggaaaaagttaactacaagttttaaataa

SEQ ID NO: 1053 - DNA, 741 bp, Listeria monocytogenes-EGD
gtgaaaataaaatcgtttttggggaaaagtttgaccttggttgtgttaggggtttttcttttttctggatggaaaattggtatggaactgtatgaaaataagcataaccagacgattctagatgatgcgaaagctgtttacacaaaggatgccgctactacaaatgtgaatggtgaagtacgagatgaacttagagatttgcaaaagttaaataaagatatggttgggtggctgacgattatagatacggaaatagattatccgattttgcaaagtaaggataatgattactatttacaccacaattataaaaatgaaaaggcgcgcgcgggcagtatttttaaagattatcggaatacgaatgagtttttggataaaaatacgattatttatggtcataatatgaaggacggatccatgtttgcggatttacgtaaatacttggacaaagattttttggtggcacatccaacgttttcctatgaatcgggcttaacgaattatgaagtggaaatctttgctgtgtatgaaacgacgacggatttttactacattgaaacagaatttccggaaacaacggattttgaggattatttgcaaaaagtaaaacaacaatctgtgtatacatcaaatgtaaaagtcagtggaaaggaccgaattataacactttcaacttgcgatacagaaaaagattatgaaaaaggacgtatggttattcaaggaaaattagtaacaaaatga

SEQ ID NO: 1054 - DNA, 1902 bp, Listeria monocytogenes-EGD
atgacaaaaaaagtcttaccaaaagaagcgtccgaatttacaaagaaagtgaatgagaaagtaaaaaaatctttaccatttgagaacacgaaagattttgatgatgctaaaaaaggttttattggaacttgggatcatgtaaaagtagatactgaagatggccatgcagtttgggatttggaggattataagtttattgaaggagaagcacctgattctgttaacccaagtttgtggcgtatcgctcagcttaatatgacaaatggtttattcaaagtaacggaccgcgtttatcaagtacgtgggtttgatatgtcgaatactacgattatggaaggcgatactggtcttgtaattacggatacattaatgtcggttgaaactgctcgtgcggcgcttgatctatactatgagcatcgtccaaaaaaacctattaaggcgattatttatacccattcccatgccgatcattacggcggtgtagcgggtcttattagcaaagaagatgtagcctctggaaaagtggcacttattgggccagaaggatttatggaagctgcggtcagtgaaaatatttttgctggaaacgcgatgattcgtcgtgcagaatatatgtatggtagccgcttgtcacgcggggaattaggtcaagtagatgctggtcttggtaaaacagcttctaaaggtcatatgtccttgcttgctccaaatgatactatcacgtttgatcacgaaaaacgtgttgttgatgggattgaagtggaattcttgatggctccaaatacagaagctccttcagaacatatgatgtatttcccacaatttaaactacttaatatcgcagaagatgccgttcataacttgcataacattttaacattacgtggtgcgcaaattcgtgacgcttatgagtggtggaaagatattgacaaagcaattcgtgcctttggcgataaatatgaagtttgtatcggtcaacatcactggccaacgtgggggaatgaagaaattaatgatatgcttattcaccaacgtgacgcttataaatatatgcatgaccaaacgcttcattttattaataaaggattaactgctattgaagtagctgaagctgtgaaattccctcctgcactagaagaaaaatggtatttacgaggctactacggtacgcttaaccatgatgttaaagcgatttatcaattttatcttgggtggtatgacggaaatcctgctgacctttatccgctacctccagaagatgttgcgaaaaaatacgttgagtttatgggtggcgttgatgaagtattgaaaaaagcgcgtgtatcctatgaagcgggtgaatatcgctgggttgcggaagttgtcaaacatgcggttttcgcagatggagaaaacggagaagcaagagctcttcttgcagatgcgttagaacaacttggctatcaatctgagtctggaccatggcgtaatgtatttttagctggtgcggatgaactgagaaattctgtcccagatgaagttatttctggtgttacactggatattgtggagggtatgccgtttaacttgattttagattacatgggtattcgtttaaatggggaaagatccattggtaaacgtatctccatgaactggaaattaacagatgttgatgagaattatcatttacttgtaaataattcagtacttatttatcgtgaaggtgaagtagacgataaagctgatttaactttaactactactcgtgatacatttaatcatatcttcggtggtgtgaaaagctttgaagcagcatttgctgaccaaacagctaaactagaaggagacgtgaagaaatttggggagtttgcttccttgttagatgaatttaatcctgtcttcaatattgttacaccttaa

SEQ ID NO: 1055 - DNA, 342 bp, Listeria monocytogenes-EGD
atgtttactaaaaaaagaggtttaatgttattagccgcagttcttctaactgtttgcgcgatttgggagtatgcgatgccaactgacgccgcagtaaaatcctattacgtaaaagtagaagacgcagggaaacccgttcaaaaaaatcaattcaaagggttcaaatatgtatcaaatgtttatgatgacaaaggaaaacaaaagcaactaactttctactcagaaaaagaattaactaagaacgagcaattcaaagtacttgtcggcgagaacaaaatggttgttaattataaaaaaataaaaaacgtaccagataaaattaaatatttagctgaaaaataa

SEQ ID NO: 1056 - DNA, 735 bp, Listeria monocytogenes-EGD
atggttagaaaattaaataagatgaatgatgcgtcgccactttatgcacaaatagcggatgacttacgggaaaaaatccaatcaggaatttggaaaaccggagataaaattccaccagagctggatttatgtgagttatacaacgttagtagaattaccgttcggaaagcaattgatgaactcgttcgtgagaatctactttatagagagcgtgcgaaaggtacttttgtacgtgactgggaagaagcagaggatgagcattttactttggtgcgcagttttacgaatgagatgaaagaacttggtaaaaaagcggctacgctacatgcagaagtagaagtgatcaatgctgataaaaaaattgcgttgcagttggggcttgcagttggggataaggttttacaagttaagcggctacgaggcacgaaagacttggcgtttgctctttttatcagtgcgattccttatcgacaagcgtattcccttcaagcagaagattattacggttctttttatgaatatttgaaaggatttgggattgtcgttaatcaagaaaaggaatatattgaagctatgctaccaaatcgtgaagttcaggaagctttagcaatcgataagcaggaaccaattttaaaaagagtacggatgacgaaacaaaaagaaagtgattttagagaatacagtgaatgcttttatgtaggaaagcattatcgatattatattgattttgaataa

SEQ ID NO: 1057 - DNA, 1743 bp, Listeria monocytogenes-EGD
ttgagtacgtacgatttagcacctgaagtgaaaattcatcaatttgatggtgcttgggctggttataaagatattgccggagagctactaacagccatccaaaagaagaacaatgaacatattatcgttgctattgaatgttaccctggaacgcgaaatgaagaaattgttgccgaactacttccattactacctgtcgaaaaagcggttttcgcggatgagtgggcattaaataacgaagaagtaacaaataaagtccaatctcacttaacagatgaccgtgtgttcggcattatgtcccactatgaagtgagcgacttttatccagcagaaaaacttgctgaaattcaagcagaaatttcggctagtaaggggttagttgtaatttacgggactggcgcaacagttatagcaccaaatccagacatccttatttatgccgatttagcgcgctgggagattcagtgccgttaccgcagagaaaataaacctaactggaaagcagacaatgcgaatgaagatgcgcttcgtaaattcaaacgaggttacttttttgaatggcgcatggctgaccgccaaaagaaaaaactttatcaacaaatagatttcttacttgatacaaataaaaaaaatgaaccaaaaatggtacgcggggaagattaccgaaatggtttaaaacaagtttcgaaagctccttttagagtagttccttactttgatgcaagtgtatggggtggccagtggatgaaaaacaacttcggacttgaccctactgctgacaattatggttgggcatttgatggtgttcctgaagaaaatagtttatacatgcgatttggggatattcggattgaagtcccgtctaccaatgtagtaaaccatttcccaaatgaattacttggaccaaaagtacatagccgtttcggtacggaattcccgattcgttttgactatctcgatacagtgggcggtggtaatttaagccttcaagtccatccattagtagagtacgcgcaagataagtttggcattcattatacccaagatgaaagttactatattttagaagcagatagtgactctaccgtttaccttggaacaaaagaaggcacaacaaaagaagcaattatggcagatctagaaaaagccgctgaaggaaattaccgttttcccgatgaaaaatacattaacgtcttcccagtgaaaaagcacgatcatattttaattccagctgggacgattcattgcggtggtccaagtaccgtcgtcctagaaataagtgccaccccttatattttcacttttaaattatgggactgggaacgcactggactcgacggcatgcctcgccctgttcatttagagcacggcagagaaaatttacaacttgaccgcgataccaaatgggtaaatgacaacttaataaaccaatttgaaacattacacgaagataacgattcaaaagtagagcgcaccgggctacatgaattagagtttatcgaaacacaacgccactggtttaaagaaactgttaccgtccacacaaacgatagcgtcaatatgctcaatttggtagaaggaacaagtgctgtcgttgaaagtattgacgactctttcgcaccatttgaagtgcattacggagaaacatttatcgtccctgcaatcgtcggaacttatcaaattagaaatacaaacgctagtgaaaaagtagctgttattcaagcatttgtacgtaacttatag

SEQ ID NO: 1058 - DNA, 552 bp, Listeria monocytogenes-EGD
atgaaattaaaagaaggaatattttttaaaatcgtaatatgttttgtaactatttttatttgcctcactcctttatccacatctgtgtcagcgcatgcaagtgtgaatagagaagacggaaaagaagggaatactctagaacaaactgtttcagttgataaagaaaatcctgatttatttgtaaatcagagtgtagaaaacaatggtccaaaaagattattcgctaatcaaacagaaagtggaggatcaaagtataagtttgtaacaaaacaaactgtaagcttagcagctgcaaataatatttatagcctagcatttttagcagcaggaggagcacttggacgagttgctaagagtacaattgcagcagctgcatctagtattgtcggaggcggggcgagcttactcaaaaaatataactatatgcgtcaaacgatttataaatattctacgaaaaaagaagacaagtacaaagtaattaatgaatatttatatacgaaaaatggtaaaccaggaaaaataacaacttcttatagtactgtgagaaaataa

SEQ ID NO: 1059 - DNA, 414 bp, Listeria monocytogenes-EGD
atgagaaaatattctgtcaaaaaatttagcattgtatttatttcaatgattgctgctattctattattttctattataagtgaagaatcttttgtagtcactcctctgaacttatttactgctgttttaatagcagcctctgcttacataattaccggtctttttactcctaaagaaaagttaattggggaaatgaaagaagaaaaaagaaacgctgatgaaagatacatatttaataaaggaaaaatttcttatttcttcttattatttttagctattttaaccccatttttgttagcttttttaaaatatagaaacatatcctctgtttctataaaaagcttagcaataatatttgtttgtatcttttgcttatatatagttgttttacaattctataaaaagaaaaaatga

SEQ ID NO: 1060 - DNA, 315 bp, Listeria monocytogenes-EGD
atggcagaaattaaatacttagagggaatgtatcaagattcattctttccgacgtttctagtggataaattaaagcaatatatgttcgatacggttcaatttttagaacaagggaatcatgatacagaagcgattcaagctaaatttgatgaaatgacattagcaattaatgcgttgcaagatgagttttatgaaaatgagagcgaattagaaacaggagcaagggattcgattgctgaaacaatcatcccgattttagctcattataagatagatatcgatattgaagaactacttagagagcgcgagtggtaa

SEQ ID NO: 1061 - DNA, 261 bp, Listeria monocytogenes-EGD
ctcgttacacttcgaacgggcgaatgggaatgcgggttttcgatagatggtggatggattttgatggaggatgatagtttgtgtggtgggcgcactttacaggaaggattacatgctcgctttgctcgcatgcatatttgggccgtaactcgttacacttcgaacggcccaaataaaaacacgttcctaaggctcagaaaggaacgtgctctttcaactggtaaggttgaaagacaattgggttgcgcgcccaattgttaa

SEQ ID NO: 1062 - DNA, 1227 bp, Listeria monocytogenes-EGD
gtgaaaaaggtaacactcatttttagcgtttatacatttattctaggtatcttagtgggagttattgctgctttatttttagcaatggttcactttgccacgacatttttgtgggattatcttcctaatcagtttgatttttcatggtattatcctctgctaatcggcttaatcgggagtttttttgtagggatggttcagctgaaacttggtgactatccgcggtcaatgcatgataatgttgctgaggcgaagaaaactggacggatggaatatcgcaaagttctgcttccaacaatacttagcgcttggattattttaacatttggggcgagcgttggtccggaagcggctttaattggtatcgtaggtggtgccacgacttggattattgaccatttaaaattatctatggcgcataaagaagaacttgttagtttgagtgttggcgcgattatttccagtattttccacgctccgtttagcggactagccgaggaaattgatgaaagtagtcaagcaaagaaaattcctaaaaactctaaattagtgttatcacttcttatttcttttagcgcactcggatctttcctttggctgaaatcctttttaaaaatgcctgcaagtatttttgcgattcggctacctgatatgggttggtcttggtggtttattttactttttatcccaacaattattctcggatggctttttagtgtttattttcagcaattacaagtatacattgcgaaagcggcctctgtaattaaaaataaaatggtcgcggcgattatcggtggattaagtattggtttgtttgggattatttcttccttcatgttgttttccggcgaacatcagttgatcgaattaacaactactgtccaaaattattcgattcccttcttattaattattgcgctcttaaagcctgttttagtcgctatctgtttagcaactggttggaatggtggtgcgatttttccggcgattttcactagtactgtgatgggatacatagcaacatattggatagatgggtcaactggatttctcattacggttttcgtaaccgcctgttgtacgaaaattgtgggaaagcctgttctaaccgcatccattttacttttcattttcccgctacaatttttcccgtttattctactgacagcctttatcgttaataaaaattggtgggttagcattagaaaaattatccgggcataa

SEQ ID NO: 1063 - DNA, 681 bp, Listeria monocytogenes-EGD
atggaaactctactatcttttgagaaagtatataaagattacccgtctggtccttcaattattcatgcactgaaggaaaccaatttcgaagcgaaaaaaggcgaattaatcgcgattgttggtccgagtggttctggtaaaagtacgctcctttctcttgccggagcgctattaacacctactggcggaacaatttctattaacggcaaatcagtcgggaatctatcttccaaagaacaaacagcgctacgcttagaagaaatcggctttattttccaagcagctcatctggttccttacttacatgtaaaagatcaaattagctttattgggaaaatggctgggaaaagtgcggcggaacttgaaaaagatacagcttcgcttctaagccaacttggaattagcgatcgcgcgaatttctatccaaaagatttatctggcggtcaaaagcaacgtgtcgctattgctcgcgcgcttattaatcaaccctccgttattttagccgatgaaccaactgcgagtcttgatactgaaagaagtcgtgaagttgtcgagcttatccgtaatgaggttgtgcaaacgagtcgaacagcgattatggtaacacatgatgagcgtatgctagatttagtcaaccatgtgtatcgcatggaagacgggattcttacccaagaaagctaa

SEQ ID NO: 1064 - DNA, 306 bp, Listeria monocytogenes-EGD
atgagtacaagagtaatgtatccagcagaaataaaagaaaaagctatcaaaatgaaattagcaggtaaatctaccaaagaaattatgagaacattaaacatcaaaaatccaacacaagtgaaaacttggtggcgctggtatcgaaatgaagaaacccacaggtttcaccaaggggtaggtaaacaatataaataccaaaaaggggtgcctgaattaccagaaatagaacaattaaaaatagctcttcggcaaaaagagctagaactggaaattttaaaaaagtacaaggcattggaaaggaagtga

SEQ ID NO: 1065 - DNA, 393 bp, Listeria monocytogenes-EGD
ctggaaaaagaaagatttcgcacagagctcattggagaaaaaatagggcagttatgtaaaacatatcagttcacttatggttatcgaaaaatcgccgcattaatgaaacaagaagaacaagttggcatcaataaagtacagcgtattatgcaaaaatatcagtggcaatgtcaggtaaaagtaaaaaagaaaaatcgaccaggctccgcctactatcaaacagaaaaccacttaaatcgaaactttcaagctagtcagccgctggaaaaattaactaccgatatcacctacctttatttcggagactgccgtttatatttatcaagcattatggatttgtataatggagaaatcgttgcctactccattggcgaaaaacagacacagaattag

SEQ ID NO: 1066 - DNA, 339 bp, Listeria monocytogenes-EGD
gtgctagatacattaaatcagttgtcccttccagaaggaagtttacttcatagcgatcaaggttcggtgtacacatcttatgaatattatcagtgctgtaaaaagaaaaacgttatccgcagtatgtcccgaaaagggacacccgcagacaacgctcccatagaatgtttccattcctcgctaaagtgcgaaacattctaccataaaacagcgtataaatacgctaaatctattgtaatccaaatcgtaaaagattacattaaatattataacgaaaaacgaattcaacaaaaattaggctaccaatctcctattaatttcaggaaacaagcagcctaa

SEQ ID NO: 1067 - DNA, 2499 bp, Listeria monocytogenes-EGD
atgagaaaaataccagttgttgtttctcttgctttgtgttttagcctagtaagtcctagtttgtatgctagtgcagatactataactgcggtccaaatcactaaggaagcaacaaccgacactacagaacctacaactattgaccagcctagcagaatggacaactcgcaaaccgcaccacagaaaatgacagcatcatccagtgaagaagctgcaactactaactcaactgaagaggaaaatacacctaaaaataatttgaaatcaacttctgaaaacagcaaaacatatgctgaactatttccggatgttaatttagccaaaataatagctaaaaatattagtggaacagaagatattaatgcagaagtatcagaagcagaattacaaactattactaatttagtagcaacaaaccagaatattacgagcttaactggcatagagcatttaacagcgttagaaaatatcaatgtgaacaacaatgagctcacgacaatagattcgttatttaatataccaaccttaaaatcaattagcgcgaataataataaaataacggggaattttagtttggtaaaaactttgccggaattacacacgttagaagtgcttggtaatgcaattacagagttagatattgaaaaccaacctaacctagtaactttgtcggcagatgaattagaattgaaaaagctaacgttgaaaaatttatcccaattaaacggactaggaagaatagcttccagtatttctattgactggggtgatctagagagcgtcactttaatgaatttaccagaaataataagcgtagatattagtgggaattatttagacagtgatgatatacatttggagaaccttcctgcagttaagaacctggatatcagtagtaatgaactaactcggctaccgaaaattaacgattttccgcttctgactacaattaatgtaagaagtaataaaatagataggctagaatcaagtaaactagtcgatgtaccaaaacttgcgacactaaatgcggataaacaagccgttacgctttcaaaaacgatagcagcagggaactttacgataccgaataacgttgagaacttagcgggacaaatggttacaccgaaaataatttccaacaacggaacttactctgatcaaagcatcgcatgggcaagcggagaactatcaggcttatcaaaagtttcttatacatttgatgaagtgattaatagtccggcaattgctggcaagtacactggaacagtaaaccaaccaattgaagtcaaggcagtacctgtaattgtagcggataagagtgtttcgtacgcgcccgtaaatgcaaaagatgaggcgacatttttacaagatattcgtgcgtctgcttcggaaaacgcacagattactagcgattatagcgaggtagtcgactttgcaactccgggagattatacagtcacgctacatgctaaaaatgagtttgacttaaaggcagatccggttaccgttgtcgtgcatattaatgatattcaaaaaccacaagtcgcggttaactcgaacgatatttcatttgaagtaggaacagaattaactagtgaagtgcttcttgctaaatctggcgcggtagttacggatctatacgacgaagcaattaagatggaagttgacttgtccgaagtggattcaagcaaacttggaacgtatgaagcgacgataatagcaaaaagcaaaagtggtgcttcctcggatccaatcaaactttctgttaaaatagtcgataccgaaaaacctattattcaaattaacaatccggaaataattattgaaaaaggcagcgaattaacagagggtcaaatcattgaccaagttggaataactgcaacagataattatgatcaagatttaaatatccacatggatttatctaaagtagatacttccaagccaggcagttatgaagtaaccatttatacagaagattcatctggtaatcgttcagaaacagtaacgatcaccgtgaaagtaccagaagctagaatagggaaaattactattcaatatatggatagtgaaaacaatgaattagctgaaagtaatacgattactggcgaagttggtgaaacgtatgaaacacttgctaaagaaattgaaggctatacgctaaaagaaaatccagctaattcaagtggggtttttgaagaaactagacaaacgattcaatatatttacgtgaaagatataattaacccagaatttccagtatacagcgaaaacaacgtaacaccagaactcccaagtaacaataataactcggtcaatgggtccaggcaaacaccaagtaaatcagtaaagaaacagtcaaaggcatactcgaaaattaatcaaatgccaatgaatcttccagaaacaggagatagcacaaatttactctttatttttatgggtgttctgttattagctggattaaccctctctaaagctaaaagaaaaaatcaataa

SEQ ID NO: 1068 - DNA, 783 bp, Listeria monocytogenes-4B
  misc-feature (1)..(end): n can be any nucleotide a,g,c or t/u
gaaggttnnnnggctttcttgttnanngacctcagtaacgggcagcagctgnatggncaacggngtgctggaaagtgtcttgcgcgacttcttttgtaatgagattagaggtataaagagaacccagctcaacctctggaagtttatttattatatccctttcttgtgcgatagaaacattagcgctcccacaagcaatgaaaataatggtaacgattaggatgactcgtatggaaagcttcttcatcagctcccctccttcttgcgtaattagtttctagttgctaaacattctagctgttattttattatagaggagtaagggggtacctcgagccataaaattttaacttcttaaaattttatggcttgcttagcaaagttattcataattaatcgaaaatactagattccctgtatattttccagcctggatattttctggcgcttcaatagccatgactgcatcgccttctgttatttccgaacctggagctagggttaaaatcgctttttctggattgttttcggaaccgtcccaactcagcggtgccgaacattggactgtcgtgtctgccgtattagctaaagttagctcgttgctctcagaaacagacgttgctaatcggtttaatcccacggacaaagctttactccctcgattaatcccttctaccttcaattcagtagcttcatttaaggaaatagaagctggaataatcaccgtgtagttttctacccatttggcgtaaataggtgtagatacagcagcaaggcatgaaa

SEQ ID NO: 1069 - DNA, 779 bp, Listeria monocytogenes-4B
  misc-feature (1)..(end): n can be any nucleotide a,g,c or t/u
gggnaagttgagggtnnnntgactgctttttgggacattccttagtaactgncctcctatgcgagggncaccagngtgctggaaatactaaacccttgcgcttttcttatctcttgcccagggcccgggtctattccttctttcaccgattgaataactgcctgcaacaactcggcttcttcttgcgcttcattgctttcatgtggtaattccccgttaagcacggcggcattgtacgcgttcgttgcttcaacatctactataccattttgcattagcacccacatttgaccacggtacgttttttgatattcgtcaaaattgaatgttgtttcgttgttttttagcgcttttcctaaggcgttttgcatccgaggctatgaggaaggttttgaaagtgaagtaaataaagaatatatactgctacatagagaatgattggaatgagttaactttaaatgtcaaaaatattgaataaaacaaaggacacctttatatattctaaaggtgccctttgttttattaagaatactctataaaaatttcgctatctaagttatcttttaatagcttaattagtttcatcataacctcttgtgtcacattgtccaatatttttacatcgattgtttcaaattgttccaaggcttttttattatctggaatcacccatgggctttcatcataccacccttcatataaatgataataatatgctaaagaaacccatctaccatcaactggactaagttcattcataatactgtcaaagtagccta

SEQ ID NO: 1070 - DNA, 754 bp, Listeria monocytogenes-4B
  misc-feature (1)..(end): n can be any nucleotide a,g,c or t/u
nctnnnnnnnnnnnnnnnnnnnnnnnnnnnnnnnnnnnnnnnnnnnnnnnnngctgggtgaaaggttgtgtggagggcgcattttacgggaaggattacatgttcgtttcactcgcatgcatatttggctcgtaactcgctttgcttcgaacgggccaaacaaaaacacgttcctaaggctcagaaaggaacgtgctctttcaactggtaaggttgaaagacaattgggttgcgcgcccaattgttaaagggagtgttacttatatgttgaccgtgaaatcacgggtacaacctagagataatttatcatattaatacactactgctttaaagattagcaatgtattggaaatattataatatatctgtaaattcgtgtcaattcatatctttataaaaattcataaaatttaatagttatgcttcgtgaaacagcttagtcgctttttttggtgggtttttgtacaataatagtgaggtgaagcgtgatggtaaatgaagcgaaattatatgtttatggttcaacgactatttgtgcgagttgtgtcggagcgccatcctcgaaggaaacagaggaatggcttcgagctgcaattggtcggaagttttcagggcagccgtttgtggtggagtatgtggatatgcgtaatccgccgaatgagaaggctttaccggatatggcgaataaaattgtcgaggacgattatatgtacccagtcattgtggttgatgatgaaattctcccggaaggcan

SEQ ID NO: 1071 - DNA, 764 bp, Listeria monocytogenes-4B
  misc-feature (1)..(end): n can be any nucleotide a,g,c or t/u
ctaacctttttnnnagaactgtcgactcnnnnnnnnnnnnnnnnnnnnnnnnnnnnnnnnnnnnnnnnnnnnnnnnnnaaatcactatttaaaactgcatttccagttaccgaactatggatttcttgcaaaaattcgtcgactgatttagttgattcttttttataagaaatttgggaatcggctgtaataactggtttttcatgaacggttactttaactgttacgggagttgcttttagtcctgcagcgttttgctcatttaatgtcacggtatattcacccggtacatcaagcttaactacttgatcaaaatcgctctttactgctgtgccatcatctgtttcagcatgtacatcttttaaaaattgttcttctgatgttgcatcgtattgattatagtcaaaactttcatccgccgttaaatctagcgtgtggctaatatcaaaatattgatcatatgtcccgctggagatggtgtaagaattcatgcttggtggtgtcgggtaacttccagtcggaaaatcatagcgtgcattatattcaatttcatccagattgtcgaattcttcttttgggacaccgctgactgtgatacccttctccggcctggatagacttgcgctcgggagcgcccctctttggctccttctccgtgttacttcgcgcatcctctttctcccgtggcgctgcttcgtcgtttccctctcccctctgtcctgcccctccgttcctgggccgacattaatacaccatcaaaaaaa

SEQ ID NO: 1072 - DNA, 757 bp, Listeria monocytogenes-4B
  misc-feature (1)..(end): n can be any nucleotide a,g,c or t/u
nctnnnnnnnnnnnnnnnnnnnnnnnnnnnnnnnnnnnnnnnnnnnnnnnnntgattccagtaaaagaaggacattactttgacgggtggtatcttgatcaaaatttcactaataagtttgatttttccttgcctgctgctgtatctacaactatttacgccaaatgggtagaaaactacacggtgattattccagcgtctatttccttaaatgaagcttccgaattgaaagtacaagggattaatcgagggagtaaaactttatccgtaggtttgaattatgaggaaacaaccatttctgagagcaacaagctaaccttgtccaatacggcagacacaacagtccgatgcttggcaccaatgagttgggacgggtccgaaactaatccggaaaaagcgattttaacccttgccccaggttcggaaataacagaaggcgatgcagttatggaaataaaatccccagaaaacatccaggctggaaaatatacggggaacgtcgtattttcgattaagtatgaatgatgtaaattagccagactagtgatcatgtcaaggtcatttggttatgaataaattggaggttacctatgaagaagaaaagagtagtgatcatatccttactactattgctagtaagtgtcattggaatcagtagttattttctattcaaggataaaataaatctgttggatgtagaccattctgccgttgagtggaacgggaaaaaacagaaggatacangtggagaagaaat

SEQ ID NO: 1073 - DNA, 751 bp, Listeria monocytogenes-4B
  misc-feature (1)..(end): n can be any nucleotide a,g,c or t/u
gcgctacagtaaatnncgacgnnccttngtggngnaaccagtgtgctggaaagtggtagtacgatgtggtttatagtatctatatcactcgtattaggagctccctctgtactattttcagagttacctccaccttcatcggttcctccaccgtccccaccagaagatgcatctttactaaactgggcatacaaggttatatcatttgctggcatttgattgttcgtgagtcccattttgttccaccagttttggcatcataccaacctttaaatgtataaccatccttagttggcgctggtggctcttccagtaaaccttgatactctaccgcttgagtagaaatgacgccatctacatcaaaagttgcggtataactattaatactaaactgggcatacaacgttatatcatttgctggcatcgtatcggctgtaaagtcccattttgttccacctgtttcagcatcataccatacgttcaatgtctcaaccctctttgacctggggaaggcggnnnnnnnnnnnnnnnnnnnnnnnnnnnnnnnnnnnnnnnnnnnnnnnnnnnnnnnnnnnnnnnnnnnnnnnnnnnnnnnnnnnnnnnnnnnnnnnnnnnnnnnnnnnnnnnnnnnnnnnnnnnnnnnnnnnnnnnnnnnnnnnnnnnnnnnnnnnnnnnnnnnnnnnnnnnnnnnnnnnnnnnnnnnnnnnnnnnnnnnnnnnnnnnnnnnnnnnnnnnnnnnnnnnnnnnnnnn

SEQ ID NO: 1074 - DNA, 783 bp, Listeria monocytogenes-4B
  misc-feature (1)..(end): n can be any nucleotide a,g,c or t/u
agtctcgccnnnnnnnnnnnnnnnnnnnnnnnnnnnnnnnnnnnnnnnnnnnnnnnnnnnnnttaggcggttttccaatatgggttgtgagggtttcgaacccccgacccgctgattaagagtcagctgctctaccaactgagctaacaacccgttgtcgtattccgacaaaaaatattataccataattcagcgataaaacacagccgcagccactcgctgcggctatatttttcggtattatataaacagaatgtagtggtgcttttgctgctaagacaggttgaacatttgcaatgggtatttagcccattgctgggcgtgtttccacagttgcggccgccatctggggcgcccacccgccattgtggagcctaccccaatcctcacacgattacgcccgaactcccgctccgccccgtccacgccctcaccgccccatggcgctgtggcgtgtctcgcgccgtacgcgtcgcagcgcccgctccacgacccgctccggcgtccgtcctcgccgcgaccccgcagacggttcacgcgcccaccaccccacgcccgagccatactgtaacgccggggcgcgcgccccgcgcgctgtatgtctcccccccgcgcgcccgcgctctcctttatcggcccccgcccccccataaccctctcccgcccattccataaccccgccccgctgaccccgggtgcgaagcgaaacgccgaccaccaagagccgcgataccagctattcgaccaccactccccccacccgcgcgattcatgcaagcattg

SEQ ID NO: 1075 - DNA, 740 bp, Listeria monocytogenes-4B
  misc-feature (1)..(end): n can be any nucleotide a,g,c or t/u
cctttcggtaacnnnnnnnnnnnnnnnnnnnnnnnnnnnnnnnnnnnnnnnnnnnnnnnnttcttcttcaagcattgcatccgtcatgtagtagtaacggtgatatggacaaggaagcatttttagatgtttaacttgctcatataagaagcgcatgtttttaatgttttcaacgacttttcctgggttagcatctggtgcataaaggccgtcgataactttttctgttaattcggtaccatctttgtcgaatacgcggtgccagtgcaagtggttgattccagcaaatttgaagaataagtcttcttctggtttttctaaaacgtcggatgcgcttttcactgctccgattggcacgttacaaagaccgataactttatcccagttgccgtaacgaagaacggcttctgttaccatacctgctgggtttgtgaagttgattaaccaagcatctgggcaaagttcgcgcatatcttcaacgataccaagaatgacaggaatcgtacggaaagctttaaacattccgnccgctccgtttgtttcttgaccgatgatgccgtggctaagtggaattctttcatctttaatacgagcgtctaataaaccaacacgaaattgtgtcgcaacaaaatctgcatcttttagagcttcacgacggtcaagtgttaaatgtgcttcccacccatgcttgctgatttcgcgctccgcccggccttttacccaccattccccataacaca

SEQ ID NO: 1076 - DNA, 776 bp, Listeria monocytogenes-4B
  misc-feature (1)..(end): n can be any nucleotide a,g,c or t/u
ncgctcntgtaactctccacgctgctcgaggggccgacgtgtgctggaaagtacttgacccagatggcactaagattatgattttggagcccgcacaatgagcgatgaatttgcttggatacagaaggaaattagtggtcttaaaggagtccagtattcgtttaaagaagaatggggagcggagcgctatcacgttttggatcagctaatggcaatgcgcggaacgatctatgaagggcagctcgattttaaccttgaagtgcgacggcgcacccggcgagctcgttcctccgccacatcccctgctccctccccgctgttcccttgcccccccctgctccgctttccgccccccttccctattccttttnnnnnnnnnnnnnnnnnnnnnnnnnnnnnnnnnnnnnnnnnnnnnnnnnnnnnnnnnnnnnnnnnnnnnnnnnnnnnnnnnnnnnnnnnnnnnnnnnnnnnnnnnnnnnnnnnnnnnnnnnnnnnnnnnnnnnnnnnnnnnnnnnnnnnnnnnnnnnnnnnnnnnnnnnnnnnnnnnnnnnnnnnnnnnnnnnnnnnnnnnnnnnnnnnnnnnnnnnnnnnnnnnnnnnnnnnnnnnnnnnnnnnnnnnnnnnnnnnnnnnnnnnnnnnnnnnnnnnnnnnnnnnnnnnnnnnnnnnnnnnnnnnnnnnnnnnnnnnnnnnnnnnnnnnnnnnnnnnnnnnnnnnnnnnnnnnnnnnnnnnnnnnnnnnnnnnnnnnnnnnnnnnnnnnnnnnnnnnnnnnnnnnn

SEQ ID NO: 1077 - DNA, 1274 bp, Listeria monocytogenes-4B
gctatccaaggtaacttgtgaaacacttttttcacaaagctcaaacacgttgctaccaaaggcttttccggaggtttcatttgtgaatttctgcgcttaaattagaaaagaaactatgaattaattgtaacaattgtttcggtttttgccttggtaattaatgaagtccatttcttacaataaccatttcaccgtgttgaacagaatgcaccattttctttgtatctttggaagatattaaatcatattcacccacaacagctaaaagtggcgcgcttattttttgcaaatccgcttctgacatatgtggatgataaatcgttaaagcaagttgtcgtttcatccgctcaaaaaagcgactaaatggcgctaaaagaaatgcagccccgtatgcgacacgacaaaataaatctggtaaaaatcgtatttgatttacatgatagtttgttccaataacaacggatgcgatttgacggttcggttgcaatttccccattccgagagcaacaataccgccgtcgctctatccgataactttatatttatcaattttcaaataatcgagtaacgaaagcatatctagcgccattacttcaaaatcaagcggtgtatttcccgcttcacttttcccgtgtgcgcggctatctacggcgattacttgatgattagtagagaggtcatcaatcatccgctttaaagaacgatgattttgaccattcccgtgaataagcaagattggttcttctttaccgattatttgataaaacaagttaattccattgatttctgcaatcatatagcatttctccttgctgaaaacattttctacccttattttacacctgattatacttgatttcctataaaaaagcttccattttcattaaaatacgcctgattcttttaaaactagaatcaggcgcaccgtttatttcataagtcttcggtgaaactgttgttggggcatatctgcgttaatgattttcttttgcacagaatgtttttccgctaaggggtggcttttttcatgcaccacagcgtctttgatttttggagtttcgagcacttttgaggcctgactattttttactttcatcagcattacctcctcttccaaatcattacccctctcgctatttttaaaacagaaaaaactccgcgaaaatgttacttttcgcggagcttagcgttttattcaatcaacttatttttttaagttgtagaaagtttcgttaccatggtattcagcaagatcagccaaattgtcttcgatg

SEQ ID NO: 1078 - DNA, 685 bp, Listeria monocytogenes-4B
  misc-feature (1)..(end): n can be any nucleotide a,g,c or t/u
atgttgcgattaagtcgatggttgctcatattattactattgatagtattagtggcattttcagcatgcgtggacagcgggaatggagatgtttccggtgtgccggctaaaagggaaaaacagcattttcctccaaatgatacgaaaaaaggatggatagaacttcttgccacggatggaatttcaagtcaaggtgatctgccttgtgtttatgaagaggcggaatctgtagaaaaattggaagttcatatgaaagaattaagtacggtgagtttgacctatatttatattgatggctacatcgtccaaatggaacaaggtggcggcgaactttcctttcaaattcaattaagtaaagcagaattaaaaagaggaattcacgaattaacggccgtgcaatatcaagaaaataatcctgatacaaacaaagtggagcttttaaaacgtgctaattatgaagtgaaataaaaaagactaataaacaattcataaccatatttttaaagagaatgtgaaaaatgacattctttttttgtgctattaatacttacaaaagaaagatgacgatattgtaagtagcttttcgcttttaaaagaattaaaatactagtgtttagggtatactttccagcacatggtggcccccgagctgctgggnagtgaccaaatgttgaaaaaaaggtac

SEQ ID NO: 1079 - DNA, 702 bp, Listeria monocytogenes-4B
tggagaacatcataatgacaacgagtgctcctgtaaccccagccccagttacacctacaatactccacataaagtcaggagtgaaaatcagcatagaagaaagtggttctccttttgcaagagctgctgcattcgcatccacgttttggaacgctacactgagccaaactggcgccataacagaatagccatgaataccaaaccaccataataattgttggataaagataattaacataatacctggtaatgtgtttactagggatgtcagtggagaaaatagtgtttgaattaactcaactacacgaataccacttaatgtttctatcccaaaacttaaaatagcaataattaaaacagagaataaaattggccataaattttcaaaagaacgtaaaatcggcgttggaacaccttgtcctaaattaatcgtgaatttcaacttattcttaaaaatgtgtaaaatttcgacagacaataaactaattactaaagcaacaaaaatcccttcaccggctagatacgctacatcgctcccgcctgattcaagtggtcttactgcaacgacaacaaaactcattaaggctgttacaatcgccccgatatcccataaattgcgttccttcgcatagtaatatgctacaaaaaccgccacatatacggacattaatccaaaagtggcaaaatatattggagaagtga

SEQ ID NO: 1080 - DNA, 679 bp, Listeria monocytogenes-4B
tagctctattctgtggatacgcctctaaaatacaactttcgcgccaactctttttctaaagatacttgcatgctataattgtgatgcaaataagtttatggtggtgcaccagcctttttcatccagaaagtaggtggtgtttatgttgttttttaggcgttacctggaaaggataaacgtgtgactgttttcgagagtcttacgctgatgattgcttttgcagtcttagtcgtaacaatcatgaacagcaaaaatgacaaaaaataaaaaccactcataagcctgacagctagtggtttttaaataaatcatataaaaggctgtcaccatcttaaatggtgtttgcgagagagtcatgttgtcgcatggctctcttttcatttatatagtaacacatttacttattacttgccaattttttccttcctaacagatagtatctagttcctagaggataactgctttttacatcgttttatttaaaaattggcgtactttttcttcgtatgtttttggatctatcgtgaatgcttgaccgtgttctgctcctttgacaatccatttttctttatagctattggtagctttataaagttggtctaccatatttgtagggacgaaagcatcagcatcaccgtggatgtaaaaaatgggtacgtctgttttagcgaccgcatca

SEQ ID NO: 1081 - DNA, 833 bp, Listeria monocytogenes-4B
tgtaagaagccttatcctccgctagcacttctcctttacgatctaaaatggagccacgctttgcttcgagaacactgcttttcaaatgttgtttagatgcttttgctgcaagaggtaccccatttgcttctcccgtaatttgcaaataaagaaaacggccagaaaccaagagaaagagaattgtgaaaaagataaaaagcacaagagctccccttctcatgttacctatacgccgtttcattgaccatctaccactttcacattatcgccatcaagttttagccctttttctttagcgattttcaaaatacgttcatatctccctaaatcttttacttctacttttaagtcttcatttgatttttgttgttcgagaattttggtttcttttgtttgaatttcttggttcactgtgtaaatttgcgcttgtacgctaattatacgaaaagcaacaactaaaacaatcgcaagcgcaatcgtgatgattactttttctccaagtgtcatttgaccacgttttaggatttgttttttaggttgttccgcttctctatgtactctatttggctcgagattcgatttataggcgacattgctcacattttttcaactcctgctatttgataattttttcgatcacacgtaattttgctgaacgcgctcggttattttgttccagttcttcttcacttggtacgattggttttcttgtcgcaagtttgaaatctggtttatattcatctggaatgacaggaagacctggtggtaaatctggtccttttgtcgcttcttggaataagtgttttgtaatgcggtcttctaaagaatgaaaa

SEQ ID NO: 1082 - DNA, 768 bp, Listeria monocytogenes-4B
gagttaacttgtgggaagaactgcagttacgacccagcctgttggtataccggccgccagtgtgtctggaaaaaagaagcaagtcctacttgaactgtcatccttttttgtgaattaagaacaattaatggccacatgaactggttccagccagcctggaatgtcattattccaagagtagctaatgcagttttagcaagcggcatatagattttccaaaagattttaatttccgaacaatcttttattcttgcagcttcagaaagttcatctggtaacgtttcttttttttgtttcatgaaaaagatcgaaaatgccccagcggctcctggaatcaaaattgcccagtaagtatttataaaacccataccaccatgaccagtaatatcattaccgcccatcaacgggaaattctttaatactaagaaagatggaatcattgttactactgctggaatcatcatgcttcctaaaaatgtcataaaaagaccttttttccctttaaaaggtagcttagcaaaagcataacctgctaatgacccgaagaataaattagtgagcacaccaccaactgcaagtattaaagagttgactaggtagcgggcaaatggggttgtactaaaaacatctttgtaattatcccaagtaaacattttaggaattaaattcatactattacttaaaatttcacttgttggtttaaaggaagtagatactgtccccatatgtgtggaaacacagtcactaaactaattagaagtacagcaa

SEQ ID NO: 1083 - DNA, 759 bp, Listeria monocytogenes-4B
ctgataggcaacctagcatgcatgctcgagcgccgacgtgtgctggaaagtatatctttactaatgaaaatatcatcttcattagaccgttccttttacctagttccctctaatcccggctaacaaacaattgtcggtatatctttttctcagaagaacaaaaatgcttttatcggagcggttgactaaaaaaagactttattctaagggatacaatgtagttattttccaatgtggcgaattagacataatttcacttcataaaccggaaatacaactcatttcactactatttttagcatcctgataatagtatgctaagctcacaagattatttctattggaggaaagaccacttaatgaataaatattttaagaacttagcaactgtattatttactgtctcccttttaactacttctattactgccttacctgcgatggcatccgcatatgaagaaacacataatgcctcaactatttatattagccctttagatgcgccccatgttggtgacacgaaaatcactggaaaaaccacagcattatcatcttttgccatagcaatttataccccagaaggcaggctcactggaacattctttggcactaccaatgcagctggttcctacgctgttgattcatccgattccacttatcctgatcctcttggcttctaagctcgtggcgctgccctcccccacgaagggggccctggttcgcctcctgccccacaccatagccattcatacaaacaaa

SEQ ID NO: 1084 - DNA, 619 bp, Listeria monocytogenes-4B
  misc-feature (1)..(end): n can be any nucleotide a,g,c or t/u
tcggtacaagtagctcacgcgcggtgaagttctcgactgttttcataatatacgtatgaactgggtggaacatcgttagtttatccacattttcgagtgattcgtccgctaaagcaatataatcgccttccgctttcaagccatcttcattcgtaataatccggtaaactttctttttaccaggagtcgacactttttcggtgttactcgaaagtttaatcgaatcttgtaaaatatcattttcatcagcaattgccgccattttgtaaacggcacctaatgctggttggtcgtaagcggtgattagttttgtgccaacgccccaagaatcgatttttgctttttgcgcttttaacgataaaatagtatgttcgtctaagtcactcgaagcaaagatttttgcttctgtaaaaccagcctcatctaacatttggcgtgcttttttagataagaaagccatatccccgctatctaaacgaatgccgataaagttaattttatcgcccatttctttcgccactttaatcgcatttggtacgccagattttagcgtatcgtatgttcttactagaaatcgatcaatgctntcgacttactttgcgacaccccaaatatccgg

SEQ ID NO: 1085 - DNA, 698 bp, Listeria monocytogenes-4B
atgcagcagcgaaattagtagaagcagtccttagcattatgaaataaatcgcagaaaggagcgaataaaatggctgaaaataaacgagtaatttcaattgaaaatcgcataccagaactcaaaaaataccgcaaaaaaaaattagtaagacacttagccattttaatcggaatttttgtgattttgatcgccattaccctctatttcctctccccactcagtaaattagataaaattgctgtaagtggtaataagcaacttacagagaatgaagtaagaaaagaaagtggactcgaaattggtgagtttgtcatcgggataagtaatggaaaaactgagaataccctcaaaaaaaatacccttattaaagatgctaccgtttctaaagaagggataaatgatgttcaaattaatatcaccgaatttaaaacgataggctatcaacaacaagatggtaaatactatgatgtgctagaaagtggcatcatgttaacggatcaaccaagacaattcccaattggaaatgatttgctatttcaaaactttaaaaacggtaaaacacttgagaaaatggtagcacaaattaataagttaccaaaagatgttgttagttctatctcggaagtgatttatagtccaactaaaactggtaaaaaccatattaaattatatatgaacgacgggaatcaggtttccgc

SEQ ID NO: 1086 - DNA, 830 bp, Listeria monocytogenes-4B
  misc-feature (1)..(end): n can be any nucleotide a,g,c or t/u
agaaattagtgtagcagataaattcgtgacttcagctgagaataagactttgcttagaaacgtggagcggcagttgttttacgtttgcgcagaacttgcaacagagcacgaagcatccctcgctagcaaaattattattacagaaaacgacatcaatcaacttgaaaaagtcattgatgattacactgcaaaattgccaaaagtcgatagttttgttcttcctggatcaagcacagcaggagcatttcttcatagcgccaggactgttgctaggcgtggtgagcgattattagttcgtttgtcagaacaaacagctatccgaaaagagttattaaaatttgtaaatcgcttatcggatttcttgtatattcttgctagagaagaagatttcagacaaatgctcgataaggcaaccaagctcattgttgccaaatacttagagcaaacgggccaagaaaagtcagttacatgcgatttgtctttttccttttgtgaaaaattaatgcaccaacgtttgcatcgtttcagaagaaattggcgttccagtcacacttgctattgtcgatgcgcacggtaacgcagatttaataaacggatggagcacgctcttttagtaagtgcagaactggcaacgaaaaaagcatattccaccgtaagcgatgaaaacaagcacggacaaattaacagaagcagttcagccaggagccccactttatctattagaaacactcacagatggtgatattgtaacctttggctttccgagcacactgtcggccggttctagccatccaggctcggtgccganactggagcctttnaaagggcag

SEQ ID NO: 1087 - DNA, 756 bp, Listeria monocytogenes-4B
tcgctagaaaccggccgccagtgtgtctggaaagccataccttcttggaacacatcgcgttccctcttagacattttgcttaaatcatgttgcttcactgcttctctttcatctgcggcagaagtcgctgcgatgataccacgaatttcttttttgattgtttttggcgtaatgccatgtttttcattatattcaatttggattttacgacggcgttctgtttcgccaatagaattgcgcatcgaatcggtcattttatcagcatacatgattactcgaccgttttcattacgagcggctcgacccattgtttgaattaaggaacgctcggaacgaaggaatccttctttgtccgcatctaaaatagcgacaagagatacttcaggtaaatcgattccttcgcgaagtaaattaattccaacgataacatcatacacaccaagtcggaggtcgcgaatgatttcgattcgctctaacgtcttcacttccgagtggagatattgtactttaacaccagcttctttgagataattggtcaaatcctctgacatttttttcgttaaagtggtgattaaaacacgttcgtttatatcgacacgatcattaatctcatccattaagtcatcgatttgtccttgaatcgggcgaatttctacgattggatctagcaaaccggttggtcggatgatttgttcaatgacatccggatttttttctagttcataagggcctggtgtggcggaaataacataattt

SEQ ID NO: 1088 - DNA, 710 bp, Listeria monocytogenes-4B
atgaaacgtggttaattccatatagtgatttgctgacacttttacttgcgctattcatcgttctgtttgcctccagttccgttgatgctaagaagtttgaacaaatgggaaatgcatttaagaaaattgtagaggaaggcgcggcaggcaatcaagcatatgtatccaaagaaaaaggaccagatgatcctaatgtgaatgcagtcttgaaggcgatggaagagcaagataaaaagaaagaagcaaccgaacaagagaaagccaaaaaagcagcagcggccttacttaaaaagcaaaacgaagaaaagattgaagcctttaaaaaacaaattgatagttatattgcagcagaacatttgggagcaaaaatgacaacgaaatactcggatgaagggcttttgataactatccgtgatgatattttattccagtcaggaagtgcagaattaactgcaggaaaacgcgagattgccaaagaaatcggcgaactttttgcgcaaggaaaaggaacgatggaagggattgtttctggacataccgatgatgtgccaataagcacctgaatgtactcttgcaactgggaattaagtgtaatgcgcgccgttctttttctggtagtggtgcttggggaaaattgtcaatgctcctcttctagttcattgcttgtggtttccgtcaaatcttacctgataagaaagaggttcacgccg

SEQ ID NO: 1089 - DNA, 845 bp, Listeria monocytogenes-4B
attattaattatagcgacaactccgtcaagttacaaaatgatattagagaactcttagtcgattattctcgcgcaagtagcaatttaatcgaagtaagaattgtagatgacaaaggaaaaattctcggcacatctaatttaaataaccaaggaattgttggacaaaaaagcaacgatccacttgtaaaacgaacattatcacttggaacgacttctgaggacaaaatctataaagacgaatcgaataaaaataaccgcgtttgggtgaacgtatcctccatcaaaaataaaggccaagtgataggggctatttatcttgtcgccgatatcgaaagtgtctataaacaagttgatgatattacaaacattttcatcacagggactttgattgcgatgattattacagccgtccttggaattctattatcaagaaccattactaaaccaattatcgaaatgaaacgtcaagcttatgcgatggctcgcggcaactatagccgcaaagttaaagtatacggtgtcgatgaaattggtgaactggctgattcttttaatacactaacaaaacgagtccaagaagcccaagcaatgactgaaggggagcggcgcaagttatcctctgtactcgcatatatgactgatggcgtaattgcaacagaccgccgcgggaaagtaattctcattaatacgccagcagaaaaaatgcttcgcgtgaaacatgaaagtgcgaatgggcgctcgattattgatgttttagacatcggagacacgtaccaatttgaagatttaatggaagtagatgggtcactaacaatggaccgtagtactctcgacaaccatacgtg

SEQ ID NO: 1090 - DNA, 1239 bp, Listeria monocytogenes-4B
cgcaacgtgtgctggaaagacacttacaacgataaagttattacttcttatgaaaatagcgaaatgtactgggatgctggtggcggtacggcctatgcgaaaaaatatgttttagataataaaacaaatgcatatttaagtggaagccaatataatgtagctactcctgatgcagacggtaatttgtcagttggctattaaattcgagtaagaagtgcctatgaatttgataaatcatctataaacattggagatattattgctgcagataattttaaatctatctctaatgtagaagtaaatggttatgaggcaagtccaaacacgggcttccaaattgacggggaacttgaaaatcctgtaccacttgctgcggataagtatgcggtagaagcaaaagcaactgcaaacacattagatatcacaaacccagttgacattccacaaatgcaactatataacgttcttttcaaagtgaattatcaaaaagtgaaatatggcgcgaaactagttaaccaagcagcagggtcagaagttgcaactgttgttccattaaacttaaatcttctaaaacaagatgatataagcaaaacagcattgacaggctatgaattcaaagcttattatgcagatgaaaatggaaaagcagatttaacgaaaccggtcaaagatacaaatagtaatgaaattgttatgacagactcatccggcgcagcaaatttcatcccgacaggttataaaacatcttctaaaaatcaagaatggaaagtagttcttgttgaaacaaagacaccaactggttatgaatcaaatgaaaataaagagtatccagttacagtgaaaagcgatgcgaatggcaacttatccattccagccactacagaaacaagccttgaaatcaccaataatgatcacggagcaacaacagcgactattgacaaccatgcggatgtgaaaatgattgatgtgaatggcgcgaaaacttggactggtgacacagaagcagatcgcccagattccatcgaagtacaacttttgcaagacggtgtggcttacggtggttcaattgctgtgacaaaagcggacgactggaaatgcgaattcgaaaatgttcgcgaaacaaatgcacatggtaataaatccacttgtggcggcggggaaaatccagggtctcactatacaagcgctgacacaggcgttgctttctaccaccacttaataaaacatcgtgcatcggtg

SEQ ID NO: 1091 - DNA, 914 bp, Listeria monocytogenes-4B
aacttgtcttctgctcgagcggccgacagtgcgctggaaagaacggttgcccagtggatgcttgaaaacacgccaattttatccgaacaattttatgactggatgacagacattctgccaaaataaaagaaacattcgataccagatgtatactcttagccaattttggataggatttctctggtattttttaatgattttacagggaggaataaagattgctactaataaaaaagaaattattcgtttactcggagaaattgccacttatatggaattaaaaggagaaaatagctttaaaatatctgctttccgcaaagctgcacaagcaattgaattagatagtagaagtttatctgaaattgatgattttacgaagattagtggcatcggaaaaacaacgggcgaaattatccaacgttatttagatagcggagaatgtccagaacttgaggcgcttaaaaaagaagtaccagctggtctcgttccacttttagatgtgccagggctaggaggcaagaaattatcgcgtctttatcatgagcttggtgtggtggataaagatacattactccaagaagcagaaaatggccatatcgaagcattgaaaggttttggtaaaaagtctgctgaaaaaatggccgaagcagtgcgcgaaatgggtgagcgccctgatagatatccgctaaatgatgttttaccaatcattcaaaaagtagaagcttatcttgcggatattgctccaaaagaaacttttgctaaagctggaagtctacgcagattgcgggaaacggtgaaagatttagattatgttattgcgacggaaaaaccagaagaagttcaaaaagcattactggcatttccattaattacggacgttattggagctggtgaaacaaaagtaacagcagtat

SEQ ID NO: 1092 - DNA, 640 bp, Listeria monocytogenes-4B
acctaatgggaactccccctgcatgttcgaggggccaccagtgcgctggaaatactaattggacttttttctaaattaggaaatggcttattagagccgcttgtgatggagtcagacatagacggagttgtattcgggtctggcgatggtgttttcatagctttaataggcttcgttggtgccagttggttacttatttggttgcttttatttttggcagcagctcgatctggaatttacgacgaaaaccgctatttgttttttcaaacagaaacacctatttggaaaatactattgaataaattaatcatcgtcttaatcgaaacggctattctaacggcgggggttattgtgattataattagcttggcgataataggtggcgcggagatttctttttcagtaggactaactatcatttttgacacttttttagcgataggacttaatactttttctttcgtctgtatcctttttctagcaacagctttgagtatggtgccagtcaatggtttccgtgttggttttattggcgcattaatctactttgtactaattaatgcaattcaagtatccatcggaacaaattttttatctaaaagtagctcagaaatccatttttattattcccttttttcaa

SEQ ID NO: 1093 - DNA, 801 bp, Listeria monocytogenes-4B
cgacgtgtgcttgaaagtcctaattttctgctaaaatataatctgttgaaattgatggtatagtcaaaaacattcaaacatcctcgaaacattggatatcaacatggagaaatacccaagtccggctgaaggggacagactcgaaatctgttaggcggtgtatgccgcgccggggttcgaatccccgtttctccgtagaaataaaaaggttcacgcttaaaaatagctttgattgctatttttagacgtgaacctttttgctgttacttcttcaccgcaatactcacatacataccctcatccaactgccaattcttcaccacttcaaacccaaatcccgcaagctcttccttcaatttctccgcagaaatctgaatttccattggtgggccttttaaatcagtccctttcgtgtcaaattccaaactagcaaagtagccgccagtcttcacaactctactcacttcgcgcaaaacatctgcgagcgaatctgcttcatgtaacacgagcgatgcgagcacaacatccacggaatttgcctcaagtggaatatcatccatgctggcttctaacgtttctacattagccaaacctgcttccttcgcttttgactcaattaattccaacattttcgcatctaaatctaatgcaaaaactgtattatcaacgaattttgcagctggaattgttaaaaatcctgttcccgctcctaaatctaaaatacttgctgtttttccgattggcattgcctgcaaaaatcctctggcgacagcacttcactccgctctggtcgatccaaat

SEQ ID NO: 1094 - DNA, 938 bp, Listeria monocytogenes-4B
agtgcgctctatgtctgaagaggcacgcaacattatcaaaaagaaattacccgtatcgttagtggaatagaggcaatgtttggcgttacttgtgaacttgattacaaaaatgattatcctgttttaaataatgacgaagctttgactgattttgttgttaaatctattaaaggggcgaaaattccagaaattacagatgttgtgcgctgtgaaccgcaaccaccatcagaagactttgcttattatgcaaaagaacgtccgagctcatttttctatgtgggagcgatgccggcagatgggcatttttatccgcatcatcatccaaaatttgacatcaatgaagattcattattaattgcatcaaaagccatgggagcttgtgttgtagattacttaaaaggagagaataactaatgacttcaacagcgtataaaggtacaaataaacttattgttgggattgttttcggggttatcacgttttggcttttcgcacaatcaatggtgaatatcgttccggccgtgcaatctgaccttggaatttcctctgatttacttagtattgccatcagtttaaccgcgctattttcaggtatttttatcgttgtagcgggcggtatggctgacaaatttggtcgtgtgaaattaacttatatcggacttattcttagtatcatcggttcactgttacttgttgtcactcaaggggcgacgttacttattatcggccgtattattcaaggactttcagctgcttgtattatgccagcaaccctggccttaatgaaaacttattttgaaggggctgatagacaaagagcgcttagttactggtcgattggctcatggggtggatcaggtatttgttcattcgcaggtggagctatcgcaacatacatgggctggcgctggattttcattatttccatcgtattcgca

SEQ ID NO: 1095 - DNA, 713 bp, Listeria monocytogenes-4B
  misc-feature (1)..(end): n can be any nucleotide a,g,c or t/u
acgtacggaaatgcaatatgaattgcgcgatttgcgaaagcgtcttggaattacgtttatttttgtgacacatgatcaagaagaagcacttgcgatgagtgatgaaatttttgtgttaaataaaggcgaaattcaacaaagtggtacgccaattgatatttacgacgagccaattaataaatttgtcgcagattttatcggcgaatcgaacattgttaatggcaaaatgatacaagatttcgaagtggaatttgtggaaagacgttttgaatgtgtcgaccaaggtttccgcccaaatgaagtcgtggaagtagttatccgtccggaagatttagagattacttcggctgaaaaaggtcaactgcaagtaaccgtagactggatgcttttccgtggtgtgcattatgaagtaggttgtgtcgacactgatggaaatgaatggcttgtgcacacagcgagaaaagttcgggtgggtgataagattggttgggcgggtgaaccagaggcggttggtggcgtgcgtggccggggagcggtggaggaatgggtggggcgggtgcctcgctcccgattatgtgctgtggtgaatccgctcccgcctgcggttcgtgctggggtgctggcggctcgtcgcgcctccggcgtggcgggggtcccgtcngttgtgtgtgctttgtcttttgtttctgttgacgctgaaaaaaataaaaaaa

SEQ ID NO: 1096 - DNA, 772 bp, Listeria monocytogenes-4B
tgtttggcacttgcagcatgctcgacggccgccgtgtgctggaaagtcattataaatgatgccatactaagatttcaagaataaattaaaaccttacaagtaagcgctttatgtgtttttctggtaaaataagattggaaagaaggtggaaaattggaacgttatgatagacagatgcgtgttaagaacatcggaaaagttggtcaaaaaaagttactcacgaaaacgattttgattgttggcgttggcgcgattggttcatatgccgcagaaatttgtgcacgaatgggctttggaaagttaattttaattgatcgtgactatgtggagctaagtaacttgcagcgccaatcgcttttcacggaacaagatgcattagacaaacaagcaaaagcgtatgcggcatccaaagcgttacaattaattaatagcgatattgaaatcgaatatatagttgatgatgcgaacgcaacaagtttaacgccttatgccggagcaattgattacatacttgattgtgcagataatagtatgacgcgcgactttgtaaatcagtgggtggtggaggcatgaaatggcttggatgagggacctggggggctgggaatgatgcgaatctgatgcgcatcgttaccgcccgctcttgcctggtcgccccgttgtcccttgcgttgttgcctgggtgttgctcgcggttcgtcggtattttatccctgttgtctggcgctctttctctctttgcgcccttcccgcaataaaataaaataaaaaa

SEQ ID NO: 1097 - DNA, 724 bp, Listeria monocytogenes-4B
gctagtctcgtttttccgaaaattttaaaaacgtttctagcggattttccaaagttaatggtgaatgtatcggtggatgatgcgaatacttgtagccaaaaactcattgatggggaaattgattttgcgatttgcggagaaccagagctaattttggagaacttctattttccatttttccatgattcgttagatttaatcgtctcagaaagccatccgttagcttcacgtacttctgtggagttacgtgatttacgcgatgaatgctttatcttcacaccggcaaattgccccatccgcatccaaatcgaacagcatttaaaacgtgctattggtagtgattacaaaaaaatggagctcacaagtagtatgtcacataagtattttgttcgtgaaaatgttggtgtatctatctttactagcaccgcgcactcagaactacttgatggcacggtccgcattccgattgaaaatttacccatctcaccgccaattggacttttaactaaccaaaaagaaaaagattttgacagcacgacgaaagaacttatcgaccggattatttattattttgatgataaaaaaagacagctaggctaaaaaattagcttaactgtcttttttattaaaattctaattgcatattcgcctctatcgcaagtaaattatcacgatacactttcatttctttccgcgtaatcgtaccttcgtacagtattgaaga

SEQ ID NO: 1098 - DNA, 980 bp, Listeria monocytogenes-4B
  misc-feature (1)..(end): n can be any nucleotide a,g,c or t/u
cgccagtgtgctggaaagtttgtatccgctccaagtgaagttattatgctatgcggtggatttatggcggaagctgggaaacttaacttctggctcgttgtctttgctggtattgctggtaacttagtcggttcactgattgcttactacatcggtaaattcggtggtagagctttagtattgaaattcggaaagtatatattcttaaatgtgaagcacttggataaagcggaattatggtttggtcgttacggagcaagagctgtatttttcggccgagttttgccagtcatccgaacatttatctctttaccggctggaattgccaaaatgaatgtctggaaatttgttatatatacgattttaggctgcattccgtggaatatttttctgacatggcttggttattcattaggttccaattggagcgttgtggaaaaatatacgcgaccaattagctatttaatgttagctttggttattgccatcgttgtctaccttgcttacaaagtatggaataaacgcgctagaaatgcaaaataaaaagcatgtcttgacagtttttgtcaggacatgcttttttaatttttattcttcgtcttcgtcagctaagaatgttgcaaggatttcttcaatcatatcccattcttcatctgtttcaactggtttaagttgaccttgtttgccttcttcatcttggatatagctagatgcaaggatttcgatttcttcgtctcaccattgccagccgggaaatataaaacataagatttgtcaaagtcttcggaatcaaaatcaaaaagaatttcgtaagcttcttcttttccttcttcgntttgtgatccacaataatattttcttcttcatgattatggttatgttcttctgccattaaattcacctcaaataattagtacttccagcacactgtgnntcatccagcatgctgcgaagtaaactcaggccngttcaaaaggtaa

SEQ ID NO: 1099 - DNA, 768 bp, Listeria monocytogenes-4B
aactatggggcacctacatcgcatgctcgagcgccgacgtgtgctggaaagtaagaacaccatgtttttttattcttttaaattgcgcaatttcataaggcatttccaacattgttaaaatatctttttgtttatctcaatataacatttaattaaaataaagcgatgtagtgctttcatgtcatttaatattcccaagtaaaattgaactaagtgacctataggagtcaaacttattttattgcctgttaacacttttatttctattaatccgtctgtattgagctttattttatttttagaacctagcagaaaaaccaaatattgaaattcatcaaaaaaactttttatgttttgtactgttttaatgtaatctatattgtttttcgtcgttgacaccccgttttactttaatactatcaaaacggattcattatttgttatgctaactgcgtaaaaaagcttcgaaattagtaataaaactaatttcgaagcttctctaatcaattcacttcaatgtgtacaaatttccgtggaacagcaattacttcttacaattctacgctattcattgcgtcttttggtgtaccaaagaaataagttaaaatgaatccacctaaatatgctgcaattaatccgatgacgtaagaaagccattcattattcgcgattagtgggataagtgcaactcctgatgggccgattgcaattgctccgacgttaccaaagtagccgattactgccccaccgataccgactacgagacag

SEQ ID NO: 1100 - DNA, 724 bp, Listeria monocytogenes-4B
cttaattagtttctagatgcaaactttctagctgcaacttaattatagaggagtcgaaaagcttttccggccataaaattttaacttcttaaaattctatggcttgcttagcaaagttattcataattaatcgaaaatactagattcccggtatacgttcctgcctggatgttttctggcgcttcaatagccatgactgcatcgccttctgttatttccgaacctggggcaagggttaaaatcactttttctggattagtttctgacccgtcccaactcagtggtgccaaacattggactgttgtgtctgccgtattggccaaggttagcttgttgctctcagaaatggttgtttcctcataattcaagcctacggataaagttttactccctcgattaatcccttctactttcaattcagtagcttcatttaaggaaatagaagctggaataaccaccgtataattttctacccatttagcgtagatagttgtagatacagcaacaggcaaagcccaatcaaacttattagtgaagtttcgatcaagataccacccatcaaaataatgtccttcttttacaggaaccacttcttcccagtattccccagaaactttattttgtaccttttgttcctccgcgtcttcaaactgcccacccatggcacgctcgcaaggaaaggaaagcaccttttctgtagccagttttccaagacacagtgcag

SEQ ID NO: 1101 - DNA, 1178 bp, Listeria monocytogenes-4B
gatttaaccaataaaaaaatccttacacgctcgagtaaggtgatgcttgttttaggaattattttaattgcggcaaacttacggacaccaattacctctgtaggtccgttacttggaatgattcaatcagatttacatttaaccaatacgatggctggattacttacaacaattccgctacttgcatttgcaggactatccccgttcgtttctaagctaagtcgagcacttggtatagaggtattaatttttgtagcactattgacacttgtacttggtagcttacttcgaccttttggtggcgaactcaatttatttgctggaacgtttatgattggtcttgctattgctgtcggaaatgttattttgccaagtttgataaaaaaagaatttccatttaaattgggtctaatgactggagtttattccatttcgatgaatttgtgtgcagcgattgcagctggcttaacggttccaattgctatgaacaatcgctttagctggcatggaagtatggttttctgggcaattcttggaatcgttgctttagtcatttggcttccacagttaaaatataatcaacgctcgacggaaaaaattgcaactcacttggttacaacttcggtttggaagtctccttttgcgtggaaaatttctttatttatgggttcgcagtcagcaattttttatatttcgattgcctggttaccaaatattttggcggaccaaggattatctagtacttctagtggcttaatgctctccttaatgcagtttgcggttatgccgattacgtttattattcctattgttgccggacgaatgaaaaatcagcaattactagttggaatttctattttattctttttaattgggatttttggcattatgtttgcttctggtagcgtgcttattttatcgattgctatcattgtatacggaattggttcggggatgtcatttagtttgtcgatgatgttctttaatttgcgaacaacaagcgctaccgaatcagcggatctctctggaatggcgcaatctatcggttacttgtttgccgcttcaggtccgatattatttggtaccctgcatgatgcgcttggtagctggcaaccaaccttatatgttttagtcggtattaccatgcttatgttatactgcggcctagatgctggaca

SEQ ID NO: 1102 - DNA, 718 bp, Listeria monocytogenes-4B
aactagatgataaacaaaaagaaatcttgcgagaatttgcttccactactggagacaaagtagacgaacaaacatccggattttttgacaaaatgaaacgagcttttaaaggcgattgatgaacgtagaggtcgatagttgtgcgagaagcaaccatcgaccttttctacatacaaaaggagtgttaaaaatggaatggtcagaagtagaagtccatacaacaaacgaagctgtagaaccagtagctaatgttttgacagaatttggtgcagcaggagtatccattgaagatgttgctgattttttacgtgaacgagaagacaaatttggagaaatatatgcactaagacgagaagattatccagaagacggcgttattattaaagcttacttcttaaagacaacagaatttgtagagcaaattccagaaattgaacaaacattgaagaatctgtctacttttgatattccgctaggtaatttccaatttgtcgttaatgatgtggacgacgaggagtgggctaccgcatggaagaagtattatcatccagttcaaatcactgacaggatcacgattgtaccaagttgggaatcatacacccatctgctaacgaaataatcattgagctagatccaggaatggcttttgggacaggaacacatacgacaactcaactatgtatacccgcactgagcgattatttacaaccaggagatg

SEQ ID NO: 1103 - DNA, 1216 bp, Listeria monocytogenes-4B
gttttgttttttttgcgacaggcgcggggcgaggcggggggaagcggaacagaacgggggcgggggggggggggcggagggaggcgagggaaggagcgcaagcagcggggggagacgcagagggaggagaaagggaagagaagaagaaaggggagggggaagagaaaaaggggggccggcaaggagggccttcctttttcgtgaattatgaaggaaatcgaccatcggaaactgtgatagaaagcgaagcacatgcggattatgcggcaatagccgtttcaaccaagtcttcggagatgacttttgttccagtgttattatctaatatattaaaggcaagaccttctgtatcataatcaaaaacatcaggtgcatgaatggaacaagcgccacaagcaatacaagtgtctttttcgacaagacaatacttcaattttctacgcttcctttctaaaataactatttgcagccagattttttctttttctattgtaccatattttgaaaaagtttttttcggaaaaattaatgtagaacaagtgtttctgtgttatgattatggtacaaaaaaaggtggtggacatgtcttggataagctagataactatattatgacaattttagaaaaaagtatcacacctagaaaattaccatttttacatactgttttagctggaagaagaactggacaagctggtcaagatatccatctttttcaaatgcaacatttatttggactagtgccaaatttaaaagcaagctatttagaaaaacgaatttcggaattagtgcaccaaggtagcattctttctactgaaaatggttatgtgacacaagggcaactagtagctatgtttgaaaatgattacccaaacttccaaggttttacatttcaagggcaagcttttgctttttttgcccatttgcgactcgcagttcaagttgttagtaacattcatcatcatgaaagctattatttaccagttattcgtgataagaaagtccaacaatttattaagcattggttgaagcaccgagataaatctaatttagcgaatcagttatacggtgaactcgttgcatggatgaataaattagcaggtgctggaccagcgtccttagtggaacgtggtggtgggggcgaatgaatgggctgtgctgcagaacacatgggctggaagatgtggggggggagagggggacggcggttgggggg

SEQ ID NO: 1104 - DNA, 703 bp, Listeria monocytogenes-4B
tacggcatttacagcagaagcgatggcgacggcggtggagtctgatccacctcgtcctaatgtagtaatttcaccatctgtcgtgaaaccttgaaaacctgctacaacaacaatttgtcccgcatcaagcgcagattcaatacgagcgctatcaatatcggcaattctagcattactatgtacggcttctgtttcaattcccgcttgccatcctgtataggatatagcatcgtgccctttttcttttaatgtcatcgcaagtaaagcaattgtgatttgctcaccaggagaaagaagcatatccatttcgcgtttatctggtgcctcgctaatttcttctgccatcacgactaatttgtcggttgatttccccattgcggaaacgacgacaatgactgtatttccttgatttttctcataaatggcttgatctgctgttgtcccgattttatccaccgtgctcactgatgttccgccaaatttgaatacgactagtgccaatctcgttccctactgccttgttagttctttgttatcaatgtttatatgatagcgcatatatgtgttgaagggaagtgtattatatgtaaaagctatttaatctgacatgttagtaacaatttttatgctataaaacgccataacatcagagatattggcgtttacaatcgtgtaataaatcatgatcgctacggattgttag

SEQ ID NO: 1105 - DNA, 1312 bp, Listeria monocytogenes-4B
  misc-feature (1)..(end): n can be any nucleotide a,g,c or t/u
agtcacttaagctgtcgagcgccgacgtgtgctggaaagagagaatattgcgggaaccattgaaactttacttatttttgtagcggggatttggatcattgtggaatcagttaataaacttgtaaatcctcacgaaattcgttttccagcgcttggtattatggtaatgctttttggcgctatcgtgaatattatcgtgtctcgtatcatcaaaaaagcggctgatgaagctaattcagtagcgatgaaatccaatgcattacatttatatacagacgtgttcacatcgcttgggattgcgcttagtttgttccttgtatacataaccggctggctttggttagatcctgtcatcgcgattttaacggcgttttatatcatgtatgaggcttataaattgttaaaagagtctttccctccattaatggacaaacgcttgtctgcggatgaagaagaggctatcaagcaaattattttggctcataaagcaagatttattgaatttcatgattttcgctcgagacgggcaggagcagaagagtatattgattttcatttagttgtatcttcatcgatgacgattgaaagtgctcattcgctatgtgacgaaattgaggcagagattatgaatttttatgctaaagcggaagtccttatccacttagagccggaagaagaacgggttcttaccagaatttaatccgagctctttctattcgatttgttgctaaagtgttacaataggtagaaataagactggaaaggacaatgagtatgacaacttctattttaattgctgatgatgacaaagaaattgttgatttagtaaaattatatttacaaaatgaaggatatacgatttatcaagcttatgatggtgctgaagtatggcgtttagttcaagaaaaacagccaactttagtgatactagatattatgatgcctgaaatgaacggcttagaagtatgccgattaatgagagataatgggattttgactcccatcctaatgcttagtgccaaggctgaagacaacgacaaaatcatgggtcttttaacaggtgcggacgattatatggtcaagccattcaatccattagagctttctgtacgcgtgaaagctattctaagaagaatgcagcanatgagccaggcagacctgtagcagaaagatcatggcgtgtgtgacggctactacgttgaacttaccttgtgaccttcnaggcngcgtgccccgtggccttcccgcaggnnnntngnnagnnggnanannaaccttnntttaaccgactcttttgagtttgaatatatat

SEQ ID NO: 1106 - DNA, 688 bp, Listeria monocytogenes-4B
caattgcttcaacaataccgtgaagtccaccaatagtaataattttatcaccttttgctaaactactttgcatattttgtacttctttttgacgtttttgttgaggtctgattaataagaagtaaaacaaaacgatcatcaagataattggtataaatgttacaataccgcccatattttccaactcctttcgatactttatatatatttagaaattttttgcatcaggacgattgaatccatattgctcaaaaaattcttccctaaaatcagcaagacgatcttccataatagcgccacgaacttgcttcattaagtttaacagaaaatgaagattatgataagttgtaagtcgaattccaaatgtttcctcacaacgaatcaagtgtcgaatgtatgcacgtgagtaatttttacaagtataacagtcacaattttcatcaattggacggaaatcatgggtaaacttagcatttttaataactaagcgaccactagatgtcatacaagtaccatttcgtgcaatacgtgtgggaagaacacaatcaaacatgtccactcctcgaattacgccatcaatcaatgagtcaggcgaacctactcccattagataacgtggtttattagctggtagtagtggtgtcgtgtgttccaaaacgcgattcatgacgtattttggataaccaac

SEQ ID NO: 1107 - DNA, 737 bp, Listeria monocytogenes-4B
cgatttggctttatttaactatgagccaagggggacattagtagataggattcttgttttcatcgagtgtgaaaccttctcccatcacatcatgaacgacactgacggaaacaaaggcatgtgggtcaattgcttgaacaatattttttaattgaattatttcatttttcgcaacgacgatataaaggacgtcttggtcttttttagagaagccaccgcgaccttccaacactgttaccccgcgattcatcgcgagcatcacatgggaagcaatcgcgtcattatctttagaaataatgagcgcaccgcgagccgcataagctccttcttgaacaaaatcaattacgcgagagccgatgaatacggcgacgagcgtgtacataacttgacggacatctaaataggagagtgaggcaacgagaacaattgcatcaatagcaaatagcgtgcgccccatgctaatgcctttcgtatgatttagcagtttggcgataatatcactaccaccagtcgtcccaccgtagcgaaacacgaggccaagcccaataccactaaagccaccagcaaaaagggcgactaaaagtaaatcgctatgtaaatctagcgcctcaggtatacgctggaaaatgcctaaacataaggaccaactgaccggtgcgatgccccggtaaatgagggaacgattgcctggacctcggcccctattttaacaaaggattttaaaaaataaaaaaaaa

SEQ ID NO: 1108 - DNA, 740 bp, Listeria monocytogenes-4B
gatttactaaaaaaaagatctgtgttgtatccaatgaacaggcaaatgattaatagcacagctactcgcattataaacttcacattttgccctcctcggcagtattttgttttcttgatgtaactttcattttaccaatactattatcatttgaaaagctttaaaaatcataaaaaaaacaattacaaggaaacgcgtattgcacgcttcttcgtaattgttttttatttttataagaaaatcgaaataactaccattgctacgaataaaattgtcatgtaatttaatgagtaaacgaacatccatttagcccatttaatactatcttccattttaaagccgtaaatactaagtgctaaccaaccgatattcagtaacgttgctaaaacaacataaacgatgccaagttcaaacataaagaacggtaggatagttaataaaatcacccagaaaaacatgcttttctttgtacgttcaatgccttttactactggtaacattggaattccagcagctgcgtattcctctttccgtttaatcgcaatcgcataaaaatgcggcggttgccaacaaaacattacgagaaacagcatgattggtacgatgctaaatgatggttcgactgcaaaccaaccaatcagcggcgggacagcgcctgaaaaactaccaattacagtattactaactagttttctttttgcatatagcgaataaacgactacatacaaaaagaccccgat

SEQ ID NO: 1109 - DNA, 1039 bp, Listeria monocytogenes-4B
ggggggcaaaatattggcgggcaggggggggtgagggaggggtgagcggcgggttgggtgggggggggaaaagaattaggactaggggaaggcggggggggcagggcatggttggtgtccccggtgtgcagtggaggggaccatgaggaggggcggagaggtgagatgtgggcgttggggaggggggggaattctacaatggatcattgggggggcggtattcacaatgccacaatgtcaaaatagctaggagcgcaagggcgagagacttagccgtttaaaaagtttgtgagaagaattagttgacgagaagttctatattatggtattattctctaggtaatcatatatcgttctttgacaaatgtcagaggggagtagcgctgattagctttttaatcaggataaagtcgtcattacatgatagagatatcatcggttttatcacatttaattttaaatgttagcgagacctttgcctttacgggcaggtctcgcttttttgtttcttcaaaataggagatctttgacattttaatagaacaaaggaggaaaagaattagtggatacagcaatgattttagagtacggttgggtgttacttgtcctaatcggtcttgaggggattttagcagcagataatgcagtggttatggctgtgatggtcaaacatctcccagataaacaacagaaaaaagcgttattctacggattgatgggtgcctttggcctccgttttggcgcattattcttaattccctttttggcaaatgtttggcgagttcaagcgcttggcgccgcctgttcgctatgtatcggtcttgggcgcattgggaatcctgcaacaggcaaagacggccaacccgagaacacggaacaagctggctctggtctttcggtgcccggcgtccccctccccaccttcccccctcccgtcgcccccttcgctctctgcctcgctgcccccggcctccccctctctccttccctttctggtgggggccccccccccctgcgaagacactccgaaaaaaaaaaa

SEQ ID NO: 1110 - DNA, 759 bp, Listeria monocytogenes-4B
  misc-feature (1)..(end): n can be any nucleotide a,g,c or t/u
agcatctagcagcatgctcgacggccgacgtgtgctggaaagatgaacttccggatacccttcgtgttatcgaaatgagtgatgatgatgcgtggatacgcgattatggaccaagttttttggtgaatgataagggggaaatgcgtggtgttgactggggatttaatgcttggggtggtcttcttgatggtctatattttccgtgggataaagataatcactccgcaaaaaaagtttgtgatttagagcgacttgattactactttctttatagattttattttagaaggttgttccattcatgtagacggtgaatggacgctggttacgacagaagagtgtctgttatcagaaggaaggaatccgaatttaaccacaatagaaatcgaacaaactttaaaaaaatatttccatgcacaaaaggtaatttggcttaagcatggcttctatcttgacgaaacaaacggccctgtagataacatttttaactttgtggcgcctggcgatgttgctttatcgtggacggttaacacacgtgatccgccctgtgaaatttcacgagaatgctgtgctgtttcagctcaccgtcccgatgctccgggangaacttttctgctccgtgtcctacgttgcccggctccggtccttatcaccctccccctcagccaacgtgtggcggccaccaatggcccctcctccttcactcgcctgcgcatccttctgcctcctccccctcccaactcccaaacaaaaaaaaaa

SEQ ID NO: 1111 - DNA, 1069 bp, Listeria monocytogenes-4B
tcacaagatttagattttttatgctataatggaacgtattaacgaactaaaggagtgttgaatgtgagagctgtacttactgtaattggaaaagataatgtgggtattgtcgcaggtgttagtaataaattagctgaactgaatatcaatattgtggatgtatcccaaacgattatggatggttattttacgatgatgatgatgtgcgatattagccagatcacgaaagaatttgatgaagtaaaggcagaattagccggtaaaggcgaggacctccaagtaaaaatacatattcagcgggaagaaattttcaacgcaatgcacaaactttaggatgggggcgatgctagtatggaaacaaatcaaattttagaaacgatacgaatgattgaagaagaaaaattggacatccggacgattacaatgggaatttctttgctagattgtatggacggcgacggcgaagtggctcgaaagaaaatctatcaaaaaatcgttaccaaagcgcgtaatttagttgcagttggtgaagcgattgaatctgagtttggggttccaattattaataaacgaatttctgtcactccgattgcgattatcgctggatcaagcgcagatactgactacgtagaatttgcgaaaacacttgatgctgctgcaaaagaagttggcgtgaattttattgggggctattccgcactcgttctaaaaggctacacgaaaggtgacgaaatcctgattcgctcgattccgcaagcactcgcacaaacggaacgcgtgtgctcatgggtgcatgttggctcgacgcgaacgggaatgaatatgggtgctggccggcaaatggggcgaggtgatcgaaggaaccggtggcttttcggggcttgcggagtggctggggtgggcggagctgggggggtggcgcccgtctgtctgcggtcccggttgggtggggccgcgctgcgttcgtggtcttcgtttccgttttcctttgtctgggctggcttgcggggggctgtttttgtgcggccggcggtgcgtgtgggttagggggtattatgaaagataaaag

SEQ ID NO: 1112 - DNA, 732 bp, Listeria monocytogenes-4B
  misc-feature (1)..(end): n can be any nucleotide a,g,c or t/u
tagcacttgaaaaagacgatatcgactctgcgcaagactatttagaaaaagtaaacaaagaagatgaagcatatattgaaagtttgctcgtattagctgatttatatcagatgcaaggtttattcgaagtcagtgagcagaaattactcgaagcgaaacaaatggcgccaaatgagccgattattgattttgcacttggggaatattatttatcgcaagcaagattcgcatccgctgtacagtcttatcaaactgctgtagaagcaggattaacgattatttcgaatggtgcggtgtctgtatatgaacgtatcgctgaagcttttgctgctagtggggcatttgaagaagcgttatcttactatgaacgcgcgctcgaagataaggaatcggttgatacacttttcgggatgggtttaacggcttatcaggcaaaagattacacgaaagctattcatgcgctcgaacatttgcgtgaacatgatccctcttacacaacgctctactcttatttagcgaaaagttatgaggagaacggcgaaccggaaaaagccattgcagtgcttcgggacggcttaacgcaagatgaatttaataaagaaatgttcttagaggctgggaagcttgctgttacgctacgtttgccagaagaagccgaagaattttatcgtcaagcaattgtgctagatgaagaatattcngaagcaattatgcagttgaacaaattattaa

SEQ ID NO: 1113 - DNA, 757 bp, Listeria monocytogenes-4B
cctttgggcactgtcatcctgctttagcggccgacagtgtgctggaaagtatcttcaaagatattaatgattcgcaacttgcgtgtgggaacggctatgtacacttacattcacgtattgctgtatttgctggctcgattccaaatgaacgtttcactgatgaacaacgcaaccaattattaattacgactgttcggtaaattgattttcaacacaatcttaccaaaatcgttcccttatattaatgaaccaacgaaattcaacttagaaatcgaaacaccagctaaatattttgttgatactacaacagatgtgcgtgctcacattgctgcacaagaactaatcgatccttcaagaagaaaatcctcggtaacattatcgcggaagtcttcacgaaattccatattaccgaaacttcaaaaatgcttgaccgtatgaaagatcttggtttcaaaatctggactaaggccggtatgacagtaggtattgcggatatcttatcacttgaagaaaaacatgaaattcttgaaaaagcacatgatactggtgaaaaaatcactaaatcattccgtcgtggtctcgttccagatgatgaatgaacgaacgcgtgtctcttgccgtcactgcggtcgtcagctgcttaagggcatgcctatggaggtacatgactgcgggttctttttctgccccgcggccgtttgcccttcgccccggtgttgttgcgcgcggtgctgcccgttggaatataagaaaaaaa

SEQ ID NO: 1114 - DNA, 1213 bp, Listeria monocytogenes-4B
ggggcacccgtgtgctggaaaggatagtaataaccaagacatagatacaacggataaaagcgccgatgattcaggagataacgatacaaaaatttctaagtcattttctaatatgcaagtctacatgagtggattgaaaaatactttcgatgcacaaatgataactcctgccaatggaaaagtatctgtgacgataactggagagaagaaaacagtagacggaatagcggcgaaagacttgagtgtgattgccaatttgagtaaaagcaaagcaggaagttacagtattccactagaattgaatggcttaccggataatgttgcctatgttattaatcctagacaagctgatttcattattacggataaagaggcatctattgaagtaccttccaaaagcacataacataaggagtgtggggcgctagtctcatactcctcctttttggcaaagaactttttatacatagaatgaatgtcatgcaagagaaccaaatcaaattaattgaacatatcaaacaaggagttgttcaagcggttggtttagaagaagcggaagtaccagaaattttactagaagtaccaaaagataaaaagcatggagattattcgactaatatagcgatgcaacttgctagagtagctaagaaagcccctcgccaaattgccgaaagtatcgttccagaactaaaaaaagacaacaaattaattaaagaagtagaaatcgctgggccgggttttatcaacttctacctagataatgcttatttaactgatttagttcctgtgattttaaccgaagataaaaaatacggagagtctgattttggtaaaggagaaaaattccctattgaatttgtttccgcgaacccaactggtgacttgcatttaggacatgctcgtggcgcagcaattggcgactcgttagcaaatattatgaaaatggccggatttgatgtcttaagagaatactacattaatgatgctggaaatcaaattaataatttagttctttcagcagaagcgcgttactgtgaagcactagggttagattctgaattcccacaggatggctaccggggggcgggatattatttgcgcttgggaaagatttagctgctaaatacggcgataaacattgggcacccaagcgaagaagagcgccgttccgtgtctgcgggtagatgcattacccgtgtgaaacagggaaatt

SEQ ID NO: 1115 - DNA, 1022 bp, Listeria monocytogenes-4B
gaagaaaaagaagtggagttagcagaagctgctttactcggcgcacatgaaatcatcgcggaacaaatcagtgatgagcctagtttccgtgagtggattcgtaactttacgcgcaaatttgggatgattgaatccagagcgaaaaacgccgaagcagacgaaaaaggcgtttacgaaatgtattatgaatttaacgaaatgattggcaaagtagcaagtcaccgcatccttgcatttaaccgcggagagaaagaagacattttacgtgtacaagtccaagtagatacgacaaaaattttccaatatttatttgaaaaagttatccaaaaccgtaattctgcaacacgaccatacgtagaagaagctataatggatgcttataaacgctttatcggaccggcaattgaacgtgaaattcgcggtgaactaaccgaaaaaggcgaagaacaagccatgcatattttctccgagaacttgcgcaaactacttttacaaccacctttaaaaggaaaaatcattcttggggtcgatccggcttttagaacaggttgtaaattctctgtattagatcaaacggggaaagtactagaaattggcgttgtttatccacatacagcaaaagcacgccgtccggaagccaaacaaaaaattgcggagattttatccacatacaaagtggaagttatcgcaattggtaacggaacagcctcacgtgaaacagagcaatttattgtggaagtgattcgtgaatcgaaatcgaacgcttattattgtatcgtcaatgaagctggtgcgagtgtttattcagcgagtgaaactgcccgcgaagaattcccagactatcaagtagaagagcgtagcgctgtttcgattggtcgtcgtttgcaagatccgctagctgaacttgtgaaaatcgatccaaaatctgtaggcgtagggcaatatcaacatgacgtagcgcaaaaacgtttaaatgaaacactaactttcgtcgttgaaacggccgttaaccaagtgggcgt

SEQ ID NO: 1116 - DNA, 722 bp, Listeria monocytogenes-4B
  misc-feature (1)..(end): n can be any nucleotide a,g,c or t/u
aaaacgaaaataatttactataaaaaatctaattagcaaagattcaaaagtacgaaagtaattgatattacttatttccaattaaaatacaactcaaaaaaaaagcgtttcaaaagataattccaacattttcaaaacatcccaaatcatcgaaatccacttgaattcaacctcgtttttggataaagttacacttttatccatttttacaattttgtcaaaaaaacgtcacaatttaacagctggacacagctaacgaagtctaattttagcactctgataatgtgaaatcatattattattgactgatgaatattgaaaatagtagaaatagtacttttcacatctgctctatttgtttgaagaaatagagttatataataaccacaaaaaaaccgacaaaataaattgtcagttttactttaaaataaatttattatcttttgagaactatttaaatcaaaaaaactgcaacagaatgattcctcatcctattacagtctagcattaagattagctaaatgtgtcagttggtacttttctcgctaggcacataatacctgcaataacagcaagtacacctggaacgatccatagtaatcctactaagaagaaacctacaacaccagctactagcgtcaagataccgaatactntagcattgcgtttaattaatacagcaaaaacaatcaagcataccaagcactaaagncattatagag

SEQ ID NO: 1117 - DNA, 807 bp, Listeria monocytogenes-4B
  misc-feature (1)..(end): n can be any nucleotide a,g,c or t/u
aatcttttgctgatttagcctaaaatatgattggctttgatatttaagggggtaaacgcatgtttaaacacgaaaccgtattactacatgaaacagtcgatatgcttgaagtaaaaccagacggaatctatgtcgatgcaacacttggcggcgcaggtcactccgagtatttactaaataagcttaatgaaaaagggcatttatttgcatttgaccaagatcaaacagcaattgataatgcaaaaattaaactagcagattatagcgataaagtgacttttattaaagccaattttcgcgatatgaaagaagcattaaatgagcgtggtatcgaagcggttgatgggattttgtatgatttaggcgtttcatccccacaactagacgagagagaacgtggttttagttatcaccaagacgctgcactggatatgcgaatggatcaagaacaagaattgacagcaaaaatagttgttaacgaatggtcttatcaagatttaatccgtatctttttccaatatggcgaagaaaaattttcgaaacaaattgctcgtgaaatcgaacgtcgtcgtgaagtaaagccaattgaaacaacaggcgaactagtagatattatcaaaacagctatcccggctccagcaagaagaaaaggcggacatccagggaaacgcacttttcaagccatccgaattgccgttaacgacgaactcggtgcagtagaagattcgcttganaaagccttaactttattaaaaccaggcggtagaattagcgtaattacgtttcattctttagaagaccgcatta

SEQ ID NO: 1118 - DNA, 776 bp, Listeria monocytogenes-4B
  misc-feature (1)..(end): n can be any nucleotide a,g,c or t/u
ggagaaatgacaatgaagaattattcaatgaaggtttttgtaagtgtggcggttcttggtactttagcatttattttaatgatgctacaatttccgctactaccgagtgcaccatttttaaagcttgactttagtgatattccagctttgattggtggcttattattcggaccactcgcagtgattttagtagaactaatcaaaaatgtgctactttatattgtgtcaggtagtccagttggagttccgattggagaaatatccaattttattaatggtattgtttatgtattaccgatttattatttatttcactggtttcgttcaacaaaaggaatggtgttttcaacagcaattggaacgttagtaatgacagtcgtcatgtcgatatttaattatttcattttattaccattttacattaaacttggtggacttccggcggatacagatgttgcttggttagtcacatatgcgattataccattcagtttattaaaaggagtcattgttagtgctgatctgtcttcttactanaatgatgtaacactgagacgcgatgaagcaggnnnnnnnnnnnnnnnnnnnnnnnnnnnnnnnnnnnnnnnnnnnnnnnnnnnnnnnnnnnnnnnnnnnnnnnnnnnnnnnnnnnnnnnnnnnnnntnnnnttncnnnncncncccctccccttctataagggggggggtggtttttttttttttaaaagagaagggcgggggcgcctcttaatcaaaattttatttgattttggaacg

SEQ ID NO: 1119 - DNA, 702 bp, Listeria monocytogenes-4B
aatgattcacttaaaagaaaaagaacagtcccacaaagagcaacaacatgatatccagctaaaattaaaattcactaataactccgaagaaaaactccaaaaaaagattgatcaaatagaagcggagatgtgggataataaaacattccaacaagcaaaagaaaaaatgcaggatagtcctaaaacttctaaaactaagacgatggtttccttgggcatatttgcagtagcgttcgtcttgatgatagttttccaagctatttggagtgtagcacttgtttttgtttctgcacttatagtgggttatgcttttattactactggaaaatcttctccaacaaataatgagcaaattctagcttttttagaacaaaagaaaataagacaagaatggcaacaacttttgaacgaaatggatatggttgcttcacaaattgctgaattaagagcagctgagaataaactaagcgaaaatatctaccaacatacgatggaacttagacacttcttttctgacttgggaataaacactgaacctagttcgaactggcattacgaacttagcatctacaaaaaacacagtgaaaaaaggcaattagcaatggaacttatctgcaactagaaccattagcagagaagcaagaagcatatagaggcagattagaaaccttaaaattgcctatagataatacgggcacggaa

SEQ ID NO: 1120 - DNA, 706 bp, Listeria monocytogenes-4B
tagttaaaagttatttctgttttacttaaaaacaagaattttattaatacactaatcttctctcttaatttacactaccaagattatgaagtcaataagttaatctctaattggtttatcgcttacaatggcattattacttaaatcattcgctttccacttctgtgttaaaaaaagatgaaacagataaaaactgttatataatattgcaactctcgcattaccacacctatttcaagctttcaaacagcaaatatcgatagtttgtgaattcacaaacatatattttttttctttggttagtttaaacgaacattataaaaaaaataattggtattggtcgcttttaaaacttttttttttttaacaaatatgcctttagacctattaaaacactctttttttcgagtctagtaatctttcattccttttttttcgttcttttgttaaaataaagataagttattaaagaacaggagagaatcaaatcatgcttacaatggacgatattgtacgagaaggtcatccagcacttcgagaagttgcgacagaagtgactttcccgctttcagatgaagaaaaaaaattaggacgcgagatgctcgaattcctgattaacagtcaagatgaagagttagcagaaaaatatgggtttgcgtggtggcgttggatttgcagctccacaactcgctgggactaaacgttt

SEQ ID NO: 1121 - DNA, 1269 bp, Listeria monocytogenes-4B
aaggccaccagttaaaattatggcgtcaactttaccttgcaatacaacggaacatgcgccaatttctttgctaacttgataagccattgcatcaaaagcttcgatagctttcacgtcacctgcttgtactttagcttccacctcgagcatgctgttagttcctaaatatgaaatcatcccaccacgaccaacaatcagttcatgcaattcgcgttttgtccatttaccgctaaaacatgcttctagaaaatcattcatcggtaaagaaccagaacgttccggactaaaaggtccgtccccatctaaggcattattcacatccaccgcttttccttgtcgatgagcggcaactgaaattccaccgccaagatgcgcgataacaaaattcattttttcataatcttttcctagctctttggctattttccgacctgctgctttatgatttaatgcatgaaaaatactttttctagcaatgaaggcattgccagatatccttgcaatttcctgcatttcatccacgacaaccggatccacaataaaactaggtattgtcagttcatctgctaatttttttgcaagcagtgcccctaaatttgaggcatgctctccgtatttattttcttttaaatcatctatcattttttctgtaaccatatatgtaccgccggcaactggtcgaagtaagccccctcttccaactaccgcttgtaatttctttacatcataaccatgtgcatccatcactcgacgtagaacttgccacctaaaatcaaattgttcctgtacgttattaaagtcggctagttcttgcattgtatgtctgacagtttcttcaaaaagtactttatcgccttggtaaacagcgagtttggtagacgtggaaccaggatttatggttaaaacatcaaaagacatttgctttcctccaaatttaattgtgaaaaatgcggtaggttatcattttcccatggactattgtaacacgtaggctgtaatcaaataaaagcctttgcattcagattgttaaagtccgtctattcacattatttcatcatttctcaactagtcttacagttagtatgaatgaagctaatttgttttccggtgaatcatttcttgaggaaatgacaataggtacttttgccccgaccactgcactacctactttagctccagcaaagtagactaatgatttataaagtgcatttcctgtttgcatattaggagcaattaatatgtctgcttctcccgctgacctatccgaaa

SEQ ID NO: 1122 - DNA, 992 bp, Listeria monocytogenes-4B
acgttatttttaaggaggtaaacaaatgtcaaaagattatgcattaacatgggatttagaaaatatatatgctggcggcagcggctctgaagaattacaacaaacgcttcaagaggtaaaagctgatttagacagctttgttgtaaatgtttcggagtgggatgttcctgaaaatgtggaagcctctgctgaatttttacttctcgttaatcaaaatgcagatatatctaaaattttactcacagctggatcatttttagaatgtcttgcttccgctgatatcaatgactcgcgtgcaaatgagctttcggcgttaatttatcaatacgttgcaactctagctacggccgaagatgaatggcatgacaaatttgcacaagtttctgaccgtgtttgggacgaattaatggaacaaaatggtttatcgcaaattagctttattttaagtgaagcgcgtacgaaccgccgtaaaaaagggagtaaagaacaagaagcagctattaattctttagctgtcgatggttatcgcggctggtctgatcattatgataccattgtcggtaaactccgcatgcatgttaccattaacggagaagaaaaagatgtttctgctggccaagcgctaaacttattaaatcaccctgatcgcgcggttcgccaagcagtttttaaagaatatacacgtgtatggcaaagtgaagctcgtttatttagcgatacgttaaatcatttatcaggattccgtttagctacatatgaaattcgtaaatgggataatattctagatgaacctcttgcaattaatcgtttagatgagcaaacgttaaaatctatgtggaatgtcatccaaacgaacaagcctacttttgttcgattcttagatagaaaagcgaaattacttggccttgaaaaattaagtttttatgatgtagaagctcctcttgtcttttcaagcgaacctaagaaatattcgtatcaagaaggcgctgaat

SEQ ID NO: 1123 - DNA, 1226 bp, Listeria monocytogenes-4B
  misc-feature (1)..(end): n can be any nucleotide a,g,c or t/u
acattggcagaaactccactagtatttgatacccatcaagcggcggtagcggaatcaagttaaacacaaacaagactagatttaattgcacaaaaatcattaaaaaagtttccgcaacggagccatatgtaaagaaggaataatttagaaataaagcatataaccccacaccaaccatcgcaagtaggaaattacttactggtcctgcaagcgaaacaagtatacttccaaggcggcgtttttttaatttaaatcgatttaccggggtcggcttagcccaaccaaagcctgcaattaatatcattagcaaaccgaataaatcaatatgtacaacggggtttacagagagtctcccctcatttttagctgtatcatctccaaatgcgagagcaaccaaggcgtgtgcccattcatgaatagtaaaagcaattaataatgtaactaaaacatacggtatgatttcgagtggatacgcgagaaaactaggcataggagcctgctttatcttttattgagcaatttttatatgctataatgaaaaaaacgttgatcgaggtgagaaaatgccatttgttaccattcaatttttagaaggtcgtacggacgatcaaaagaaagctttagttagcgaagtgacggaagttgttgccaaaaatctaaaagcaccaaaagaaaacattcatgtgattttttattaaatgaaaaaaacggattacggtgttggcggcgtaaggaaatctgatatttaagtgtgtaagaagcaaggcatttcgccttgcttttttatttttcctttaacgaatgcgcatggatgagggcgatcattctctcggtgattgcttcttccacgtgtccactttcgataaaatcgagcggataatataatttaatatcggtccggcgctctcgaccaatcgcctcaacaaccggagactcggtcgataactcacgcaattccncatttcccatcaatagtttaattgggtctttgccacttcccactccaggaagatagtaatcataaggtaaatcgctggaagaatcaattactaaataataagacggatcaatatcggccttttcaagaagtccttttagttctgcgtaaagttctgcatcttctttcggatcgtagttaatgtatcgtagcaatcttctattcaaaaagcgactacctaaatcactccaaatcggatctttcttctcttgccaaatagaaaaaaaga

SEQ ID NO: 1124 - DNA, 880 bp, Listeria monocytogenes-4B
  misc-feature (1)..(end): n can be any nucleotide a,g,c or t/u
aattatttatcaggcaaaatgattttcgattggaagggacaagaaaaaattgggatacaggaatctactgccaatcaaatagaaatgatacggcaaaaagaatttccatttagcgatccgaatgtgaaaaaacatcgtgatttaatctatttattactcgtaaacgatggtgctattttaacgcaagacaatgaagtggaactttttgtagatggacatgagaaattcgatgcgctaattgctgatattgaaaaagcgaaagatcatatacatctcatctattatatttttcattctgatgaactaggcaatcgcttaatgcgcgtgctggaaagaaaagcagcagaaggtttaaatgtgaaaattatttatgatgcaatgggttcaaggacaacgaaaaaatcatttttccgtacgtttcaaaaaaatggtggtctagttagacctttttttccgtctaaattaccattgattaactttcgtctcaactaccgaaatcaccggaaattggctataatcgatggagatgttggttatattggtggttttaatattggtgatgaatatcttggggcatcgaagaaatttggttactggcgtgatacacatttacgtgtacatggaaaagctgtttatgcgatgcaaactcgctttattatggactggaattctgcatcatccacacataaaattgattacaaagcgcgatacttcccgacttttcatgggaaaggtcatacaagtatgcaaattgtttcgagtggtcctgattccgaatggcaacaaatcaaaaatggttacatcaaaatgatcaatgctgctaaaaaacaatttatttacaatctccttattntatttcagatgcangtttgcttgaaca

SEQ ID NO: 1125 - DNA, 822 bp, Listeria monocytogenes-4B
  misc-feature (1)..(end): n can be any nucleotide a,g,c or t/u
aagcgtgattgtccttggttctggtccgattcggattgggcaaggggtagaattcgactatgcaacggtgcattccgtgtgggccattcaacaagcgggctatgaagcaattatcattaataataacccagaaaccgtttcgaccgactttagtatctcggacaaactttactttgagcctttgacgctagaggatgttatgcacgttattgagatcgaacagccactaggggttgtcgtgcaattcggtggacaaacagcgattaatttagcagacggtttagcaaaacgcggcgtaaaaattttaggtacaagtttagaagatacggaccgcgcagaaaaccgtgatgcctttgaaaaagcattaggaattctacaaattccacaaccagctgggaaaacggccacatcggtagaagaagcaatcaacgtagcgacagacatcggctatccggtccttgtacgcccatcttatgtacttggtggtcgagcgatggaaatcgtagaatcagaagaagcattaaaacattatatgacgaatgcggtaaaagtaaatccaaaacacccagttttagtagaccgttacgtaagcggccaagaagtagaagtagatgcaatcagtgacggtgaaaacgtcttaatccctggtatcatggaacatatcgaacgtgcgggagttcattcaggtgactcgattgcggtatatccagcgcaacgtttaagcagtcaagtgaaccatatgattntcgattnttttgggagggggcgggtacccttactcatnaagggntnctnnttnttaacatccaagactgtaggtgg

SEQ ID NO: 1126 - DNA, 776 bp, Listeria monocytogenes-4B
ccgccaaattttttatgctacgatttaaaagtaaaatgggtgtgaaactccttgcagcacctcttagatgcagcccacatctaaattatgaaacaaaaggagtaacttgaatggtcgggtatggaaaaacagtgagagatattcgcacttctaaaggaatacatcaaaaagatttatacgataatatcatttccaaatccttcgctatcgaatttgaaaaaggaaagcacgacatcacactaaccttatttgaaaaaattttaaaacggatgaatatggacttggacgagttcttttatatccatagagaattgtcagtatcagctgagaaaaattatttatgcatgaatcaagaacgcggaaatatatatgatcttgcgagtttggaactattatataacgagctttctaaacataatggcgaattagtggaggtctggaaagcatttgttcgttcgcgaattaaattggtcgaacatctctttaaatgtcatgaattgacagtgcacgtgattacacctaatgatgaatgcacgatgcacaagtgttcgttgtcgcgttgctgcgtgggcacttggtgaacttctgatgggcgctgactgcctgtgctggtgtggagacgatcccctggtccctggtgcacccgcggccttcgggcccttcctgtgtcctatctccggccctgtccggccgctgtcggccgtggctgggggctgccgctcggcggccccggcgcccgcgcggtccgtccgcgtccctgacaaaaaaaaaaaaag

SEQ ID NO: 1127 - DNA, 760 bp, Listeria monocytogenes-4B
  misc-feature (1)..(end): n can be any nucleotide a,g,c or t/u
cgtttaggcactctcgcatgcatgttcgagcggccgaccgtgtgctggaaaggatgaatgatggcgatactatcaacgagaacgtaacaaacctaatgggagacggctcttctgctgatgtgaaaacggtgactgttggacgcgggaagcaaacgcaaaacgtgacaacgcgcgtgacgcattacggtaaagcttctaatggtacgattttatcccatggtgttatgaaagaaagagcgacaactatttttaacggaattggccacattaaacatggcgcttctaagtcagatgcacaacaagaatcacgtgtactgatgcttagtcctgaagcacgcggtgatgcgaacccaattttattaattgatgaaaatgacgtagtagcagggcatgcggcttctgttggacgcgttgatccactacaattattctatttgatgagtcgcgggatttctcaaaaagaagcagaaagattagttattcatggcttcttagatcctgttgttcgtcagttaccaatcgaaagtgtgaaaacgatgcttcgtgaagtaatcgaagggaaagtgcgctaaatgattgatatccaaaaaattcgggcggattttccaattctagctcaagaaataaatgataaaccgctagcttatttagataatgctgccacttcacanaagccgaaacaagttattgaagctttaacacattactatgagttgtatgcacgtacgngtggctcctcgaggtactgacatcaaatctt

SEQ ID NO: 1128 - DNA, 698 bp, Listeria monocytogenes-4B
  misc-feature (1)..(end): n can be any nucleotide a,g,c or t/u
aaggagagtgatttagatgttagtcggcgtaccaaaagaaattaaaaataacgagaatagggtggcaatgactccggcaagtgttttttcatacgtaaatgcaggtcatactgtatacgtggaaaaagatgcgggcattggctctaattatcaagacgctgattttgtgcaagcgggggcaaaaattgttgaaacagctaaagaagcttgggatgtagatatggttgtaaaagtaaaagaaccgattgcatcagagtatacatactttaaagaaggactattacttttcacatatttacatttggcaaatgaaccaacgcttgcgaaagctttgatggagagtaaagtaaatagtgtggcgtatgaaacagtagaacttgcagaccatacgttgccattactttcgccaatgagtgaagttgctgggcgaatggcagctcagattggcgcacaatttttacaaagaacgaatggtggtatgggtgtcttgcttggtggggtgccgggtgtagagaaaagtgaagtggttattattggtggcggaatcgctggaacaaatgcagcgaaaattgcagctggtttaggtgccaacgtgaccattcttgatatgaatttgaaacgattgcgcgaactgganatatttttggcatcaagtcaacgttatgtcgatgttattactgaacgtgtgcatacaaagg

SEQ ID NO: 1129 - DNA, 740 bp, Listeria monocytogenes-4B
  misc-feature (1)..(end): n can be any nucleotide a,g,c or t/u
gcggccgacatgtgctggaaagagtaggtgcaggcgttggtattgaatttgatgtcgaggattgtaactatgacaaagtagttatcatgaccgatgccgataccgatggcgcgcacattcaagtattactattaacctttttctatcgttatatgcgcccactagtggaagcaggtaaagtatttattgctttacccccactttacaaagggggccgtggttctggtaaaaaagaagtaatcgaatatgcttggacagatgaagaattagactctgccatccaaaaaattggtaaaggctacatgattcaacgatacaaaggtcttggtgagatgaatgctgaccaactttgggaaacaacgatgaatcctgatacgcgcacgttaattcgtgtacgggtagatgattctgcacgcgctgaacgccgcgtggccacactgatgggcgacaaagtagaaccaagacgacaatggattgaaaagcatgtcgagttttctatggaagatagccaaaatattttagaaaatgaaaacatgatggttgaggaggcgaaagacatttgagtaatccagaacaacatatccaagacttagcgctagaagaagttatgggcgaccgtttgggngatatagtaatatattattcaagaccgtgcgcttccagatgttcgtgacggactgaaacctgtacaacgttgtatttttttcccgatgaatgtcgaacgaaatactgctgagaaa

SEQ ID NO: 1130 - DNA, 769 bp, Listeria monocytogenes-4B
ctctacagcatgctcgaggcgccgccagtgtgctggaaagtgttgttccactagacatcgcgattacacaccatgtggacacaacaaagagtttaattggttatatgtatgcctatagtatgtatttattctttgactttgcaggttacagtgcctttgcagttggggttagttacttactcggcgttcaaacacctatgaactttaacaaacctttcgcagctcgcaatattaaagagttctggaatcgttggcatatgacgctttctttctggttccgcgattatgtattcatgcgtttcgtattttgggttacaaaaaagaaatggtttaaaagtaagttcactattgcctacctagcatatttcgttaactttttcatcatgggtgtatggcatggacttcattggtattacatccggcatggcctgcatcaagccgcactcattggtggatcggacctattcgaacgctttaacccgaacggcatattctgtgccaaagaacaaagtcgctcatcggatccgcgcgctggcttcccttgcaaggcccgcgggcgggttcccccgcgtctctcccgtctcttcccatcgccgcgcgtggtcccgtcgccctccgcccggcgtcctcggtggctggggtgtgccgctgtcccccttcggccctcgctccgtgcccttcctgagcccccgcccggcggtgccggcggtccgcggccgcccgggcggccgggggttcggcccccgcggtcccatataaaacagacact

SEQ ID NO: 1131 - DNA, 1154 bp, Listeria monocytogenes-4B
agcctgaagtaatctacagcactgcgaggggaaccagtgtgctggaaagaattattccagaagatttttcggattcagcggtttggaagctgacattctggtcggttatgataataataggtttgggtggttatatcattgcgagaaaaaaagagaagaaaaccaaaagagtttgaatatgatcaggaagtaaaattgcgcagaagattaaaactggtgttagctcgtatgacaccagttcaagtaattatcgcgtattattttattgcggttacgatttctaccatcgtcttaagcttaccgttcactctacaaaaaggggtcaaggtgtcgtttattgatactctatttacagcagcgagttcggttagtgttaccgggcttgcaacagtagacgttagccagacttatagtactgctggaatttgggtcttaatggcgattttccaaattggtggacttggtgttatgatgattagtacgtttttctatttgattttaaaaagacggattggcttaaaacaacgtcaattaattatgacggatactaaccaatttacaatgagcgggatggtccggatgcttcgtgagattctagtgcttattttcggtattgagttaattggagccttgatggtgtggatttactttattccgctgtatccgaatttttgggacccgatgttacaaggattatataatcctggtgcactcacgaccaatgcgggggcggatgtggcgcgggcaatcggtcatccggctccggcccgaccgtccccgggcactggatgagggtcgggtatcgtgtcggcccccccccacccccccccaccccccccccgccctcccctctcctccctcccccgccccctcttctccttttccccctccccccccctctcggcctcccctccccccctcccctccccatccccgtttccccttcttccccctcgccgttccctgttgcccccccctgctgcgactctggcggccacgccgccccatcccgcgcgtcccctaccctacgggcccccccgctccccttccgctccccggcccccccccgtgccgcccctcactctcctgcccccccgatgctacgtttaccggcctgcccccgtcgccctttcgccccctccctcgtccccctg

SEQ ID NO: 1132 - DNA, 1161 bp, Listeria monocytogenes-4B
tacttacaacagctatgacaccggcaaaaatagtagaagtagtttcacaaatgaacgttgtcgaaatgatgatgtcgatgcaaaaaatgcgctctcgcagaacaccaacaactcaggcccacgtaacaaacttgcgtgataatcctgttcaaattgctgcagatgcggcagaagcagcaattcgtggttttgacgagcaagaaacaaccgttgcggtagttcgttatgcaccttttaacgcgcttagtttattagtaggttcgcaaactggccgtggtggcgtattaacgcaatgttctctcgaagaagcaacagaattagaactcggtatgcgtggtttaacttgttatgcggaaacgatttctgtttatggtacagaacctgtatttacagacggagacgatacaccttggtccaaaggtattttggcaagtgcttatgcatctcgaggtctgaaaatgcgcttcacatccggaactggttctgaagttcaaatgggttacgcagaaggtaaatcgatgctttatcttgaatctcgctgtattttcattacgaaagcggctggtgttcaagggttacaaaatggttcgattagttgtatcggaattccgggagccgtaccaagtggtattagagcggttcttgcagagaatttaattgccgtaatgttagatctagaagtagcttctggtaacgaccaaacattctcgcactcggatattagtagtacagatcgattattgatgcaatttttaccacgaacagattatatttcctctggttacagcggaccaactaactatgacaatatgacccgctggctccaattcccatggccatgacttgcatgattgcaatattcccgccccaccatccacccactacaccgcggcccattcccccccccctcctccagcacctcccttaccccccctgtttggtaagggcagatccctcccgtgcccccccccgcccccccgcccccacatatacctaccccaccgccgccccaaaccccaactcaccctcccccccccattaccaaccccccccaccccaatccccccccctatcccccccttctaaccccaaccccccaccccccacccctactaccccatctacaccccatcccccctacccccccaataaactatccat

SEQ ID NO: 1133 - DNA, 692 bp, Listeria monocytogenes-4B
aagacactgcgaaaaaatacaatttaaacaccgtaagtgatatgcgaaaagtagaaaatgagctcacagctggtgtcgataattcttggatggaacgtgaaggcgatggctataaagcattttcaaaagcctatgatattgaattcaagaaaatatttccaatgcaaattggcttaatctacacagcgcttaaaaacaatcaaatggatgtggcgcttggttattcaacagacggacgtatcccaacttacaatttaaaactattaaaagatgataaaaaattcttcccaccatatgatgcttcagctctagcaacagatgaaattttaaagaaacatccagaattaaaaacgactatcaataaattaaaaggtaaaatttcgacagaagaaatgcaaaaacttaattatgaagcggatggcaaattgaaagaaccgtccatcgtagcgcaagaattcttgcaaaaaaataattactttgaaggtaaaaactaaggaggtgccaaaagatggacacattaaaacaattaattgattattaccaaacaaatggaagttatgtcatggaagagttctggcggcatttcttgatgagtgcttacggagttatcttcgcagcaatcatcgcaataccgctcggagtatatattgcaagaaaaaaacgcttagctggctgggttatccaaatcgctt

SEQ ID NO: 1134 - DNA, 715 bp, Listeria monocytogenes-4B
aaacttcttactgttctgtctgttggcgtgggcgggggggtagggactcctaaattaggaagtacctgcggcatggattgctcaaccgacgcggattcatgaaatttttacagatgagaatttaccatacgcaataaaagcaactttaaataaacctagtactacatcgtgacgtttcacaagcgtgtgctagattctataagtgaagccacggctgaaagtagctgtctaacttgtttatagggggcgcagtgtttaaattatatagatgcattaatcttaaataattgtcaaataacggatggaaattctcttgcatgactgtctgaattaaggatgttggcttgcaattgacactcaattcagcgatttaagtgccctcgccaatgtgccatgtctgcccccctggagattagctgggtatgattttagccagttgagtgggggtagttattttatctacctagattcccttgggctcttccgctgtcccgtttcggttttttatccccctcttaggtttggcggctcttgtgtggccttggaatcggttctaatggtctgcgcgggttcagccccattggtggctttgccttgcgtagcgctttttctcgggaccatttccctttccgtcgcttgcgctcctcttccccctttcgggctctgggcgctttgcctcttgttgcttcccactataaaagcacaaaaaaaaaaa

SEQ ID NO: 1135 - DNA, 732 bp, Listeria monocytogenes-4B
cgagggccacagtgtgctggaaagtttaattaagttttccgcttactatttaggatgtcgatttatgctacacattatcactctgtcactcgctattttgatggcgttacaaacgatttatttcttcatccgtaaaaatgttaatatgggcgttatgtttttgctcataactgctgcacttcttttactcagtacgatttaatggaattcctgtttcgatagcttgctttaaatttcgctgcatgacaccaattcctgatgccccgtcaagtgggaaattaaatacttgcttaccatccgtgatgctcgtcaataaccctctgaactttttgccgcctaacatcggaattggttcggtagggtttatttgtagtttctgccactgctcctttaattcctcgagttgaatcgtatcagcactagtccctttcatggtgaagcggacatcatatgtttttgaaataatatcgtccggtcgcaaaaaaccatatttgggggataatattaaatattcatttgcaaactgttccgcataggctctacttaaacgatgaaatgttcctgtatacacttcgcttgcttttactggaccaatatctggcgacttatcccatatttttggttgtccagacgcaatactaatcatgatcgggttcttggttatgggatattcccaccatcaccgctcttcctgggatctcttcgggttcctttcctttgaaaaaaacaaaa

SEQ ID NO: 1136 - DNA, 717 bp, Listeria monocytogenes-4B
gctggaaagagcactagacaacgatttataaattttaccaggcattgacaaaatcgatttaccagcggccgatccggaaagagtccgcgaagaaattgaagatgtaattggtttagatgcttctgacgctgtacttgcttctgcgaaatctggtattggtattgaagacattctagaacaaattgtcgaaaaagtggctgagccatctggtgatgtaaataaaccactaaaagcgctcatttttgactctgtttttgatgcatatcgcggtgttattgctaatatccgtatcatggatggtgttgtaaaagcaggcgaccgaattaaaatgatgtcgcatggcccagaatccgacgcggccgacgttggagcatcctggtcgcccgccgccgtcgcgcgccaattggtgcctggcgacgttggtgggttaacgcgccctatcccaaatgtaggcgatacgccccctagggagcccactcgccctagggcactgctggtggcgcttccggcgttgcccccccccgtacccttgtcgccccctctctcccctggttgatccccagcctccccattaccgttgtccacattccctatggttgctcggccggacccgtgcccgcccgggctcgtccccactacatcctctcgttgcgccccccccgtgttttgtctttccccccctcgcccgggttgttgtctaccgcggcctcttcccgt

SEQ ID NO: 1137 - DNA, 994 bp, Listeria monocytogenes-4B
tgtgctggaaagagcatgactactacaaagctacatgatgtcgaagcaacagtagcggaaattcaccgattagaagaggtgggttgtcagattgtgcgagttgcttgtcctgatgagcgtgcagccaatgctcttagtgccatcaagaaaaggattcatattcctcttgtggcagatattcattttgattaccgactagcacttaaagctattgatgcaggtgttgacaaaatccggattaatcctggtaacatcggtcgccgtgatcgggtggaaaaagtggttaatgctgctaaagcaaaaaatattccaatccgtattggggttaatgctggtagtttagaaaagaaaattattcaaaaatacggttaccctactgctgaaggaatggtagaaagtgcacttgatcatattaaaattctcgaagatttagatttttatgatatcattgtttctttgaaagcttctgatgtgaatttagcaattgaagcttatgataaagctagtcgcgcatttaattatcctctacatcttggaattacagaatctggtacgcagtttgctggaggaataaaaagtgctgctggtttaggagcgatactcagtttgggcattggaaatacattacgggtatctttgagtgctgatcctgtggaagagataaaagtggcccgggaggttttaaaatcgtttggcctttcctcgaatgccgccatgcttatctcctgccctacttgcggtcgaatagagattgatttgattcgtatcgctaatgaagtggaaaattacatagcaacgattaaagctccgattaaagtagccgtgcttggctgtgcggtcaacggtcccggagaagctcgcgaagcagatatcggaattgctggttcaaatggagaaggccttctttttagacatggtaaaatcatccgaaaagtaccagaagccattatggtagaagactagaaaatgtttgcaattgaacataatgcatctg

SEQ ID NO: 1138 - DNA, 763 bp, Listeria monocytogenes-4B
tgctgcttgatcggccgacctgtgctggaaagacgttgatttactagcggttgatatgaatgaagaaggtgagacagatgttcgtgtggtattagttggggatgcaccgggagttaaagctggcggcgtactacaacaaattatccatgatgtaaaagtttcagcaacaccagaaaaattaccagaaacaattgaattagacatttcttcattagaaatcggtgatgttttaacaacgaacgaccttccggaaaacaaagactatgtcgtgcaagcggaggaagaagaaacagtagtaactgtatctgctccacgtgcggaagaagaaccaacgactacggaagcacctgaaccagaagctgtacatggtaaagatgaagaacctgttgaataattttgaataaataaggatggaagattcgcttttgtttgcgatatcttccattttttttgttataatggtttcgagaaggaggcgtttatatgcttgataagtcagtaccgcacatttctgctattatggtcaatcacgatgctacaaattatccggagtttcatttacctgagggatattctttttgctgttataaagatggtctggaagaagactggtgtgcattgcgattgggaacgggggaagtgctctcaatggacatcgttggcgctcgcgttgcgacgggggttttcggtgcagaccagactcactgctccgctcctcgctcttctaggttctcttggtgaaacaataacaaagaaaaaaaaa

SEQ ID NO: 1139 - DNA, 680 bp, Listeria monocytogenes-4B
ggccttatggtaattggttcatttgcagctccgttttctgttttattcttctttttcgaaacgaatgcacctcgtaacatcagcgtttttgatgtagtgcgaatgttctttatcggtggtgtagcagcgcttgttgcaacacttgttatttactccattattccagttggaaaattaaattattttaatgcacttttggttggttttattgaagaaactgggaaaatgattattgttgctctcttcattcgttcattaaactcgaagtacattttaaatggtttacttatcggtgccgctgttggggctggatttgctgcatttgaatcacttgggtacgcgtttaactatagtgtggatgctgcctttttattcaaagatattcatattgccggtgaaacgatgctcaatgttatctttagccgtggttggcagtctatcggcggccatgttgcctgggctgctattactggtaccgcacttgttatcgctaaaggtgatcaaaaacttggaatgaaccacattttcacaggaactttctggaaatggtttattattccgattgctttacatttcatttgggattgcccgttcaatccgcttccagcaattgcattcaaacaaattgttttaatcattgttgtttggttcgttatcttacgacttattagtaaaggttt

SEQ ID NO: 1140 - DNA, 1134 bp, Listeria monocytogenes-4B
atgatccagaaaaataccaagcactgatgacggattatgatacgttacaacatacttttaaagaaagtggcggctatacttacgaagcagaaatccgttctgttttaaatggattgcgtttttatccagaagattatgaagtagaaatcgcttctctaagtggtggccaaaaaacgcggcttgctttagccaaattactgcttgctaaacaagatattcttgttcttgatgagcccaccaaccatttagatatcgaaacactagcgtggctcgagacctatttacaaaattatcatggttcgttactcatcgtatcccatgaccgctacttccttgataaagtcgtgaatcaagtatacgaaatcagccgaaccaaaattgatcactacaaaggaaattacagttcattcgttaatcaaaaacaagcgaaactagaacaaatgtggaaagagttcgataaacaacaaaaacagattgccaaactagaagattttgttgctagaaatattgtccgcgcatcgacaacaaaacgagctcagagtagaagaaaacaattagaaaaaatggatgtgcttggtcgcccgcaaggtgatgaaaaagcagcgcattttggtttccatatttgaaaaacaaacaggtaaagatgttttaatggtagatcagctgagcattggttacgcaaaagataagcgcattgcttccaacctaacgttcgaaatgaaacgccaagatagtctcgcgctcgttggtccaaacggaatcggcaaataaactctacttaaaacgcttattcgtgatatcccagctttaagtggcgaattccacttgggcgctggcgtgaaaattggctgctgcgatcaagaacacgccacactgacatccaacacaactgccatcctgcacccctggcatgcatctccgcagccccctcgcccccccgtttccctctgttttgctcgccccttctccctcgcaccgtcgcccctcttgtccgggcctgcctcccgctcatacacccttccttcccttctccttctctttcctttttctttccgctttttcccctttcccctctccccgccctcccccctttccctctcccgcgccgcttcccgacatccgccggcagataat

SEQ ID NO: 1141 - DNA, 693 bp, Listeria monocytogenes-4B
tggaaagaacagaaatcaaaccatcatgaacaggcgaatcaccacttgctaacttgcatgactgggtaaacgtaacagacaaaaacggtcgaaaaggtcgtcgcgaaacaaatacaatgccacaatgggctggctcaagctggtatttcttgcgttatatcgatccaaataacagcgaagcatttgctgacaaagaaaaactagcagaatggcttccagttgacgtttatatcggcggggcagagcatgcagtacttcaccttctttatgcacgtttctggcataaattcttgtacgatatcggtgtagttccaacaaaagaacctttccaaaaactatttaaccaaggtatgattcttggcgaaaataacgaaaaaatgtccaaatcaagaggtaatgttgttaaccctgatgaagtagtagaaaaatacggcgcagacacacttcgcttgtacgaatgttcatgggaccactagaagcttcgattgcatggaacgaaaatggactggaaggtgcacgtaaattgctagaccgcatctggcgcttgctagcaactgaagaagggacactcgctgaaaaagcgacacctgatgcgaatgctgactcacgaaaagcctatgctgatatggcgaaaacggccgcccgcgctcgcggaaacgctggcggccaataccggaattaaaaacctgatga

SEQ ID NO: 1142 - DNA, 721 bp, Listeria monocytogenes-4B
gaaaatttacaaggagcttatgccgcgattcaaggtgagcctggtggggctggaatttgttggagaagcaatgcgtcaaatggaggcagcggcgagtattcatacggattataaagcggttagtgaggccatttcttctagttactatatgttagaagatagcatgagccaaattaggcaatcactagatcagctcgaattccaaccagaagaactgaatcaaattgaatcacgtttgaatgatttaaaccaattaaaacgcaaatatggtaaaacaattgaagatatcattcaatacgaacaagaaataagcagcgaaatggaaaaactgacagatagtgaatcacatgtcgggcatttagagaccaaattagcaacacttaaagcagaactaacaaaacaagcaaatacactaacggaaatccgtaaaaaagcggctgttacattagaaaaacaaatcaaacaagaattaaatcacttatatatggagaaagccatttttagtgtacgcttcgaagcaaacaaaatggaactaacagattcagggcaagatagcgtcgttttctatatgtcaacaaacccgggtgaacctttaaaccattagcaaaaatcgcttctggtggagagttatctagaatgatgttagcattaaaaaccatttttctaggcaccaaggtatcacctcgattattttccatgaatagatactggtgtaagtggg

SEQ ID NO: 1143 - DNA, 708 bp, Listeria monocytogenes-4B
  misc-feature (1)..(end): n can be any nucleotide a,g,c or t/u
aggtatctagcagcatgcgtgatggccgacgtgtgctggaaaggaaaccgcgtggatcacgtaatgtttctggagaatgttgcccatgaattactgttgaaaaacgagcaaaaacctccgtttccgttccttcttcttgcaaaaatttagccattgtatattttttcatgcttttcttagtgacaaatttcccgtgcgcaccagcaccacgagcatgtacatctctttctggtgcttgttctctatcaaaatgtgccaatttctcattattcacataatcttctatcaaagttggtcctttacgtcccgctgtcctcgaattttggttatcaccaactggcacaccttgattcgtcgttaaattttttctatctgtcatatgtatatacctccataacaattctatatcattttttatttgtaataattattaaatgatactatttatattttaaagaaggaagagacaaacttcaactaacnggcttcaaaaagaacagacgacctaattcatcgtctgttccctattattgttcagctttaactaagattttgttcacttttcgttcgaattcgcggcgggggatcatctcaactatgaccgcaaccattagggacttaatcttgaatatccatcccctatgcgtataatcttaaatgtgattggtaccacaaggatgaggcttttgcacatccacaatatcattt

SEQ ID NO: 1144 - DNA, 736 bp, Listeria monocytogenes-4B
agttattggtacggctatcctaattattttaggtgctggtgtcgtagcaggtgtttcactgaaaagatctaaagcggagaatggcggctgggtcgttattactttagcttgggggctaggtgttacaatgggtgtatatgtttcaggatatatgagtatggcccatcttaaccctgctgtaactattggtatggcgcttgcaggtgctttcccgtggaattacgtattgccatatatccttgctcagtttatcggagcatattattggggcctcgcttgtgtggttgccttgctatgctggctggcaactttctgatgacgtcctatcacatcttggtgtttcccgccccgcccctgctcttgcccctgggccctcctaactgtcctggcgattcgtcttgccctctctctcgcgttctttgtatgtctctccctccgccgcgttttctgttcttttccgcgtcttccttctccctccctccccctcgttcgtccccttcctcctttcccccgccctcccgccctctccctttgtcctcttttgttccgctcctctcctccgctttcccttttcgttctcccgccctctcttcttttctcccctccttcttctccccttccccgctccttcttgttttgcctctgcgcccgttgcgtggcgtcttctcgtcgttcctccccgccctcttcccccccttccctcgtttcccctttctactataaaaaaaaaaaaaaa

SEQ ID NO: 1145 - DNA, 1166 bp, Listeria monocytogenes-4B
  misc-feature (1)..(end): n can be any nucleotide a,g,c or t/u
atcgagtttgatatgtcgtttcttttgaaatgaagcccatgcgaagttataccgtttctttgacgaaaaaggacgtttgacagttctacgtccggacatgacccttccaattggtcgagttgtgagtacaactggtgtgatgctccctctaaaactttcttatagctggaaaaatttttcgtgccaatgaagattttggtggcgaacaaatttaacaaacgcaagctggaattgaaatcattggctatccttcgattaaagcagagattgaatgtattttaagtggaatcggaaatttaaatgctctagaaattccgaattttcaaattgaactcggacatgcagcaatttatcgtcgtgttatacaacttttaaatctctccgaaacagctgaaattgattttcgccaactaattcaaaataaaagcttaactggtattaaacgatttgttgccaataatccaagtacacttgacgattttattttagccataccaagattatttggcccagcgacagctattttaaaccaagcaaaaagtttaacgactgacaaaggaattttaacggcactgcgtgaaatggaaaccattgtggaagctgtttcttacacagcagatattagtgtcgatttatgactcgtacaagattttcattattatacaggtataatttttagaggatacgctgaccttgctgctgataattttttaagcggcggccgttacgatcacctactagaacaattcaccagctcttcctccccagcagttggtttggctcttaatctcgactccctcacaactctacaaaaccgcgctggcttcatcaaaaaacaaacgccaacaactcttttgatccactacgaccttgaagcactcccacaagcagaaaaattcatgccagaaacaccaaatagtgaattaagctttttcgaaacagcatcaaacgccatctntttttgcaaaaaatggcataattccgaagtcgttcacctntcgagcccaggcatccaaactctcttcccaacggaggtggactggctgaagctcctaaaattgctctaactaaagggccccctgggtcaaagacgcccccgcgcttttcggaaaagcttgcgcttgaccggcccttttgcccgatcaaaagcgtaaacaaataaaaaa

SEQ ID NO: 1146 - DNA, 1103 bp, Listeria monocytogenes-4B
aggcctccgtcacctagagctgtgcgacggccacagtgtgctggaaatagttgcgaaagagcgtggtgttgttcggatgacgttagaagttcgcgtatccaacgatgtagcacaagggctttataagaaattaggatttcaagacggcgccacttcggaaaaactattatccggatacgaaagaagacgcgctagtgatgtgggtggacttatgaaaaaaaatacattaattcttggaatagaatctagctgcgatgaaacagctgcttctgttgtaaaaaatggtaatgaaattatatcgagtgtggtggcttctcaaattgagagccataaacgatttggcggggtagttcctgaaatcgcatcaagacatcacgtggagcaaattacgcttgtgattgaagaagctttaaaacaagcaaatgtgacgatggatgatttagacgggatagctgtgacagaaggtccaggtctagttggtgcgctgcttatcggagtgaatgcggctaaaacgctcgcttttatgcacaatttacctttagttggcgtgcatcatattgctggccatatttatgcaaatcgttttgaaactgaattcaaatttccgctactttcattagttgtcagcggcggtcatactgaactagttttaatgaaagcagataatgagtttgaaattatcggggagacaagggacgatgcagctggtgaagcttatgataaagtggcacgtacacttggtctcgcatacccaggcggcgtgcaaattgataaacttgccaaagacggcgaagatacgtttcatttcccaagagcgatgatggatgagggttcgtttgattttagttttagtggattgaagtcttcctttattaacacgcttcataatttaaggcagcgtggtgaggagccaaatccaaacgatatggcggcgagttttcaagcaagcgttgtggatgttttagtaagcaaaacgattcgtgctgctaaacaatacgatgtgaaacaactgcttcttgcgggaggcgtggcagcgaaccaaggtttacgagaacgccttattcaagaagtaaaactagagcttccagagacagaactgatta

SEQ ID NO: 1147 - DNA, 707 bp, Listeria monocytogenes-4B
gtgatgcgctttacaagcttcaggctggaaaatgaaaatacactttccaagatgcagaagaacttgatgtgaattttgaacggcttatagaggctaaaatgttactacaaggattcgctatttttcttgatgaagatatccctgttgaacataaatggaagaaagcggttgaacaagttaatatttttaaacaacacgtactgcacaaaggtggaatcattcatcatgtgaaaaaatggtgtgatttagaaaatctacctgaagataaaattggcgcgatgttgacgttagaaggcattgaaccaattggacgtgatttagataaattaacgcaattacttgatggtggcgtattatctgtcggactaacgtggaacaacgccaatttggcagcggatggcattatggaagaacgtggcgcaggactaacccgcttcggaaaagacattatccatcttttaaatgaaagaaaagtattcacggatgtttctcacttgagtgtaaaagctttttgggaaacgttggaacaggctgaatttgtgattgctagtcattcaaatgccaaagcaatttgttctcaccctagaaacttagatgatgaacaaatcaaagcgatgatcgagcatgatgcgatgattcatgtagtcttctatccacttttcacaacaaataatggtgtggctgatacagaggatgttattcgtcaa

SEQ ID NO: 1148 - DNA, 772 bp, Listeria monocytogenes-4B
actaatagacactcgatctgcatgttcgagcggccaccagtgtcgctggaaagacttgttagcgagagtaattcaatgttttgcgccggggattccgcaaatttattatgttggtttacttgctggcaaaaatgatattgaccttttagaggaaacaaaagaagggcgtaatattaatcgtcattactacacaatagatgaaattaaaaatgaagtaaaaagaccatttgttaaagcttttttcaatttactgttgtttagaaatacttctgaagcgtttgtttttttttggaagtatagaaattgagacacctagctcaaatgaaatcgttcttattcgcaaaaacaaaacaaataaaattacagcgacattaaaagcaaatttaagtactaaaacattccaaatcagcgaaaatgaaagaaatattttaatttaacattttataaacacgaatgagcctcttcgttcgtgtttatttctattttctattgacattggctaatggttattgtattattatataatgccaaaagaatcgaaactgtttttttgtgtttattattaagcgaaaatgctgtcggaaatcaagcatttgcaatcgattttggcaaaatagaagacatagatgtggctttcaaaaatacaaaacggtataaactttttccgtcttgtactgacacttttaaggaaaattattttctagggagtttcagccatatgaaatgcggtttttttttgtctaaatccaaatttcttctgaccaaaaaaaaa

SEQ ID NO: 1149 - DNA, 970 bp, Listeria monocytogenes-4B
ctaatgagcctcaagatcctgagcagtaactttaaaaccaaataaaagccagttacataatagtagctggcttctccttaaaattattttttattttcaatcgcatctgcaattcgttttaacattaataactcatcctctgagtatgtataaggtaattctaaataccatttctcgagttcaggatgggcaattaaaggaaaggcgtttaccgaattcttttctcgcaaaccagctacatcatctaataaaaaatcggttgttgttccaagaatttctgctaatttagccaaaataaaaattggcggtcggtggttatcattttcatacttgcttattgtggatgcagttgtcccgattttcgcagccagttgtttttgtgttaacctatttttctttcttaaatgaattaatttttctccaaattccaatacgcccacctcacttcacttccagtatagcaatttttcggaaatttttcgagaaattactaaaaagaaatcgcctttttagtttcaaaagacgatttccatattttatacagttggtttcttacgtagaacaccaattaatcctgcgctgattaatgttccaataataattgcaataatatagaaccaaggttgggatacaaggaagataacaaaaactcctccgtgaggtgctaatactttaatgtttaagaacattactaccgcacctgtgatagcacttccggcaataaaactcggaatcattcgaagtggatcggccgctgcaaatggaatagctccttcagtaatgaatgaagcacccaaaatagagttagttaagcctgcatcacgttcttgagctgtaaatttatttctaaaaataagagttgctacaaacgttgctagtggtggtaccatgccagcaccttgtgctgcatattgcctccgctgtgtcctctgatgccgtgatttacgttttcacctcaacacgcatactt

SEQ ID NO: 1150 - DNA, 1072 bp, Listeria monocytogenes-4B
caattatgcgggcatttaatgcatcaaattcatctgaccgagcggaaatagcaacaatttctgtcggacaaacaaatgtaaagtccattggatagaaaaagagaatcgtccgggtatcgtcttctatatttttttctagacttactttcccaaaagtctgatttggcataacagcttccatttcaaatcttggagcttgtgtgcctactaaacgttctgccacttttatccctccattaattatgtagttgtattttgtatcacatgatatattttaatacacctaagaaatactgtaaagctttatttatactcattacaaacaagaaaaaagcacgccaacgaatcggcatgctttatttacttattaattaatcgcgctttttttcaagtcagcttctgtcaaaacttcatgatcaagtactttttcataagcggcttggaattttttgaacgtcccctgctcccatgaataaaataacagcttttgggtatttcaaaagttcttctgggtggcttttctttgattatgtgggttccttctatgactctgcgggagtcgctttgcaagacaaagacctagtaacagtagttaaagaaaaaggacggattgcagaccttgcgagccttgtaccaagtgatgcattcggtacaacaggaatcggacatacacgctgggcaacgcacggtaaaccaaatcacgaaaacgcccacccgcaccaaagcaaatctggtcgttttactatggttcataacggcgtaatcgaaaactatacccttttaaaagaagaatacttaaaaaatcattcatttgttagtgataagaagacagaagtaatcgttcagcttattgaactatctgcagcaggagggtcgactaaagaagcattcaaaaaagcgttatcgttacttcatggttcttacgcgatctgcttaattgaccaaaccgatacagaaacactatacgcagcaaaaaacaaaagcccattactaatcggaaaaggcgaccgcttcaacgttattgcaagatgatgcaatggctgttcttactttccagcgcacgagtgcaagg

SEQ ID NO: 1151 - DNA, 770 bp, Listeria monocytogenes-4B
atcttgggcactagagcatgctgagcgccgaactgtgctggaaagttagatacctcgatcaagatggaaaaccaatccacgagccacaaacaattagcggaaatgttggcgaaccttacgatgcttcaacagataaatacaaattacaaattgatggttatgttttagatacaacaaaactaccgaacaatgcgaatggaacgttcacaaatcaagccacgcaagtaacttatatttatacgaaagaagcacaagatgttaccataacaattaagtttgttgataacaatggaaatccatttgttttaacggatttaacaacctataaaaatggtgatttagtacctgtttatcctaatttagaccaataccatatgagattaaattataatcaacaaatctatagccaaggagaagcagtatctgatattgttctttctgctaaagaaggagaaacgtattccttaccagaaagaatgaccttcaatataatagatgacaaaggcaatgaaatcccctatgtgatttcgcaaaatcctgactttagtagtagcgggattgagaagtgggaaaactaccgaagtataccagccaaccatgaagggacacttactggagaaaatgtagtggttacgtatcagatatttgtttatggagtaatgattcctgcgccataaagtgagaagccggtatttggaaaaaaaccaatctctattaaagattggtttttttcaatacgttctttacgctcaccggatgttttaatacta

SEQ ID NO: 1152 - DNA, 1141 bp, Listeria monocytogenes-4B
cttttagttttgtttctcgagggccactcgcaagcatcagccagcgcgcaatttatgaaacaccaagcgtggcatgtaagaaaaaatcacaagcagcaagtttacgcaaattctaattaaaaggcgatgatttcgttgacactgcttgacaagttaaatgaagatatgaaacaagcgatgcgcgataaagagaaagaaaaactgtccgttattcgtatgttaaaagcagctttacaaaacgaagcaattcaccaaggtgtgaaagatcttactccggatgatgaagtaaccgtgatttcccgcgaactcaaacaacgcagagattctctagcagagtttgacaaagctggacgtaacgacctttctgataaagtccgttccgagattgtcattgttgaggactacgcgccaaaacaattgactcctgaagagcttgagaatattgtgaaagcaactatcgaagaagttggcgcatctagtaaagctgatttcggcaaagtaatgtccgcgattatgcctaaagtaaaaggtaaagctgacggtggtgctgttaaccaattcgtaaaaaaatatctttcataaactaattcaaactagttttgaaacattaagaaacaggattacttcctattttgtggaggaaatcctgtttttttatgcctatttttacttgaattgcgttgttgctatcgcttcgtttttcaagcaaggcaatttcgtgtataatataactaatcaaggcacttataacaggtgaaggggttagccaatgctaaatgaatttaatgaagtagtcgaattatctgatgacacaaatattcaagatttattcggcaataataataagaatatcgaacttttagaagagttacttgaagtgaaaatcattgctcggggagagtgactatctattacaggcgaggaagagcctgttcagccttcgactgccgttgtaaatgaacttattgtgacggtgaaactaggtgtgcctgtttgcgggttgccatatgcccgcaggcgggtcgcattcccgggaacccggccacttgttggctggcgttcctgcttcttgggaccatcttccgttgtatttttttctgatccctgttgctgttgcctttcaccaaaaaaaaaaaaaaat

SEQ ID NO: 1153 - DNA, 765 bp, Listeria monocytogenes-4B
  misc-feature (1)..(end): n can be any nucleotide a,g,c or t/u
gcctttcagcaacttacagctgttcggcggccgacatgtgctggaaaggaactacgtaaccgtatctgtgatgctgcagtaaaattaatgaaaaatgttgattacattaatgctggaacagttgaatttttagtggaaggcgatgatttctactttatcgaagtaaatcctcgtgtccaagtggagcatacaattactgaaatgattacagggattgatattgtnctancacaactattcattgcagatggttacgcgcttcacgaccaactagtagctattcctaagcaagaggatatccatattcacggttctgctattcaaagccgtattacaacggaagatccacttaataactttatgccagatactggtcgagtagatacgtatcgctctacaggtgggtttggagttcggttggatgctggtaacggcttccaaggaacagtagtaacaccattttatgattccttacttgtaaaattatgtacttggggaatgacattcgaacaagcaacgcgcaaaatgcgtcgtaacttaattgaattccgtatccgtggtgtcaaaacgaacattcctttcttattaaatgttgttcgtcatccggattttgcaagtggtaattataatacaagctttattgatacaacaccggaactatttaaattgccacatattaccgaccgtggcacaaaaacgttgcgttctattggaaatgtaaccgatcatggtttcacaccaattaaacgacgaaatcgacctgaa

SEQ ID NO: 1154 - DNA, 661 bp, Listeria monocytogenes-4B
gtgctggaaagtgcagacgtggttgattaatgaagaaacagacaattagcgcctaaaaaggtcggtgtggatttaacatttgacgatttggctaaaattaagatcatttcattgagtaataaatcgcttactggtgaagtaccaccggagattaaaaatttagtatctcttgaaaaattgcttttatattctaataagctatcaggagagattcctgctgaattaggggaattaacgaatttatcagaacttcgattagactacaatcaattcactggaaaaattcctgatggacttggaaagatttcgtcaattgcgttacagaacaacgaactggttggccaaattcctttgagcttatacgaaaatcgaacaggaacaaatgaagtaaatgtatcaggtaaccaagtgaccattaatagtagagagccggaaccaagtatttactcctactcaacttttatttatccagcgactacacctcaatatagtgggcatttgacggcaacaaccacttattttagcaacgtaacgaatgatacattgcttactccttttctttctggcagttctacttttattgatttgcatgcggagtttatgttagatagggaactttttgaaggtcatgaggtaacaattacagatgagtcttctggta

SEQ ID NO: 1155 - DNA, 762 bp, Listeria monocytogenes-4B
aaattttatttaaaacgaagactttttggtatggtattgcgcttactttctgtattgctaccttatcttattttttagcgaagttgccttttttaatgattctcggacaacttgtaactgctattttaattggtattatcattcgtgcacttttcccagttcctgaaaaatggtttactggtattcagttttccaacaaggtaattcttcgtgctgggattattttacttggttttcgcttgaacttagttgatatttatcatgctggctggcgagtgtttctcattgctgccttatgccttagctttggtattactattgtttatttcttagccaaactttttggagtggataaaaaactagctattttggtcgcttgtggtacagggatttgtggtgctgctgcagtagttgcaatttctccacaagtaaaagctgataataaccaaacggctgtggctgctacaattattgcattactgggaactattttcactgttatctatacgttgatttatccaattctgccacttggaccagacggttatgggatttttgcaggggctacacttcatgaaattgcccacgttattgcagctgcagatccaggcggctcatcagctgttgatatggcggttattgttaaattaacacgtgtagccttacttgttccagtctgctttgttgttgcaaaaatgttaatgctggaactaaaaaccgtttttcatgggctgaacttcctgtaccttggtttattttcgg

SEQ ID NO: 1156 - DNA, 848 bp, Listeria monocytogenes-4B
aatggtgaatgggtcgagagtatggcggacaaatacgaagatgtcatcaatccggcgacgggggaagtgctgtgccaagtgccgatatcgacacgcgcagaattagatcaggcggctgtcattgctgaacaagcttttgaaaaatggagccaagttgctgtaccaagacgtgcacgggttctatttagtttccaacagttactcattcaacataaagaagaactagcaagactgattacactcgaaaatggtaaaaatttatccgaagcacgcggtgaagtccaacgtggtattgaaaatgtcgagttcgcggctggagcgccaacactaatgatgggtgattcgctggcttcgattgcaaccgatgtggaggcggcaaattatcgctatccggtcggggttgttggtggaatcgcaccatttaacttcccgatgatggtaccatgttggatgttcccaatggccattgcgcttggtaactcgtttattttaaaaccatccgagagaacgccacttttaatggagaaattggtggaattattttcctaagcgggtcttccaaaaggtgtattcaatgtagtgtatggtgcgcatgatgtggttaacggaattttagaaaacgaaataattaaagcggtttcttttgttggttctaagccagttggtgaatatgtatacaaaacagggagcgcaaatttaaaacgagtgcaagccttaacaggtgcgaaaaaccatacaattgtgcttaatgatgcggatttagaagatacccggacgaatgttatttcagcggcattcggatcggcgggtgaacgttgtatggcatgtgcggtcgtcacagttgaaga

SEQ ID NO: 1157 - DNA, 790 bp, Listeria monocytogenes-4B
gggccactagtcgctgcctgagcgccgaactgtgctcggaaagttcgtttctgcgtcataccattcctcgaatgtatatactcccttggttggaactgttggttcttcaattaattcattcacaactactgtcaaacttgtttgctctccgtccacatcaaaaacggcagtgtaagcctctgttaatggttgggtgactgttccactgaaaggaactgttgcatttttgaaaacgactgattggttaaatgtgtaactaacactattaatgtagctgtttaaatcccacgttaaatcaggactagtatatgttccattgtcactaatagtatcaggtgcaataagctcaccagaaaggccttttatcacatttggaacaatgattttattttgataatatacgggttggttggtaattatttgatccgtcaactcaataatagataagttgggaatattcgcaaggggactcacatcgctaatttgattctctctcaagtaaacttctgtaagactagataaactagcaagtggcgagatatcgcttactttacaattttcagcgtttaatatggttagtttagataaattagcaattggggttaaatcgctcacttgggtatatccgagtgataatgtttgcaagttagataaagctgctagtggacttatatccgttatttgattgatatccaaatttaattcctgcaaattggtaagacctgcaagggaagtcacatcggtaatatctgtataaataagatgcaacatttttagactttttaatccc

SEQ ID NO: 1158 - DNA, 478 bp, Listeria monocytogenes-4B
tgtccggcaccgtgtgaatgtggctgtacggtggcaatttcggaacctgctgtagggattaaatccatcgaaaaagcgattattgaccgaggttttgaagaaggctggattaaaccggctcctcctaaaaaacgtaccggtaaacgaattgctgtgattgggtcaggaccggctggacttgcctgcgccgatcaattaaataaagctggccatagcgtaacggtcattgaaaaaagtgatcgcattggtggcttattaatgtacggtattccaacgatgaaactggagaaagaacaagtaacgcgccgagtgaacttgatggcggaagaaggaatcgaattcgtcacaggtgttgcagcagggacagatgttacttttgcagaactacgagaagagtatgattctatcgttcttgcgacaggagcagggaatgcgcgcgatatcccacttgctggacgtgatgcagttgggattcact

SEQ ID NO: 1159 - DNA, 1342 bp, Listeria monocytogenes-4B
acttaaggcactgtctccatgctcgacgccgacatgtgctggaaaggaccgtctacttcaaattgtggataaaaacacgccaatgcttgaagctttccgtgaagcagataatgttttacgtcaaggtgtacaaggtatttctgatttgattgccgttccaggtttaattaacttagactttgccgatgtgaaaacaattatgactaatcgtggttctgcccttatgggaatcggtattgcaactggtgaaaaccgtgccgctgaagctgcgaaaaaagcaatttcttctccacttcttgaaacttctgttgacggagcaaaaggtgtcctaatgaatattacaggcggatctaacctaagcctttatgaagtacaagaagcagcagaaatcgtatcaagtgcatcagatgaagatgtaaacatgattttcggttctgttattaacgacgaattaaaagatgaactgattgtaactgttattgcaacaggttttgatgaagaaaagcaagcgccacaacaagcgcaagcaaatcgccgtccaaatcaatctattcaagtaaatcgtcctaattatgctgtacaagacgaaccacaaaatgattacgcgcaaaatgcgccacagcaagcaaatgcaccagttcatgaacaacaagctgaaccacaacaaaatagttcagatgttgatgtaccagcatttatccgtaaccgtaaccgtcgcggataatacttataacataatttcacccggccacttttgaagcattgccaagtgaccgggtatctgattataacaagaagcgttttaaataaagcacttcgggaattatatagggtgataaaaaatgacaaaacaagctaatttacaaaaagtaacggcacaaatagagcgtgcctgtgaagaaagtaatcgtcagccggaagatgtaacgttagtagctgttacaaaaacgattgatgtagctggaatcacagagctttatgatttaggtatccgtcactttggtgaaaatcgtgcagacgttttccaagaaaaaacagtagcacttgcagataaagaagacatttgttggcattacattggttctttacaaacacgtaaagtaaaagatggtttaccaaaaatcgattatttgcattcgcttgacccacccatcggtagccaaggaaatccaaaagcgagctactaaacaagtggaatgtgcccttgagtgaatatccgtggtcagggaaacccccctggccctccccagaacaggcctctgcccggcgccccaagcgacgccccgccctgcgcatcgcgccggccacccccccccctgctgtcgagccccccatcccccag

SEQ ID NO: 1160 - DNA, 691 bp, Listeria monocytogenes-4B
gtgggtttgatacggacgacgaagtgaaacggttggcggacgagaaagaactgcccattttatcgacttcgtatgatacgtttacagttgcaacgatgattaaccgcgcgatttatgaccaattaattaaaaaagaagtagtatttgtggaggatattttgaccccattagaaacaactgcatttttatctacgtctgataaagtggaagattggcataaaatggaagaagcgacaggtcatagtcgatttcctgtagttaaccgagcgatgcgactgactgggatggttacaagtaaggatattctggaaaaaaatccaagtatttcaattgaacgagtaatgacgaaaaatccgttaactgtgggaccaaaaatgagtgtagcctctgtggcgcacatgatgattcgggagagtcttgcacgcctctcagtcgttgcagatgactcaccatgcatcgggatcgcccgtcgacaggatgtgctgaaacccctgctcccgatttgccacccgcgcggtggtcggtctatccctctttcattctacttgctatgctgttcgtcctcttatcttattctctctaataggctttccggtcctttttggtgtggcgttttttgcacgcggctcccgctctcttttgtttgccttgtcttttccctcgcttttgccccccgcctacaaaaacaaaa

SEQ ID NO: 1161 - DNA, 1182 bp, Listeria monocytogenes-4B
gggcagagcgacgggcgcggggcgcggcgggggaagggaggagccgaagaaagggcgagacacgggcaggggcggggggggagcggacgggggaggggggcggggggggggggacggcggagccgccggaggaggcgaagcccgacgggagaaaagacagagaaaggggggaagggggggaaagaagcgggcgacaccgacgggagacgggggagggcgcgaggggggggggggagggggcgggggcggggggcgggggggcgggaggggggaggaacggggagcaggcgagaggaggaggggggacggagcggagcggagccaacgccgggtgacggcacgggatcgtcccggcggcggaggcccgcgatgggggcggggtcccccccccggcagtcgaaacgattagatcgccaagcatgcgaggcgtttcaagatcaaattcgccccaatcaatctccgtttccccgtcgcccatttcttctagcgcgaacgaaataacatcggttgcttgatctttatcccgatattctcggttaatctcacgaataccttcattcgttgtaaaggtgagtgacagctctgtcccttgttcgatttttaaatactcagccgcaaattgtaaaatattctcaactagctgattatcttcatcaagtgaattcttggtttcgtctagtaaatcaatttctaagaccgtcatcttttgtcctcctatctcaatctatgccatcacgatatagcatgctgtgctcatatatgccatcgaatgtgcgtatttaggtgcccgcaatgatccccatcgcttgcgtacggataccacattccgcgtatttccctttcgggcatcggcgcctcgtcgttgcctccccacgtgtccagccttctttcccacttttttcctctctctcacgactgcgctgtcgattcttccgcgtcgcgccttaccccactcccgcgggcgattcctgtttcggcctcgtttcactagaggatttactcaccccgggcgagaatagctccacgcttcccgtccccacgttccactctccggttttttcacttttccctcacccagcatcttcccagtcggtttccgcctatcgagagcgttccggtcgcgcattgcgtcctttccactctttcacgattgcgcccacgcgcccctccgatttcctcctt

SEQ ID NO: 1162 - DNA, 856 bp, Listeria monocytogenes-4B
  misc-feature (1)..(end): n can be any nucleotide a,g,c or t/u
aagcaaaagtaatgttcgactggaaaacttcttattcaggtgaaggcggggaagcaaaaatcgattctttagttgcgaccgcaacagctacaagcgaagacaaagctggtaacaaatctacctctactggctctttaaaaccaaaagatattagcgcaccagttgtcaaagcagataaaggggaggttacgtataatcttggaagcaacgttaccgaagagcaatttttaacagacattaatgctagcgttactgataattatgactccactattagtcttacaagcaattttacttccatagttaatctagcagtgagtggtgattactcggtcaatgttcaagcaaccgataaagctggcaacgtctcaaatactgtaaatgtcaccgttcatgtagcaactccggcacctgtagccggagcgaacataacggtcaactatcttgatagcgatggaaataaactcgcagaatcagacacattgacgggaactatcgatagtaattaccaatctacaagtaaaaaaattagcgggtacactctagaaaccacaccaaaaaatgcaactggtactttcactgacaccccgcaaaccgttgattatatttataaaaaagataccgttaccccaacacctatagttgatccggtcaatccagttgacccggttgacccagtaaatccggttgatccagttgaccctgtagtaaataaaccagtcattgtgacaccaaatacgcatcaagttactactaaaattcagtagaaaaaacaatctttccagcacagttcggcgctcaggcatagactagtggcacaagtccctnccaaaagaaaagcaccnnncaaccttca

SEQ ID NO: 1163 - DNA, 1059 bp, Listeria monocytogenes-4B
  misc-feature (1)..(end): n can be any nucleotide a,g,c or t/u
gaaagagcgggatattgttttgcatcgcttttcatgtctacttcgtctggaatccagtagttagtagaaagttctttatacgcacggtagaaagaaggatacgggatgtcattccaatttaaaatcccactagtttctccgtttatgattgaagtagaacgattaggaaataaaggttctaaaattttaatacgtgtcagttgttctttttggttagccatctaggcaagccctccctttcattttgtactaagtgtaaagtattttagagatgtatcagcttgagcaccattcgcactcttcaacatcgatatcgttagagcgaacatagtaagttgttttaagtccttcattccaagccgtcatgtgtagttcaagtagtttacttgctttgataccacttggtacatagaagttaaagcttagtgattggtctacgtgacgttgacgacgaccgttttgacgaacgcttgcgaattggtcaactttgtaagcacctttttcgtagtatgggtatgtgcttaagtttaagtccggtgcaataactggacgacggtaatcttttttctcttcatagtagaatgcactgtaaattgggtcgattgaagcagtggatccagcaatttgagctgtactcatatttggtgctacagctacaagatatgcattacgcaaacctttttctgctacttcttttgctaattcttgccattcaggtgaattatagttacgacgcgagaagtattctccagtaacacagtcactgcctttaaagactttataagcacctttttcaagaactagtttgttacttgcgcgaatagctaaatagttaatttgttcatataattcatcggcatatttctccgcttcttctgagtcccaagcgatatttttaagagcaagcagatggtgccaaccaaatgttccaagtccgatagaacggtacttttggttcgtgatagtagcttgggaatttccagcnacactgtcgngccgatcgcagcatgctagctacngtnaactgcaaggtcagncnncncaacgggngttagccct

SEQ ID NO: 1164 - DNA, 1162 bp, Listeria monocytogenes-4B
aatcgacatccgcgaaaaattagtttttaaagaaagcgaagaagaaatggccttagtaacattacagcaggaaaaaagtatcctcgaaaatgttattatttcaacgtgcaatcgaacagaaattattgcggttgttgaccaaatacatacaggtagatattacttaaaacgctttatggctaactggtttcaaatggatatggaaaaaatcgaaccttatttgtttttccatgaagaatcagatgctgtcaatcatttatataaagtaaccgcgggacttgattcgttagtactgggagaaacgcaaatcctcggacaagtaaaacatgcattcgaaatcgccaaacaaacggctacaacaggtacacttttaaataaactttttcgggaagtagttactttcgcaaaaaaagtacaccaccatacaaaaattaatgaaaatgctgtgtctgtcagttatgccgctgtagaggttgcaaaaaaattatatggttcattagacaataagaaaattgtgctagttggtgcaggggaaatgagtgaactcgctttgcaaaatctcgctgggagcggcattgcagatataaccatcatcaaccgtactaaatctaatgcagaattattagcaggggaatttcaagcaaaagtgggcgcatatgaaaatatgaatgaacatttgatgctagcagacatcgttctcgtttcgacaagtgcggcagaacctattattaaacaagctgctatgcaagatttgatggaacaaaaagcgagttcgatgcttgtaattgatatcggtttacctcgaaatgttgaacatgattgttcatacattcccaatttccatttatatgacattgacgatttggcaggggttgttagcgcgaactcattagagcggcagcgaatcgttctggaacttgaaaaaactattgaggcagaagttcgtaactttttcgagtgggaaaagcaactaggcgtcgtccctgttattcgtgctttgcgtggaaaagcgttagatatgcaagaagttactatgactagtttagaaaataaaccttcctggactaacagaacgcgaatacattcaaattggaaaacatttgaaaagcattataaaccaaatgctgaaacaacctatctcagaattaaaagaaatggctga

SEQ ID NO: 1165 - DNA, 1017 bp, Listeria monocytogenes-4B
aacattacttatgctagtcatgatttatccttttatttatttagtattaaactcatttgctgcttgggatcaggtagataaaaagttgattcctacagaattcactactcgttcgtgggattggttatttggtaattcagttgttgcggcaccggcgccgtggattcatgcgtttattaatacaattattgtttccaccattgcgacaggcttgatgttgcttttcggcctaatggtaggctacgcactagcaaaagtggattttaagggcaagaaaattgttaataatgcgattttatttcaaatgttttttccggcaatcatcttgctgattccgcagtttttaatgattacggactttggtttattggatacctatgcgggaatgattatcccgactatgcttagcttatgggctgtatttatgtataccaactttttcaaagcgattccagatacattaattgaagctgccaaactggacggggcgagtgatttgaagattttgtttcgggttgtgctgccaatgtctaaatcaattacgaccgttattttcttattccttttcacagacagatggacgaatttactttgggatatgcttgtaacgaagagtgatggaacggtcacattgaatgtgctaatctcgcaaatgtttggaccatatgcaacctatcctgggccaatgtatgcggcatctgtgttactaacacttccacttattatcttgttcttattcttctcgaagaaattccaagaaggaatgcaatttactttgaaataaaaggagcgactgaacttggaattttggcgtccctgttgttttttgaaatcggtgtgaaatcctctcaccatctctctggtcatggctcccgcgctctccctggccttcccttctgtccccgtttgctcttgttcctgcccgtttccgtcttgcgttctgccccctctccccgctgcgcgcgccgtcccggcggttcccgttgttttgcgcttcccaaccaaaaaaaaaaaaaa

SEQ ID NO: 1166 - DNA, 731 bp, Listeria monocytogenes-4B
tcgtgcagcaatcaatagccgtcgcgaagaaggcgacgaaattccagtaatgcaattcatccgcaaactagatgccaaaatggatattttagatatggacgaagaaatggcggaacgttatttaaatgaaggattttcaggcggagagaaaaaacgtaatgaaatcttgcaattattaatgatcgagccaaaattagcgattttagatgaaattgactctggtcttgatatcgatgcgcttaaagttgtctctaaaggtgtaaatgaaatgcgcggcgaaggattcggttgcttaatcattacccattaccaacgtttactgaactacatcacaccagattttgttcacgtaatgatgcaaggtaaagtagtaaaagaaggcggacctgaacttgcgaaacgtttagaagcagaaggttatgactggattaaacaagagcttggtatcgaacttgaggaagaagaagcagtagaccaacaataaggaagtgaggttaaaatcatggcagaaaatatgacgattaaagatgattttatccacgctttttcaagtaatgcgaatgaaccggattggtttttagatatccgtcgcaatgcttttaaagcctacggggaactggacttgccttttgtggataaaacaaaaattactcgctggaatttcacaaagtttgagacgtttataccttttaaagaaggcgtaacgaatgaaactctaccggaaaaagtag

SEQ ID NO: 1167 - DNA, 948 bp, Listeria monocytogenes-4B
  misc-feature (1)..(end): n can be any nucleotide a,g,c or t/u
tgggcccttgagaccatgcctcgagcgccgccagtgtgctggaaagattctcgttccatctgcaaacgttgtactttcattgtggcagtacgagggatttcatcatatttcatgacaattggctcattcatatgtggtaggtcagaaactgcgtcccaccatgcatcccaattcatttctttatcatcatgaactgcgataattggttgcgggctgccattttcaccacggataatgacaacttcatctaagaaagtcagcgtatcaagcagtttatcttcaattgcgagtgtactatcaattgtttctactaaatcgacttgacgatcttgcaagaataaccggccttgttcatctttcataccataatcgccgctatcccaccaaggtccgtacacattctcttcaaaacgagcttcttctttgtaataagtaagcgcgcgacctttggaaagcatttgaatattaccactaaccccagctggaacaggattaccatcttggtcaacaatccgaacttctgttaaaccaggaacgccaatccccatatcacgcgcatttagcgtttcaatagattgaagcgtatgaccacgtaaaatcatcggaccacattcactttgtccataaatttgtaagaaaattggttttttatattcggaagtacgaaggaaaaccgccattgtttctttattaatcgcatcaaaagtagaatgataaaatttgatactttggaaaacgtctggtttttcacgagcaagtgacgcccattgaacaaaatgatttggatgcgtttcgagcacatacggtttgtattcgcgtagcactttttcgacattcgctttagtcggattggcaattggcagaagcgggaaaccgagcgacatcaaggatgatacaccaatattaaaacgagaatgtactggtgagatatggaaagctacangccct

SEQ ID NO: 1168 - DNA, 781 bp, Listeria monocytogenes-4B
tgaaaaaatgattcttcaatcaaaatgcggaattcgtcaaggattctttgatttttcaaaagagcacattattgcttctgtggaaggtagcttaaaacgcctgaaaacagactatttagatacacttttacttcaccgtccggatacacttttcgaaccagaagaagtagcggcagctttcacagaattagagaaaagtggaaaagtgcgtcatttcggcgtaagtaatcaaaatccaggtcaaattgaactactgaaaaaatatgtagaccaagaattaatcgccaaccaactgcaatttagcattatgcatacgggtatgattgatactggttttaatgtgaatatgacgattgatccttcacttgatcgtgacggcggtattttggaatatagtcgcttaaacaacatgacaatccaagcatggtccccgttccaatatggtttctttgaaggagttctcttggataacgatgaattccctgaattgaacaaagtaatcgacaaaattgctgctgacaaaggtgtaactaactcacctatagcggctgcccggattcatctcttcccatctagctcacaacaccggctggtcaatgaatccccgcagaatcgctgctctccgcgaacctctcgtcggggcacttcggcccgcaccaatggtcttcaatcctattttctctgtcgcgctttctcaccccctccgccgcatcccgcccctttatcccctttatccctatccccaccctttttccccccacccgagtctaccccaacacaa

SEQ ID NO: 1169 - DNA, 1335 bp, Listeria monocytogenes-4B
ggccattagacaatgtacagctgctcgacggccaccatgtgctggaaagggaacgtttccgtaaagctacgatgagtttgttatcgatgcaactgaattcgattacgattatggatattatttcgtatagtggggcggcacttggtattggtatgtcgttaattatgttcacaaatgggaatataagcatgactggtatgttgatgttcttactactaagcgccgaattctttattccaatgcgtcaactcggatctttattccatgtggcgatgaatggaattagtgcttgcagtaaattgttcgcttatttagagttaaaagagcaagtttatggctcagaagaactagctaaaccgttagaaaaaatggaagttcgtcatttgacatatacatatgaagaaggtaaagctaaagcactgcaagatatatcagtaaatttcaataaaggaagtttttcagcacttgtcggaaagtctggttcaggaaaaagtacatttgtccgagtattattaaatcaattacctggttatcaaggggaaattgtttggaatgatataccgttagctagtttgagcgcggaaacacttttcgacaacaagctgtattagtagataatcatggttatctttatgcaaatagtattcgggaaaatttattaattgggaatccagctgctaatgatagcgatttatggaatgttttggagcaagttagtttggctgattttgttcggaagttacccgagcaattaaatgagaatttagaagagaatggaagtaatttatctggtgggcaaagacagcgattgttactggcgagagcattgctatgtcaagcggaagtctatgttttcgatgaaattacgtctggtgtggatttggaaagtgaaaaaattattcttttggtgttgcagaaattagctaaagaaaaaatcgtgctctttatttcgcatcgcttatataatgttttggatgcggatcaggtactcgtttttgacgcggggaaattgctggaagtggcgagcccagaacgattacagcaagaatccaattacttcaaaaactactttttagaagaagaagcgttgctgaaagggggagcatgacatgtcagaatggacaattattggctggttgttaaagtttgttaagccgttacgaggaaagatggttttggcgattttacttggtattattagtaatttatcggttatcatgatttctttaatcggtacgtatggcattatcgcggtaattttacagcagcatctaaatccttataaatggctctttgtgatggttgcttgtggggtggttcgcggtttggcacgat

SEQ ID NO: 1170 - DNA, 720 bp, Listeria monocytogenes-4B
aatcatcaagacagcatttggcaatcaatctagttattaaatttgtgctgctctgcttatttataggtacttttattgcttcttatcaatcacttcacacattaaatacaacactagctaatattgatgtatgggaagctacaaaggacatttttaaagtaaaagtatgggttgtacctgacgggattcaagataactcaaaagctgatgaagagctcaacaacactttatttgcttcctatgaacaaggtccatttcacaaagacatgctcccaatgcatcgaaatattcacaacacgatcgaacactttttctattttctatcatattgatttcatacacgattttcttattcccccaccttcctggctctcccccctttcctctcccccccattttccttgttctcatattatccttcttttttcccgccattccccccgtctatcaccctcaataccgctgtcccctccttagatttcttcgtgttcgctcgcccctccttcatctcctccactcccccctccttctttggtcggtcattcttcttttccatccccttttttttcttctcctctcccccccgtctaccttccttcccatacacaaaacctattctccccctacctcagcttctcctcctattctttctcccccccccatcctccccacccccatcccacatctattatcacattacatctagaacccataacacaa

SEQ ID NO: 1171 - DNA, 1015 bp, Listeria monocytogenes-4B
attgctttgtcagccaattccttatgcgaaaagaaaaacatttgcttatttgttcagtcggacatttattagaacaaatgaatatgccggtctttacattagacttaccgtaattgccgtgattttactcgtgtttgttcaaggtttttatttaaatatcatgggggcactactatttttgtatttaactggttttcaattcatcccgatgttaaaacattatgatgcacaaattatgctacgactttatccgattaatgatcgttatcgtcatcgcagttttattcactttcttcggattttgttactcgctcaagcactactctttagtgtgattggcattgcacaaaatgggaccatcagtgggatgatcattttaggaattaatttggcttttgtagttatctttacgttcctttatgcaccagtcagaatgaaaaaaatgtacgaataaaaaaagcgatttggatgagtggtccaaatcgctttttcctatttagcatcatgggaaaattctggataatgataaatatcttcatgtgagaatccagattgagtattattttttttcatgatattggtaatttctttggataaaggtgtttttttccaggcatgaaaaaatacttccagaatcccaaaaggaaataattaaaaatttattcatattcatcgcttttgtgagtttcgtactttgcaagccaggcctttcactaatatgcagactcgctcggtgttgcattggccggatagttgggtcttcttcctcgcggcgggggccctattcacagacgactcctccccaatcttttaaggaaccattggtcttggattctgtcctttgcttcgctttgaccgcccgtctgctggctcccccgcttttcccccccgtttgttttgttgggcggcgtccggcgtgttccggtgttgggtcgccgctcgtttcccttccgtccgctctgtgcgtccttcgggtggcgggggctgtccgccgcgggaccacgagaagacaaat

SEQ ID NO: 1172 - DNA, 701 bp, Listeria monocytogenes-4B
  misc-feature (1)..(end): n can be any nucleotide a,g,c or t/u
ggaccatctgggacaaattccaccagtcccacgtgggtcttttgttagatgccgatcctagtgaaaaacaaattgcgacatacttcaacaaatctcatgtgttgcaattaatgcaagctgatacaatcatcggcgttgtttgtttatttccactaaataagaaccaactcgaaataatgaatattgtggtgttcttcagaatacagaaaccaaggtattggcaaaaaattactcgaaaaagcttttgattatgcaactcataaacacttttcaaaaattatcgttaaaactggaaattctagtattgaccaacttgccttttaccaaaaaaatggttttcggatgcagcatattatcccaaattattttactgaaaattatcctaatcaaacaattatcgaaaacggcattgcttgcttagatcaaatcattcctattaaaagaaataaaatcctgatgaagtttatcatcaggattctttgttngctggtttaatcggtgagtgccattgctgaaccaacaaccgctgaaatacgttctcgctattcggctgccattcctttgcgtgcccctcctccttaactgcttcaccggttctcggccctttcgcgcttctatccccctcccttgcccttcctttctctcttaccttccctttctcttttcctcccttcgttctcccgcctctccatatcactcat

SEQ ID NO: 1173 - DNA, 749 bp, Listeria monocytogenes-4B
cgacagtgtgctggaaaaagtaataaccgatcacgagaataatcgtgaataagaaaatcagtgtcgacaaagcattgatagaaagcgaaatcccttgtctagctcgggaataaatttccactgccaatgtcgagaagccatttccagttacaaagaacgtcaccgcaaaatcatctagcgagtacgttaatgccattaaaaatccagctaaaacgcctggcataatatacggcaaaataaccttagaaagaacttgccactggcttgcacctaagtcgcgcgccgcatccattaacgtcgggctcatttcttgcaatttcggcaaaatcatcaatacgacaatcggaatactaaaggcaatatgcgacactaggacggaaataaaccctaattttacgcctaaaatcgtgaagaaaatcaagaaactagcaccgataataacgtccgggctaacaatcaacacattattcaaacttaaaagcgaatttttcgcgaatggttttggcataaatttaatcgccagcgccccgcaaacgccgataatagttgcaatcaccgaagaaagcagcgcaattacaaatgtatttaaaacaataattagtaggcgcgtatcttggaaaacttctttataatagccaagcgtaaagccactaaaattatgcatcgtgccgcctttattaaacgaataaaaaatcaaatagaaaatcggcgcatataaaatcacaaaaacaagcactaaataaatcgta

SEQ ID NO: 1174 - DNA, 758 bp, Listeria monocytogenes-4B
gatacaaaaaagactccggaagaatgggaacactgaacgtttagaacaaatgaaagcggatattgctgaacaagattctggttttgtagagatagtagaaacggtaaagttactacaggaatcgggggcacttgaagctttgaatagtgcgattaaagcgcgcggggatattacgaaaacgtttctgaatgaatggcgtaaggaaccgatgacgaatgcgattaataacatgatgatttcaagtaagctattgaccgatacaaaaccagagcaaactgaggaaatgatagccaatttgaaaaatgctgcgaaaaaagcagaagaaagcgcgaaaaaagacgaaatcatgggcatgttagcgatgatgaaggcgctgaaagaccccgatatcaaccgcgcactccggtatggtgtgacctttttaaaagaagttgggcaaacattaaaataagtagacgaaacagcgagactaagatgtgtcgctgtttcagtttagagaggagtggtttttgatggatattgtttcgcaccaaaaaatccgtcgttttgaagcgggcacttttcaagaaattgaatcaagtgttgcgaccgagtatccgctaactatctacgttaacgaccaagaactcgtgaccatcgtctgcacgccagaatatctggaagatttagttgtgggctttctgacatcggaaggcatagatccggggtcctcaagacatcctttccgcggatctcatgacaagagactggacacaaaa

SEQ ID NO: 1175 - DNA, 849 bp, Listeria monocytogenes-4B
gcgctggaaagaagaaatgatgtacgaacactaaaacgaagatgtgcagatcagtatctaaccaaaacggcaagactatctcaactagtcttgctgtttttttgcttctatttgtgataaagtaaaaaagacattgaagtaaaggttgtgcaaaaacatgagagtcattgcaggacaacgaaaaggacacgctctaaaagctgttccaggaaacaatacgagaccaacaacagataaagtaaaagaatccttattttcgattattggtcccttttttgacggggatatggtgcttgatttatttgctggcagtggtgggcttggaatcgaagcgttgagtagaggtgccgaacgagctgtttttattgaccaagcagcgctcgcaattaaaacaatccgccaaaacttagaaggatgccattttacagagcgtgcggaagtataccgaaatgatgccgaacgagcactcaaattactccataaaaatgagtggaaattcgaccttgttttcttagatccaccatataaaaagcaacaattagaaaaattactagtaactttagaaaaattagaattagttaacgaaaatggaagaattatttgcgagcatgacaaagaagcaatcatgccagatacaatcggtaaattcgagaaaatcaaatcagtttcttatggaattactgttttatctatatttgaatttcacgaggcgtagaaatgggtgacaaaattgccgttattcccgggacatttgatccgattacgaatgggcacttagacattattgaacgggcagcgaagatttttgatgtgcctgatgtttccggtttaaacaactcatccaaaaaa

SEQ ID NO: 1176 - DNA, 831 bp, Listeria monocytogenes-4B
  misc-feature (1)..(end): n can be any nucleotide a,g,c or t/u
tatgtcagagcaacttcttcatattattcagactaaaaatccaatcttataattctgacatatttgttatattattttccttctttgtaacttgaaacgagggcttcataatcctagtcttgctataataaagacatcttagaaaggtgtgttgattatgaatgatcatcgtattttaaatgctttaagttattttagtatcctatttgcacctgttattgtgccagtattgatttggatttttgctaaatcagaggatgttactcatcatgctaaagttgcattactaactcacattattccgactatcgctggtgttctatgtttctccagtgttttcgttacagctttgacaaatggcggcttactcgcaaatgtatcatttttcgttaccggtagcttatttatatttacactaatagctattgttggactgtttatctttaatattgttcgaggtattcaaatgcttttaacgaaaaatgaagaagatgcttggatttaaatgaaaaagctatcctaaatttcttaggatagctttttttttattttatttgtttaggtttttttaagaagaatactccagcaacactaacaaacaatccaatgaatagcattgtataagggaactcatctcctgtagaacgaagtcctctctcattatttgttgcatttgctgctggcctaaagttcctgttctatccgctccggcctctgtcctgtncctgattctgtcccctgctctgttgtctctcacggccccaccttgccccctatnntccgcctcgacttcctctctaactnnggcgcatcccacgaagattctgccct

SEQ ID NO: 1177 - DNA, 808 bp, Listeria monocytogenes-4B
caacgtgtgctggaaagtagtaatgcctttattgcacggcaaactcctcgtaatgaagctggaaaaattctcggtactttgcaactcggaggcgtgactgggatgctgtttggtcccttgattggcggcgcgatggcggatttatttggctttaaagatacctttacaattaccggaattgcgatgatggttgcggctttaattgtcgcttttggtgtcaaggaaattcgtacagaagaacaaaaagaagctgccaaagtcgtttattctcgtcgtgcagttttaaaacaaatttttacgctacgagttctattcacggtgatggttattacagcacttatccaaattgcgaactttagtgttcaaccgttgcttgcgctttatgtaggagatatgacgcaatcagacaatattgctttcttgtccgggctggcgttttctgcgacgggattcgggaacttggtgatgacgcgaaaatggggacagcttggagacaaatatgggtatgagaaaatactgaatatcttgttgattatggcggctgtttttgttattccacaggcattcgcgacgaatctttgggtgttcattttcttccgctttttattcggtattgcgattggtggaatggttccttgtacgacagcttatattcggcttgcggcgcctggtgttatgcaaggcgaaatgcttggctataatcaaagtgctcgctttttaggaaatgttatcggaccaatcctcggtgggacgctcgctggtttcacaggaatttccgagtgtgttcttatttatgagttttatgttc

SEQ ID NO: 1178 - DNA, 421 bp, Listeria monocytogenes-4B
taaactggcgattattgctgtcacagaacgtggtcgcgatttagcaataacgttaacaaaaacggtagcagcaacgatttttgtaccaggaaagcattgcaatgagcaaacaaattctttaacgccggattttggaacagcgatgcgcgaaattttcacaaaatatcaagcattgatttgtattatggcgactggaattgcggttcgaacgcttgctccagcgatagaagacaagctgtctgatccagcagtacttgtcatggatgaacatgggaaatttattatcagcttgctttcaggacatgttggcggggcaaatgaactaaccgaacaaatcgctatgataactggtggtgcggcagtaattacaaccgcaacagaccgcgcaaatgtagctgcaattgataatatcgccaaacaa

SEQ ID NO: 1179 - DNA, 789 bp, Listeria monocytogenes-4B
  misc-feature (1)..(end): n can be any nucleotide a,g,c or t/u
gctgcatgttcgagcggccgacagtgtgctggaaagtagttcagatgggctacaatagagtggattataaaagggatgatattaggaggattgcgtaaaaatgagtgcggatcgtagctttacgttaaaagcgggaaatcgtgctgttttgctcttgcatggctttgcagggactacagaagacgtaagagaacttggagaaattctagcagaaaatggatacgggtggcatgcaccaaacttcagaggtcacggggatgaacccgctattttcttgaaaacaacaccggaaatgtggtatgaagatgccgtggctggatattgtcaacttgaaaaagacggatataatgaaatctgcattcgccggcgttccactgggcggcgcctccgcgcggaaaatggtgagaattgcgctgccgcccgcgccactgtttctttttgctctcctcctgcactccctttccgttttctttctccctttgcctcctgttgcttccttatccccgttcttcctcgtttggtgtctcctccccgccgctttcgttcgttccctcccgctcccgcctcgggtcttttccccgccctccccccgtttgtttcctccgtctcgctcccattcccccccgtgtcnccccgcctctgttttgtctgtttacccagcatcccccctcccttccctcgtctatgttccccctctctatttccccctgcccccccccgtcttgccgtcgctgttcgctatttgtcttctcttttgccccgtgctcgcttcttcnctcttccactcta

SEQ ID NO: 1180 - DNA, 654 bp, Listeria monocytogenes-4B
atgctggatcgggcgaacgtgccgccggaaaggaaagtttagcggagcacggcgtggaatatttagaaatctcgctctattgatctgaatccattagagtcgaatggtatttctaaagacgagcttgcttttattcacctatttttaattaaaggtttgctttcagaagatcgcgaattatgctccaacaaccaacaattagccgatgaaaatgaaaataatattgcgctaaatggtctcgcgcaacctgcccttaaacattgtgataatgaagaaatatctgtcgtagaggccgggctcccagagcttaataagatgagcgatttcatccaaagcttgcgaccagaagacaccaaactccaagcaatcatcgaaaaacaaaaagaacgtctgctacaccctgaaaaaacgattgctgcacaagtgaaacaacacgtcacaaaagaaggctacgttgacttccatttaaaccaaccccaaacttacatggcagaaaccgaagctttaccctacacattgattggcgcacaacacatggagctttctccccacatcatttggaaagaccccctcccgcgcggcctcccagccgctgtctcccaccggcccgaacacttccttacctctccccccggcccccctgctgcagcctgt

SEQ ID NO: 1181 - DNA, 1023 bp, Listeria monocytogenes-4B
ttagagagatgaaacagcaaaacgaaactaccgagcggaacttgcacttcaagttttcgttgaccgcatccataaatacattggttcttatgcagctcgtatgaacggtgtagatgccattatcttcacagctggaatcggtgaaaatagttcatactttcgtgaaaaagtgctatgatggacttgaattcatgggcgtatactgggatccagcacttaaccaagtgcgcggagaagaaagattccttaactatccgcactccccggtaaaagttatcatcattcctacaaacgaagaattaatgattgctcgggatgtagaaacaattaaaaacaatcactaaaaaagaaaaaaaggctagctcttaattaagagctagcctttttttctatccttatttttcttctttataatcaggaacatcattacgtactacaagaacatcacaaggggagtggcgaataatatactcagatacactaccaattaacaaacgttctacagcgttgagtccaggtgcaccacacatgattaaatctgcttggaatgcttttgctgcttcttttgtaatagctgtttttggagaaccatactcaatgtagctttctacttttgttacaccggcttttaaagcatcttctttatagccactaagtaattcatctgcatattcggtagctttgtctgccatgcttgtatcgtaattggctacagatgaaaacgcgcgtgtatcgataacatgtaccagaccaagcgccgcgtcattacggttagccacttgaattgctttttggaatgctctttctgcttctttggatccatcaactgctactaaaactctttcgtattgttgcaacataataattcctgcaatcaaaatatgtattttctatacttatattttaccctctttttcctcaaagaaccataaaatgaaaaataaattatagtgaaacaaatatttacgctaattttactataacttttgtttgaattacactagctaatttttaacacttaag

SEQ ID NO: 1182 - DNA, 802 bp, Listeria monocytogenes-4B
ttccgtagtcacttacagcagtcgtagtcgccgacgtgtgctggaaagattttagtgttttttaaatacttaattcttcggatagtgtaatcttctacttggatattttctttttctaaaaattgttttaataccacgctatacaaatctgctattgcttcataatgcagttctttccatgtttgaatggctcttttggcttggcgatagcccttttccacttcgccttctttcatccaaatagccccttgataataattggctactattcgataaaaagcactgtttaaactaccacttgtttcagatgcttcttttaatttttcgagtactagattcgcataattgattttattctgtatgatgagttcatctgtcagattagcaaatagatggcaaaatagcagtcttcctctatcatagtacctatacttttcatacgatttcaacataatttgataaaagtgaatttgtacttcttcctcaaaaaatgatatgccgttggaaaaaatacgaacctcttctaaagtccacgtctgcattttccaaagatagtcatgaataatttttttatattcatcagaaatattcgattcatcaaacacattcgtacgcaaataatgattaatcgtttgaattctcgtatgaagtatcgcttttctaacttctgtctgctccgttcgctctaaagttattttatctagcaacgcctgcatccctacaacatcatttttacctgatagctcgacgaaatcaatccaaaaactatcatcctctgtcgaagaaaagtctctgtaaataa

SEQ ID NO: 1183 - DNA, 752 bp, Listeria monocytogenes-4B
cgcacctgtgctggaaagcaatatctggttgaacgaaatgcgcagctgttttggcaccacgtaaaccaacttcttcttgaacagttcctacaccgtaaacgatatttggatgttgttctttttgtaagtttttaagtacttcaatcgcaattgcaaggccaatacggttatcccatgcttttgcaagtaagaattcttcttttttcattacggtaaagtcaaaagcaggtacaatcatgtcgcctggacgaatgccatagctctccacttcagctttatctactgcacacatcaataaacatgtgtttaatatctaatgatatttggcgttctgttgttgtcatcacatgtggggggttataacccctatcacctgtgatttcttttccacagcgcgtcacgatagttactctttgtgcgagcattacttgtgaaacccacccgcccacacattgaaatttgatataacctttatcgccaatttgcgttaccatatagccaactttatctatatgggcaccactcatatttttatgtgcatcttctgctccgactttttttgtaacaccactctctataccatctgtgtcaaaactatacgctatcgggtctatgtgttttcggaacacatttctcactgtgcgttcgttaccgcgaatacctcttgcatatgtgaatgcgcttaacacatctaatagtgcatccctataaataaccctccttatatactccattttattatatcagagtat

SEQ ID NO: 1184 - DNA, 1165 bp, Listeria monocytogenes-4B
ggctacgtcacttaactgctgagcgccgacgtgtgctggaaatagatgcaatgagtggtttcgttggggattttgttgtagcaacagcaggacctgacttagaaagcatcattgctggaaaaggagcaggtgctcatacctatgccaaagagaataatacctctgttgtgaatttggatattggcggcggaaccacgaacttatcgctgtttgatcgcgtttaactcattgatactgcttgcttagatattggtggtcggttaattaaagtagaccgtgaaacaagaaaaatcacctatattgctccaaaaattcaagctttaatagaaaaacgaggttatccggttaaacttggtgaaacaacttcaccagaaaacttgcaacccgttttaggtgaaatggttgagctgcttaagaatagtgttggcctcggggcgccaaatgatttttatgaaacaatcattacgaataaaggattgaaattcttaacggagattgaatgtatctctttttccggaggcgttgcagactgcatctcaacgggtgcgctaagtgatccttttagatatggggatattgggttattgctaggaaaagcgattgcagaatctagtttaatgactgaaaaaaagtatatcgaatctgtcgaaaccatacgggcaacagtggtcggagccggttcacacacagctgaaattagcggtagtacgattacttacaccgagaaaattttcccagtaaaaaacattccaattttgaaacttgccaaacaagaagaagatgaaaatatggcagaagtcatcaaggaaaaacttagctggttcaaaatagagaatgaaatggaacatattgcacttgcaattgaaggcgaaaatagcccaagtttccagcaagtaacagaatatgcgaaagccatttgcgaaggaatgaaagaaccaatcgcacttggtcatcccttaattatcattacatggcacgacatggcaaaagccctcggacaaagcatcttcgggcatttaccagccgggcatccactaatttgcttggatagtgtcaaagtcgataatggtgattatattgatataggaaaaccagttgctgacgggaaagtgctaccagtagtagttaaaaccttagtctttaactgatccacataaatagcttt

SEQ ID NO: 1185 - DNA, 716 bp, Listeria monocytogenes-4B
agcacttcgtggggccaccatgtgctggaatggagaggaagcatgcagatgagagaaataaaagttagcgaagtaaccttccaacaacacgcaaccaaattggcaagtgaaagtacgggaagttatttgccactgaaaaacgggaacatggcttattccagagccaattcaattgatcaattgcggtcggcattgattgatttggtttgcgtagtggaggattttcaacacgtgaccaagcaagatgcgggccgattaaagaaaatgggtattgcctatgccaagcaagaccaggtcatgggacaaaaaatcaatcagttggaggtgcgttaattggatagcgcacaccgccaactagaacaacaactccaacaaattaaaaaagcgaaaataatggcagaaacggatgtcgatcaaacgagaagaaaacaaaatgaacaagattggttagaagaggacagccaccaattaacacaagaaaaactggtgttattagacttttaacacagtggctggcaaggtgaacaagccagtggttttcatcgtataatagaagagcagcaacacgaagaatctcaggcttggaggcgtgatctccaggataaaagaagcgatttagacacggaattacaagaaaataaggccaggctccacacgttagaaaccaaacaagccaccttacaaaaggagtggagcaagtgagccggatagatatt

SEQ ID NO: 1186 - DNA, 1083 bp, Listeria monocytogenes-4B
  misc-feature (1)..(end): n can be any nucleotide a,g,c or t/u
ttttttttgtttatagtgtcgagggcggcatcaaaggggaggacaagcacgcacgcccatccaatcgcagccgcgccaggtcttgaaagcttggagcagtccctacattaaggcatagcggctagccgaggaagtagtgcacttactcgttgatcaattagaacggcacggttcaaggaatatttcagaacgcggcgaccaaacgttagaagtatctcgtcaaatttacacaaaggctttataatggacaacgcaactttagcgcaaatcattagagaagaaatttgcttacttaaataaaaatcaatagaaaatgaaagagggcgaaatttcttgagtaccaagaagggaaagacgtttttcggccatccgcgcggcctagctacattatttaacaccgaattttgggagcgattctcctattacggaatgcgtgcattattactttattatatgtatactgcagtagcagatggtggacttgggtttagccagtctaccgcaacagcaattatgtctatttatggttcactagtatttatgtcaggagtcattggtggatggttcgctgaccgtgtcttgggggcacgacagaccattttttacggtggagtccttattatggtggggcatattgtactagctttaccaaatggaggagcagcggcattatttggttcgatggcatttataattctcggaactgggctacttaaaccgaatgtttctaatgtcgttggcgatttatacccagctggcgataatcgtcgtgatgctggttttagtatcttctacatggggattaacttaggtgcatttattgccccgcctattgtttcggcagtttctgataatgctggaagtttccatgctgngtttggtgtggcagctgttggtatggcaattgcacttgttgtttatgtacttacaggaaaacgttacttaaaagacgctggcaaaaaagcgccaaatgcgcttcaaagatcagaagcaaaaagtcttacattcaaaataattggcattgctctaggcataggattattaattgcctgtttaacactaattacaggaaacttaacaata

SEQ ID NO: 1187 - DNA, 1212 bp, Listeria monocytogenes-4B
gttgtacttgcatcggaattccactcgtttccagcatgttagccactttgcatttctggtcggatgtactttttcattttcccctttattgccagactgacatgctgtaagtgctagtaaacataataaactgagtgccactaccatttttctggctgttttatgcaatatttctcctcctcttttgtaagcgctttttgattacgcaaaaaaatgacggacttcctgccaaattcgcgcagaacttccgccaccattataaaccgaaactgtatcaattgtaaataaaaactgttatatttttatttcttattaaggtaaactcctgacccaacaacaataacacacatcgtcatcaacattgctagcattaagtaactgggatcattgcgcataaacaaagcaagaataaaacagattgtaccagctatattaagtgtaacagttgtgatttttctaagtaggtttcttgaccatgcatcgatctttttaaaaccaatcatcgttaaaaatttaaagagttttttcgagtattgaatgtaggccgcaacaacgaacatgaatgctcctgctgtgactagagaaaatctaccagtcgggatatcgtaacctagcgcgtatacaataatactcatttgaatgattgttaacagcactaacaacagtctaaaacaatattcaaattccaacaaagctgcctgattcagtttttcttttccgtaatattccgttcccgtttatcttaaccattaaaaaaggaatcagaattaagccaagccacttctcgcctcaacatatctggggagaagtccgtaccgaaatgcaccgccacttcagaaggtagtagcggatctaacacagcagaaattcctactgtgaaaagaattatcatactaggaaatataccaactttcctcattcccctcacctcttccaatataattactggcaataggcgacaagctcctaccttgtttcgataagttgcactttctcggtatttgctacttgctctttcgtttaatcaaaacccttgttcccatcgtgaacgtgtagatggcgaatgaactaataactttccagaacactgggggaacctactcgaggatcccgcttcggccccccgcttccgccggtcgctcgcgcctaactcccacatgtttttttccccccctccgcccctatacccccccacctaaaaaacaaaaaaaa

SEQ ID NO: 1188 - DNA, 808 bp, Listeria monocytogenes-4B
aaatggcctctgataacgatgcaatcgatgtcagaattgtctttatgatggcgctaaggagtgccgatgaacaactagatatgctgcaaacacttatccaactcattcaagacgaggaggtgatgacgaccttacttaaagcgcgagaggcgggagatgttctttccgcaatagaacatttttctaagaataattaagggaggtcgggaatagatggggagtttttttgcaagttttgtacactggctaataggaagtccaggtagatttgtcgttaacttaattgaagataatatgttggggttcatgttcgtagtaatgatttacgccaccaccattttatacgccaagtggacactggcatactacttaccgaaaaaaatgaatcacctcggcagaaatgaaaacgttggagctcgactaattatatgccacgggggggaacacagcaaaaagctgtagcgtgagccatccctcgcgcgcattcctattcaatcctccctcccactattgccaactccgtccgactcccgtctttccgtgcgtcccccccgctgcgtgtcgatcctccccgccttccaaccacgcgggcgccatggtgtggcttggccccgcggggggaccatgttcgcccctttcgcttctttcgtcgccccgaccccccctcccccccgttctcgtctccccccccgcggttccctcccccttctcgccccccgtcttttcggtttgggtcgtccccgcctgcctccctccgccgtctttctcccgtcgccttttgtcggtttgccgttttgcccccggcctg

SEQ ID NO: 1189 - DNA, 1305 bp, Listeria monocytogenes-4B
accactacaaagaaaactagaatcattcagtaaaaagctaggactcggtattttagctctctgtgtacttatttttgcagttgaagctggtcgcgtattactcggcgacaattcagcggatatggcaacggcgattttaaatgcctttatgtttgccgtggccgtagctgtagcagcgattccggaagcactttcttctattgtaacgattgtacttgcagttggaacaaacaaaatggcaaagcagcacgcgattattagaaagcttccagcagttgaaacactaggctccacaagcgttatttgtacagacaaaaccggaacgttaacgcaaaataaaatgacggtcgtcgattactatttacccgatggcacaaaagaaaatttcccggaaagtccagaaaattggtcagaaggggaacgccgtttgattcatattgcggtactttgtaacgattcaaatattaacagtgagggcaaggagttaggcgacccgaccgaagtggcgctaattgcctttagtaataaaaataatcaagattacaatgaaattcgcgaaaaattcattcgtgaaggcgaaattccctttgattcagatcgtaagttaatgtctacgcttcatacctttaatgaaaacaaggcaatgctaacaaaaggcggaccagacgtgatgttcgcgcgttgcagttatgttttccttgatggggaagaaaagccaatgacagaagaaattttagcgaaattaaaagaaacaaatgaagaattttcgaatcaggcgctccgggtccttgcttacggctacaaacggatgcctgctgatacaactgaattaaaattagaagatgagcaagatatcgttctagttggcttaactgcaatgattgatccgccacgtgaagccgtgtatgcatcgattgaagagtccaaaaaagctggcattcgtacagtcatgatcaccggtgaccataaaacaacggcacaagcaatcggccgtgacattggtttaatggatgccgatgatatcgcattaacaggccaagaactagacgcaatgccagaagaagaactcgacaaaaaactagaacatatcgcagtctacgcccgagtttcaccagaaaataaaatccgtatcgtcaaagcttggcagataaaaggcaaaatcacagcaatgactggcgacggtgtcaatgatgcacccgctttaaaacaagccgatattggtgtcgcaatgggtagcggaaccgacgttgcgaaagactctgccgcgatgattctgaccgatgataatttcgttccgattgtgga

SEQ ID NO: 1190 - DNA, 733 bp, Listeria monocytogenes-4B
agaaattatgcaacaattaactaaatgggatgagactatcccagcaattcaattttctacttcgttaattcccatcacaagaggaatcttcacaaccatctacgttaaacccaaaaatcctatcacccaaaaagagttacatacgctttacaaatccacctacgagaatgctccatttgtccgaatccaaccagaaaatgtatatcctactgtcaaacaagtgacagcatcgaattactgtgatataggtcttgcttataatgaaaaaacgaatgtgattactatcgtttctgtgcttgataatttagttaaaggggcggctggtcaggccattcaaaatttaaacataatggcgaattttgctgaaagtgacggattaaggtttattccggtgtatccgtgaaaggggaaaaataaaatggaacttgtcaaaggaaatatcgcttcaccaaaaggattttatgctgacggaaaacatgcagggcttaaaagaaaacgaaatgatattggttggatttattcagaagttccagcaaatgcagccgctgtttatacgatgaatcaaatgcaagccgcaccaatttttgtaacgaaagattcttttcaaagtaatgcgaagttacaagcaattattgtgaatagtgggaatgccaatgcatgtacagggaatcaaggtatgttagatgcacttgcgatgcgggctcaaacggcagaaaagttagatattccactt

SEQ ID NO: 1191 - DNA, 1106 bp, Listeria monocytogenes-4B
tgtgctggaaagagtcgatacctgaacgagtgccgttactattcatccaaaatggagcggcgcatttagatagcatgccgctactcggtaataaacgaactattttgctaggtattagcgaacacggggcggggcgggaagatgatacaacagtcatttggcgtggtcatggccgaacaaagtatagtatttatcaaggcgaactaagtgaggcggtaacaaaaacattagactcaaatccagattttccagttgaaaaacatgctagttacttagaaattataagtgaaaaattatttattaatgcagtaattaatccgctcacagctgttcttcaagtccaaaatggaaagctccttgaaaataaagaatggcacgagttattaaagacgattgtaaaagaaatacaaacggttttgccagtagaaaatgctttagaaaaagtggaagtaatctgccaagtgacagctactaatttttcttcgatggctcttgaccgaatgaataatcgaatgacagaaattgatggaatcgtgctgccaattttagaaaaaggggagtcacttcctacgcttcatgcgttatatcatctaattaaagggttggaaggagaaagcgatgtttgattggttaactaattcaacagcaataattattattttacctgttgtggtgtttattttgacgatgtttttttccagtttcaaactaaagaaaagtcagcggagaattatgttggccgctgacttatccactattttcttgattatagctgttcattttttcatgattgtgctatttaatcgctcgttcttattatatattttattgcttttatttattttaggtattgtaattgttgtcacggctgcccagaacgaaggcgagattcagttccgcaaaatcctacgtggttactggcgcctatgcttcttcctttcctgcgttcttgcctgtggcgcctttcctctctgggattgcctctcgcctggtttctccgccctccgcgcgcctcgtccccctccccctctgctcttttctttcccccgcccccttcccgtttttgtccctcccccctcctcccccaacacaccaacaaaaaacta

SEQ ID NO: 1192 - DNA, 941 bp, Listeria monocytogenes-4B
gtaattgctggaataatcggtttaggtttgttggtatatttattttatgtgttatttagaggtgaggacttatgaagtatatcgtgatgcaagatgcgttttttgttgtattgttattagttttggcggtgcctcttggaatttatatgtataaggtgatgattggggaaaaggtatttttgtcacgagtgcttgagccggttgagcggtttggttatcgattgatgggtgtgagtgaggttggcatgtcggcgaagcgttctgcagtatccgtacttgcttttagtgcagttggctttgtatttgtaatggcggtgttgatgctacaaggctttttaccgctcaacccttaaggtattaactgactcagttgtattcttgcctttccttccgcggccagttttgtttttaatacaaactttttttcttcttctggcgcgcgccgtttcctcccgtccccctcctccccccgccctttcccccgctctttcttccttttcccccctcttgcctccgtctcttcttcccccttcggtcctctgcctccctgtttccctccccttccctttttcccggccctccccttcccctccttcctcctcccgttcgtcctttccctcccctccctcctctcccccctttttcttcctcgtttccgccccgcttccccccgtcgtcttccgctccccctcctttctctcccctcccctttcgtccttcttctccgcccgcttccttccctccttcccctcttttcctctcgcccccttctccgcccttttcgtcttctccctcctttctccctcgcttgctcggcctcccccttgcctctctgtcttctccctcgccccccccgccctttgccctgtcctcttttccctctccgccgcgccctttcctctgttggtcgcctcagcatgagagaacaaaaaaaaaaagag

SEQ ID NO: 1193 - DNA, 720 bp, Listeria monocytogenes-4B
  misc-feature (1)..(end): n can be any nucleotide a,g,c or t/u
cccaccacattaaaatcaaaatacaaaataagcaatggatcaaatactaaattaacaactgtagcaattatcattccgttcatagaaacccgcgaagctccctcagaccgaaccacctgttctaaagcaaaattcgcaataataaacgggctacaaattaaaagcgccaacgtataatttttcgtgtgtaaaaagctcgttgcatctgccccaagaaaatgagtaactggattaatcaaaaagccaagtaagatggcgcagataattcctaatactaaacttccatataaaacaaaggcggatacttgttttgcctttattccctcttctttcccaagcaagcgcgaaatatacgttccaccacctactccaaacatattaccaatcgccatcaaaacggtgaacatcggtaatccaagtgtcaccgcggttaacatcgacgtatcatgcaacaagcctataaagaacgcattgataaggttatatatgacccctacagacattccaagcatcatcggaatagataaatgtgctatcgctttaggaatgctcgcttttgttaaataataattatctgagtgtttcattttggttccccctcaaaattagttagaactctaactatatagttaaatttttttattccgtattgtcatcaattttactaagtagatcaataaagattttatactcgtcagcggaaagganttttttcgctta

SEQ ID NO: 1194 - DNA, 995 bp, Listeria monocytogenes-4B
tgtgtagcctggacggggaagaatagcctggtaatttgcgtaattcatcgtagcggccttctgcttttagcgttcggcgaagttccgcatatttttccacgagcgcttgttgacgttcatgtttggcaacttttgattttttagccatgtgtctctctctttcttaatttttaatcattgcgatttatatcatacgccgatttaattaggaaagcaagtcttctgttttaaaaaaaccgatatccagttaaactgaatatcggttgtcctattatttagttccaactatcggaccatacgcgttagagaaaccattattataaggcactcctgctttatttttacctgcatcccagttcaccgaccaagtcataatccctttcactggtgtgccttttgcttgtaaacgagtgaaaacatttttgacgatttgcggatcttttacataaccagttgcggctgcatccacattggctggtaaaccgaacacgaatttattagctgggattttcaagtaaccacgagtcccattaataaaggagtccgccatataatataagaaagattcttttaatgtatcattattttgcgcaatccattggtttgtttcatcaacccaaacaccatcgccaccttgattgtatagttgcggcgcaatatagtcataataattagcaagtgaggttaggtagctttcataggcactacctggttttaaataaggaaattctggtgccatcctacttacgaaatcgttcccttccgctttataatgatccttaacgatccctagcgctgctgggataacccccccattatccgccccgcctatgccccctttgccctcacccccatttcctctccatcaccgtcctcctcctctaacccccccccattcctcttgtgccaccgccccctcctcccattctcttccttgccccactccctcccctcctccctcctccacccgagcggtacgacctctccactaaata

SEQ ID NO: 1195 - DNA, 1059 bp, Listeria monocytogenes-4B
agccgcaggagtggatatttttctcgaaattgaagtacaaggagcaatgcaagttcgaaaagcgatgccagaaggaattttcattttcttaacgccaccagatttgtctgagcttaaaaaccggattatcggtcgcggtacagaatcgatggaagttgtcgaggaacgcatggaaacagcgaagaaagaaatcgaaatgatggcgtcttatgattatgctgtggtgaatgatgtagttgcaaacgccgtacaaaaaatcaaaggcatcgtcgaaacagaacacttaaaaactgagcgagtaattcatcgctacaaaaaaatgttggagggattacaatgatgttatatccatcaattgataatttattgttaaaaatcgactcaaaatattcgctagttacagtggccgctaaacgcgcacgctacatgcaactggaaaatgataaaggcgtattgccgagctaccagtccgacaaatttgttgggaaagcgttagaagaaattcacgctggaaaattagttttacaaaacgacgataaataagcttaactgctccgctttcctgcggggcttttttgttagccacaagtgcaataaaaataagctgaaatctagtttcttcatggttttgtcctgtcttaatttaaggtataatagaattaatgattttttatattaaaaatgaggtgacttttcaatgcaaggaaaaaatatcttactcgcagtgtccggtggcattgctgtttataaagcagtcgcacttacaagtaaattaacgcaagcaggagcaaacgtcaaagtgatgatgacagaacatgctcaggaatttgttccaccgctttcgtttcaagtattatctaaaaatgatgtatacacagatacatttgaccaaaaaaaatcaagtgttgtcgcacatatcgatttagctgattgggccgatttagtctttccagcgccctggccgccgttgcttgtggctgcttcactcctccaccccctaccttgcctgatcctccgaccttcacccccgccctaacaacattgtaataaccagacaaa

SEQ ID NO: 1196 - DNA, 888 bp, Listeria monocytogenes-4B
ctgtttctttttccaaatccgcatactgtagtaagttggatggaatattaatccggccttgtttgtctagttcacattcagacgcaccggaaaagaaggaacgtgtaaaggaacgagcatctttcttagtaagtggtaaggtttggagcttttcttcaagctttttccattcctcttgtggataagcaaataaacacttatcaagtcctcgggttataacaaaattatcccccaaaagctcacggaatttagctggcacaattaatctgccctttatatcgatgttgtgttgatattctcccatgaacattagacttcacccactttcatacataccactttaccacatctccccacttcgcaccaccaaaaacctaaaaaagtgtaaaaaaaaatcatcccagccaaagcatagaatgatcaatcccttatttaaagccatttccatctaattcaattcttaaaaaacaatgtggggcttggtggagggattccccactttgaaccaacatttattttaccaacactttttcccaaccagattttagtgccactgctgagaacactatacttaaaacaccaagcgtaatcgtaaaagctcccatgccatatttaccaataaatggtgcaaatactaaacttacagaaccaatcattttaccaatttggaaaataataccattaaatgccatgtaggccccacgtctttcatcatctacaattgccgctaagatcgtttgacgtgttggtacatagagtaattcaccaattgagagcaccatcgtcgccaaaagtaaaactgttagattatttgcgaaagcacaaactgcaaatccaagcgcaaacaaagtaaaccctacatacataataggttgctgcgccctttta

SEQ ID NO: 1197 - DNA, 712 bp, Listeria monocytogenes-4B
  misc-feature (1)..(end): n can be any nucleotide a,g,c or t/u
acaacctaataaagaacatatggaaatgccagcgctacactctttagaacatttgatggcagaacttgcaagaaatcatactgacaaattagtagacattagtccaatgggatgccaaactggcttttatgtttccttcattaatcatagcgactatgatgatgcactagaaatcatcgccacaacactaacggatgttttagctgcgacagaagttcctgcatgcaatgaagtccaatgcggttgggcagcaagccatagtttagaaggtgcaaaagcgcttgcggcggaatttttagacaaacgagacgaatggaaaaatgtatttggtgaataaaaatgaaagcatctatcggaatatcggtagatgctttttataaataacatatttttatcaaaattaataacgaatttaaatgtcgtatggaatactaacggagacttgccatgcaatcacttgtattttttgtgatttgcccagattagtctatctgattctaatgttctggagatacagccatctctgttttgaaaactagtatagtcaaatcaacgcaaacagaaaaattagtaccaacaactatcgcagtggtaggattcatagttattataattattcgtaaaaataaataaaaaactatctactcaaaattctcgagtggatagttttttatctatannatagcttataaaaaaattatgattncatttc

SEQ ID NO: 1198 - DNA, 751 bp, Listeria monocytogenes-4B
gggagattacaacatcccaattacttgcaatcggagaattacaaaaagaatcagaattaacacttggcgaattagcagaacgaatgaagcttggtaaaagtactgtatctggtattgtagatcgattagtgaaagcgggatttttaaaacgtacaagaaatgaaagtaatcgccgcgcactcgggttagaattaactgaaaaaggagctacaaaagcagcagaaacgtatcatgtattcttcaaccgtttagaacctatcttagagattggtgaagaaaggtgaaaagaaatgctagaaatgcaccaagagattattaccattttagaaagggaaggtgcacgagattgaatatgaaagctgcaagtacatcagtgaagcgtaatggtattttgatcgttatgcttatgggcgcctttgttacgattctcaaccaaacgttgatgaatgtggcgctcaccaagtattctgaacgatttaggaattacaggcagtctagggcaatgggtatccactggatcccgccggccaatggtgccatgattccactcgccgcttttttactcgtcccatccccactccccccctttccccctcccctacccctcctcttccaccggttctgcccccccggctccccccgccttttccggctccccccccccggcttccccgctccacgccccgggactggccccgcatccaccttccccccgcccgcccccgccgtcccgcaccacccccacccactt

SEQ ID NO: 1199 - DNA, 384 bp, Listeria monocytogenes-4B
  misc-feature (1)..(end): n can be any nucleotide a,g,c or t/u
aacgattaataattctattggtgcaagctatgacgttggaatgacaatggcattcgttattctagcatggtcatctgtcgcgcatattttcaatgtaagaagtgataaatcgattttcactatcggatttttatctaaccgtggtttgttctttagcgcgatttgttcgatgttgattattttaggacttgcgattattccaccacttgcgaacatgttcttcttagtagaaatgagcttaacgcactggattctcgcattcatcctctcgatgttcccactcctattcgtagaaattcaaaagcttattcagcgactttccagcacagtgtcggcgctcaggcagctctatggngctgatgtgcnnnnnnaaaaggtgagctc

SEQ ID NO: 1200 - DNA, 714 bp, Listeria monocytogenes-4B
  misc-feature (1)..(end): n can be any nucleotide a,g,c or t/u
tggaaagaatattaaaactactaaaaataatgaaaacgattatcgctacaataataaatcgctttttatgcgggaactggttgcgcgtcacaagtgctggttgtccttctatagcaaaggcgttcttcactaataattgcgcaatgattccttgaaaaattccagcggcaaagaaacctatcacttgtagtatggttaaagtaatacccgctataaacaccgcaattcccggagttattttttctattaagagaagcggcaacatcataatcgttgcgataatcgatactaaaaagccaatcgcaacaattattaaaacccattttagtaacatgaaaaataagtttttttgcgggtatttccaactttttcggatagccccacttatttttagtgattcgtcttcaatgaaatagggcaaagcaaacacaagtctggcgctaatatagaaaataatcgcaattgcaataacatacagccacgttcccgtcgtcgttttcattaattcatccgtaataaaatgtggtaaatagaggttctctgttatcgtaattggtaaagataatcctgcactgggcaaaagtaaaagaaatatagcagaaaataaattgcttgataactaagacagcatttcgcttttacattgagtctttgtatgatantgaaaacgcgatagctttctccccgcagttgatgaatagccatcattattaa

SEQ ID NO: 1201 - DNA, 696 bp, Listeria monocytogenes-4B
gcgaaaaaagaagtaacagaagaagacttgcacgcgttaattctcggacaatcttccgagtcagccgatgatttcgaactaaaacatttgcaagttcaatatgttactggcggcgtccaaggtgcgattgttcgcattgaagaacgtgatggcgctctagtagaagacgcagcaattgtttcaggtagcattgaagcgatttataatacgattaaccgtcttatgaaacaagatattgaattaaccgattatcgtatccaagcaattacagccggtcaagatgcccaagcagaagtccatgtcgtcattaaaaatgacaaaggcgctgtgttccatggtatcggtattgattttgacgttttaactgctagtgctaaagcttatttgcaagcatcaggcaaaagcaaaaccgccagtaagcaagctgatttcgaggaggtaaaataacgtgacctataaaattacttccttagctggcgacggaattggtccagaaattatgacttctggacttcaagtattagaggcagtcgaaaaaaaatacaaccatacgtttgaaattgaatctcatccctttggcggcgcaggaattgacgtagcacaagacccaatcccttcttccaccttaaaagcgtgccgagacgccgacgccattttactcggagcaattggtggtccaaaatgggataatgcgcc

SEQ ID NO: 1202 - DNA, 705 bp, Listeria monocytogenes-4B
tgtatgaagcgatgaaacgagcagcagcactagatatggcgattgtggctcactgtgaagataactcacttatctatggtggcgttgtccatgacgggatttttgctgaaaaagaaggtctgaaaggtattccgaatattgctgaatctgtccaaatcgcacgtgacgttttactagcagaagctgcaggttgtcattatcatgtctgtcatatttcaacaaaagaatctgttcgtgttgtgcgagatgcaaaacgggcgggaattcgtgtcactgctgaagtttcaccacatcacttaattttagatgaagaagctattccaggaaatgacggtaattggaaaatgaaccccccacttcgtagcaaagaagatcgggcggcacttttagaaggcttactggatggtacgatagattttatcgcaactgatcatgctccacacgcagcggaagaaaaaaatgtaccgatggagcaagctgctttcggaattgtaggtctagaaacggcattcccattactatatacccattttgttaaaacgaaggaatggacattaaaacagctaatcgactggatgactgtgaaaccagcggaatgctttaaactcccatacgggaaatcagaagaaggcagcgtcccacatatggtcgcgcttgattgacaaaaagaagcgaatgttgacccagctactttgtatataaaag

SEQ ID NO: 1203 - DNA, 1242 bp, Listeria monocytogenes-4B
cgagcggccaccagtgtcgctggaaagaatacaactcaatatccatattcaacgagcgcttaccttgtaatggaatttccaaatggaaaaacttatataggtagtggacaattgattggtgaagattctgtacttacagccgctcattgtttatatggtaaaaaagatggtggatgggcaaaaaaagtgactgtatatcctggatataatggcacgaaagctccttttggaacagcaaaagcaagaaaaatgtatgttccaaaagaatggacaaaaaaagaaccttctacagaagattatggtgttattaaattagataaaaatattgggacaaaaactggaacaatggggttaacaactaatacatctggtgcaattactattagtggttatcatggtgacaaaaaagggaaattgtacactcaaactggaaatatctctcaagtcactgcaaataatgttttttatagattagatacaacaggtggtagtagtggtagtggtgtttataattctaaaaaacagattttagcagtaaacgcatatgaatatttaaatggtaccggggacaactttggtgcaagaataacaaaagaaaaactaaataatatttatactgggcgtgggacaataatctttctgtaagcgaacaaaaagggataaattacgagctccacgtccaaagtaagggatggatgggaaacgttgctaatagtatgacttcgggcacagttggccttggcttacgagcagaagcaatgaaaattagtttatcagggatgccgtattctggagatattcaatatcgctcacatgtacaaggtagtggatggcaaggttggttgaaaaatggggaaatttctggaactcgtggacagtcaaaacgtctggaagctttccaagtaaaattaactggaaatatggctaaaaattatagtgtgcagtatagagcgcatgtccaaaataaaggttggcaaagttgggttaaagatggagcaacagcaggaacaacaggagaaagtttaagaatagaagctgtacaaatgcgactagttgcaaaataaatttaaaaaaatatggtgtgtaaaatgccaaattctttttcttttaccaaattgattgaaaaagtagagctagtatagtagaattgaaaagcaagcacttactttaaaagggaaataaagtaaaggagtgtgttttttggaaacttggatcacaagtattatggctgattttggctat

SEQ ID NO: 1204 - DNA, 1240 bp, Listeria monocytogenes-4B
ttagcttttggacattccttagatacattacatgctctgcgaggggccaccagtgtgctggaaagattgctatcgctggcgttatgggtggagaattttccgaagtaacagagaacacaacgacagtagcgctagaaggtgctattttcagcagctcttccatcggtaaagcatctcgcgaattatacctacgtacagaagcaagcatccgttacgacaaaggttctgacgcttggaaagttgaaaaagcacttgcacatggcggagcgttaatcgctgaactaagtggcggaacactagtaggcggtgtcgtagaagtagataaccgtgaaaaagctgtaaataaaatcgaaacaagcctaacacgcattaaccgcattttaggaacagcaattacgcttgcggaaatcgaaacaatttttgatcgtttaggttttgtattagaagtgaaaaatgatactttaatcattgaagtgccgacaagacgttgggacattactattgaagcagatattttagaagaagtagctcgtatttacggttacgatgaaattccggtaacacttcctgcgacaagcacaacaggcggcttatcagacagccaaaaagctcgtcgtgtcatgcgcgcttatttagaaggagcaggacttaaccaagcattaacttactctttaacatcaaaaaaagatgcaactcgtctagcgctttctgatgaaaaaacagttgcattatcgatgccaatgagtgaagaacatagccatttaagaacaagtatcgttccacaattaattcgtagcgcaagttataacatcgctcgtaaaaatatggacgtggcactttacgaaatgggtaccgtgttctacgcaacacaaggggacaattgaccaattgaacaggagcatgaggcaggactaatctctgggaaccggcgtgcgggcgaggtgttgctacgacaacccccctgacgcagttgtcgcgtaagttcatccatcggcgggtgcccctcggtcggtccacggatctcatctgtccagcccctttttcgcgcagatgatagtatgtccggcgacccgtactcctatagactaccgttgcatattcccgcggtgcgcgtttttttctcgcccggtcttccggtcatcatcatctatgtcatccgtacttttggcgctggagatggccttgactaacgccgctgcgctcgaaaattgcgctggcgccctggctggacaccgaccgg

SEQ ID NO: 1205 - DNA, 797 bp, Listeria monocytogenes-4B
aactacggcccttgctgctgctcgagcgccgccactgtgctggaaagatgtgaatacatcggaaaattcttttaacaggtacaaagaactgacctacttttactattgaatagactgtttttgatacaaatggcaattaaaagaggatcaactagagcataggtgtaaagagagtgaataataagctagcattatattttgaatgcgacatttatacttatttatggaaacttactttgcctgagcatttttaaaccgctttaaatgcggatttattcgatcctactctatttatatcttcttaatgctgcggtactgttagttcttactaggattctatctgtgttctacttgattgaattcaacaggagagagtgtaataaccatctttttggttagcttgattatattaactcaaatttatttgcttttctccttgcaaatgaattcatatgcagatgcttttcttatcaagggagaagcattgaatatgctttctaatggagggcatgcaacaacgcagaattattttttaatgtatcctaataatatatttataacaattattcgatactggctatattctgttggagggacgcttggtgttactaatacctatttattagaaagtgctttcctttttgtgggtatgactattactatctttggattcggcctggattggtgcgccagaatattgtgataaattttgggaacctccacttttgaatggggtgttggtgttcgccctgctggggggcctcgggggtttgtttgcgaagcactataatgaaata

SEQ ID NO: 1206 - DNA, 708 bp, Listeria monocytogenes-4B
acaacgctacagtatcgtattctaattgttgaaaaggaaaatcgcattgtcaaacgcgacgaagaaatcattgacttaacaaaacgagagtatgaacttttacttacgttaatggaaaatgttaatatcgttcttacgcgggaagtgttactcaataaagtatggggttatgaaacagaagtagaaacaaatgtagtggatgtgtacgttcgttacttacgaaataaaattgatcatcctgacgaagaaagttatatccaaacagttcgcgggacagggtatgtgatgcgtacatgacgacaagcccattttccttaaaaagtcgttctttgaaattcaaatggacttttggagctagtgcagctatttttctaacttttttcttattttcctatgccatttaccaaggaattgggcaaatgttgttaaatgaagaagaaccagaagtaaaagaactgcttctagcaacaacgagcactttaacgaatcaagatttgaccgataatgaggaaattaagtatttatttaataacgataaaacggtgaatcgaaaattacaagatcaagtaattaatctgtatgataaagacggccattttattaataagtattatttttcaagaagtgaagatattactagcattgatttttcccagtattttgttagtggtacggacaagtttattatgaataaaccaacgattgacg

SEQ ID NO: 1207 - DNA, 707 bp, Listeria monocytogenes-4B
tggctagaatctgattatgtcaaaattaatgataatctggcgaaaatagcgagaaaaaatttatcgctaataaaaaagattagggaaacacttgttggaatggatatggaaaatgtttaaatggaaaaccaaggtcttgtccgagtaatgatcgttactcggatttttttatttctatttttcatttgtacaatactaatggaaaaagtaaacacaccaactaagccgtaaaattttaagaagttaaaattttatggccagaaatgcttctcgactcctctataattaagttgcagctagaaagtttgcatctagaaattaactacgaaagaaggaggggagctgatgaagaagttttccatgcgagtggtgcttattatttctgtgctttttattgcactggggaacgctaatgtttctatcgcacaagaaagggacacaacgaataagcttccagaagaggagctgggttctctggatacctctaatcttattgcagaagaagttgcgcaagacaaaccagcagaggtcgagaacttagaagaaatcccaactacggatgagttgatgcaaaatccagatgttcgagagcagtctgttgccgactcggatgatccggatttaacagtggtaaactcgggtgattactggacgctctattataattctgcgaacggtgaatatagcttgcgtatgtttggcaacga

SEQ ID NO: 1208 - DNA, 1204 bp, Listeria monocytogenes-4B
actgtagtcacttagagctgctcgacggccgacagtgtgctggaaagattcccgtaaccgcaaataaagttaacaatattaatacttgcatacacctataaaagaagctgtctttcttaaaatctataataactatacacattataattatgccgatgaattccaaatccattattaatttcaacattgaatccatttcaatctcctaatttggttattttctttcctttttctttttttatattctctaggattgtattcttactatcttgcttatgctcacgcagagattattcttttgatatgtattatttacatctcttacttttagaataagccctccctgtaaaaatggagggcttattcttagtttatttttttagtttgttcatcaaatcttgttctacactgccgccgaaacgcagggctagaatatcttctttttttatccaacaagttccatctaatcgaccttcgtcatccactaaagtaatttctaatccttcatagtcattttcagcgattattccaattgctggcgtctcgtcgcctatgatgtcaataaagattatctctttactttggtatacataatcagcagcaatttcaaattgtttctacacgattaaactatagaaataatattccagtaacttatatttctaatttagatatattattttagcaattgagctttattcaaagcatctttaatgttttaggcaatattctcgcagtcataccatccactctgattacttgaaaaactgcgccaaatctattccttttgaaaatatgcctatagcagtaacatctaaaacaggagaaatcactatcattccatcttctatttccatgttttttctagcatttaattcttttttctccttgaacaaaaatattttgtttgcgtctggataagcatcaccttctaaaaacaaatgaaacatctttttctttatctccatagattcatctgcaagaacaacttttttatagccattctttttgtctccaggtaattcctcatacggcccaaatatatccactaaaaaataagcagaaaccataaactcaccaaaagtatcacaaatgtcttgtaattcttgttcagaaatagggattggatttttaaaattataaatataattttgttctgctccagtaattccagagtcaacttcataattaggtatgtctttgt

SEQ ID NO: 1209 - DNA, 719 bp, Listeria monocytogenes-4B
gttacgcaggaaacgacttctaatgaaactacttcagagcctttaaaagagaccacagtcaatgaagcaataaacacaaaatcatttccaactgggaattattcaggggactttagtattaattctcaaaaagatgtgattgaatctggtcagacggtaaactataacatttatttaaaaattactggaccaaacacaacataccaaaatgctaaattagtaatcaatttaccaaaaaatggggaatttaatcaatcattaaatgaacttaagattgcgggagaaacgccaagttataacaaaacaactcgctagctcgtttacacatattaaacactgaacagtggtgtagtcgataaagtgatccttaagctgactaccaaaaatggctgctcaccacctggcactacctctctccgtttcaggcgactcccctgccatcctctatttgccacagttccttcccctggccggcgttcggttttccgggcggtcttgcccgtttgctgtgcgcattttccctccgggccccgaccgtccctccccttcctccccttcccccgcctccttcctctcgtccccccctcctttcccctccccccttccccccccccttcgcctccctgcctttctcctttcctcccctcctcccccctttcttttttccccctctttcttcccctccgcctttccctattaatcatccccacacaaaaaca

SEQ ID NO: 1210 - DNA, 714 bp, Listeria monocytogenes-4B
ttgttgcaacagctttattttccaccgttgcaaaatttggtatagtagtttggaagaacgttctaatttggaaagtcttgttaagtaaactgtttgctttttcttgttccaaatatgtaggtgctgcaatttcccaagttagtttttgtccttcgaccttcgttggttctggtgtatctcctgctacacctaagtaatctagcttatctgccaatgtatactcaataacaatcttcttaccttcttccataaaaaggcttcctgtagactttttcggaatatttaggttgaaagaccaaatcccgatatcaccttgactcggattattgttgatgctattttctaccctagtaaaatcatttgataaagctgttgtagctgttgcgttgacagttgtttcagcctgttcggttacttttccaagtaaattatctgcacttaattcacctgttactactaatttcgttccatttggtgtgtaaccatttttcgtagccagcttaagaatcactttatcaactacaccactgtcacacggcccgatatgtgtcaacaacctgaccagttgctatgacatacctcggcgcccctcgcccaatgttaacctcatgtatgatcgacggaatcgatgtatcgcacagttgatcttgcccctccctaccctttcacgaaccccctgtcaagatcctcatagatcttattccactctcccct

SEQ ID NO: 1211 - DNA, 656 bp, Listeria monocytogenes-4B
tacattgtgcaaatccgcttcttttactttttcgcgacgcaaccttcagcatattttcactaaaatcaagccccgtcacatgaccttcaggaccaatttcttccgccatcataatcgaccaatctgccgttccacagcaaacatcaagaacattcgtccctttttgaacacgcattagcttcattgtctctttacgccatttcacatgtagtttaaaactaataacactattcattcggtcataacttggagaaattttctcaaatactttatgtactttttcttctttagtttccgtcatatcccgaatctccttctatttatcagtcgttaataacttcgatgattctttttcctagtatattagaaagcggttctgatttatctttcaaccgtttcacttcacttttcacatcacgaataatcgcaactaaccagctttcaaaattagatacggcttccttcgcaaaatagccatgatcaaacgcccgcttcaatctggacgcaccaatttctttgtaagtagcaagttctgtttggagtcttttgagcaaaaagaactgacaaccaagcgcgataaatgtgtcatctttcataaaatacttcgctttccagcacacgtcggccgctcaagcatgctgtaggttgctcaaagg

SEQ ID NO: 1212 - DNA, 1282 bp, Listeria monocytogenes-4B
tgaataacaaacgaatcgatggtttaatcattgatgaagtgtacgcgcgttattacattgataaacaaaaaaataaagacgattacaacattataacaggcggttttgatgccacagattttgctgtaggaatgcgcaaaagtgataaagaactgcaaacaaaaatcaatgaagcttttgaaaaattatacaaagaaggaaaaatgcaagaaattagtaaaaaatggttcggtgatgacgaaatcgctaagcaatagtgcgattgacagtaggtttaagttcctatacaatttgaattataaatgtcgcagccgaatatccgaccgtgccagacagaagggatgatttttgttgaataaagaattgattgttcgcggagctccgcaagaatatttatgccaagtaggcgcgtgggatacattacctactcacctagaacgccgcggtttgaaaaatgtattagtagttcgtggaaatgcttcttgggaagtcgctaaaaagaaattccctgttttatcaactgttacatctacttttgaagtatataatggtggttctacctacgaggagcgcgatcgtctggtggcaatcatggaaacaaataagatggatgcgattatcgcagtaggtggcggaaaaatagctgacgtatgtaaagcgacagcagcagttctacgtttaccagtcattatcttaccgacacttgcatcaacttgtgccgcttatacgccacttagtgtgatgtacgacgaagagggcgctatgattcgttacgatgtgtttgcgagtagtaatgcgctgttattaattgatccggaaatgattttagactcaccgaaagagttactagttgctggaattggcgatacgctagccaaatggtacgaggcagacgtgattattaattccttatcaactaaatcagtcgaaattgaaatcgcgcattttgctgccaaaatgtgccgtgataacttgttgcaatatagcgaagaagcacttgctgccatggacaaacaagtattgaatgaagcgtttgttaaaattattgagacgaatattttagttggtggaatggtcggtggttttggcgatgattatggacgttgtgcaggagcgcattcgattcatgacgcgctaacgatggttccagaaacacatcacttattgcatggtaataaagtagcttatggtattttagttcaattagtaatagaaaatagatgggatgaaatcgagcgtttgttgcattttattctgagcttgggcttccgatgagttatat

SEQ ID NO: 1213 - DNA, 569 bp, Listeria monocytogenes-4B
gcattagaattcactatggcaagttctgaagctgcccaaatgtcaccgatttctatagcgagaatggcgttcatgccacgcggccaggcagaattgaccgagaaaacaaatgggaaattcagtcgttttctggtggaataaatgatgaaaatcaacaagatgcccaattagaagttctttttacatcagcagcaagtttccgtaaggcgcttatgcatatccagaccattagagaacgatttgcgcaaacttgcgagaaatatggtgctcttttgacgcatgatacaaaattaatttatgaagggtaccgaattcgctgtaagcatccactaatgaatatttttcaaaaagccgcaaaaaagcaatcttcggaaacaagagaaatataaaagaaggcgaaaaagatgcaaatgtgttgaatgaaaaaggtattccgaccatgctcttatcagctggatacgaaaatgcgcacacagaagaagaaacagtatctgttgagcagttagaaaaacttactcaactcgtcattgacttagcaggatccgcaaaaaacgagaaaattcttctca

SEQ ID NO: 1214 - DNA, 782 bp, Listeria monocytogenes-4B
  misc-feature (1)..(end): n can be any nucleotide a,g,c or t/u
tttttttttgttttatcgtggggtgggaaaaaacgggggggaagggacagagggggaagggagggggcgggcagggggcggacggacaggcgggggcagggcacgaagcgaggacaggggggagacggacggggccacgacgggagggagcagccgagagcgtgccaaaagccaccagcaatgcagtacggcggcaaggcaaagcaatgtggcgacctgcggaagaagaaggcgcgcatttggacgtatgattttcatcatcgtttttccagtggagcacagtttttacagcaccaattcggcgcttctaggcgcgcatttattgtgtgaaagcagctgcgcttcgtcgttctggcgtgccgggttggggaacttttacgaataaagaaatgcaaggcgggggtccgctgattgatatgggaattcacatgctcgacgcggcgatgtttgtccttggttttccaaaagtgaagaaagtaacggcaaaaagttttcaaaaaatcggaaccaagaaaagtgcggggacatttggttcatgggatccggaaaaatatacggtagaggattctttattcggctttattgaactggaaaatggcggattaattgaattagatacttcttttgcgctacatatcaagccagaaagtgcgctaaatgttgattttttcggtgatttagcaggaggcagtttataccaggctgaaatttatacagatactttccagcacactgtcggcgctcgagcagctgtaagtgacgtaagggnnnnaaatagaaaa

SEQ ID NO: 1215 - DNA, 1095 bp, Listeria monocytogenes-4B
gcgctggaaagacggttattttaattacggttattatcgttataatggccttagcatttgattttataaatggatttcatgatattgcaaatgctgtggccacaagtatttcaactagagctttaaaaccgcgagtggcaattggaattgcggcagtcatgaattttctgggagccatttcgtcctcctgagtagctgaatcgctcaccaaaagtattgtagatccattttcgcttaataatggagagtttgtcgttttatgcggcttaattgcggcagtgatttggaatttgatgacttggcttgttggcatgcctagtagttcctcacatgcgcttatcggtgcgatagctggggcctccatcgcatcagccagtagttttagcgtgcttaattggtcaggatttacaactattattattgcactcattatctcgccgattatcggttttacagtaggttatttgatttattcactctttaagcatctttttcacgacaaaaagcttgggaagatgaatcgacgctttcgttttatccaaattggaacagctgccgcccaagcatattcacacggcacaaatgatgcccaaaaaacgatgggaattatcacgcttgctttagttgcgagtgggcttttgaaagagtcagctggtcttcctttttgggtgcaagtaagttgtgcggcatcgatggcgattggatcgtctgttggcggttatcgaatcatcacaacagtaggaactaaaatcatgaaaatcaccccagttacaggtgttgcgtccgatttaagctcactttctgtaatcatgacagctactttgattgatttgccagtcagcactacgcaagttattgacagctcgattatgggtgtcggaacagctgaccataaaaaagaagccaattggcgcccggcaaaaaatatggccgcaactaggtttatcacgttaccactaactggactttcggcacccacggcgtactggctaccaccacctctccccgtctcctccggcggatgccgactcacaccgcaccccgcccgcctctcccccccccccgccaccccgcaaccgttccgccccccccatc

SEQ ID NO: 1216 - DNA, 647 bp, Listeria monocytogenes-4B
acttctttataatatttactatttagagtgggatgatgaacttctaaaaatgcttaatatcccaaaagcaatgttacctgaagttcgtccttcctctgaagtgtatgcggacacagtgccttatcacttctttgggaaaatgccggtgcaggattgctgggaccacagccgtttattcggacgaggtgtttgaaaagggatggcgaaaatacttatggaactggtgttcttactaatgacctggggaaaaacatccgtctgaaaacggttattacacactagctggggaattgatggaaaagtaatatgcacttgaaggtagttattcgtgctggttcggctattcagtggtacgtgacgggtacaatggtcgtcatcagcgattctgaaaacttgcgagccggattgaatctaggagggttatggtgaccagcattcgtggttaggcgcccttactgggatgcgattttcacacctggcggcgtgctagggatgctagctgtgtccagctgcgctctgctcgactggctggtgctgggcaccggcgtctcgcgccggttctccctcttcgaggccgcgggtcggcttagacgtgcgggggtggggggggggcttccgcggacgttgttcatctttaatatcacaaa

SEQ ID NO: 1217 - DNA, 880 bp, Listeria monocytogenes-4B
ttctttttttgggtgtgttctgttttaagtctgttactcggagctttcttttcattcaggatttttttacaggagttcgtaatattattagggatcaaatagggaaaaaagcttatattcttcaaaaattagctgtaagttttattctttgttttatcaccatgcttacaactttattattaaattttattttagtttctattgtattcttaggtggcacttataaaatggggttaaatggattaggatcgcttaatactctatttgattttagcattcaaaacccctacttagcagattttggttttggatttatggcttgcttaatggccggaatggctggacttatcgctactagctccagtctgttctttttgaataaaaaatttgcgtatccagctgcattttttatttggtttctgatgatacttccaaacaattcaattatgtttattttccaaccttttacagaatatggctttgaaataattttgcctatttttctagttttcagtttaatagttttgataattgttggtgtcctttacttatatgaggtgaaatatgttaaagagtagatattttcttctaattttttccatgttcctctttttttctgttttttggttcacacaaaacatggagtacctaagtttccctaaaaacagagaacttgttctcattatgaatggtagtttgtatgggtatatctcaatcaaatccctttgcttgatgcttgttttcccgtatcttatctttttactactattttcaaaaaaagaacaaattgttgctttagctagagaaaaaaaccgtttacgattctatcataaaatattgaaagatacagttattgcaacagtactatttgtaggtttat

SEQ ID NO: 1218 - DNA, 930 bp, Listeria monocytogenes-4B
tagaagaatgttttgaaaaaggagaaatagcacaaatttatttaaacttctccgatccatggccgaaaaaacgccatacaaaacgtagactaacgaatccaacgttcttaactatttatgagcgactgctaccggaagcgggggagattcatttcaaaaccgataatcgcagtttgttcgaatattcgctagtagctttctcagaatacaatatgttattaacttttgtatctcttgacctgcataatagcgattacgaagggaatattaaaactgaatacgaagaaaaattttcagctaaaggattccccatctatcgtcttgaagcaaaatttgatagaaattaacaaggataaccagatgcatctgctgcatctggtttttatttttaattggaggcgttaaaagtggattccattcaaattggaaaaataaagatttattggttacgcggagggtatactcattttgacggtggcgcaatgtttggcgttgtaccaaaacctttatgggagaaaaaatatcccgcaaatgacaaaaatcaattagctaacgtaaccgatccgatgttttttcagtacttagggaaaaattatttaattgatagcgggctagggaacagacggcttacagaaaaacaaaaacggaattacggtgtgacggaagaatcgtttgtactggaagatttggcgcaattatctatcgctccagaagacattgattttgttttgatgacccatttgcacttcgatcatgtgttaggcctgaccggggtttcggaagaggggagcccatataccatatttccccatgcggaatttcccaccttcacacggcatggcgggcaatgataccccccatctttactctagctgcttcttactggccatacaccttctgcaccatcgctcgaccctctgttcccgcccc

SEQ ID NO: 1219 - DNA, 731 bp, Listeria monocytogenes-4B
agacgtggagcacattgatgtatcagctgcgcgctcgatgaatgtggatattattgtaacgagccaagagttagcagaaacacttggaacagatacaagcgccaaagtagtcatcgtcaacaactattttgacaacgcagaaattaaaacggcattatctgaagcaattaatagttaaataagacaaaaaaaggtgggaaaaaaatggagattattacgtggattgccaataacttttttggaaccccagccatacttttaggttttatcgtacttctcgggttacttttacagaagaaaaatttaagccaagtgattagcggaacgttcaaagccattattggattcttaattattaacgctggtgcggctgttattactggttcccttgggatttttgaaccaatgtggaaagaagtattcggacttgaaacaccgccacttgcaggctttttaggacaagaagcctttaatgcaaaatttggtagtgcggtaacacttgcgatgacactcggatttttagtcaacgtattattagcacgatttacaccatttaagtacatttatttaactggtcatatgatgttctggacaacgacgatttttgcaggaatcactgtgcaagctgtcggcggggatattccgttctggggtcttgtactcttcttagcagtaattatgggtctttactggacattacaaccagcgattacacaaccattcttacgtaa

SEQ ID NO: 1220 - DNA, 1341 bp, Listeria monocytogenes-4B
  misc-feature (1)..(end): n can be any nucleotide a,g,c or t/u
tactgcacgtactggatgagagattaaaagaggtgtctttcacttttataagatcattttcgctttttctcgtgcgattcgcttgcttgtttttcttaactaaaaaataagaaattcccgcaagtactgctaaaagtacaataatttttaaaagtgataaaaaatattccattcaagtaaggtaaattcacctttcactcccttcatcagattacaaaaataaatcattttttcaaaatatatatcaataaagtgttttttgtaactgcaatataaaattttacaccaaatcctgaaaaaatctatactttttttaaaaaatgaaattttgtgtaaaaataaaaaaacagccagtgtaacagctgtatcaaaggaaaacttctcattattcgatttatatttttctatttaactcgaaaaaaggttcttcatacccaatccttttgacctactcgcgttccctttacacaactaacatatattgttattataaaaataaacagaaaatcaataatactataggatagagaggtatgtgattgtatgcctaaatcagaaataagaaaattacttcaagaaatcaaaaaacaagtagataatccggggaattcatctacaactgaaattaaaaaaatggcttcagaagctggcattgacgaaaaaactgccgaagaaatctaccatttactcactgaattttatcaagccgttgaagaacacggtggaatcgaaaaatatatgcattccaatattagttggttaaaaatcgaattagaactactttccgcatgtttctcttattgctattttagaagatatgaaggttcttgatatttctgaaatgctcagcctaaatgatttgcggatttttccaaagactccaagccaactacaaaatacttactacaaactaaaaaaagagcttatccaagtagaagatattccgaaaaacaagcctgggagaaaaagaaaaacacaaaaaaacacaaaaaaagaaaaaaccaatattttcggcaaagttgtgccagctgaattcaaagcaccaacgtncatcaaagaacaaatcagctacgacaaatcacgcgaaaaaaacttggttgatttactttccggcgttaaaagcaatgttcaacttttaagcgaaaaccaaggtgaagaaaacaacgtatatgactgactaaaaagcatgtactcactctcttgccttgctgttcaaaaagaagaactcgactaaaaataccaagacttacaaacaaaatgccaagaattggaacaggaaattgcctatggtaaacacccggacggaaacgctgacagatgcgctgcatacgactagagaaa

SEQ ID NO: 1221 - DNA, 744 bp, Listeria monocytogenes-4B
  misc-feature (1)..(end): n can be any nucleotide a,g,c or t/u
gactaggtactaagctgtcggcggcacagggctgaagatggactttggtcccatcacccacacttggaacaaatattggtcttgctctaattgatacagcttacacagaaataggtcaagaagtagaagtaggtataagaaacaaaaaagtaaaagcgaaaatagtaccaacaccattttataaacgcgcaaagtaaaaaggaggaagtaatatggcaaaacatcgttatttaccaatgacagagcaagatgaaaaggaaatgcttgatgtaataggggttaagtcaattgatgacttatttcaagatattccagaaaaaattagatttaaacgagattatgatttaaaaccagcaaaatcagaacctgcacttttacgcgaattatcgcaacttgcttctaaaaatgctaatactactgaatatgcgtcttttttaggggctggagtttatagtcattacattccaactgtagtcgatcacgttatttctcgctcagaattttatacagcatatacgccttatcaacctgaaatttctcaaggagagttgcaggcaatctttgaattccaaacgatgattgcggaacttactggaatggacttggctaattcctctatgtatgatggtggaacagcgcttgcagaagcagcgatgctagcaagtggacatacaaagcgcanaanaattctcatttccggagctgttcacccggaaagtagcaatgttttaaaaacctatgcac

SEQ ID NO: 1222 - DNA, 704 bp, Listeria monocytogenes-4B
tgtttgttttccatccacatcaaaaaccgcagtgtaagcttctgttaatggttgggtaactgttccactgaaaggaaccgttgtatttttgaaagcgactgattggttaaacgtgtagctaacattattaataaaactagttaaattccatgttaaatttggactagcgtatgttccattgtcgctaatagtagcaggtgcaataggcgcgccagaagaaccttttactacattaggaacgacaagattattttgataatacacgggttggttggtaattgtttgatttgttaaagtgactataaataagttcgataaattagcaagtgggctgacatcactaatttgattatctttcaaatgaacttctataaggttaggtaaactcgcaagtggcgaaatatcacttattttattatcatcagctcttaaagtcgttagtttagataaattagcaagtggggttaaatcatttacttggttatttccgattgataagtattgtaaattagttagtcctgcgagcggacttatattggttatttgattgaggtccaaatataatacctgcaaattggaaagacctgcaagtggagtcacatctgtaatttgtgtagaagttaaatctagcgttttaatgctttgtaacccagcaatcgcgctcacattttttaacggatttccagataattcaagctctgtta

SEQ ID NO: 1223 - DNA, 878 bp, Listeria monocytogenes-4B
  misc-feature (1)..(end): n can be any nucleotide a,g,c or t/u
atgctgctcgagcggccgacgtgtgctggaaaggaaattgaaaagcttgatggcgtaatctctgtcattaaaagtggtggtcaataccaagtagttatcggtaaccacgtaccagacgtatttaaagcagtattagaagttggcgggatttcagctgaaggtgacgaaggaagtagtgcaccagcaacaggtaatatcttcaaccgcttcatcgatatgatttctggcgtatttacaccagttctaggtgtattagccgcaacaggtatgattaaaggtttcactgccatgtttgtagcatttggttggattacagttacttcaggtacgtaccaactactttatgcaattggggattgtttattctacttcttcccaatcttcctaggttacacagcaatgaaaaaattcggcggaaacatatttatcgggatggctataggtggtgccttagtttatccaacacttgcaggtattacagcaggtgacccactttatacacttttcgcaggaacaatttttgaatctccaattcacgtaacattcttaggaattccagttatcttgatgtcttatgcatcttctgttattccgattatcgtagcaacatattttggttccaaagtagaaaaaggcttcaagaaaatcattccagatgtaattaaaactttcgtagttccattctgtacattattaatcgtagttccaatcactttcatcgtaattggcccaattgctacatgggctggtcaattattaggagcaggaacaatttgggtttataacttaagtccaattatcgcgggtctaattntaggtggtttctggcaagtatttgttatctttggacttcactgnggtcttgtaccagtggcata

SEQ ID NO: 1224 - DNA, 647 bp, Listeria monocytogenes-4B
aattgatctcgggatggggatagaagagatgccatatgtcacgcttggttatagcgcaaccattctcatgttgaatttaatggcgcttgagctagcccttttacaagagaaaatgttggaagaagaatatcaagcggaaattgcagaattgaaaaaaattaccgctaatttaccaaaagtggtagagaaatcagcagcttgggtagacgcgcatacacaggaattgatggaagcggaacgagttttcttcataggatacggcgctgcttatggtgtagcgcgcgaaggagaaacaaaagtaacagaaaccatccggattacagcttttggtaaggagttagaagaatatatgcacggaccttatataggtttatccgagcaagactatattatcttccttgaacctcaaggcttactagaagaccgcgcagaaaaattaaaacaatttttacaaggccatgtaaagaaaatccgaacattttatgcggatgcaggcggggaaaaggcagatgatttattactcggtgtgcgggcagcagaacttctgacaccgctgtttatgactattccggttcatttattatcctttgaaatttccaagaaaaaaggaattaatttagaagtatccgcttttccggagtttgacc

SEQ ID NO: 1225 - DNA, 1096 bp, Listeria monocytogenes-4B
aacagcaatttgttctggggaccaatctgttgtcgtagaaaatatggctaaagatttaggtattgatatgttcttggccgaacaactaccaaatgataagagcgccttagtcgagaaattacagcaagacggtcatatcgttgcattcgttggtgatggcattaatgatgctccagctcttgcggcaagtgatattgggattagtatcggtactggaactgacattgcgattgaaacaggagatgtaacacttgtaagtcatcgtttaacactcattccagaaacaatcgaactttccaaagcaaccatgcgaaacatccgtcaaaactttttctgggcgctagcatataactgtgcgggtattccaattgcggcactaggcttacttgccccttgggtagcaggacttgcgatggcatttagttccgtttctgttgtcacaaacgcacttcgcttaaaaagatataaatttaaatcataggaggaatttaacatggaaaaattaacattaaatgtagaaggtatgacttgttctcactgcgaggctcgcgtaacaaaagctttatcagaagttaatggcgtgaaaagtgcagtagtatcacttgatgaaggaacagctactgttgagtttgaaaaaggacaagtgacagaagatgcgttaattgatgctgtggaagaagcaggttatgaagtagcttaatttaaaagcgaaaagggggattctgtccagaatcctccttttttgtgtagcatgaaaaaaagataccaaaatgaatggaaaactggtaaaataaatgagttaaataaaatgtgctattactagccacattttacatagaaagtggtgaagaaagatggaagaatccccacaaaacgaaccaaataacgtggagaaagacgaagaacaaaaagcaaaacccggcaatggttatataaaaatgaagttattcccatttataatgctactattcgcttttgtttttgtgacggcatttgtgactacaatcgtcatgtcttttggggatgaccagcacgtaaagtgagccttccctatcgagaagatttaccaagctctacgatgtatacgacaaaaaaa

SEQ ID NO: 1226 - DNA, 1039 bp, Listeria monocytogenes-4B
  misc-feature (1)..(end): n can be any nucleotide a,g,c or t/u
cttgcaaacgtgtgctggaaaggaataacaaatgaatagagtggcattagtaacaggaagtggtagaggacttggaagagaaatagccatcgcacttgcaaatgaaggctatgatatcgctgttaatttttccagaaatcgcaaaaaagcagaagaagtacaacaagaaattgaacaattaggaagaaaatgcgttattttctaagcaaatgttggtgacgtggaaaaaattagagacttatttaaagctgtagatgaggaattcggccgattagatatttttattaacaatgcagcaagtggtgtccttcgaccattgatggagttagaggaatcacattgggattggacaatgaatattaacgcaaaagcgctgttgtttgcaggtcaagaagcagctaaattaatgcaacgccatcaaagcgggaaaatcatcagcttaagctcgattggctcgattcgttatttagaaaattacacaacagttggcgtttcaaaagcggcggtagaatcacttactcggtatttagcagttgaacttgcaccttttggcattgcagttaatgctgtttctggcggcttaattgaaacagacgcactaaatcactttcccaatcgtgaagaattgttaaaagatgctataagtaaaacaccagcgggtcgaatgattgagcccaatgacttagtaaatgccgtattattccttgcgagcgaaaaagcagatatgattcgcgggcaaactattttagtagatggcggccgaacacttttagtatagtcaaacaaaataggtaaaaattagctattttatgtaaaaaaagttcttttttgaggaaaatattccgtttcagcacgatattgtttttttgcagacttgcctctttcccggcccttggcgggtttcccttgtggggccgggtcctgtccccatccttgcccncgtactggcctggcctgccccttggttggcccgccctccctcttgctttccctcacccttcccgcccctagactgggcatgccccccgcgccccaacga

SEQ ID NO: 1227 - DNA, 467 bp, Listeria monocytogenes-4B
  misc-feature (1)..(end): n can be any nucleotide a,g,c or t/u
gcgcgctgctggaggggccgacgggcgctggaaattgtactagcgcttttagtttttctttcttgggtgggggttgggagacttggtcgaatctgctttgaaacgcttttatggtgtaaaagattctgggaaaatcttaccagggcatggtggtattttagaccgctttgatagcttgttgttcgttttacctctgctacatatacttcatattattgggggggggatngnataatgaaaaaaattattttgctaggtgcaactggttctattggaacacaaacgcttgcaatcattcgcgaaaaccctgaaaaatttcaaattgttgcgcttagttttgggcgtaatatggaacgtggtagggcgattataaaagaatttaaacccaaaatggtcgctgtttggcatacgagagatcgtgtgatattagaagcagaattcccaaacgtgaaattttttaatggttt

SEQ ID NO: 1228 - DNA, 1070 bp, Listeria monocytogenes-4B
  misc-feature (1)..(end): n can be any nucleotide a,g,c or t/u
gtgctagtcaagtgttctagaatgtgtaggcgcccttcttttgcttgcgttaatgcttcgtccaaaatttggcggcttaagccatcaatcttgatgtccatttgaagtgctgtgataccatcttttgttccagcaactttaaagtccatatcgccaaagtgatcttccataccttggatatcagaaagaatggtgtaatcatcgccaagtttgacaagacccattgcgatacctgcaactggcgctttaattggaacaccagcatcaagcattgcaagtgtagaaccacaaatacttgcttgcgaactagagccattagattcaagaacttcagatactaaacggattgtgtacgggaattcctcttcggaaggaataacatattgtaacgcacgttcacctaatgcaccgtgaccgatttcacgacggcctggagcacgacgaggacctgtttccccaacactaaattgcgggaagttataatgatgcataaagcgtttgtactcttctgtccctaaaccatcaatgatttggtgttcacgaagcggtgccagtgtacatacacttagagcttgtgtttgaccacgagtgaataaacctgaaccatggacacgaggaagcataccaacttcagaagaaagtggacgaatttcgtttactttacgaccatctggacggattttatcttgagaaatcaaacgacgcatttcgtctttttcgatcatttcaagaatatgagctacttcgctaagaatttctgcttcgttttctagttcttttgctttatagctttctaaaatttcttcttttacatcttcaattgctgcttcacgtgctttattctcttctgttttgatagctgctttcattttgccttcacttgctgcttttacttctgcttcaagttcaggatcgcttacgaaaagttcaatttcgcgtttttctttaccaactgcagcgataatttgttgttggaattgacaaagacgtttaatttattcgtgaccgaacatgatctttccagcacacagtgncccctcgaacatgcgtggtgaagttaccgancaggg

SEQ ID NO: 1229 - DNA, 691 bp, Listeria monocytogenes-4B
ttggcaattactgttgttaacgcagataattctttataatcagaagtttttacatctaccaattggggttggtcttgaacatttatcaattttatagccaaattttgttgtatatttagtgtcatcaaattgggtagattttctacatccgttttgtctaatacaacttcttctagttggttttttgacagatctaacgtttttaaattaggcagattttggatgttatcgaatacagtatctgttaattcattttctcctaatggcagatcttcaatggccaaatcagtaacttttagctcattaatactgttcctctcaaggtttacttttcttaccttagggagattgactaattcaactttcgttaaacttgccacctggctaaagtaaacattttgcataatgggataacctaaattaactaattctggattatttttggcaattactgttgttaacgcagataattctttataatcagaagtttttacatctaccaattggggttggtcttgaacatttatcaattttatagccaaattttgttgtatatttagtgtcatcaaattgggtagattttctacattcgttttgtctaatacaacttcttctagttggttgtttgacagatctaacgtccttgaattatgcggattttgggtgttatcaaatacctgatctgagaata

SEQ ID NO: 1230 - DNA, 1147 bp, Listeria monocytogenes-4B
tgcttttgttttggtgggctggcaaaggttgaggggaggggggaaggcggatgatagatttgggggaggtaaaatttgttagaagctgttgcgagcggggattaagataggtgaccaaggacaacaagcgggccatttaaactccataaattgccgaatcggctagatgtcgcacctttgatttgtgtcatggacgtagataaattcgactgccactgcacatgcggcaattggcaaagcaagtatgtcaataataatagaataaaagaacacaaagctagtttagtcggaaattcgcgtttagcgccttttttgcgatgttttgtttctgcgcttactcgctccgatttccaatcaatcttgtggaaaaagaagaagaaatatccagcgaaagcaatcgcaaatacaaaagaaccaatgtatacatgactcattccttgtttcgctagaagccctgcaagcaacggaccaatagccacgccaatattttgcgccacataaatcgcattaaatccagttcttcctccagtcggatgtgttaaccctgctgctgcgtataatccagagaagaccatccccatcgcgataccaaccgcccacaaattccaaataaagaatggaaatccgtgaaaaaagcacaacgaagcagttgaaagcactaatataatcgttccaatcgtaagtgaaataaaaccagaaaaccggtcaaaaataagtccgccgataatactagaaacaatccccactccagaatttatcaacaacactaatgaagcgtccgttgtcgacatccctaactcttgcgtcatgtaaatcatattgaaaggccaaataaacgatagccctgtatatagtaacaccatcccaataattacaatccataaatcctttggtaaccattttgtcatttcctacactttcccttcattaaaactcaccttttttagggtatcacaaccatccacattcgaaaagaaaaacttcatcaaaaaaccacctagcaaattttgctggtggctaataagggactggcgataaatccctatcatggttacttataagtgtactatgaattcgaatttttgtctgtgctaaattaagaaatatttcaattaattttttgtaaaacttttttataggctaagtc

SEQ ID NO: 1231 - DNA, 1185 bp, Listeria monocytogenes-4B
aacttgggaactactgctgctcgagcggccgacgtgtgctggaaagataagtccgctagctagttttacaagtttacattattttacagcatatgtgaatcaaattactgatattactcctgtagctaatatgacaaggctaaattctttaaagataggaaataataaaattactgatttaagcccattagctaatctatcacaattaacttggctagaaatcttttccaatcaaattagcgatattaatgcggttaaagatttaactaaattaaaaatgttgaatgttggtagtaaccaaattagtgatatatctgttctaaataatctttcccaattgaattctttattcttgaataataatcaacttgggaatgaagatatggaagtgattggtggattaactaatttaactactttatttttatcgcaaaatcatattacagacataagaccattagcaagtttaagtaaaatggattccgctgactttgcaaatcaggtgataaaaaaaccagcacgtaatttttcgaagacactatctgttccgaataatataactagcatagatggaacactagttactcctaagacaattagcaataatggaacctacgacgcgccaaacgtgaattggtcttcgccgagctatcttccagaagtaagatatacattcaagcaagatgtggtggtgggatcaaccacaagtagttatactggtatcataattcaaccgctaaatgagccagtagactacaatgtcacatttaatatagacggcaatacaagcgaagtaaaaactgtaacagaagaagatctaattccagaacctgcgaacccgaccaaacaaggttatacatttgatggttggtacgacgccgaaacaggtggaacaaaatgggactttacaactgggcaaatgcctgcaaatgatctcatgctatatgcccatttttccgtaaatagttatcaagtgaattttgatatagatggcgcagtaatgaatgaagcgatagaatacgatactttgctcaatgaaccgaccgctccaaccaaacaaggttatacattcgatggttggtatgacgcagaaacaggcggtaataagtgggatttcaaaacgatgaaaatgcccgcaaatgatgttactttatatgcacattttactgtcagcagttaccaagt

SEQ ID NO: 1232 - DNA, 411 bp, Listeria monocytogenes-4B
actagctgatttagcctagtcggttttttgattattttttaatatattgacgtttatgctcttgaataccagttaatacaatggttgctgggtcactagcaggatccacttcaaacgtcgaaccatctttaggtaattgttgtttgaatttcgtttcataatctggaatagcaagtttcgtacggtttgctaacaattccgcatgttcatctttacggatatattttttatagtcaggttgtagcactccatggaagaactcgccaacagcaccagacccgtaactaaagaagccaattttatcctctgcttgtaaatctgcttgattgtctaacaaggaaataaagcttaaataaagggaaccagtgtaaatattaccgacattgcggctataaagcgtacttagacgat

SEQ ID NO: 1233 - DNA, 950 bp, Listeria monocytogenes-4B
gaggctactgggcacctacacgctgtactagcggccgaatctgtgctccgaaaggacacttactaacaatagtattaaggatgtgatcactacccttttcttcttcataggtaacctccaatttattcataaccaaatgaccttgacatgatcactagtctggctaatttacatcagtcatacttaatcgaaaatacaacgttccctgtatattttcctgcctggatatttttttgggattttatttccataactgcatcgccttctgttatttccgaacctggagcgagagttaaaatggcattttctggattgttttcggacccatcccaacttagtggtaccaaacattggactgttgcgtctgccgtattggacaaggttagcttgttgctttcagaaatagacgttgctgttcggtttaatcccacggacaaatttttatctcctcgattaatcccttctactttcaattcagaagtttcatttaaagaaatggaagccggaataatcactgtatagttttctatccattttgcgtagatagttgtagatacagcagctggcaatgaaaagtcaaacttattagtgaaattttgatcaagataccacccgtcaaagtaatgtccttcttttactggaatcacttcttcccagtactccccagaaattttactttgtactttttgttcctccgcgtcttcaaattctccacccatcgcatccatcgttaaggaaaggaactcaccttttctgtagcctgaaggttcactttgtaaacaggtgatatgtctgtagttgcgagagattagaaaactgtacccaattcttttcgtcataccagcttgtattttctaggccagtaaaagtacttaaattgtgactgacaaacaagtaggttagggaggtggttccagtaaacatatctgtcatggtctatgcggtagtaa

SEQ ID NO: 1234 - DNA, 986 bp, Listeria monocytogenes-4B
  misc-feature (1)..(end): n can be any nucleotide a,g,c or t/u
cactggtgcagctcctgcgaggggccgacagtgtgctggaaaggaggtggaaaaatatgtattttacacttggtcggtacacggtaagcgctgaaaatttacttaagcctcggtataaaaagtctcgttccgcattaatccaatcgaatgtttgtctaatataggcttcatcctctaatagcatttgccctgctaagtcagcaaatgtattaatcgaccagggttcgcgcatttgcatgagtgcttcggctaataagtcattttttgtcagcaaataaccgagtcttaagcctggaatcgcgaaaaacttcgtaaaggcgcgaataattgctaaatgcggaaatttttctaaatagttgatcatcgaaattgtttcattttcttctaaaaagtccataaaagcctcatcgataattaaatatatgtttcgcttttcacataaatcagcaatttttatcatttcttgttgcgcgatgagttgtcctgttggattattggggttgcacaaacaaacagcttcgatatccgtatcttgttcaagcatttctagtacgatttgcgccgcagcaaaattggtttctttcgttaactcagcataaacaatttcggcatcaaaaaaagcacgttcgtattccgcaaaagtaggcgcaagtaagagtactttttgcgcctttgttacttttgctattccgaaaatcagctctgtcgccccgtttccagggattacattcgctaggtcgagttgatgaaacgaggcaattcgcgcacggagcgccaagtaatctggttctggatattctaccagtttgtccaaatttgttgttatcgtttgtttcaaactagctgggactcctaatggattaatattcgcactgaaatcgagcaccatttctttcgttaatccgtgttgttttgctagttcattatagttctttccagcacactngtcggccgaccngagcagaatnntagagttccatagatgc

SEQ ID NO: 1235 - DNA, 623 bp, Listeria monocytogenes-4B
agctaatgacgacaattcaccaagtagaagacggatttctttccattacaaaaggtgcttttgaccgaattcccgtaaacttttccgaggcgtttttagcggaagcggagcgggtgcatgacagttttgcggaggatgcacttcgggtgttagttgttgcctataaaaaatatccggaaatgccgacagacttgtctagtgaggcgcttgagacagacttaacgtttgcgggaatggttgggatgattgacccaccgagaccggaaagtaaagcggctgtgttagcggcgaaaaaagcgggtattaagactgtaatgattactggtgaccatattgtaacagcatcagcaattgcaaaagaaattggtattctaacggatggggacaaagcgattactggagcagaactggctgaaatgtcagaagctgatttggagaaaaacattcgagattatgcggtatatgcgcgtgttagtccagaagataaaattcgaatcgttaaagcttggcagaaaaatggtgaaattgtcacgatgacaggtgatggtgtaaatgatgcaccggctctaaaagcagcggatgttggtgctgcaatgggaattaccggaacagatgtatctaaa

SEQ ID NO: 1236 - DNA, 729 bp, Listeria monocytogenes-4B
  misc-feature (1)..(end): n can be any nucleotide a,g,c or t/u
tttgctaaaaattaacgtccttttctattttgtgctataataaagcaagaatttgaagcgcaggaggaaatggttagtggagataaaggttcaaaagaaattgactgacggcagaatcgcttttagtagtgaatatggtgaatgcgttggtatatgggccgatgaagacccagaaccaagtagggtttacacagtagaaattacaataccggacatgattagcgcagaactgctacacgagagtgaagagaaacattgtgcattagaaatagacgaagaaggcttagttcacgtaattgggaagttagaggattacgaggaagatggctttgcagtgctccgcttagaagaaagtattatttgttttgacacgaaattcagtgaagaaatcgaaatgctccatggaagatttgttgaatttgttattccggaaataaaattaagtaatgttggtatatagattgaaatgaaagaggcaggaaacagatagtgagagtttcctgtcttttttttgttatttggaaaggagtgcttgaataattattcattcgtgaattatatttaatgtgaaataataaaacaaataggtagtaattagcggttaaatagttattttatagtagtaaatacgaattttttgtgacgaagaaaaattgattgcataaaaagtgaatagtgcttcatattgngtaagattttattattgaaatggagatattacccatacta

SEQ ID NO: 1237 - DNA, 696 bp, Listeria monocytogenes-4B
gaaatgaagcatggcgtttttttatgttcactctacttaaatttagaatcaatgatttttcttaaaaatgaaaagtatgccaatcagtatacttttacatatgttccatttagttgtagacgataaactttctctattaagagaaaaaataaactaacgctttttattaggctacttcatagcctctgatgcaataaaatattcgccgtcttctttaaacaaaatagtccttggaaactcatctccatttttcgctttataaagttctgtcccttcgcttaaataattagatgtgaaatttttattcggtatccggtaatggcgaattctatgctctatctcaccaattttctctaaagcatcttcttgctttgctggttcatacgacactatatataaagtgtcgtcaacttgcatgatttctacaagattgtctctatataacaaccattttatgccgaatattattgcccaaagaactattactgtcattattaattgcaaccattttttcttcttcattctattatctgacttttgattggatttattaccggttgtaatacaccctcccgtctcaatggccgcctgtcctgccgccgcattagtgcctcgttcccaggccgtgcctccccccccatgcccctgactcggtcgatcctcgctctcatccccccacccatgcacactaacaat

SEQ ID NO: 1238 - DNA, 1254 bp, Listeria monocytogenes-4B
acttctccagccatcttccaagttcatttggtcaatttgcaagtataggttgtcatttattgccgctgatacattcaaaatatccgcttcttcttggcaataatctagcagttccaaaatatcttctaagtggttgccgccttctgtaaattcatctgcactaaaacgaagtacgattgggaaaaatggaccaacttccgcgcggactttttccaaaattagtttgacgatacgggcgcgattttcaggcgagccaccaaattcatccgtacgtttgttataaagtggcgataagaattggcatagtaagtacgagtgtccgccgtggatttcgactgcatcaaacccagcttgttgggcacgtctagctgcatcaccatatttattgacgatttcataaatttcttctaccgtaagcgggcgcggtacagtaccaccttttttagatggaatatctgacgcggaaactggttgaagtccattcaaacgtgctggataagctgatgcaccagcgtggttgatttggatggatacacaagttccatgtttatgaagacgttctgttaatttgtaaaatccagggatgtattggtcattatcgattcgaagttgcgttgttccgtttgtcccataaggaaaatctacacaagcgtctccaatacccatcacatcctgttcaccttttgtgcgtagacaagaacaattcatatgcgggggataaaaataacccctacaataaccactaggaaccgaacgtctccctcggcttgctgccctccaccctttttagttcttgtcgccctatttatctcgtgcctgccttatcctcttatccgcggacgtctcaagccacgtgccgcctcccccgcttaacatacatcttctacaccccgccccttacccttttctcctcgacctgttcctactgatcataggccccccctacaataacccacttttttgatccccctaatcagctggtatggttgagtaaacacactttgtcttcctcccctctcccctcctcttgtctctcttccccttcacagattcctatctcgccttctccctttcattacccgcaccctaggtttttcccgccctccccccctttactttcctctgtcctctttcacctcttccccccttttcccaccttatcttacaatacccccaaacacgattatgcccgccgactcccgcgtatttcgccgtctccattccacccccttctcccatcactcttcctctcag

SEQ ID NO: 1239 - DNA, 1256 bp, Listeria monocytogenes-4B
ccttagatgcatgcctcgagcgccgccactgtgctggaaagcataacggtttttgtaagcattcgcccagctccagcaatccatgaatgtccaaagatgataaccatgacagttagaaccttcttcaatggctttatgcagccatttcaagtgactcttaatgaaatcgattcggtacgtatcttcaatcattccgtctgcattacggtagcgactttcgccttctacacccataccattttcagaaatgaagaatggaatattatcgtagttatcacgcagattaatcgcaatatcataaattgctctttcgaaaatttcccaaccacgatatggattcattttgcggtaaggcatttcatagttatcaaaaagatgttctggcataaatggtgcatccggatgagctgcgtattctttcgctttcacacgacgcggttggtagtagtttacaccaagaatatcaataatgttgtttttaattatcgccaaatcttcttcagtatattctggaagcgcgtcatgttcgcgaataatttcaacaaggtcagctgggaattccccttttgtaaccggatcaaggaaactacggttgaaaattagatctgcaatatgagccgcttttaaatctgccggattttggcttcttggatacgacggtgttaagttcaaaatgatcccaactcggccttctggaatatcaagtgcgtggaattctgtaacagcaagcgcatgtgccaaagtaatatggtaagcaacctgcgccccacgtgccaaatcgaatcacgttgccgatcgggcgtataccactacggcaccctggtcccaccgtgaccggtaacgagactagcggagcgccacgcctcgccccgtaccatactcgggcgtgcgcgacgcatcgtcccaaaacaagatgactgaacccagcgtattggaacagctcccaaccatcaaattgtggtcggttcggcgttgccgtgtcgacgccgtagttagtccataactcggttgaccacactcgcccactcattatgcgccctcccccacgtgttcgctttactcctgctccctcttttccctcccgccctgcatgttccgcttgctccatccctgctcatgtctccctccgacccctcctgttccccccgtgtgcccacccaatccatcaccttccgccgatcgcgtatctcgcccgccgtcagccctctttgccccctctcacttcccctcctttttccgcgtccgtcatcgttaag

SEQ ID NO: 1240 - DNA, 732 bp, Listeria monocytogenes-4B
tccaatttctcgggttcgttctgagacagacacgagcataatattcataataccaataccgccaacgagtagcgaaatccctgcaatcgcacctagtccaatcgtgagtgttcccgtaatactatcaaacgtatctaacgcctgttgctggtttacaaccgtatacgcatcttcattattcggaaaaaactggcgcatttttttctttactaccttaactgctgctggaacttgttctactttttttgtttgaatataatacaaatccacagtatctgttttaaaaagtcgttctgcggaagaaattgggataaaaagttttttgtctgccgatccaaataaactctgccgcttttgctttaaaactgcaatgaccatgtacctagcacctgcaattggcaaatattcacctatgggatgctgttctttaaaataagcctctgctatttcctgagcgcatcatccgtcaccttttggggcgttgatcacatccacattttatcaaaaacggcctgatgctgattcgcaatgctggatgctgccgtggtgccccttcactttctgcttctcggctacctgccttccctttttgctcccttccgccccgccccctcgtcccttctctcctgtcgtctcatccacttatcgcacgcaaacgagtttcccccgtccctctatgcctctatcccgttcccgctccgtttcctccccctgcctttcccctccccgaag

SEQ ID NO: 1241 - DNA, 830 bp, Listeria monocytogenes-4B
aaccggaattatcgaagagcataatgttaatttttttgccgtattgtaaggatgttagtagttctgagtgtgacatgcagaagctgccgtcgccaacgatggcgtatacttcttgtttttttgctgcggccattttcgcgccgagagcaccgtttatttcgtagcccatgcaggaatagccatattctaagtgataggtgtctggtacggctgggttccagagtcgttgcaaatctccgggaagtgaaccggccgaacaaacgacaatgctatccggtgccacgttgtcattaattgtgataagtgcttctgtttgcgtaaattcggtctgcaagcggtctgcatattcgtttaaggtcgcttggtcgaattgatctttgatttctggcgtaaatgcttctcggttgaatttggtggtttgtagccgtgctctttcgtctagccactcggttttgtatgcggctatcttgtttccaaattgagtctgataatcttgtaaaagtggtgcgagttcagctagggttgctctagcgtcaccgaccacttggaaggcatctaatttgtatgtttgcatgcggctgacattgatattgataaatttggttgttggatcgaatgccgttttggaactggttgtgaaatcggtatagcgcgtgccaattccgatgactaaatcggcgtcacggatagctttattggcagcaagcgttccgaggattcccgtgccacctaggttgtttttgaagtcaaactcaagcgttgatttcccggcatgtgtttcgacgagcggaatgttggtttgctcggaaagggcgattaattcttcgcgt

SEQ ID NO: 1242 - DNA, 740 bp, Listeria monocytogenes-4B
gcatgtctatacctataataacaaaaaagaatcaattaatgtactaaaaattccatgtgaacagatgagagtttcatgagagcgatggaattgcccattaaaaaacattcctaacccaacacatatggaaagaattaggaatgtcgcttcaacttaaaaggtgtttaaccctatttgttactatttgtaaaagtatcaattaaacttctaagatttccgcttctttgtctttcgtgatgctatcgatgttcttgatgctttcatctgttaatttttgaacgtcttcaccataagaacgcaaatcatcttctgtgatgtcgccatttttttctagttttttcaattcttcattagcttcacgacgaatgttacggacagcaactttcgcttcttcagcttcttttttcacttctttaaccaactctttacgacgttcttccgttaattgtggaatagataaacgtagcacagaaccatcattatttggagtcaaacctaaatctgatttcaaaattgctttttcaatttcacctaaaatagttttatcgtaaggtgtaattagtaacattctagcttcaggaacgctgatagaagccatttggttcactggagtagctgctccgtaataatctacagataaacggtcaagtaatgatgcattcgcacgaccagcgcggattgaaccctattggcttgtaaatgcttgttctgcttttccattttttctttggattccataa

SEQ ID NO: 1243 - DNA, 993 bp, Listeria monocytogenes-4B
gtgcgagcgccaccagtgtgctggaaaggaggataagtgacactttcgcaaaattaattggtttccgtgtatcacttccagcaaaaataacatcacccattcggccaccacggagcgatttagcggactgctcaccaagtacccagcggattgcttctgtaatattacttttcccgctgccatttggccctacaactgcagttttgccgggcacgaaatctatcgcaactttgtcagcaaaggatttaaagccattcatttctaatcgttttaataacatgtccggacacctccatttttgtttatctgtgtgttagttggtttatagcaaattgtgccgcactttgttctgcttgtttttttgttctgccgctgccttttccgagtacttgtccgttaacaattacttgggcatcgaatgctttattgtgcgctggtcctgtttcgccaaggatatcatattcgatcaagacatcacggtcccgttgaacaatttcttgcagttgcgttttataatccactgtttgtagatatgcccctgcatcaatttttggaaaaataacacgttctaaaaatgtcacaactttgtcaatcccattatctaaataaagcgcgccgataaaagattcaaatacatccgccagaagtgccggacgagttcttccaccggctttttcttcccctttaccaagtcgtacgtatttagaaaaatgtactgcttctgcaaactcgactaaagaaggctcacaaacaattgctgcgcgcatttttgtcatgtgtccttctgccatatctggatatttgttaaatagataattcgatacagtgagttcaaggactgcatcaccaagaaattctaagcgttcattatctttcacattttcccggcggtgttcgttcacatatgaggaatgtgtgaatgcttgttttaataattcaacatctttaaaatcgaatccaacgctttcttgtaactcttcccattgattcatt

SEQ ID NO: 1244 - DNA, 755 bp, Listeria monocytogenes-4B
tatcgtccccggtgtgctggaaaggaagttgctcatgatgcaattaaagacttgagagcgggggcaaaagttgtcatgattccaaatacaccatttgagaatgatccagtcattgctgagaactatttacgttcgagtaaattccgttctagtggttatgatggtttaatgcaggattatgtgttcatgcgtcgtgatcgtgtggtggcactgccggatgatattaacatgaaagtagctgctttctcagaactgatttccgtggcagttcacgctattttacgctttgaaggtaaaagtaatgctaaccgggaatctttcggtgtgtggggtgatgggaacttaggttttatcacttctttactactaaaaaattggtaccctgatagcaaagtttacatttttgggaaaacaccatataaattagacttcttttcttttgtggatggtgcttatgcaattgatgatgttccggctgatttagttattgatcaagcattcgaatgtgctggaggaatgggtagtcagtatgcggtgagtcaaattattgatgtcattaaaccagaaggaaccatttccttacttggtgtttcggagtatccgattgaatttaattcacgtatggtacttgaaaaaggactaaccgtttatggaagtagtcgtagcggtcgtgttgattttgagaaaacagtggagttcttatcaaccaataaacgtggggtagaatatctgcaaaatcttgttggggaagttca

SEQ ID NO: 1245 - DNA, 736 bp, Listeria monocytogenes-4B
gtgctgtgaagcatctgtccattgttgatgattcaatccctttatctcatcagataatcgtaaaacctctttccattctggcgttgttctcaatgcttttaccacagaattcctccatcaagttcaaaaagtttagtttgcagctgcttgcttagtaaagaaagctctctatcaattatgtcattattttcaacaattcctttgtatatggactcaaagcagctggataatcaattgctaactcttcaaatatttcatattcaatttcttcgtcggataaattaattgtatgcaatcctaacatacatagcgaagaaaggtaatattcaaaagactgttctgttgttaattttttcaattgtttcacctgatttattttttaatattatagtcaatggatttgtgtggtgtgcgtgtattatgaatcgtcaactatgtaatctcgtatgtcctttgttaccatttctaacaaaaaagctgtgacacctataaaacactggaaaatgaaggtgtgtatctcttcggtcgagagatggctgttgctgtctccggccacgtgggtatggtgagcgcgggatcgatggtgcgctgcccccactcccggcccccccacacccccgcatttgtcccctcctccccctccccccctcccgctcctatcccccccccccgccgctctgtcttccgcttttgctcccttcacccggccctctgctcacgacccacaaaccacaaa

SEQ ID NO: 1246 - DNA, 757 bp, Listeria monocytogenes-4B
  misc-feature (1)..(end): n can be any nucleotide a,g,c or t/u
tacagctgactggcggccgacgtgtgctggaaaggaggaaatcgtgatagtgtctttatccaaacgaaaggcgcgcatccagttcgggaagcaagcgacgtgccgcgggttactccggaagcaattcacgaagatatttcggttagtttagatacgctacaaacagatcatgttgaattattcgcacttcatcgcgacaatccagatgtatattcgggtcctattatggaggcgatgcataaagaagtggaagatggccgcgtttatgctatcggactttcaaactgggagctcccgcgtattatcgaagcgaatgaatatgcagtgagccatggattgacgccactaagctttaacagccctaattttagtttggcaaaagtgaatcgaccacgctgggaaaattgtgtttcggcgagtgaagagatgattcgctggcatgaggcgacgaatttgccactattttcttggtcatcacaagcaggcggatttttctctggtagattttctgaggaagacacgcgcgatacggaaatggtcgaagtttattatagtgaggcaaactgggaaagatacagtcgtgccaagcaactagctaaccaaaaaggttgcactccaatccaaatttcgcttgcttatgtattaacgcaatcattcccgacagccgctgtcatcggtccggaaaatgctacggaacttcaatcttncgttgcagcgggcgggattaaattaacagcgtctgaggttgattggctga

SEQ ID NO: 1247 - DNA, 797 bp, Listeria monocytogenes-4B
  misc-feature (1)..(end): n can be any nucleotide a,g,c or t/u
ttttttattctctagtaagaagcaatcatgactcctgcaacgggtggcaccattgctgaaagcacggacaaaattgcaacaaagtgttttaaaatccgataaccgcgagtattgttccaagtccgcctgcaactgccactgcgactttgtgatatttttcagagatgttaaatacattgataatcgcaatacctcccgaaaaggcatttactgcgtttgttgtccatgcagcaagtatcaaaccgataataccaagaactggtaatcctaagtttgtaaatacgacagaaatatctgctgtacccgccgtaagtgcaagtaccgctccaaccgtaatcataagcacacctgatggcaaaatcccgacaatagctgcttttacaacatctttacgcgattttgtatattgagaatagtctcctgctattactgcacctaatgcaaatgagccaattgtaattgctagtcctgtcataaacgacatgcttcctgctggtttataattttcaacaatagctagtccgccatcgtttaaagaaacaacaagtccgtaaatacatacaaatagtaaaactggtactgcgatataatttaaaatactcaaaatacgaataccataaatagctgaaagtaacatgataactccccaaattaaggaagaaactggtactggaagattaattccataaatacctagaaactgtgagaatgctgcaccacctttccagcacagttgcggccgatncaggcatgctgtacggtgnactnaaagtcnnnncnnaaaaaaggtttagctc

SEQ ID NO: 1248 - DNA, 896 bp, Listeria monocytogenes-4B
ttgctcgccgacttctttgttcgaaggaacaccgtaaatgtttccgtcaatggttgcaccttcccaaagtacatcatttaactcggctttcatattcttgccttctttatctagatatttatttaatggcaagaatgcgcctttttgtgagtaagaaacgaattctcttgctgcagagtaagcaatatcaaagttttctccggagttaataacggtttgcatccgtttaccgtagtcgccccagtcaatttgtgtcatttctactttgacgccaattttttcttctgtatatttatttacttctttcattacttcttccgtgtctttttgtggcgttccaatcatgtaccatttcagtgtcggaacttcatttgcgtctgccttctcatcgcttccgcacgcgcttaaacctagtagcaagcagagtgatgcgatgattactccccatttcttcttcattaaattccctccatcttttttattcttttacgccgccaattgtgagtccactaataaagtatttttggaaaaacggataggtgattgcgattggtaatgtcgaaataacaaccatcgccatttttgcaccgtcttgtggtatggacttaaacgcgccggcagtataagcaatttcagagttttgtcgcatgaattctaagttgttttcaattttcataagtagcgattgcagcggcactaaatccggattatcaatataaagtgacgcttggaaccagccattccacgctcctaccgcccacaaaagcccgattgccgccagcccctgcccaacaaagtggcacacccatctgctaaagatccgcgacctcccaccccccccaatcccaggcctcccagcctcggcctcgccatacacaccctccacacccccccca

SEQ ID NO: 1249 - DNA, 699 bp, Listeria monocytogenes-4B
ggcagaagcgcttggttacgaagtgaaaatcgagacacaaggagctaaggttgaaaatgttttaacgaaggaagacatcgcgactgctgattatgtcattttagcagtcgataaagaaatagatacatcaaggttcgctggaaagaaaataaaaaaagtatccacttccagagcgattaaagaggctgatgtggttattgaggaaactatttctggtaaagggttaatcagtttggaggcgaaaagttcggatataagttcggaacaaccgtcaaaagcaagtttatacaatcactttatgaatggtgttaactatatgttgccatttgtcatagctggcgggattttaattgctattagttttgcttttggaattgatgcctcaaaccctgactctgattcgtataacgcacttgcagctgcattttcaaaaattggtggggatactgcatttggtttaatggttccagcccttgcagcagggatagcggtttctgtggctggtcgagcaggatttgcgcccgggcttgtggcagggacactggcgactgttggtggatcaggatttctaggcggtatgattggtggtattttggctggctacgtggcacattcctttgctaataaagccaatgccactaaatcacttgctcccatttatcaattgattgtcgcacccctcccagggatcaccatcgc

SEQ ID NO: 1250 - DNA, 1163 bp, Listeria monocytogenes-4B
cgttccgggttgagttttcatgtagtttcgatgttacgacttgcaaaatcagttgccgatctttacccatctgttaaccgagatttattatacgcaggtgtgattttacatgatttaggaaaagtcattgagctttcaggccctgtatcaacgacgtatacactagaaggtagtttaattggccatatttctatcgtagtagaagaagtgagcaaaattgcggacgaactttcgattgatggtgaagaagtcgtagttttaaaacacgttcttctatctcatcatggtaaaggtgagtgggggagtccaaaaccaccgcttgttcgagaagccgagattttacaccaaattgatttaatggatgcttccttgaacatgatggataaagtattttttcatacaaaacctggtgaattcagtggggaggtatttgggttagataatcgttcgttttataatcctagatttgaataaaaaacacgcttggaaatttccaagcgaacccctagtgataagaagatgagtagctttcactggatgaagagccatcaaaatctttaaaagcatctttcaagtctttatcttccacttttacgttagcatctttgtattcttttttaagcgttttttgcatgttctcagtagttagttgagactcaaggtaagaagcttttacagcttttttatctttttcgaaagttgtttttgttgcaggtttgtccatttggatgatgtggtatccgtattgtgtttttactggagcgctgatgtcgcctttgtttttaagggcataagctgctttttcaaatgcaggatccatcttaccaggaccgaatggagctaattgtccaccattgtctttagtagcagtgtctgtagagtattcttttgctaaatcagcaaattttgcgccgtctttcagtttttgttcaacttctttggctttgttttcatcagctacaagaatatggcttacagtaatatctggttgccatgtttcatagtattttttaagtgttttgtcgctagtatcagtattggcttcagtagctttttgaactacaagttgactaagttgctttgatgattctcgtagccttgctcctggaatgtccgatggtatctcgtatttaacctgctctgtatcattcagatcgggaatt

SEQ ID NO: 1251 - DNA, 896 bp, Listeria monocytogenes-4B
cgctgaggggacaccagtgtgctggaaagacgtagcttcgtatcgaagtcatgttcgtcaatcgttggacttaaacgaacttctttcatcacgatgactttttggttcttacgggcttctttatctttcttctgttgttcaaaacggaatttaccgtagtccatgatacgagctactggcggtttcgctgttggagcaacaagcatttgatcaagattagccttttcagcaatttgaagcgcatcgattttactcttcacgcctaattgttcaccgtcttggtcgatcaatcttacttcacgtgcacgaatcccatcgtttaccaacatgtctttgctaatggtgagccacctccacttaattttgttacaacaagatagaaaatagctgttcaaatctgcggcctgctaactcattcgttcggaggccataaaaaaacgggctgcttttcagcaatcccgcacattcaaaatcgcgtaagttacgcgacgaaagtttgaattttttgcctgaaaacgttcgtgttaacgaggcgagaagcgggttgcttcttctttcttgtttaataaccttacttactatatcatatgggatttttggtgtcaaggtgaattgtaaataaaatagtttctttacctctgggcaatcttatacgaataaacgttctttctgtcaaaaggcagttaaaactttcatattgaaaaagctctcgtgactatacgagagctaaaagtatacagtgtgcatatccattcaaaacatcaaacatgtatgcataagtcctaattctgaataggttgtataactgttccatcaaatatagcctcagtctcccgaccgtttatatattcacaaaacttatagcttacttcactttccagcgcacgcgtgcaggt

SEQ ID NO: 1252 - DNA, 1298 bp, Listeria monocytogenes-4B
gagtagaacgcgaacgtgtagcagcggaagaaaaacgcgcagctgatgcaaaaattgcggctgaaaagaaagccgaagaagctagagtggcagccgagaaaaaagctgcggaagaaaaacgggttgcagcagaacgttcaaaagctgcagctgcacaaccggacacgagtaacgaacaaggacaaatggtttatatcactgctactggcaaaagatatcattatgatcaaaattgtcgcggcttaaataactctaatggcgaaactgctgtgacagttgctcaagcaaaggcacaaggcttaactttatgtaaatttgaacaataaaaaaaaagcaaaatttcttatcatgagaaattttgcttttctatttgtttttaattgaatttaggctagattcatggtaaatttagatagataatatcggtaaaatatactaatgtaaagcaatccctactttaattatacaacaagaggttctttacagtcaagtattatttttcgaaaaaaattgggggataaatatatgaaaccatatgtactcaagtttcaagaaatacgaccgcattcagaagcacttgtcggtggtaaaggaatgaatttaggtgcttgctcttatatcgaaggagtacatgttcccgcaggtttttgcctgacaacagaagcttacaagcgaaccttagcggaaaacaatgaatttacgcaactgctccaacgcctttcttccctaaaaacaagtgacatggatgctattagagaaatcatttaaacgattcgaacgcttattcaacatacacaaatcccctctgaaatagcgagttatatggatgctacgcttttagatgtgggtgggtatgagatgcctttcgccgtacgttctagcgccactgccgaagaccttccccacgcttccttcgctgggcaacatgatacgtatttaaatattatcggtaaagatgccttattacaacatatcagtatgtgctgggcttctttgtttaccgaacgcgcgattatttatcgcattcaaaatcagttcgatcatcgtaaagcacaacttgccgtcgctattgaacaaatgattccccgccaagcatacggaatcctatctacggatgatccactcacatcaaatagaatacccctctctatcgctgccacataccgggtacgcgataccctcttcccccctcttccctccgaatcaacctctaccccccattccaaattcatcgcccccaacacccccgtatcccccctcacccatccccgcccctcggccgtcccaactacgtgcag

SEQ ID NO: 1253 - DNA, 1063 bp, Listeria monocytogenes-4B
  misc-feature (1)..(end): n can be any nucleotide a,g,c or t/u
aactggcccgagcctggatgcataaccacggccgacagtgtgctggaaagaaaaaggttacgcagatgatttagatggcttgattatcggcgaaccgagtggacaccggattgtttatgcgcataaaggttccattaattataccgttaaatccactggtaaaaatgcgcatagttcgatgccggaattcggtgttaatgcgattgacaacttgtttctattttataatgaagtagaaaaattcgtgaaatcaattgatgctactaacgaaatattaggcgattttattcataatgtcaccgtaattgatggtggaaatcaagtcaatagtatccctgaaaaagcgcaactaaaagggaatattcgctcgattccagaaatggataacgaaacagtgaaacaagtgctagtgaagattatcaataagttaaataaacaggaaaatatgaatctagaattaatatttgattatgacaaacaaccagtatttagtgataaaaattcggatttagtccacattgctaagagcgtagcaagcgacattgtcaaagaagaaatcccattactcggtatttccggaacaaccgatgcagcagaatttaccaaagctaagaaagagttcccagtgattatttttggaccaggaaacgaaacccctcaccaagtaaacgaaaatgtttctatagagaattatttggagatggtagatgtttacaaacgaattgcaccgagtttttatcgtgatggaaactntaactntacttattttnncgctataaaatacgtaattaaaataaaagtctagtatttgggttgtaaacagggtgctaagccttttttcttggcttttaataccagtttagtactaaactaataatatcaagaggaggggacgagcatggtaaaaaaagaagaaaggctaggggttttgctntggtttcgatttagtcgattttacaacccggatatgaagctgcccaccatcattatgtgcgagcgtaggatttcgcagcgcgttgattgatgccaatgctaacaaaatccagacactgcgaatagtgac

SEQ ID NO: 1254 - DNA, 831 bp, Listeria monocytogenes-4B
  misc-feature (1)..(end): n can be any nucleotide a,g,c or t/u
gcgctggaaaggtgaggtaattgatacagataaagttgcagcggaagatatttctaaaactgtatcgttatcaatggagccaacaagtgattatacgttgactgtcattaatccagataaccagcccgtcgcactttatcaaggcaataacgaagaaaataatctgaaagctgaaatcaacaaagatagttttacactgatgagcaataacacagccgatgctgaaactacaatgacagtaactgtagagcctaaagaattaacagcatggcaaacagttcaatcctggtttggtaaagactttacagaaacttataacatccaaaaagatgagctagatacaggtgtgaaaattgatgaaaattatcaagacactaaagttactgtcgaagaaacaaaatcaggaaagaattttggaattattgaattggaggagagcaaatgaaacctacatggaaaatagggataatcgttgcagctgttccgttaataattattgctgtcgtcttatgggggtcttttaaggaggcaaggtataatcttgtctctctccctgatgacggtgtagtcctaaataatgagcaagagacattgcaatttcaaaagggcaatacgctttatcgcagttggaatagtgatcaattaattgcgaaaaacgataaagaagatactcgaaacgaaattatggagagtaccatcctttatctaaataaagaagccttaatgtttactaagagtgttcccgtcattgatacanatggggttagtagcaactaaaaggaagacaagtctaccaacagaccaattcctgctataaatacaaaaactcag

SEQ ID NO: 1255 - DNA, 732 bp, Listeria monocytogenes-4B
atacggtccacgcgcacttgttatcccagggtttatcgtagcggttgtggcactatttttcttaacgagaatagaagttggaacatctgcattaaccatcatcgtacttcattcggtgttaatgattgggatttcgatggtcatgatgccggcacaaacaaacggattaaaccaattaccgccaaaattatataactgatggtacggcgattatgaacacgttgcaacaagtttccggcgcgattggaacggctgttgcgattacaatcatgtcagctggacaaaaagcttatatggaaacggcgcaaggagtaggaccagagcaaatggttgcttcactgacagcaggaattcaaaatgcctttgtctttggactgattatggcttgtattggtcttctgtgctcgctattgattcgcccagctcactcataaagcgaacagaacttctccccatgagaggctcttttctgtttccacaaatgggccctgagcggcctcactgatcctccatctgcgcgctcaggccccgcccctcccctcccctactggcccggccgctgctcgctcctcccgcctcgtctgtgccacctccctcctcccccttccctcccccctcccctttgttctctgccgccctgtccccccccgctgtttccccgcgcccgccgtctcgttcccgcctcttgcctggcctcccctttccctattcagtacaaaaacaaaaaaaaaa

SEQ ID NO: 1256 - DNA, 776 bp, Listeria monocytogenes-4B
agtagccgcaaaagctgtttcgggcgctgacttcccagaaatccttgaattatctggcccactcatgacatacgaagaacttacaaatgcattaaaagaagcaactggaaaagatttcgacgttatttcttcagatgataaaggatttgtagaaaatttagtttctgccggtttaccacaacctgtcgcagaaatgttcttatccttccaacatgacattaaaaataatcaattagatgttacttctgatgattttgaaaaagcattaggaaaaccattaacgaatcgcgtagatgcgcttcgggaattgttgaaataaaaagggacagcctaccttgatttgaggtaggctgtttttttactgcgcattttattatcttttcagtagtatttatacgaccttttaaacatttgataagaatgaggctataattttatatgctctttatttattaaatgaaagaaggaaaacgagtgaagaagttagttgcttggtttaacggattatcaaaaatgtggaaagtggtagtaataataggcgcagtttttgtagttataatagccttaacaacaggagagaatgaaggtgaacaaacgaagacaaaaactaacagcgataaaattgtaaaaacgacgagcaagcccaagctttcaaccaaagatttagccttgattaaagctgatttagcagaatttgaaggtcgggaactttcttcagaaaaattttgaagatacattcaagatacagttggtcggattggatttgcgatgatata

SEQ ID NO: 1257 - DNA, 974 bp, Listeria monocytogenes-4B
  misc-feature (1)..(end): n can be any nucleotide a,g,c or t/u
gacttggttgctttcgggcgtcagtctttagcagatccagaaacaccaaacaaagctgctgctggaaaactagacgaattacttccttgcatcgcttgtcttcaaggttgcgttgctaatatgtatgccggaaaacccattacttgtttagtaaatccgttacttggatttgaatccgaagcttattcacctaaaactccaagtaaaaaagtagttgtcattggcggtggtgtcggggggccttatgctggaaagatggctggatcccgtggtcatgatgtgacagtttatgaagcatcagatatgattggcggtcaaatgcgcttagctgcctatcctcctggtaaaggcgacttaacaaacatggttcgaagttacatcaaaaagtgtgaacagttcgatgtcgaaattaaaacaaacancacctgtaactatttatgaacttattcaagaagttgccccagatgccgtcattattgcaactggcgccactccacttgttttgccgataccaggtattgaggatgctggacttatccacgcagttgacttacttgatgggaaagagaaatgtggtcaaaaagtactcgtagttggcggaggtatggttggtagtgaaacagctgcatttttaggtgaagctggtcatgacgtcaccgttgtagaacttcgcgatgaagtcggagcagacgttatttctgaacatcgtaaattcctgatgcgtgatttcgatgaatataaaatcaaaagtgttacgaatgcaaaagtaacgagtttctttgaagacggggtaacctattccctagcggataacaaagaacaccgaatcgacggatttgactctgttgttctagcaatgggatcaagagcctattaccccactgaaggaagctataaaaaaaatggtacccgaaacctatgtcatcggtgatgctattcgtgcgcgccgggcattggatgcaacataagaagca

SEQ ID NO: 1258 - DNA, 796 bp, Listeria monocytogenes-4B
aacagtgtgctggaaagaagcgctatttggcgggtgacgaggagtttaggaacttttttgtggaaatggatccaaagacggaccttagttcggtaacaaggccacgtgcgacaccagtgctgacaccatttcaatttgattcaggaaaagtagggcatatttggacgacttttagtgaggatcaaatcgatttatatctttgcttctccggaagtgctttacaagatgattgatgttttgatgttctatttagaagaaggtgcggaatatgtgcgacttgatgcgcctggctttatgtggaaagtgccgggaacgagctcgattcatttagaagagacgcatgaaatcgtgaaattatttagagatttagtagacattgcagctccggggacgattattataaccgaaaccaatgtgccgcatgttgataatattagttattttggaaatggtgaaaaagaagcgcatatggtttatcaattcccgcttccaccacttgtgctccatgcgatacatcatggtaatgcagaattcctccgtaactgggcgaagaatttagagctaccagaaggcaagcgaacattctttaatttccttgcctcacatgatgggattgggttaaatccagtgcgcggcattattccagaagctgaaattttggctttagtgaatgatttggaggaagaaggcgcgctcgtttcatataagcaaaatccagatggttctaagagtccgtatgaaattaacgtgacgtacatgcatgcgctaagtaaacaggcggacacagatgacttga

SEQ ID NO: 1259 - DNA, 633 bp, Listeria monocytogenes-4B
cggaggagaggcgccagtgttgttgtggccggcaagcgctgtggattggtggttgttagttaattctttttgtcagtagaaagttagttgtttttgttttcctttgtcatcataaacattcgatacatatttgaaccctttgaattgatttttttgaacgggttttcctgcgtcttctacttttacgtaataggatttcactgcggcgtcagttggcatcgcatactcccaaatcgcgcaaacagttagaagaactgcagctaataatattaaacctctttttttagtaaacatttctccttcatcctttcttgatttgttttattacattaagtttacaatggaatgacaaaattatcccgtttgttaactaacaaaatccagcgttaatcttacatttttgtcagaaaggtaacaaaagtgagtttaaaagattgtgaagttacaaaacaaactttttttaactactaaatatagaaactagcgaaaaaataggcactagaagtagtagcatttttatacttgaaatatgctcgaaaacacacaagtgccggaaaaaatttttttatttgctgaaaaccttgttgtaatcattgtttagacacttttcgtaataaaaccagagtactatat

SEQ ID NO: 1260 - DNA, 708 bp, Listeria monocytogenes-4B
aacagctgtatcacccggtattgtttcaggacgtgttgtagctacttctaggtaaccagagccatcagttaatggatatttcaaatgatagaaactgccttcaatatctttatgaattacttcaatatcagataaagccgttttcgcttctgggtcccagtttattatatattggcttctataaataagacctttattatataatgttacgaatactttttttacggcatccgataaaccatcatctagtgtaaatcgttctcttgagtagtctaaaccaaggcctaacttctcccattgttcacgaataaactcagcgtattcttctttccattcccaagtcttatccacaaagttttctcgtcctaagtcataacgagaaacattagattcttttaatttcgcttctactttagcttgcgttgcaataccagcatgatccattcctggtaaatataaagtgtcaaacccttgcattcttttcattcgagtaataatatcttgtaaagttgtatcccacgcatggcctaaatgtagtttacctgttacgtttggtggtggaataacaatactgtaaggttttttatccgtatttccttctgctttaaagaattctttttctagccaccatttatatttacctgcttctacgttactcggctcatattttgtaggcatatttatttcattgtgttcgattgtcataat

SEQ ID NO: 1261 - DNA, 885 bp, Listeria monocytogenes-4B
ctctagatgcagtgctcgagccgccgccagtgtgctggaaagtagaagtgcatccacaccaaaaaacatttgtggcagagaactggtattccattatcgaagcaagtgttgaagaaacgtatcattcgcttgtgatatacgcggataatatgccgggtgggtacgcaatgtatggaatggatacagatgatggtgagttttggttggtacgatttatgactgggaaagagcatcaaggtaagggctacggcggagatgcgctagaacaaattatcgagatagtgaaaaatctaccagaaaaaccagcacgtctgcgtctatcttacgaaccagataatacggtagcagagaaattttatgcaaaatatggatttgaaaaaacgggggagatcatcgacggcgaggcagtggccgacttgtggttcaaacgttaaaatcgggtatagaatggggataaggaggatgctaaatggacatttttaatgatttctttgtgatatttttaattgcagcgactgcctttttcgtggcaagtgaatttgccattgtcgcaatccggaaacctactgtcctgcaactagtagcctcagaggacccgcgagcgaaatatgtaaaaaaagttacttcgaatatgaatgattatttggctgcctgtcagttaggtaatacacttgccgcacttgctatggggtgggttggtgaagcaacaatgcgtggctggttggagccgttatttttaatgttacctgtaccagaatccgttgaaaagccgatttgggattattgatgcggggattggaattacattcttgaatgtggggctgggggaacttgctgcggaaacattggcagtgcgtagcgcatgaaaaggggctgtgaggatgg

SEQ ID NO: 1262 - DNA, 954 bp, Listeria monocytogenes-4B
ttttgtgttgtttttttacatggtctgggccaattccttgcgcataagcaggtggtcatccgataatagagccacgtgcttctggtccaacaataatatcaatttttaattcttttgcgtattccacaattttatctgtagcaaagcgatatgcttctccgtcattcataaggggtgtgatgtctttaaatacaatcccttttttgggccaatcgttcacaatcgctacataatcttgtaaatctttaatttccattttctagttcctccgcattcgggtaaattgatgtttccatcattgattccatccaactatgaagttccgtatagttagagtacaacagtttttttcttgtagttatttcttctaccttttgttgataaacaagtgattcgtccagattacgtttttcaacaacttcattaataataatctgaccactttccattttagcaaattctaaatcaaaaaacacctttgacatgaaatctatttgctctttattccagccaaacttttgcattagccgtggtgtgtacttttcaattggaaatggttggaattttttgatgagactatatagctcagcaaaggctaaccggtctggaattgctggaatttgattcccctctgctgcatcaaaatggacaaaaatacgctctggtttcgtttcacgaacaatcgtttccactaattcagtcttcgttggcatatccgcaaaaacaagttcttctgtctggaaatccgccgtaaaatcagctttttcatccactaaaatatagtttttttctccaagcgtgccaatcgttctttcttcaaaacaaacaaaaactcttgattctgtttgttcttggagaatcctagcccactcagatttattacgtacatcgaaaagttgccaatgcgagatgtgaatgtccatcatgcgtagttgtggttttttcacattatta

SEQ ID NO: 1263 - DNA, 851 bp, Listeria monocytogenes-4B
aggtaactgccgcaccatgactcgatgggccgacagtgtgctggaaagtccaatcaattggcgcatttcttagcgtattcaaatctaaaaaagtatctaaaacatcttctgtcgttataatttggatattgcttggctcattttgcataatccctgaaagctctcgttctaattcgaaagcaagcgtctctttggaagccacatggcccgtcgcataacaaactggacaaggcatcgttgtcgtttctaaaaaggattgctgttttttgcgtctcgtcagttgtaatagccctgactgcgataaagcagcaacttgtgttgtaatatattcttcgcgagttttgatctctaacgcttcataaagcgctgtgtagcccaattctgacattcctccaataaaatccactaatatcatcccactcatattacgtaacctaatttgtcgaaggatttcaggaactgctttgagatttactgattctactgttttttcttttgctgtggtacctttaaatttacctgagtttacatcaacaacccacatcgcttctgttttttcaataaataaagaagaaccattacttaaatgaaccactggtcgtgcgagcctatctatttgagctttgatacctaggtccgcaataaatcagcgcttttctttatgatgatttgcttatccggccatagcatttctagcattttagcaaactcaaaatcatgccgtattacttctgatggcgcgtatcgctgcatgaactgttccgtcctatttataatccccgaagcccctgctcattgctagcccggtctgttccgcttgctagctcctttaataatgcaagatgacacta

SEQ ID NO: 1264 - DNA, 713 bp, Listeria monocytogenes-4B
  misc-feature (1)..(end): n can be any nucleotide a,g,c or t/u
taatagtatcttgaccagctgtttcttgcgttgtataaacggcacttactgaatcatcttcctgtgtaatcgtgacaaatccgtctatcttaccgtctttcagagcggactgggcggattttttgtctttaatgtccgtatttactttgaaatgatttttatcagcagccaaagatttggcaaaaacagggtcttctgcaagtaccgcaagctttgtaatatcactacttgagtcaaaatagtcgaccattttcggaataccagcgatgagcgcggcgattaaaacgggaaaaagtagtgaaattaaaaatgattttgttttcacgcgtcttttgtaaacttgcttcgtaatcacccaaaatttactcatttagctcaccagccttccatttgaaaatttcttcgagcgtcggagcttggagactaaacgtttgaatgaaaccatcttttgtcacatattcaaaaattttctctgcgtcactttcattttcaatttcaagttgcagaaccccgtcgcggtgggtttgaacatttaaaacacctggtaaagtagcgagttctgctgcactatgactagattcaatcaaaatacgtttacgaccaaaaaccgattttacagattccgttgttccttggaggaccacatttcctttttttaacattaatagcgagtcgcanagttcctccacattctccatccgatgactagaaaa

SEQ ID NO: 1265 - DNA, 1327 bp, Listeria monocytogenes-4B
caaggggggggggcggggccgcgggaagggggaggcgggagagcgtgggcgtgggggggaggcaggggggagtggggggggggggggggcgggcgggcgggggggggggggggagggtggagggggggggggggggtcgggggggcggagacggagcggggggcggagggggggcggggggggggtggggggggggggggggagggaggggggaggacgggggggggggggggggggggagggggggggggggggggggggggcgggggggggggggggggggcgttgtgggcgggaaaataggggggggggaggaagggggggggggaggagggggggggggaggggcgagggggggggagggggcggggggggggtagggggggggggggcacgacaggtgacactatggtgggagggggggggggtggggaggggggttaggcgtagggagggagtgggggggggggggggggggggctctcgcggggggtggcgtggggatgggggggggggtgggggggagggagggggatgttaggggggtgtgcatgcaggggaggtgtatgtgggggtgggctttgcgccattgtggcagcctgtgtgggcggtgggtgattgttcgtgataagagggtttcacttcccactagagcggattttcgataaccacgttttcttgcaaacgttgcgtggcaaagtacagatgatccgaaagagaaatatagatgacatcactaatatctttcgtcgtttttattttgaaaagcttcacaatatcgttagctacttctaaaaatcgtattgttatttgatttagggtcattttaaacttatgcattgtgtcatctttcaactcacaaactttttcgattcccaatggattaattggcttgccaactccttaatcaaagcctctgttctgtcgtaaaatgaggaattcctgcgcatcctagtcaatgccactgacaatattatcatagaaaatgccgtcaatggtgaaacaaatcaccacactatttgaagcataatcacaagagcattactccgcatatgatccccaaaaactcatattctggttatgaccgcattatcggcttcacgcctgatggatatagctcctccttgtgaaatcgattcgcatggcccttcgcaatatcattccgcccctgactatttttcgtcttcacagcccgctgcttcactctgttgttcacctccttttcgcccttaccctcctttctatcggatccctctacccatccccgccgccttctcccccttccttccctccctaacccccccttcatcccattccttttcttccc

SEQ ID NO: 1266 - DNA, 788 bp, Listeria monocytogenes-4B
cctcttggacttaagcatgctgagcgccgacgtgtgctggaaagtaacaatgcagttgtcgttgttcctgataaattaacgacagaagatacagattcattagcaaatattttcaatctgttaggccgcttccatgatggaaataggggagacttgactgccgtacatgccgccaactggaaaaaaccaaaagaaggatcgaatattattgcagttggtacaatgaataataatccagtaattaaaaacgccaatgacgacctatatttccagtacaacaaaacaggcgattacttcctttccaatgaaaaaatctcgattgaaaaaaattacggcaaacaacttggtagtgtgcagctaattacatcacatggcgtcccaattctggcacatactggcacacgcgcgcgcccgccgccactccgctcggctctcctccctgtccctgcccccgctccctccgccctccgcgcttcgcgcccctcggtcctccctgattctccctctccccctcccctttccccccctcgcctcctccgtccccccgctccgctgctctccccgctcctccgtccttcttctctcccgccccctcgcgtcccgccccctcggtgtgttctctgtcggctcttcctgcgcgcttcgccgcctacccgccctcctcctccccgtcccctctccccccccctcttccctccccgcttccccccctctgtgtcgccccgcgcgcgcgcgcgccccgccccctctcccgtctttgtgttagaaaccaaacactcaaaaaaaag

SEQ ID NO: 1267 - DNA, 736 bp, Listeria monocytogenes-4B
  misc-feature (1)..(end): n can be any nucleotide a,g,c or t/u
gctgttgcaattagcagctgcttgagcgccgacgtgtgctggaaaggagtacagtaaacaatatctaattggtaatcaaatcaaatacaaaatcaatgcgaaaaacatatttgattacttggaggatgagtgaaatgggagctaaaaagccactttttgaagtaatagcttcagaaataaaagatagtattaatcgcgatgaatataagccgggaatgctaatgcctatcgaaacagccttgcaagaaattttttctagcagtcggacaacgattcgccgcgcggtagatttattagtcgaagaaggtttagttgttcgtccaaacggtgttgggctgtccgttcgcccccgcctaacagctcgcaacattttacaaatgacaggtgttctgaggnccggcgccggcgggcctctgcgcgccgacgtctcccactctcacgtccgccctgctgggccctcctcccctctcatctcccgccccgccccccgccgcccgccgccccccccgtcccccccccccccgcccccccccngctcctccctcccctcgcctccgctccgcgtcgtcgccgcgtgccccccctccctcgtctccgcccctcctcgcgcgcctgtctccgtccgtctgctcccccgcgcctgcggttcccgcccccccccccctctccctcccgctccccgccgcttccctcgccccccccccctcccccccgccccccacccaccacaaaaaaa

SEQ ID NO: 1268 - DNA, 997 bp, Listeria monocytogenes-4B
tcactttacgccagatccacaaatggtcacagaaacaacggaatttgattttgatacacttcgtactcgtacgcgcgaacttgctttcttgaatcgtggtttaacgatttcaattgaagacaagcgcgaagaacacaaagttcgtaaagatttccactatgaaggcggaattggggcttacgtggagcatttaaataaagcaaaagacgttatccatgagccaccaatttatttggaaggtgaacgcgatgacattatggttgagatttccatgcaatataatactggattctcaagcaatatcatttcattcgcaaataacattcatacgtatgaaggcgggactcacgaatctggatttaaaacggcgttaacacgtgttattaatgactacgcgcgtcgtaataaattgttcaaagatagtgatgataacctttccggtgaagatgttcgtgaaggtttaacagcaatcatttccatcaaacacccagatccacagtttgaaggacaaacaaaaacaaaacttggaaattcagaagctcgttcaatcacggataagctgttttctgaggctttaaataaatttatgatggaaaacccagatgttgctaaaaaaatcgttgagaagggcgttgtagcttctcgtgcacgtctggctgctaagcgcgcgcgtgaagttgctcgtaaaagcagtgggttagaaatttctagcttgccaggtaaactagctgactgttcttcccgtaaccctgaaatcagcgaactttacatcgttgagggtgactcagctggtggttcagctaaacaaggtcgtgaccgacaattccaagctattttgccgattcgtggtaaaattttgaacgtggagaaagcgcgtttagaccgaattttagctaacgaagaaattcgaactatttttacggctatgggaactggttttggtggagatttcgatgtttctaaatctcgttaccacaaattaattattatgactgat

SEQ ID NO: 1269 - DNA, 497 bp, Listeria monocytogenes-4B
ataccaaatctctctttcgctcactaacagaggctagcataatattcataattccaataccaccaacaacaagtgaaatagcagcaatcgcaccaagcgcagtagttagcgttgtactaatcgtgttgaaagcattgagaatctcttgttgattaatgacttgataagatggtcccatttgggggggtgacgcatttttttcttgttcttttttgtctccaaatttaatcgcaagacgtgattctagtgtgtttactgcagaatcaacatcttcggcagattttgtttctacatagattgtacggacattcgtatcttttaggagcctttgagcggaagaaatcggaataaagatttggtcatcgctcgatcccatcatagacgcgcctttttctttcaagacaccaacaactttgtaaggcattccgtttaatctaatggtttctttccagcacactgggtggcccctcgaacatgcggcgaagttacctacaggg

SEQ ID NO: 1270 - DNA, 1097 bp, Listeria monocytogenes-4B
actgatggcactctgctgcatccttcgagggccaccatgtcgctggaaagagtccattctaaaagggcatatggcagaataaatcatttgccctttttattcgttattttttaagaagtgcttctacttgatcgttgaaagtatccatttgtgtttgtacatctgcaccaccacgataaatttgttcccaagattttccatataattgagcgatttcctcaaattgtttgataagtggcattggttcagctgttttcatttgttcgccgaatactttgtagtaagggtcatttttcagcatatcatcttcccaagcatccatacgagctggcatggagtttgtatcttttaaccaagataattgcacatcaggttgactcatgtagtccatgaattttagagcatcatctttcttatcactatatttgaaaatggaaaggttagcgccaccaaggcttgattcgttattttcttttttaggtaatactgcagtagcccattttccgtcaatgtcaggggcagtgtctttcagtgtattaaccatccaaggaccactcatgaacattggcacaataccgtcgccgccgaagctttgagaagcatctaaaccaagatcagtatctggagcggaaccatttttaatgaaactatctaaataactaacagtgtgtacgaaaggttttttattgaatactggttgaccatctttatcgaaaagaggggagccgttttgacgtccgaaaatgaaaccagtcgtttgttcgtttggatcaatggcaaagccgtacatatctttgccacgtttagaaagtttaagtgcagcgtcggatagttcatcccatgtttttggagcttcattataaccaacttttttcagtaaatcggtacggtagaataatacgcgagtttctgcataccacggaacaccgtaagttttcccgtcaaattgagtagtttttactgaacctgggaaaaatagatcagaattcatatttttacttttttcgacatcttttgtaatatcaagtagtgcgccagcttcgacaaattcaggcatccaagtagttcccatttggactacatcggggccagattta

SEQ ID NO: 1271 - DNA, 696 bp, Listeria monocytogenes-4B
tgcaaaacgtgctggaattatggtaaaagacttttcaattggttttggaccgaaaatttttgcttatcgtaaaaaagaaacgcaatatacgattcgcttattgccgattggtggttacgttcggatggctggggaagatggcgaggaaatcgagctaaaacctggttaccgagctgggctagaattaactccggaagaaacggttagcaaaatcattgttaatggtaaagatcaatatgtaaacgcgcagccaatagaagtttctctctgtgatttagagaaagaacttttcattgaaggctacgaagattacgatgacaccaagaaagttcgctatcaggtagagcgtgatgccttagtgattgatggtaaaatcgaaacgatgattacgccatatgaccgttcttttaatgctaaatcattaggaaaccgggcaatgaccatttttgctggaccgctttttaactttattttacctattttaattttcacagcacttgcttttgtacaagggggcgttccaagcgccgctcatacgcttgggaatgccctaccgcacggggctgctgctgcacctgccccaccccaagggcatcacgccccccccgtgcctgcgccccaccccccccccctgccccttcctcctcccgccgccccctcccccccctccccctcacacaccaaaaacaaaaaaaa

SEQ ID NO: 1272 - DNA, 889 bp, Listeria monocytogenes-4B
  misc-feature (1)..(end): n can be any nucleotide a,g,c or t/u
tcccaacccttgaaagcgcagaaggttatttgcttgatgaaggtttttttgaagcttaattgacggaggcgagttttggtggagaatttagaacagctgcaagaacgagttgcagtaagtgatggacgagcaaaagcagatttagtaataaaaaatggacgaataataaatgtgttttcaggagaaataatggacggagatattgccatcaaaaatggttatattgctggtattggcaattttccagatgcagaaaagataatagatgctgctggtgccttcattgcacctggttttattgatgcacatgtccacgtggagagtgcgatggtcacacctgctgagtttgcccgtgtcttactcccaaatggtattacaacgattgttacagacccgcatgaaattgccaatgtggctggagaaaaaggaattgaattcatgctagaagatgccaaaggagtaccaatagacatgtttgtcatgctcccatcttctgttcctgcaacggaaggcgaacataatggcgaaacattacatgctgagaaactccatccgctttatagacatgaaaaagtaatcggccttgcagaagtgatggattttccatctgtagcaaaaggaagttcggatattttaaccaaaattatcgatgctaaaaaagaaggcggacgaattgatggacatggagctggcttaacgagcgctgatttgaataattatttggctgtggggatttcgcacagatcatgaaagtactactgctaaggaagcaacagaccgcttacgntgccgaatgtttgttatgctacgcgagggaactgtangccgtgatttacttncaacattnctgcagtatctgaaaaaatagccatcgtttttgcttttgcac

SEQ ID NO: 1273 - DNA, 719 bp, Listeria monocytogenes-4B
  misc-feature (1)..(end): n can be any nucleotide a,g,c or t/u
gtgctggaaagtgagtgaaattattgctggtagcgtaaaaacaaatcccgctaacattagaaaaatcatgagtaatttgaaaaagtccaatttaattactacgcaaactggcaaagcaaatccgattcttgctagaccaccagaagaaatttcactgcttgatgtttataagagtatagaaggcaatacgaatttaattcacgttgatccaaaaaccaatccagactgcattgtcggagccaatatccaacaagttcttgcgagtaaatacgatttgctccaacaaaaaatagaatttgaaatggaaaaaattaaattagatagtattgttcgtgatatttctgtacttgaaagcaaagaccggccgcagaatatggaaattatcgaaaagtatttgtaaaaataagtccaaagaaaaaagaactgatccgttttcagcgaatcagttcttttttcataaatttaaagttgtagcttttttcttccccaatatttagaaatagcttttcgtaggtcatttctgtgcccttaaattagcagctttcgtccaaccaatgaaagtggaactagtccttattcggtaccaaagttgaccttcaacggtggctgttcgatcgacaattaatgtttgatttttatacttggctaaagttccccatttgattgggctatctactaccggaactttatagtatgcttcatttnctttatttgcgctg

SEQ ID NO: 1274 - DNA, 196 bp, Listeria monocytogenes-4B
gatgcgcacacttggtgcacttgcagttgggatgtccactgtaccggaagtaatcattgcgaaccatgctggattacgagtgctaggtatttcttgtattaccaatatggcagccggaattctggatcaaccactttctcatgcggaagttattgaaacaacagatcaagttcgtagcacgtttttacaatatgta

SEQ ID NO: 1275 - DNA, 873 bp, Listeria monocytogenes-4B
cttgggggcactagagcatgactgacagccgcactgtgctggaaagtaaaagtgattctgtataaggttgtagcggcgcatgatacaaatcatttgctggcgctaactctactaatttaccgaagtacattacgccaatacgatcactaatgtatttaaccattgataaatcgtgggcaatgaataggtaagttagatttttttctttctgcaattgacgtaataagtttactacttgcgcttggatagatacatctagtgcggaaataggctcatcggcaataatgaattctggttgaacagcaagcgcacgagcgataccaatacgttgacgttgaccgccggaaaactcatgtggataacggccagcatgttctttacttaatccaactgtttctaacaaatcgtatacttgtttattcgtttcttcaggtgttttagcaaggccatgaatacgaataccttcagcaatgatatctttaactttcatacgcggatttaaagatgcgtatggatcttggaaaatcatttgcattttacgacggaattcaagcatttctttacggcttttacgtgcgtgcacatctttaccgttataaataacttctccgccagttgcatcgtataaacgaatgatagtacgcccagttgtagatttaccacaaccagattcacctactaaaccaagtgtttcacctttataaatatcaaaagaaatatcatcaaccgcgcgtacttcacttgcagtacctttgttgaagtattgttttagattatgaatctctaataatttttctctttgttcagtcattctacttctacccctttcgcatggacagcttgcatgccaggatgaagttccgcaaactgctc

SEQ ID NO: 1276 - DNA, 740 bp, Listeria monocytogenes-4B
taccttattatgatgtacattgatgagtggattacataaagaagcagcctggagaaacactaagcccagaagaaaaacgcttagctgatattgctaacagctacttagatcaatttttagctgcagacaaaatcgtcatggcgttcccactttggaacttcagtatcccagcccaatttttaacatacttattctattttaatcaagctggcaaaacatttaaatacactgcaaacggccctgtaggttcagttgctgataaaaaaattgccctgcttaatgctcgcggcggcattcactctgacggaccagtgcacacctcccaaatgcccctgacctctgcccaacatgcgcccccgtgactcccgcctctctcgaccacacctggctatccccccaccgtcattcccccctcttcgttccccccctccaccctttgcgtgcgtgagctctcgaccccccccctgttcctgctttctgccctccccacccccttcccagttccctcccccccccccttccttcttttctgcccccctccctctcctcggcgcccctccttccccctccccccgtgccccccctctgcctcccgcccgccccccccccccctcctcctcttcctctccccccgcattgttttccctcttgtggccgtttgccgtttccttccgactccctcccccccccccgcgtcccctccgtcccccgaagcccattccatatccatctccacccct

SEQ ID NO: 1277 - DNA, 1268 bp, Listeria monocytogenes-4B
agcggccaccgtgtgctggaaagttatattaacttctaaataaagtaaatacctcttcttgtctttttaaaaccttggtaattgttgtttccctgtcgcatcttgctttacaaagcgaccagcttgttgcatttcttttctaagtattttgcgcacatcatcgtctgtcaaaggttctttagattctttttgctgcatttgtatacattttcttaattcccgcaatattcagaccatcattcaaataatcttttatctctagcaaaacatcaatgtcttgaagtgaatacaaacggtgatttccttgatttcgtgccggatggattaatccttggtcttcatagtagcgaatttgtctagcggtgagatcagttagcttcatcacaggcccaattggaaacagcggcatcgatctccggatttccttttcactcacgacaattccccctcaaaacataattattttttgatgatagtagcattataatgtacgtcagatgttttgtcaaatttatgtaagatattctaacattatcgttaaagcgttgtataccaatgtattccgcataaaaaaaccgcgattaaaaccatcgcggtaaaaattaaaaatatttttttgcaaataaatgttacttttttatactattttttggattgctcgagtaactgcaattttgatgtgttcataggtcaaaccgccttgaacatacagttgataaggttctctaataggcccatctgctgttactcccaaactcgcgccttgaataaatgtcccagctgacattatgacctcatcttcataacctggcatatatgcaccgatcgccaaaccatgcgcatcacccctccaggctgctccactacctcgcccacacgcacgcatctcctctctgccctcgaaggaaagcctccccctcaaatgacgcccttggggcatcttatagtggtatacgtactacggcccactcgggacgcatgcccgctccccctgcccgtgctgtcgtcccccgcccccgcccatcacccccctcccccactcccctttccgcccccccccaacgaattgaccgacgggtaggcttcccccacagccccccctcttttacctcccccccccgccccgtctcgtacgccgcccccccgcgtcccccaccccgtcactgagtaatccccccccccccacccgcccccccccaaactcccctattctcccacccgcccgaccccggacgatccccccaccccccttacgcccgtccgacccc

SEQ ID NO: 1278 - DNA, 777 bp, Listeria monocytogenes-4B
aattattaacaagttcctgtgcgcgtacagcaggatagcccggaatatcataaatatatttctcgggataaagcgtggaaagttgtccacctaattgcggtaaactttctattattttcacactcgcattgcgcattccggcataaaacgcagcaaatagcccaaccggtccaccaccaatgatcgtgatatcataaatttttgttttttcatccaaaatacatcaccccctagttcgtaatttccctatgaaaggggtaaagttgcaataagcatattttagcatatattgttgaaaaagaatgtttacgggattgtctccattaaaatatggaaaaaatgaactagaccaattatccatcaaataaaagatatttacgaaaatcaagccatctcaaagctttattgtgaaaaaaatcgtataccactcgaaccatgctacaaagaagcttaaacccttgagttcgctttcttgaaaatgaatgtgaaaaagtctatgatatagtttgtaagctgtgaaatagggaatatattggtacttaccattttcactttattcattgtttgcagtagatttttagcgcaatctacataggtgcagtaagaaattcttaatgcaattttttttgtgaagaaaaatataagggaaagtagatgtgataacagatgagtaaaccaaaaattgtcattctcggagcaggatacgggggactaaaaactttacgcaagttacaacaaagaaacttggaagccgaaatcgttctagtgaataagatg

SEQ ID NO: 1279 - DNA, 1272 bp, Listeria monocytogenes-4B
tattgtccatcagtgtgctggaaagtaacacgccaagtctcgcctaaaggggaatagttatgttactacagtccaaaagcaacgaaatgctcattgaaaaagtaatggatgagttctcagccgcaaccagtttagcctccgttgttgtagatatacacggtaccgaagtttctagattatgtaactttactcctttttgccaatcttattcgctccaatcccaaatatcgctccctttgccaaaaatgtgatatgtttggtggactggaagcctccaaaaccggaaagcctttaatttatcgatgtcacgccgggttaacagatttctcagttcccatcgtcgtcgaaaaccaacttagcggatttttacttagtggccaggttatttgtgaagaaagtagcgaagttggtaatattcaagcagaagaaaccgattggaaaaatgataaagagctcatctccgcatttcgctctgtccctgttttcagctccaagaaaattaattcttctgccgaaatgctcacgattatctcccagtattacttgaaatccgaaatggaaaaaagccgggaagagcaaaagcaaaaaattgtttttgatcatgcaaaaatagcgcatcatgaagaagataaagaaattcgggaagcaccttaagtatatcgagaaaaatctcacccgcccggattccacttgatgaagtggcaagtcatgtgtcccttagctccttattattttagtaagttatccaaaaaagaaatgaatgtgaattcagtcaattatgtgaaccaaaagaaaatgtcacttgccaaagaaatgttgaaaaatccacgtttgtccattgataatatcgcacggaccctaggcttcacacacacaagctatttctgtaaagtcttccggaaagagtttgaagttaccccagaaagggtaccgcgaaccattaaaataagttttatctaaaagtcatgttctcttccctttaggaatatgacttttttgttgcctgaaaaccaaaaaaactttcatccgtcatcgaatgagagtttatgcccagcaaataagctatacgacccgcataccccctttaggaccccgaaaaagagttgcttccggcttatttggcgagtatcctgacttggcttcatcccacaatcgcaccttcccatacgctaaaaacgtacagtggctatctcgattcttgtccaccttacagttgcgggggcagtttcggtatcacaccgaattcctctttcagaaatgtacatacattcc

SEQ ID NO: 1280 - DNA, 618 bp, Listeria monocytogenes-4B
gctatcgtccagcagtgtgctggaaatggacttggtacagaactcttagaagtgggaatgactggtgtttacgtgccattaccaatgttcgttaacgtcgaaaaaggaaacgaaacagcgattcatttttataaggcgaaagggtttgttcaagtggaggaatttaccgaggatttttacggttatccgctggagacaattcgttttaatttgggtgatcatgcgtttgaagaagaataaaaaaatgtctattctagttgaatgaatcaattaggatagacatttttttatttcgtagcggcttttccactggtagattttccaccgcgtaaaaagaagaagatgatggcaagtagcgccatgataactcctgcgagaatggatacgccaacagaaatgagcataccagaaacttggataatacttaaaatgatgactgctgcaacaaccccgtaagcgaagccccatatagcaaatgtgaagtaactagcttttttgctaaacccgtaaaaaatttcgcctaacgtagaagcaactaaaattacaggagctgcaaaaagtatcgctgaaaacacaagctgtggcgtaacgttgtcatagaggattgtttcgactaac

SEQ ID NO: 1281 - DNA, 691 bp, Listeria monocytogenes-4B
taatgacaattggtattattggagcaatggaagaagaagtagaacttttaaaaaatagcatgccaagcgtagaagaaattgttattggcggagctaaattttacgttggcgaaattgctggcaaagaagtagtgcttttggagtcaggtattggtaaagtaaatgccgcacttggaacaacacttatggcggaccggtttaaaccagaagtaattattaacactggttctgctggtggtatggcggaaggattagccgttggtgatgttattatttctgaccgattagcttatggcgacgtagatgtaacggaatttggttatacttacggtcaagtcccaagaatgccagctttttatcaaggagacgctgtacttcttaaaaaagcggaaaccatttaccgtgaatattttgctgcaagcgaaaacaaagcagtctatggacttgttgttacgaatgattcatttattatgcgtccagatcagcacgaaacaattcgcacttttttcccagatgtaaaagcagttgagatggaagctgcggcaatcgcacaagttgcttatcaatttgatattcctttcttaattattcgcgctatttcacatttagcgaatcaagaagcgactatttcatttgatgaattcattcacttagcagcgaaacaatccgcaacatgtatcatcgaattact

SEQ ID NO: 1282 - DNA, 638 bp, Listeria monocytogenes-4B
gctatcgtccacagtgttctggaaagtggaagaatgagcagtttttaatatgctccaaataaagatactttgcaaattacaggaggaaaaacatgatttcagtaaatgactttaaaacagggttaacaatagaagtagataatggtatttggcgtgtgctagattttcaacatgtaaaacccggaaaaggagcagcattcgttcgttccaaattacgtaaccttcgtacaggtgcaatccaagaaaaaacattccgtggtggcgaaaaagtagcaaaagcgcaaatcgacaaccgtaaaatggcctacttgtatgctgacggcacaaatcacgtattcatggataatgagtcttatgaacaaattgagcttccagaagaccaaattgctcatgaacttaaattcctaaaagaaaatatggaaattaatattatcatgtatcaaggcgaaacaatcggtattgatttacctaacacagtagaattagttgttactgcaactgatcctggaattaaaggtgatacttcttcaggcggttctaaaccagccactcttgaaactggtcttgttgtccaagtgccatttttcgttaatgaaggagacaaactagtaattaatacaaccgaagcagcgtatgtt

SEQ ID NO: 1283 - DNA, 510 bp, Listeria monocytogenes-4B
  misc-feature (1)..(end): n can be any nucleotide a,g,c or t/u
gagaagaaaacgatatgtatggttgaaaagtatactagtagcaatattagtatttggcagtggagtatggattaacacgagtaacgggacaaatgctcaggcagctacaattacacaagatactcctgttaatcagatttttacagatacagctctagcgggggggatgaagacggtcttaggaaaaacgaatgttacagacacggtctcgcaaactgatttagaccaagttacgacgcttcaggccgatgagattagggataaaatctatcgatggattggaatacttgaacaatttaacacanataaatttcagcaataatcaacttacggatataacgccacttaaagatttaactaagttagttgatattttgatgaataataatcaaatagcagatataactccgctagctaatttgacgaatctaactggattgactttgttcaacaatcctttccagcacactgtcggccgatcgacgcatgcatctanagtgnccgatctga

SEQ ID NO: 1284 - DNA, 1006 bp, Listeria monocytogenes-4B
  misc-feature (1)..(end): n can be any nucleotide a,g,c or t/u
ttaccaaatgctggtgattctggaggattgacacctgagccactatcaacgccgtatgctttgtcttgcccatcaggatgagactctacccaattggtcgttgccgctgcatcccgctcaaatccgccgttatcgagtagatttacttccgactgtactggtgaattgattggctcagccgaaacaagaattctatcgatatttacattaccagtagtttcgccgtctcttaggaaggtaattttattggttcctgcttttaagttcacagctttttctgtatctgaccaaatattccagttttcaccttcggaagggaaagttacgcgagagttgtagtcaccattcgtatataaatcgagtgtttgtggcatgccagttccatttgctgttcgtgtgtttagtacgtactcgccgtcagctggtacatccacttcaaacttgatttcatctcctgctgctccaaatccaccaacaaaaccttctccactatagaaccagtgatcgttcgccacttttaaagtgccggcaaggtccgcttcttctgcttcgacttttgctacagttggtgtgaaaccaatatttactttgtctagtgagacttgatcagctttatcgcctgtgtccgttaccactttataagaaatactatttttccctgctgaaagtggtaatgcttcggactgaactgaccaatcggtgtttggttttagcgtggtttgttttacataatcaccattgacaaaaatacttaataattggttataagaaaaagcatttttgtaagttaggtccacattataatcaccagagtcttttacatttgcatagatagtagttccggcgccgtctttatcgtagccatccacatacgttttttcagcaaccggtttatcagcaactgtatcagcaaaattggatcctgtttccatttcgtatgttcctctttccagcacactgtgccctcngagagcgtggaggtgacttagtgagtnnacaggtagcc

SEQ ID NO: 1285 - DNA, 1314 bp, Listeria monocytogenes-4B
atcactctaaaaaaaggtcctcaacaccttaacgctgagcaagctttagcactagctcgtacacgacacatcgatagtgatatcgaacgtggcaaacgtcaacaactaatcattaaatctattgtaagcgaagcaacatccatttcttctgtaagcaaatattccgatatcattgaagttgttggagataacatgaaaaccaacttaactttcaatcaaatgctttctatcgcaaaatatggaatgacaaataaaattgatattaaatcccttaacttaaaaggggatagcaacccaatggacggtatttattactacaaacttgatgaaagctctgtgcaaagtatttcgaatgaatttgctgatgaacttggaattaaacaaccattccctggtgcagcaccgtattcagacgaaagttctaacacaactagcacttctaattaaaaaaagaccaacaactaataaatagttgttggtctttttattttcgttttcgatgtattttttgaagtaaatttaagattggtcggtaatcctcaccaattaacccaataaattcaacaataatctcaatactaaaaattaataataacagtaataacattgctccccaagtagtggaaaacgaaaatacgaagcccgtcatagagaatagtaatgccatacagtagattagtaacaccgtctgtttctctgtaaatcctagcgccatcagcctatggtgaatatgagatctatccgctgaagatatcggtatccgctcttttagtcttcttacaatagcaaaaaaagtatctgacaaaggtacacctaaaataataagtggtactaacaatgagatgaaagtaacgtttttaaaacccataagtgataaaacagcaatcatataaccaaggaataacgctccagtgtctcccataaaaatactagcaggcgggaaattataaatcaagaaagccgcaactgctgctacaagaattaacgcaaccggcgcaacaaaaacatctttcaaaagcaaagccatacctgcaatggtcattaaagcaataatagaaataccaccagcgagaccatctaatccatcaattaagtttaacgcattcacaattgcaacaatccaaataatcgataatggaatcgcaaaatacccaaaatctacttgtccgtagaatgggacgttataaagttatagtatgtctccccgacagtacgcaagagcagctaatcttctacttcattggtataattttttagctggaatatatgctcatatgagactgtatatggcaactccaattacaccaggggtgg

SEQ ID NO: 1286 - DNA, 700 bp, Listeria monocytogenes-4B
  misc-feature (1)..(end): n can be any nucleotide a,g,c or t/u
aaaatatagatgctgcacttgaaacaggagcagtagatactgttattgaagcacttgatacaatcgttgaatcaagcaatcatgaggtgattacagatattccggtcagagatcacatgtatcaaggacaaacaccgcaaagcttcaatatgaaaaaagtattcaatcactaccaaaatctaacaccagagaaaaaacaaattctaacagatgcatgtaaaatttgtttgcttgctggcgatgatgtgaaattagttaaaggtgaaattttcaacattaagattacgacgccttatgatttgaaagtagcgaatgcgattattcaggagcggatagccaatgattaatcaagtatacagacttgtgtcagagagacagtttgaagttgccaatgtggacgaatcattaacaggtgatgtggttgttgttcgaccgactcatttatctatttgtgcggcagatcaacgttactatacaggttctagagggaaagaaatgttatctaaaaaacttgcaatggcgcttattcatgaaggtgttggggaagttgcttatgatgcancgacngaatttatcccacccgcctcgcccgccctgcctccatccccactccccccttccgcgcactgtccccccctctgctggcactttccccccccccccccctctccccctacttcaggacacacaacgcacaaaa

SEQ ID NO: 1287 - DNA, 907 bp, Listeria monocytogenes-4B
  misc-feature (1)..(end): n can be any nucleotide a,g,c or t/u
ggaaatggcacgtatctcatccaaatggctattaataacttatgaaggaatgtgatttttatcgaagtaatgaaggagcgatttggggagtttgagggagaaactgtttggaagtggacgatggtaaatgatcatggtatgcgcatgagtgttttaaattacggagcgattgttacttcccttgaaacaaaagataaatttggtgattttgcgaatattagtcttggttttacaaatttagatgattatttggcacactccccatacttcggcgcgacacttggccctgttgctggacgcattacaaatgggcaatttagtttggacggtaaacaatttcaactgattcaaaatgaaggagctaaccatcgtcacggtgggaaattcaattttagtaagaagctttgggatgtttcagtagaaaaaagtcttgatcaaattgtgatgacttttgaatactgctgggcggatggagaaaatggctatccaggaaatattgatgcaaaaatgacatatacgttaaataataaaaatgaatggctgcttgattatgaagcgaaaagcgatcagccgactatatataacccgagcaatcatatttattttaatctaagcggagaagctggttcaacggttttacaacatcagctttgggttaatagtgacagcttcctaccaattgatgaagagtttctcccaattggggaaaagcggttagcggaaaatactatctttgatttgcgtgcaggtcgtgaagtagcggagattacacaaagtcaggaccagcaagtaaaattagttggtgcggggctggatcatcatcatttanacatgaaatagcgccaatgcagttgttgatcaagtcagcggctgaatgatcanctactggtattaccggggtttgtga

SEQ ID NO: 1288 - DNA, 749 bp, Listeria monocytogenes-4B
  misc-feature (1)..(end): n can be any nucleotide a,g,c or t/u
taaacaggaggtgttaggctcagtttaaaacggtttggttgcccgttcgatcaatatagctgagttctacgagttgatgttttttaatcgctaaatataaactttcgactttagcgtttaattcgtttttcatggacaaattggagaaatcgagcgaaatggaacttttaggcggttcgcttgaatggtcgagcatgtttttcattttttggagggttttcttggtttcggcggaagaaagcaactgttccattccgtccaaactagcaataatcgcggttaaatcatccgctgtgagaagctttttatcgactttgtaggtaggcataataccaatgccaccctttgttccggcaattgtgtaaatcgggatattcgccatcgcgagtgtgtcaatgtcgcggaaaatagtacgtttggaaacctcgaacattgtagccatttcagaagcactgactagctcgcgttggagaagcagcatgataattccgatgagtcgctcgattttcatttttttctcctttgtttttggaatgatgacagacagttgtcatcattcgtgtgttatagttacatcatatcaaagttaagtaactttttggagggaaatattatggcatttgaaattgttggattaaaaaaagaaacagtttttgaaatcaagtaaaaatccctgaatctttccagcacacgagggccgtactactggtagcagctgatnagtagcttacaggcttnnnaaaggaaaa

SEQ ID NO: 1289 - DNA, 731 bp, Listeria monocytogenes-4B
gaatcgtccatcagtgctctggaaagtgcaatgactaaaacaatattcattggatctttaaatggggccaggaaaagtttccaaagtggatctttctttttattcttcagttcgttaaaaccgtatttttcttgtcgttttgttacctcactagttgttaagccttgttctgttgcttctagttgtgtaaatgtttctgccgcgcttttgcggggtatctccaatcatgtcagccccttccaaacagtttatgtgttaagtataacaaatcttaacagtgaaataatattgataacactggaaatttacacactcttaacaaacagcgctttcaagttccccttttagctacgaaaggcaataaatagttgaaccggacacaaaaaacagctatactacaagcagatagagtaggagggcatggcatggataaaaatgaacaagtcatggcgaacgtcagagatttatttaataagctcgcttggattaataaagtgaagatggaaaaagcgctagagggatataaaccttctgaagtccactgcatcgaatacattgccaaaaatgaagatcctaatgtaacgaaactcgcggaagccttctatatgacaaagagcgcgattagcaaaattacaaaaaagctgatggataaaggctatattgaaagttatcaaaaaccggagaataagaaagaaatttatttccgtctaacagctaaaggcgctgaaatt

SEQ ID NO: 1290 - DNA, 718 bp, Listeria monocytogenes-4B
acttttagctttgtatcagcacttggtggctggttcggaagccctgccactaatacgctcatgcattactaaccttgcgtgtgccgatagtgtgtaaaagtaactcgaacgcgatttatgcactgaaaacaaccttgcaccatgattcatcaaccaactacgctatcatccatcactttttttgggttgttctctcggactatcatgaatatcccttgtaaccttacatagaatcatcactttaattacctgactcatgtgcatactgaactgctatttgaacctgatttactggaaggcgtagctgtagtgtatgtgacactaataggttgcggctcttctgttatgttaccacttgaaattgctcgggatgaaataccaccaaccggtagagcctcaccttcaaaataatctcctactttggcagtgattggatgatcttcgacaactggttttcccttcgcatattcgtatttaatcgtgacaacaccacgctcgattgccttgtactgaaacacatcagtctgctgaactgtctgaaatacgccgttcaaagtgccatcccatccggctccctctctcgatccctgcgccgctagaacctgcctcatccagattcctcacccacgcctccgctgcgctcatctcccgctccctccgcgtctccctctctccccttccctttgtcctctcctgtcataaatcacaaagcaaaaac

SEQ ID NO: 1291 - DNA, 642 bp, Listeria monocytogenes-4B
aactgtcggcactgtagagcatgcttgagcggccgacgtgtgctggaaagtcacctttcactttagccataaaaaaagacgccaaacagaacattggcgtctttttgagatttacgcaaataagctatttccttgtagcacaaagaaacttccccatcgtgaaaatctacttaatcaagacaactcgctcccttagaagttgtttttggatatcgaatataaaagcggtctcctgacttaacatcatcctactcaccagtcttcccggaattgcttccagtgacatatgtttggttttcgtccgtattacagtagctagggcctgtagaggattttcacctctttcccggattaatatattcacctatttagttgtttagtacccggcaattcgtcttttccagcgttctggcaatacttggtaaacgacttctgcgacaaaaatgttgcaaatcgaaccaatagcaagcactgggaacaaaacaaacaccgcttgatgcattaatggataaagtgcaagtaatgataatggacaattaaaaacaaaagcaacaatactagaaacactaaccgcaactaattgattcttttctgctagtttttggcgcgtaaagccataagcaatcatcgttacgcccatca

SEQ ID NO: 1292 - DNA, 702 bp, Listeria monocytogenes-4B
aggagttgtgaacaaagtggccggcgcaatggcagaaatggctggtgttaaaattggcgaaacgattcaagaaaatttggatagcggcacaaaaactggtaaggaattagtcgaagaaaaagcatccaaaacaaaagctgaattaaaagcaaaacaaaataattcatctggttttaaaagattactaaaatcaatctctaatatttttgttccactaattccgggttttgttggagcgggattaattgctggtattgcagcaattatttctaataatataacagctggaaatttagatgctgctgtttggactcaatatattgatattttaggagttattaataaaggaatatttgccttcttagctatttatgtagggattaataccgcgaatgaatttggtggaacacctgtactcggtggtggaatcgctgggataacattgctttccggattagcagaaggacatacaattacaaacattttcacgggggatcctatcgtagccggacagggtggcattatcggcgtattattagcagtttggttaatgtgcgtacttgaaaaaaacttgcgcaaaatcattccgaatgcgatagatattatttttacgccaacgcttgtattacttattattggtttagtaactattttcttaattatgccttttgcaggacttgtatcagatggtttagttaacgg

SEQ ID NO: 1293 - DNA, 1078 bp, Listeria monocytogenes-4B
tcctttcaagggagggggaagaattattatactacaggagaaaacggagcagctaaatcaacactgctccgtattattttgggcattttacaacccgataaaggttccgttactttcgccaaaaagaacgcatatggcgggcgacttttgacaggttatttaccacagctgtttgcatcatttaatgctttttttccaagtacagttctccaactagtacggtcaggtcgttttccaaatggtaaatggttcaaaccgctgactacaaaagatcatgcgcatgttgaaaaagcattgaaatctgtagaaatgtgggattatcggcataaacctatcggtgagctatcaggtggtcaaaaacaacggatttgcctggcccgaatgtttgcaaccgacccagatatattaatctttggatgaaccgcaaacggcaatggataaacaaagtaaaatccgtttttatgatttattaaggcatgaagcacaagtacatggtaaagcgattttaatggtaacgcacgattgtgaagaaatggtttattttgtcgcttagcctattcgccttattagaaaggaggatgtgtcatggaaatgtttctctctggctttctgctcagagcctccccccgcctccctgatcccccgctgtgttcgttcctcttttcgcgagcccttttgcttttccccccatcgtgccccctcgcggctcccctttccctccccccccccttccccccctccctcttccccgcccccttcctcctccctccctcccctcctcttcccctcccctcctcgcttccccccctttttttttcttccccccccccccccctctcccccccccccctcctcccctccccctcccccccccccgcgccttgtgtcttcctccccccccctccttcttttcgccgcccctcccgtctccgcccttccctcttcccccctctctcttcccctttttgtgctctttttcctcccccctcctcgccttttcctcctcccttgcgttccccccccctcccccccccccctcccccccgcccctctgtctcctaaccaaaaacaaaaaaaa

SEQ ID NO: 1294 - DNA, 845 bp, Listeria monocytogenes-4B
  misc-feature (1)..(end): n can be any nucleotide a,g,c or t/u
cctatgggcacttacacgcatgctcgacggccgacgtgtgctggaaagtgataaccccgtaatcatcctaaaccgctcaaaatcagcaaaaaatcgttttacttcttggaccgtttttatataattgatatccttattttctggtaaaactaaaacctgcatgttatcactccttaattgtgcgcttcattaatcacaaaagcctcatactgacattcaatcgccgaagcaggtaaagcgccaatttcgtcttttgttttatctaaatgaaaagctaatacatcaatcatttcctgctgaaccggttgcggcttttttctatttaaacctttttttcgcttccattccgcaagagacgatctcgatactccaattaacctactaatttgcacatctgatttagttcgtttatattctcggtactcacttggtgttaaaataagcaacttttgctccgccgttaacagtcctttttctctgtccccaagcgcttcaaaaaactccaactcttctattaaacgctttcgaataaatcgattttcttcttgttctagttgaaaaattagttggatttgcttttcttttaaaagttttctatccatccattcccacttccatctcataaattaatatagtaacattgtcaccaattcggtgctattggcgcaaaatcagccgcatttattttctagctctataaatattatagcaccattttggttactggtaaactttatccgacaatatgttcgaaaagttccgttttgtgctaaagtgctatactgagccataactgtgaggcatatatgagtataattgngataataacattcgagacagtataa

SEQ ID NO: 1295 - DNA, 704 bp, Listeria monocytogenes-4B
  misc-feature (1)..(end): n can be any nucleotide a,g,c or t/u
ttccaggaacaactgcaaccttggcttcttcagcaagttttacagcccaatcgaaagcattttcggttatttcatcgggaagtttgacgaagaagtaaaatgcaccatctggcgggatgacagtaaagcccattttttctagtcgatcttgagtgaaattagcgcgtgttttgtattcagttcgcatttgaaaagcatcgtctttgccgttagtaagagcttctagtgctgctttttgggaaatggaacttgcgcaagtaaccgaatattgatggattttcaacatttcttgtgtaagggcttctggtgcaagtaaaaagccaattcgccaaccaatcattgcgtgagattttgataaaccgttgataacgattgtctgctctcttagtaaaggcgcaatgctcacgtgctcctcgcgataagttaattcactgcaaatctcatcagccatgacaaaaatacctgtatcttttagcacttctgctaatgccaaaagcccttttttagagagtgctttatcggccggctcggatggatcaggaatgctncccgcctccctcctcggcccctctcccctttttctctcctccgtgcccacccccttttttcccccttcccctctcctcccccctcttcccccccccccctcccctctccggtccgcttccccttcccttttcgcgtttaactcaacactaaaaaaa

SEQ ID NO: 1296 - DNA, 696 bp, Listeria monocytogenes-4B
ttaactatgcaaggagagacttgagatgaaagtattagtaaataaccatttagtggaaagagaagatgccacagttgacattgaagaccgcggatatcagtttggtgatggtgtatatgaagtagttcgtctatataatggaaaattcttcacttataatgaacacattgatcgtttatatgcgagtgcagcaaaaattgacttagttattccttattcgaaagaagagttacgagcgttacttgaaaaattagttgctgaaaataatattaatacaggaaatgtctatttacaagtgactcgaggtgttcaaaacccgcgtaatcacgttatgccagatgatttcccgctggaaggcgttttaacagcagcagctcgtgaagtaccaagaaatgaacaacaatttgtgcaaggtggaccagtaattacagaagaagatgttcgttggttacgctgtgacatcaagagtttgaatttacttggaaacattttagcaaaaaacaaagcacatcaacaaaatgcgttagaagctgttttacaccgcggagagcaagtaactgagtgttcagcttccaatatttctattattaaagacggtgtgttatggactcacgcggcagataatttaatcttaaatggtattactcgtcaagtaattattgctgttgcgaaaaagaatggtattacggtcaaaga

SEQ ID NO: 1297 - DNA, 709 bp, Listeria monocytogenes-4B
  misc-feature (1)..(end): n can be any nucleotide a,g,c or t/u
aaaaaataacctacaaaggtaactacacaccaaccaatgttggcggcgtttatagtggagaagttccaatgtataaagctgtagccaactcgattaatgcccctgccgtttggttacttgatcaaattggtattgataaaggtgtaaaatctgtcgaaaaatttggtattacagttccttaaaaagatagaacgcttggacttgcactcggtggtatgagtaaaggtgcttcgccagtagaaatggcaacagcgtatgcaacctttgctaacaatggtgccaaaccggaatctcatattattactaaaattgtcgatccatcaggcaatacagtttacgaaaatgttcctaaaactaaacaaatcatttcagaaacagtatctaatgaaatgacttccatgcttttagatgttatcaatacaggaactggtcaaagtgcagctgtttccggtcacgaaatggctgggaaaacaggttccacgcaagttccatttgatgatacaagcggtgctaaagatcaatggtttgttggcttcncgccccacctagtcggagccgttcggatgggatttgatttccctcgcccccgatctttccctacctctcccacgtctgctgcccttttcctttccctcccttcccccccctcccgctttccctccctttccctcccttgctttcctcccataagtctaaaaaaaaacacaaa

SEQ ID NO: 1298 - DNA, 876 bp, Listeria monocytogenes-4B
tttctttccttttcttgactcacaacaatcactttggaacaacgattatctgctaaaaaaggacgcacggcctgactgaaaattggttcaccaactaactctagccacattttatttttctgggcattcatacgtttcccttgacctgccgctaaaaaaaccaactctttattcatgcttatttcctccttttaatcaggatggtttagcaaaaatcattcttcctgctgatgtttgaagtacactcgttacttccacttggattgtttcattaataaatttacggccatcttctacaacaatcatcgttccatcatctaaatatgcaacgccttgattgtgttctttaccatctttcaccataagaacagtcattttctcacctggcaaaacaactggttttacagcattcgccaaatcattaatatttaaaaccggtacattttggaattcacatactttgttcaaattataatcatttgtaacaacaataccgcccattactttagcaagtttcacaagtttactatccacttctggcgtatcttcaaaatcaccttcatacatttccacttgaatagcctcttctttttggattcgatttaaaatatctaatccccggcgccctcttgtacgtttaagcgtatcggatgaatccgcaatatgctgaagttcggctaacacaaatagtggaataaccaccgttccatctaaaaatccagtagtcaaaatgtctgcaatacgaccatcaataattacactcgtatccaaaattttatatgttttcttagatttctcttctgttttctcttcttctggtgttcttttctttgcatttctgttattgacaaaatttccaaattcgttgcgacgact

SEQ ID NO: 1299 - DNA, 897 bp, Listeria monocytogenes-4B
  misc-feature (1)..(end): n can be any nucleotide a,g,c or t/u
tgggataaatggttccaaaccgcgagatgttattattacaaaggaccaattagctaagttgcgaaacaaagaatcttaattttgtagtactaaactaacatattacttaattagttttacaaataatggctattttcatgagtaatttcgcttatattcgctgaaagatttttctatttacatggaaagtgatataataagctggtgaattattgactcaactagaattcaaacataaaacacaattagaacgtaagatgatgtctagaaaacggagactttatactgttttcaaagttaagacttggtgcttaacagttaacatgttttttttaggcaccctcttcaagataaattaatgggggttcaaataatgactatctatcattttgttggaataaaagggtcagggatgagtgcacttgctcaaatcctgcatgataaaggtttccaagtgcaaggcagcgatgtggataaatatttctttacacaaaaagcattagaagaaaagcaaattccgattatgactttttcggctgataatattcaagaaggcctaacaattattgctgggaatgcattcccagatacacatgaagaaattgagcgtgcactggagcttgggcttccggtgattcgatatcataaatttttaggtcaattaattgatggctatacaagtattgcgataactggttctcatggtaaaacgtcgacaactggtttactttcgcatgttgttggtgcgattcgtccaacttcttatttaatcggtgatggtactggaagcgggacaaaaggagcggaatattttgcacttgaagcgtgtgaatatcaacgtcatttccttgcttataaacctacgtatgncattatgacgaatattgattgggatca

SEQ ID NO: 1300 - DNA, 849 bp, Listeria monocytogenes-4B
  misc-feature (1)..(end): n can be any nucleotide a,g,c or t/u
catatcgatcgggccttctaaagtttaccaccacgaccaacccctgtttggggggggtatggcgaaatactcgctggcatttttaaaaaggatttcagccaaaggaaagatccgagcgcgctaaaagaaataagaagcgataacactaatttagagtttttgggaattttcttcgcttgactactttcatcaatttcctcgtctagtccgcggggcggagcgtggaaaatactggaaataatcgcgccgacactcaaactaacaagttcttccttatgcgccatagataattttaaatgatcaataatccaagtcgtggcaccaccaacaataccaatcaaagcagcttccggaccaacgctcgccccaaatgttaaaataatccaagcgctaagtatcgtaggaaacagaactttgcgatattccatccgtcctgttttcttcgcctcagcaacattgtcatgcatcgaccgcggatagtcaccaaatttcagctgaaccattcctacaaaaaaactcccaatcaaaccgattagtagaggataataccatgaaaaatcaaactgattaggaagataatcccataaaaaagtcgtggcaaaatgaaccattgctaaaaataaagcggcaattattcccactatgattccgaggataaaagtataaatgccaaaaataagtgttacctttttcactgaaacttgccccttttgtaaaatctgttgatatcatgattttgcctctaacataaagctgaaaactaacgacaaacaactttccagcacactgtggccgtcgaactgctggagcttnacgttagccgtncnacaggnaagacanncaacctta

SEQ ID NO: 1301 - DNA, 708 bp, Listeria monocytogenes-4B
aagagtcgcgccggaagtcacagctcgtttgaccttgagagtcgctctactagaaatgcttgcttcaggtgctgtagtagtggctgtgagtgatgttatcggagcggaaatggagccgaccggtaaacgtgttatcgcagggctaaaagacgaacttattaaggctgatttttgtcatattgaattaaatggaagtactgaagaaaatatgaacgtaacacaaactagtgtaggcgttcttgtaactggttttgcgactaaagctgcacttaagcttataaatgtgcacgaagctgcggtcttatttgcatttggcgaaccgattgttggagcagaagttttgcagaggatggcggagatgccagattatcatttagtgaaaaaattggtggagcatagcgatgtgcttgaagttgtgccggttgggtcgaaaggaatggcttatgaggcaaatactttagcacggcttaatgattgtactttcaaagccagtgacgtttttaatgaagcgaccatgaataaaactgcggggcctgcttctgttattttagtagcagctaaagcaagtgaagtaaaagcaatcgtttcagcataactttcccacggcttaatgttttaggaaagtctggggattacccatgagtgagatgatgcttgcaactggcggccctagaagtggcaaagcccccccgcttcaaaagaaactcc

SEQ ID NO: 1302 - DNA, 694 bp, Listeria monocytogenes-4B
tgcgcatggtttaaattgtgcgtacaaatacaaccggacgctttgacgcaccttctaccacgcttgcaaataacgcacgtgaagaacctgtgagccctgtgacaagttgtgctttttctttttcatccagcgcatttaagaccgctcgaatatctttttgttcatatattaattgttgtaatcctttcaagggaaaacagctcctttttgtcagaaaattcattctatgcaacgcaagagtaaatcacgcgtccgaagaaagaccgaaatacgtggcaaaagattgccacgcctcgtcatcgtctatttttgattgtatttgttcataacttctataaatggtgtctgtgcaaagtcttcgatggcgtcagcgcttttttgaatcgctgcgataatatcaggttgttctgctttaggaaaatctcccaagacataatgaataacttctccttttaaaggacgactaacgccaacacgaatgccattaaactcttgcgcttcaacgtgtggaataattgattggattccattatgtccggccgcctacgtttttggccgtgtccattttcccacctggccccccccatcctccttccccctgtccaccccgcgctctggtttggttgtccttttcctgcgcgccctttatgtttcccctcgccgtgtttgccagtgtttattcgattaaataaat

SEQ ID NO: 1303 - DNA, 1254 bp, Listeria monocytogenes-4B
  misc-feature (1)..(end): n can be any nucleotide a,g,c or t/u
aaagagtccctcggcgtacgtgggaatgaagcccaccaactgatgacatggggcggggtttttattcaagggtcactcgatggcaagttgttttgtgtgccagaaagtcctaaaacaaaattttatagtcatagaaaccaaattgattcagaaagagaagatgcttgtataactaacgggggcagcaagacaggtcttgaaacaatgattgatcgttattttagtgcatttgggccagcgactatacaagatttcaagcattggagtggtttgcgaaatagtgattatatagaaacgttagaaaagttacttgaaaactatatatgctatatcggtgaagatggcaagaactattatagcaaagcaaaaacgcaggaaaatgtggagatggggtcgccgcttctattagggaagtttgatccgcttttcgtaagttacgcgaaaaagaattggcttgcgagcgaaaaagaaacgagtctaatctggcgcaccgctgggcaaattgaagctgtcttaataataaatgctcagttttttggaacgtggagatataaaatatcgggggataaaatagtttttcaattctatcttagtaaaaaactaactaaaaaaggacaaaaattagtagaaaaagaagcgataaaactagctgaattcctcctttaaaactaccaaggcagcatttttgaacaaatttaagagggccgcggtcaggacgggggttcttttgttataggggtggcatttctggagaataatccaaaggtaatttgatactggtagtgatatttgatttacccatgttgcatacttgaaactcagcctgcagtgatagaaggaacatcgcatcttcagttgtcattttgtctgattcagtaagtaaagttatcatattgtgcgtcgctttttttgccgctttctcaatagagtgaactgatgctaagcgaattaaatggttggggggggtgattgtgggtgtgggagctgttcgatttttaaggatggaggggagggaagtgatttctgctggcgggtgtgcacccctggtagtagaaaaaccgaagaaagctgtagctcgaacattgccgatataaagcgatgcaccctgtttttcaactggtaaaaagatcgttgcaccttctgtaatctcggatgagtcgagtagnccgtcgttgttatttggtggggggacggtattcaagccctctgttaggagcnatccgatanttactatccgaggcnggtagttacggc

SEQ ID NO: 1304 - DNA, 1040 bp, Listeria monocytogenes-4B
aggtacagtccgaatcactcgaacaacggcaacatttcacacagccacctccacgttacacagaagctagattagtaaaaacgctcgaagaaattggtattggtcgaccatcaacttattcgccgacactcgacacaattcagcgcagaaattatgtttctttaacgaataaacgctttattccaactgaattaggtgaaatcgttaatgaaatgattgaagaatatttcccagaaattttagatgtcaaattcactgccaacatggaaagtgagctcgatgaagtagagcacggagaagtcgaatgggtgaaagtcattgatgaattttataaacgatttgaaccaaatgttataaaagcagatgcagaaatggaaaaaatcgagattaaagatgaaccagccggaattgactgtgatctttgtggagctccaatggtttacaaaatgggtaaatacggtaagttcctagcttgtagcagatttcctgattgtcgtaatacgaaagcaatcgtgaaagaaatcggcgttacgtgtccgaaatgtgagaaaggacatgtaatagaaagaaaaagtaagaaaaagcgtattttttacggttgtgatcgttatccagattgtgactatgtatcatgggataaaccggtcgaacgggcttgtccgaaatgtgagaaacgagcattagtcgagaagaaattgaaaaaaggtgtacaagtgcaatgtacaaattgtgattacaaagaatcaacccaacaataattcggaaaatggcaacacttggatcgcacttgtgttgccatatgttgcgcgaggaggcggacaaatggaaaagagtgttaatgttactgcagccggtcttcctcgaactgaacccctctggtttctactccaaccttgggttaaggtggttcttttcgacattagacccgtttcaccaacttgtttctattttctcaattcattccccccattctcgaccgactcattttctcgttaccctccccaccgcgttaccgccccctcgttttcttgcgcctgtag

SEQ ID NO: 1305 - DNA, 738 bp, Listeria monocytogenes-4B
atccgctagatacacggccgcacagtgtgctcggaaagcaccaccgatataaataaaatcagcgtccggaacttccctttcttctagcggactaaacggaatcagtgtggctccagttgagcgaataaaatccaagttatcttgatagtaaaaatgaaatgcggcgtcgagggcataagcaacgcgcactcccgaaaagtccggtacttgtatttctggtgggtgtacggtcaatttcgcaccagtcttactaagtgctaacaacctatctaaatcaacatgttccgcaatcaaatcaccaagtaactcccatttcgtttctaattccgtcatttcctcttttggcactaatccgagatgacgttctggaagtgccaccgccgcatttttcggcaaataccctaaaacaggtacatccgtatagcgttcaatcgccccttttatcaatgaaaaatggttttctgaagcaacgcgattaataatcaccccagcaatggttaattccggatcaaaacgattaaatccatccacaattgccgccgcagaagtggatatcgctttaccatccacgactaaaattacaggcgttttcgtgcatttagcaataaaagatgtactcgaattatcacgatcaataccaagtccatcaaaaagacccattacaccttcaatgacggaaatatccgccgactctccgtgcctttgaaaagagtgctagctcgatcatatcatagaaac

SEQ ID NO: 1306 - DNA, 1109 bp, Listeria monocytogenes-4B
gggttaccttgtggaggaacttggtgacctacagctgcactacggccacactgtgctggaaagcatctaaatcatcaccagcagttcttacagagcgactggttacaataccacctagagaaataacagcaacttctgtagttcctccaccaatatctacaaccatgctacctgtaggctcgccaactggaagcccagcaccaatagccgcagcaaatggctcttcaattgtaaatgcatttttagctcctgcttgacgagtcgcatcaataacagcacgtttttctacacctgtaattccagaaggtacacatatcattacgcgtggtttacttgcattaacacttttaccagctttttgtatgtaatacttcatcattgctgcagttgtatcataatcagcaataacaccatctttcattggacgaattgcaacgatatttcctggtgttctaccaatcatattttttgcatcgctaccaactgcaactatttcttgagtgtcttttttcattgctacaacggaaggttcacgaaggacaataccttttcccttcatatagacaagtgtgttcgctgttcctaaatcaattccaatatctttattaccaaatccaaacatctgtattctccttttccttcgtaatattctacaggatacattaagtttccttattcgtccattaaattaatgttaccttatccctttgtgtcaatgtttctgtttagacacataaacaaccatcttattataacataagtaagactatgagacattaatttttcatgagaaggaaaaaattttaacttttctttaaaaacattttttgagcgttactaaatttactaagaatatacttttgaaaggataaattttcacttaaaaaattcaatcagacaaagaaaaactggaatggcaaacataccgataactattaaaaagacgataatattatctttatatactctccatttattttgcacaataagccacctttacattttattggtactcactttagcataaggtagcaaacgttgtctgtagacattttgtgaacagtattcttgatttaaaagtaacctttttctttcaaactaatatactt

SEQ ID NO: 1307 - DNA, 960 bp, Listeria monocytogenes-4B
ccgtaatggggacttctcacagcatgtgcgagcggccaccagtgtgctggaaagtagtgcagtttgttaggtatcccttgaatagaaaaaacaatgtaggaggaacatctatgaaaatgcttaaaaagggtacaacggttttatttgtaatgattatggcggttatgttagtcgcgtgtggggacaaagaagaaacgaaaacttactcactttcccaaaatggtgttgattctaaattaacattcacatataagggagacaaagttactaaacaaacagctgagaacacaatgtcatatgcttcgctaggtgttgcttcaaaagaagacgctgaaaaaatgcttaaagcaacaagcgataaattccaaggtattgatggtttaaaagaaaagattgaatataaagatgataaagctattgaaacactagaagtagattacactaaaatctcttcggaagatatgaacaaaatccctggtatgtcttcaaacggtgatacttctaaagggattagcatggaggaatctgcaaaaatgctagaatcccaaggctataaagaagtttcaaaataaatttgcaataaaaaaagaagtatccgattcatttggatacttcttgttttattcaataatcttgcgcttcgatgacaacagctgtaccagatgcagtgaccataagcattccgttatcagctccaagcacttcataatcaatgtcaacaccgataacggcatttgcgccaatatctttcgcacgttgttccatttcgcgaattgcttctcgcgagcattaataagttcatcttcatagccttgcgaacggcccccgaagaaatttcgaagtccagctccaatatctttcatgaagttaacgccggtgatgacttcgccgaaaacgatttttttatattcgataatttgtttaccttcaatatttggtgagggtgtgacaatcatgaat

SEQ ID NO: 1308 - DNA, 756 bp, Listeria monocytogenes-4B
  misc-feature (1)..(end): n can be any nucleotide a,g,c or t/u
ctatgtgccaccggtgtgctggaaagtatcggaaagtaatgaaattgcatcaatgtctgcttgggtttctactaggtgaacaacatcaggcgctgttccgtatgcgccttctggttcaggatgtcctttttttcctatataaataatttcatagccagccgcttgtttttctaaaattaaattataggtatgaagtacatctgggcaggttgcgtggattgtcgttaagccttttgctgctgccttcgctttgacagaaggagagacaccatgtgcggtaaatataaccgttccagtggttattttatctaaaatttcttctcgattagcgccatctactgtataaataccaatggattcaaatgcatcagtaacatgtttattatgaacaatcatacctaaaatatgaattggtcgaggcaagttcggatcaagtgatgcatttttagcaatcaccatcgcatcgatgactccgtagcaataaccacgaggagatattttgataatttccattcgaaaacatcctcatttctgttttagattctttatttagtataatagacttagcctgtttttgacaaagttgtcttaacacgcgcacgaatgtccaattatgtgcttaatggctacaggttagacggagtggatatntatgacaatagtcatgtacttgctatatgttgcacatctgtcctgnnnnnnnnnnntnnnaancctnnnntnnggactnngcaatanataaataanngattttaa

SEQ ID NO: 1309 - DNA, 667 bp, Listeria monocytogenes-4B
tggaagcgatagcggaggcgattgcgggagaactagataaagattctgtaaatgacacgattacgcaagcagatttggatacaatgactcttattcctttgccctcattgggtttaacgggggaagacttaagcgtactaaacaatgaagtatttacaaacgcgattgaattagcgatttggagtaataatattggagaactgcctgatttatctgatgcgcttcctgctttagaaaatattgaagcaaatggggctaatattactctttttccagatgcaaactatcctaacttaaccaatgttgatttgagtcaaaataattttggctttaatattccaaaatttgttggaatggaaggactagtaagtattaatatggaggatgctggactttctggttatgtagcggaagatatttggatgaatatgcctaacttagattcactacttcttaatgagaatcatttaatttctattccggaagatatctttctatcagaacaattaagtacacattcatttgctaaccagacagcaacttatcctcacacaacgattaaacaaggagagaacttggaagtttttgttccttttatttaccaagcattagattttatcgcaccaagcagacacgatttaattattattaaagacaatggtagaaa

SEQ ID NO: 1310 - DNA, 1212 bp, Listeria monocytogenes-4B
  misc-feature (1)..(end): n can be any nucleotide a,g,c or t/u
cctgcatcgtgtgttggaaagttgatgaagaaagtggaagcttcagcagaaagcgaaaagaaacaagtaattaaaacttggtctcgtcgctccacgattttcccaacttttgttggacaaacaatcgcagtatatgatggacgtaaacacgttcctgtttatgttcaagaagatatggtaggacacaaactgggcgaattctcaccaactcgtacgtaccgcggtcatgcgggcgacgataaaaaaactaaacgctaatttgagaggaggatatcctaatggcaagtgaagttacaagcgcaaaagccgttgccaaaacggttcgtattgctcctcgcaaagctagaatcgtcattgatttaattcgaggcaagcaagttggcgaagcaattgcaatcttgaagtatactccaagatcagcttccccaattattgaaaaagtattaaaatctgctattgctaacgcagagcataactatgatttagacattaacaaccttgtagtagaggaagcatttgttgacgaaggtccaacacttaaacgtttccgtccacgtgcacaaggtcgtgcaagtgcaatcaacaaacgtactagccacatcacagttgtggtatctgaagtgaaggagggataattcgtgggtcaaaaagtacatccaataggtatgcgtatcggtgtcatccgtgattgggactccaaatggtacgcggaaaaagattatgcggacttcttacatgaagatttacgcatccgtgattacgttgcaaaacgtctatctgacgcttctgtttctcgtgtagaaatcgaacgtgcagctaaccgtgtgaatatcactattcatactgcaaaacctggtatggttatcggtaaaggtggttctgaagttgaagcattacgcaaaaacttgaacgaacttactcaaaaacgtgttcatatcaatatcgtagaaatcaaacgtgctgacctagacgcaaaattggttgctgaaaatatcgctcgtcaattggaaggtcgtgtatctttccgtcgtgcgcaaaaacaagctatccaacgtactatgcgtgctggagcaaaaggtatcaaaactcaagtatctggtcgtcttggcggagcggatatcgctcgtgctgaacactatagcgaaggaacagtacctcttcatacattgcgtgccgacatcgactacgcatgggaagaagctgacancactt

SEQ ID NO: 1311 - DNA, 1094 bp, Listeria monocytogenes-4B
cgctagcggccaccagtgtgctggaaaggtatataagatactgtatatcagaacgaaacaatttgcaattttttaggggggaacgatgtggatatgaaaaaagtaaatcctaatttgacacttttggcgctagcgattagtgcgtttgggattggttcaacagaatttattagtgtgggactgcttccgctgatttcttctagtatgggtgtgtcgattagtacggctggtttaactgtatcgatttatgcgcttggtgtgatggttggagcgccggttttaacaactatgacggcgaagatgaatcgtaaaaatttgttattattagtcatgctcgtgtttctgatagggaatcttgtctcggcatttgctgtgagttttggaatgctccttactgggcgtgttgttgcggcgtttgcgcatggggtgtttatgtcgattgcttctgttatcgctgccgatgtggttcatccgagcaaacgagctagtgcgattgcggtgatgtttacagggttgacggtggcgactgtgacaggggtgccgcttgggacgtttatcgggcaactatttggttggcggatgtcattcctgtttattgttgcgattggcgtgattgcgattattgctaattttttcctcgttccgaaaaacttatccaatggaaaaagtatttcatttaaagcgattggacaattattagttaataaaaaaatcgtgatggtgttactcatgacagcgtttggctatggtggtacttttgtggtttatacgtatttgtcgccgatgtttagcggaatgggctattctacaagcatgattgttattttacttattgagtatggtgtgatggccgccatcgggaatacgatcgccgggcatcccccccatgactctccacctcacgcactgcccccgatgctccccccgccccgcttcttttctccctccccctcgcccggcttgcgctctccccccccctccccccccgcctcctctcccctcccccctcctcccttctttttctccgcccccccctcttcttttttctcttccccccctcttctttattcgactgccccacccccacaacacca

SEQ ID NO: 1312 - DNA, 728 bp, Listeria monocytogenes-4B
gagtgtccaacggtgtgctggaaagtatcttaactgaaaatggtgtggagatcatcgaatcagaagaatggggtaaacgtcgcttagcatacgaaatcaatgactatcgtgatggtttttaccacatcgtgaaattaaacgctgataaagcagattctatcaacgaatttgaccgtttagctaaaatttctgatgatatcattcgtcatatgggggttaaagaagaagcataagaattcattcaaggctaggaccttgatttactaaacgagaggaggttggttttgcatgatgaatcgtgtagtacttgtaggacgcttaacaaaagatcctgaattacgttacactccagctggtgtggctgttgcgacttttacattagctgtaaatcgcactttcactaaccaacaaggagaacgagaagctgactttattaattgtgttgtttggcgtaaaccggcagaaaacgttgctaatttcctgaagaaaggaagcatggcgggcgttgatggccgtgttcaaactcgtaattacgaggggaacgacggtaaacgtgtttatgtgactgaaattgtagcagagagtgttcaattccttgaaccgcgtaattctaatggcggtggcggaaataactatcaaagtggcgactacaaccataattataatagcggtggaaataacttcggacaagcacctacaaataacggtggattcggacaggaccagca

SEQ ID NO: 1313 - DNA, 768 bp, Listeria monocytogenes-4B
tcagatttggtcaactctagcatgcatgttttcgagcggggccgccagtgtgctggaaatttcagaaccaatatgctcttcacgctctttcataactcccataagaggtttccaagcataaattcggattaaaactagcaaaatcgcgaaagcaaaaagtgtgaagaatgcatcaccaaacgtaaatgcggaaccaattactaaatgtggttgtaacacgcaagccccactaatttctcataataacgcgttgaattatttccccccccaccaaagagatgaggttttatttcctcccatcctcctcctcctccctcccccacccgtggcccccccccctctccccccctcccgaccgcctatttcccccctccccttttcctccccccctgcccccccctccccccgtctctcctgcttccccccctctttctccctatgttccttcttccgtttcctgccccctccccccctcttcctctatctcctccccccccccccctcccccttccccccccttccctcccccgcccgccccccccccctccccccccccggccccgcctctccccgcccccccccccctccccctcttatccaccctcttcctcttctcgctccccctgcccgttttatttcctcattctcacccctcctccccgatcccccccatcttctctcccccctcccctcttcccctcctcctttacaattaacacccctctaccccgtgtttttcttcctcgccatccaactaacaacaataaa

SEQ ID NO: 1314 - DNA, 302 bp, Listeria monocytogenes-4B
gagattaagcatatgccgcttcaagtggactgggataactttgacttttcggtcgatgaaattaaagcacacattcgtaaaatggtgctgctaacgatgagtttttatgatccggaaacgattgtgctctatacaaatttttattttgggcagaaggatttcaccgaggaactgacggaagagttaaagcaagtttatccatatgcggttttgccggagattgtgttgtcgcgtaagtttacgacggattatcggattgggcttttggcgtttgggattgattatttggagaataatatgac

SEQ ID NO: 1315 - DNA, 466 bp, Listeria monocytogenes-4B
ccaaggaaaaagttaaatggttcagatagaggagccttttacagtgaatgtagaaggctttttttgtgctttcagtagctccgacctattccggcaaggtttttttccagttatagtaaaatggatagtttttttgtccctacgtatctgacaaaaatagctatatagcttattgtaagcccgatcatgaaaatgataaattgaatttagaaagaggagtgatacctgatgaaactaaatcagcagtgtattcaaattttagattttcttatggagcaggaagattttaaaaatattggttatatttctaacgcgcttggttgttcggagcgaagtgttcgttatagtttggaaaaaatcgatatttttctccatgagcaaacattaccagctcttatcacacatacaaggaaaggggcgctacttccggaaaagaattctccaaatccggttgtgcgtaaatata

SEQ ID NO: 1316 - DNA, 896 bp, Listeria monocytogenes-4B
tttgtaaagcaatattttctcctagagacatttcgagtactaaaccatgtttatgacggtcttctggaatatgtcctaaaccagcttccgtaattttacgaggttttttgttttcgatatgctcgccattaagaagaatactaccactagttactttagaaagacctgcaatcgttgtataagttcactctgaccattaccatcgactccagctattccgacgatttcgccagctctgacagtcaaattaagtccacgaacactttcaactccgcggctttctttcacaactaaatcttttacttctaaaacatctttgccaggtttggcatctattttctctgttgtaaagatcacttcacgaccaaccattaaattagccaaatcttgtggtgttgtttccggaacattaacagtacccatacctttaccacggcgaataacagttacacggtcacaaacatccatgatttcttttagtttatgtgtgattaaaatgatggatttgccttctttaataagggaacgcataatttggattaattctttgatttcttggggtgtcaaaacagctgttggttcatcaaaaatcaagatatctgcaccacggtaaagcgtttttagaatttccacacgttgttgcataccgattgaaatatctcgtacaactgcctttggatcaacgcgtaagccgtaacgatcagaaatttctttaatttcttcaatcgcttttttcttttcgataacaccgagtttgcttggctctttaccaaggatgatgttttctgcacccgtgaatttgtccactgacatgaaatgttgatggaccattccgcttgcgcgctgcttggctttgttcgggcttttgctgttatcttaaaacaaaaaacaaaaaa

SEQ ID NO: 1317 - DNA, 699 bp, Listeria monocytogenes-4B
gattgcaaaatcaatgggaaacatggttacacacacgattcaagaagaaaacttagacaaagattttacaaaagatcatgcggataaaattccggaaatccttgcttgtgcaggactgttacatgatatggggaatccgccgttcggtcactttggtgaagaaagtatccgtgagtggttccgcgacaatttagcaaccatcacttacaaaaataaaaacctagctgaaatcctaacaccgcaaatgaaagaagacttttattactttgaaggtaacgcgcaagtgcttcgtgtagtttccaaactgcattatcttttcgaccaatacggcttaaacctaacatttgccactttaaatgcggtcatcaaatacccagtttcttccttaaaagtaaataaaaaacaaatcaaaagcaaaaaactaggctatttttatgccgatgaatcactttttaatgaaataacaacagcaacagaagcgcttgataaccgtcatccgctcacttatttactagaagtggcagacgacatcgcgtacctaaatgccgacctagaagacggcgtgaaaaaaggtgtcgtcaacatcacccaaatcttaaaaggttttgaagaagttgaagagcataataaagtaactgccgcgtgctacaacgaacttaagaaaaaaagcgagcgctacgaatggcaagaagaaagttt

SEQ ID NO: 1318 - DNA, 700 bp, Listeria monocytogenes-4B
tcattgttcttatcccggtaactcattagtagtaatgtgagcataaatatgatagctgaaccccccagtgtcggaagaatcattagcatacctatattatccccaataataactcgacttactaacaagcacgcaggcatactcaacaaaaaatctaatatcattattacataaataaaccgtttattctttctcggtgtaaaattcaaattagacatatcggtgtaaaaagccattaattaaactaaatgattctcttccaaaaataaaaatcaacacagatactatgagagaaaaaattactgatgtaagaagtatttccgctaaatcccgccatcaaaagctacttgcgaatgcctatcccataattagagggatatagctcgttcggcgcatgcacctcccgtcccggcagagcccccgctccctccgtccccccttttcctcgcccaccccttccaatcttgagtgtcccccgttttccgttcccccgcctatcgtccttataccccccctcccccccgcccccttttatccggtcccgcccgccccccccgtccatttccctacccccccccgtttccacacgccccgccccctcttccccccgccttcccccgctgcgcagccttacgccgcctcacaataccgcctctccgcccccgccccttccctccacccccacaaaaaaacaaaaaaa

SEQ ID NO: 1319 - DNA, 1261 bp, Listeria monocytogenes-4B
aatcgcggaatctcggatttatcgatccatcgtccagaagtacataatgcatttacaccaaaaacagtaacagagatgattgatgcatttaacttagcgcgtgataattcgaatcttggcgtgattattttaacaggggaaggcgaaaaagctttctgttctggcggagaccaaaaagttcgcggtcatggtggatatgttggcgatgaccaaatcccacgtttgaatgttcttgatttacaacgtttaattcgtgttattccaaagccagttattgcgatggttgcgggctggtccattggtggaggtaatgttcttcaattggtatgtgacttaacaattgcagcagataatgcaaaatttggtcaaacaggaccgaatgttggtagctttgatgctggttatggttctggctatttagcacgtgttattggacataagaaagcgaaagaagtttggtttatgtgccgtcaatatacagcggatgaagcgctagaaatgggctggattaacactgttgttccagtagcagataatagaaaaagaaacagtagcttgggcaaaagaaatgctacaaaaaagtccaactgccttgcgtttcatcaaagcagctttcaatgcagatacagatggtttagcgggtattcagcaattagctggtgacgcaacacttctatattacacaaccgatgaagccaaagaaggtcgcgatgcctttaaagaaaaacgtgatccagactttgaccagggggcaaaattcccttgatttgaaggtgtaaaaatggacatgacaaactggcttcaaaaacgagtgcggctttctcctaaagagaccgcactcgtttttgaaggaaaagaagaaacatttgaagaaataagtgaagcagtaaaacaacttgcgggtaagttattcgcgttagggattagaaaagacgagatggttgctttgctagggaaaaatgatcggatgacttttttactcattcatgctctgcaacaacttggtgcggtcactttatttctgaataatcgtttgacgaaaaaagagatatcgtttcaactcgcgaacgctgaagtaaagcaagtgattgtagcggattcgttagtagataaggtagccactggaattagttatgctactttggcagaaaccgattatgaagcgccagcgttgttagaaacatgggacttatctcgcgcggcttcctttatgtatacatcagggacaacagggaaaccaaaaggtgttgtgcaaacttac

SEQ ID NO: 1320 - DNA, 701 bp, Listeria monocytogenes-4B
gaattacttgtttagaatcatataagtactcaggtccgataaatccaactactgtatttactaggaatggatcaaatttcttcgcgaatccataacaacgagcttccattgttacttggtctacgccgaaatgagcgtcagaagaaagttcagaaccttgtcctgtttcaaagtacattacgtttggtccagtcgcagcaccactttgaagggctaattgtctagcttcttcaatcgttgctccgtcaaaaccgaaagctgtattacctttttcagaacctgcgatagattggaatacaagaccagttggagcgccgcgacgcattgcttccatttgagtcttcacgtgtgcaagtacacaagtttgtgttggcacatcccatttgctgcggaattcttcaaatttattaagtaaacgaacaacgctatcagtagaatcatctactgggttaagtccgattaccgcatccccaatcccgtaagttaatccttccattaaggaagcaaggataccatcaggatcatcggttggatggtttggttgtagtctagcggagaaagttccaggaagaccgattgttgtattcgcatgtgcgattacacggatttttttcgcgccataaattaaatctagattggacattaattttgtaacagcagcaataatttctgatgttaggccgcgtgcaacacgtttaatg

SEQ ID NO: 1321 - DNA, 616 bp, Listeria monocytogenes-4B
ccgtaacccagaagaacttccatggggtgacctaggagtagacatcgttttagaatgtactggtttcttcacagcgcaagacaaagctgaattacacattaaagctggcgctaaaaaagttgttatctccgctccagcaactggcgacatgaaaacaatcgtttacaatgtaaaccatgaaacattagacggaactgaaacagttatctctggcgcaagctgtactactaactgtttagctcctatggctaaagttttagaagacaaatttggtgttgttgaaggtctaatgactacaattcacgcttacactggtgaccaaaatacattagatgctccacatccaaaaggtgacttccgtcgtgcacgtgctgctgccgaaaatattatccctaatacaactggtgctgctaaagctatcggtgaagtattaccaacacttaaaggtaaattagacggagctgctcaacgtgttccagttccaactggttcccttactgaattagtaacagttcttgacaaaaaagttactgttgatgaagtaaatgcagctatggaagcagcttctgatccagaaacattcggttacactagtgaccaagttgtttcttctgac

SEQ ID NO: 1322 - DNA, 963 bp, Listeria monocytogenes-4B
  misc-feature (1)..(end): n can be any nucleotide a,g,c or t/u
tggaaagacatcacagtgatgcgatacttcctgtcacttaaaggcttaaggaacgtggaccatcgcttcagcctgagtggaaatccgattagcgacattagcgcacttagtaactcgaaaaacttacaagctctacatattaacaacgcgcaagctacctgacatgacgccactgagcggtctaacaaatctaaagggtttatgctgatataataatcaattggagaaccttaacggagtaaatagctgacatcaactccgctccttaaatgctagtaataataagcttacgaacctagatgagctacaagcgctaagcaatttaagcgttctatatgcaaatgaaaaccaaattaacaatcttcaggggctaagtaatttaaataaccttttcttgcttgatttatcagcgaaccaaattgtggatactactccactcgctggcttaactaaggtacaaacattatacgtatcaaacaatcaaattagtgatgtaactggtctttcgagtttaataaatctagattggctcgatataagtcaaaataaaattagtaacattagacctttaaacagtttaacgaagctaacaattattcaaatgactaatcaattaatcgtaaacgaaccgataagtttcgaaagcactgtaacgattcctaatttaataaaaaacattgcggaacaaacgattgatcccgatacaattagcgataacggtgtgtatgcgaatgaagctgttacatggaatttacctacttatattcctaaagtcagctatacctttattgaacgtgatacgataggggaagcgcatctggaaatctcagtgggactgtagaacagccattagtacaatattttaaagcaactttcaatattgacgggncagaaacancggaaaatgtcgaaacagggacacttttacaagaaccaccaaccccagtcaaagagggttataca

SEQ ID NO: 1323 - DNA, 726 bp, Listeria monocytogenes-4B
tattttggaaccattaagccaacaatattgatgagtagctctgaattagcgatggcaggattaatcatttgatgcgagacatttgggatggttttggtttctaggttttcttttttaatttgttgggtgtaaacatcttttgtttctgctgaatcaacatttttatctttttcagctaagacgaggtagatttttgcttttacttttgaaaggtctagggtggcatcttggttcatgtttttgcggataaagttgtagcgatctggggtcattttttctttaccgccattttgtttgtagctttcgtaggttttgtttttagaaataagggtgctgtcagtgaggaaattttgttgtgcttgcttgacttctttcgttgttttaccagcgtctttctcttgccagccagtgttgtattctccttgacgcatccagttaatagcaggggcggcaaggattgagaaagcaatctcattatttgcattcattgcttttgggatcacccagccggcttgactagcgccccataagccaattttggcggtgctatcaggatacttcactttcatccactcaataacttggttgacttcgtttgcgaggtcttgcatggactgatttagccaattgcctgaggatttaccaacgcctaatttatcccagaacaattatatctgttgaacgtcatacgtgccgtagtttgcgcaacactgtctgcatcacccc

SEQ ID NO: 1324 - DNA, 699 bp, Listeria monocytogenes-4B
  misc-feature (1)..(end): n can be any nucleotide a,g,c or t/u
cacagtgtgctggaaaggccaactgatggcaataccgactctgtggatgaaatgctaaaaggtgtccggaaagatattccagctgtgaagaaaaaccaagtgtataaagcggataatactaaatggagtgactacagtgcctctgctcaactttatcaaatggaagatgctgtaaaacaaattactggtaaataataaaaaaacccgattctacaaatagaatcggctttttttattatttatttaagaaaccataaatatcattattcacttttccgaatgaagcaatgaggattctgacgtcggagactagtgtacataaggtgctcgctcgatgactgacactactagagacgtnccagcccgtcacaactccgtgactattataactacctggatccacatagaatgccatgcattaagagatgcggcttctgatgtgaacattctttcaaactggctcaaaaaatcattttttaatcatcaaagccttggaaacaaacccctttcccacgaaaaatactcatgccccctgcccatataaattccattagcctgccagtcttggacttggaaagatcccatttcaccaatttatagaccgtgctacggtatttccccatacatcttgggatgatcctgttgctattctgacggtaaaatttatgacaagagctaggtgcatactctaaaacaccg

SEQ ID NO: 1325 - DNA, 736 bp, Listeria monocytogenes-4B
cgacatgttctggaaagtggtggaccatggttaacacagctgaggttgaaaattaccctggatttgatagtattttaggacccgatttatccgataagatgcttagcggtgcgaaacaatttggcgctgagtatgcttatggggacattaaagaagtcgttgatggcaaagaatttaaaactgtaacggctggatcgaaaacctataaagctcgggcgattattattgcgactggtgctgaacaccggaaacttggtgcagctggcgaagaagagcttagtggacgcggcgtttcttattgtgctgtttgtgatggagcgttcttcaaaaatcgcgaattaatcgtggttggcggcggagactctgcagtggaagaaggaacttatttgactcgttatgcagataaagtaacgatagtacaccgtcgtgataaattgcgcgcacaacaaattttacaagatcgtgctttcaaagatgaaaaagttgatttcatttggaatagtacagtagaagaaattgttggcgatggcaaaaaagtaactggagcaaaacttgtttccacagtggatggttccgaatctattatgccagtggatggtgtttccatctatgttggacttgctccccttccgaaagccttcttaactttaggcctaaatatacgatctgacgcagatgcgcacctctgttttgcctggagtggcaagctcccatgacaaacagatgcgctcaatat

SEQ ID NO: 1326 - DNA, 756 bp, Listeria monocytogenes-4B
  misc-feature (1)..(end): n can be any nucleotide a,g,c or t/u
aagagggcggcgagttagctgtcagtgacgaattttattttgaattaaatgaaactctagctggaacgggaaaaattgatttagtagatgtggaacttttcaatgaagaagcggacgttttacgcttaattgaaacagctcacaagaacaatgtaaaagtagtgatgtcgaaccatgattttgataaaacacctgcgaaggaagaaatcgtttctcgtttaactcgcatggaagcacttggcgcggaccttccgaaaatcgccgtcatgccaaaatctgctggagacgtactaactttactagatgcaacgaatactgtatctgaaaaagctaatcaaccaatcattacgatgtcgatggcgggcactggtgtcatcagtcgtcttgctggcgaagtttttggctccgcaatgacatttggcgctgcgaaaaaagcatcggctcctgggcaaattgatgttaatgagttacgccatgtccttgatttactgcacaaacaattttaataaatactaaaaaagtagcaagtttctttgatgaaaagaaacttgctactttttttatctagaatgaattattttgttaatagactactttttataaacgaaaataattcttgaagcagtgcattttcgctctgcttataatggctgcgacatattctggcatccgtcttctgatatctatttatatgactatttatgtctatatgcgacaagtactaagtgctactaactaactgtaccgnaattttcg

SEQ ID NO: 1327 - DNA, 1034 bp, Listeria monocytogenes-4B
aatgcttgatatgatgcgcggcgctggaatggaccaaatgaatggtatgcaggatgcgctttcgggcatgttcccagcgaaaaagaaaaaacgcaaagtaaccgtacgtgaagcgaagaaaattctttttgaagatgaagcatcaaaattaattgatgcagatgaacttgcagcagagggcattcatcgtgcggaacaaatgggtatgatttttatcgatgaaattgataaaattgctagtaaagaaggcggcggaaatgcacaagtttcgcgggaaggcgtccaaagagacattcttccaatcgtggaggggtcgcaaatttctactaaatatggtacagtcaacacggagtacattttatttatcgcagcaggggctttccatatgtctaaaccaagcgatttaattccagagcttcaaggccggttcccaattagaattgagctggataaattaactcaagaagatttctacaaaatcttaacagaaccagacaatgcactaattaaacaatacaaagctttactgaaaacagaaggaattgacttgattttcaccaaagaagccgtagaaagaattgccgagattgcattccaagttaatcaagattcagataatatcggagcaagaagacttcataccattttagaaaaattactagaagatttactatttgaagcaccagaaatcaatatggaatctattaaagtaacagaaaactatgttaatgaaaaacttgcaccaattatgcagaataaagatttaacacaatttattttataaaatactaggaggatctaataatgactttattagaaaaaacaagaaaaattaatgctatgttacaaaatgctgcaggaaaaacaataaacttcaaagaaatggcagatacacttacagacgtcattgaagcaaacacatatatcgtaagccgtaaaggtaaattacttggctattctgaagcacttccaatcgaaaatgatcgtatgaaacaaatgctaacagaaggccaatttccagaagaaatacgcaa

SEQ ID NO: 1328 - DNA, 296 bp, Listeria monocytogenes-4B
  misc-feature (1)..(end): n can be any nucleotide a,g,c or t/u
agaaaaacttcgaaaagaacgtgaattagaagcagaaacagagaagttattgacgcaatcagaaaataaaccttcgaattcagatgctaacaatgagaaactgaagattaagcataatgcaggagtagttgttcaaggagtaggtaatctattgattcgactatccagatgttgtaatccagcgcctggtgatgctatcgttggttatattagaaaaggtcctttccggcgcnnncgtcnnncctatcaaggcatcagctncgagtnccggacgtcgcnnncncaacaagggtttt

SEQ ID NO: 1329 - DNA, 958 bp, Listeria monocytogenes-4B
agccaaatgctaaaagaagactatgaagtatatattattggtttttccatgggtggactgctcgctggatggctcgcgagacattatccggaagtaaaaaaactagtacttctgagcacagccgtaaatgcaatggaatggccgcaacttgtcgaaaattccaagcaagtattaactgtgttgcaaaagaagtaacgctcaaaaacagcccgatgtttaaacgttatcaaaagaaagtaacggaaacgccttggacttccacgctacaattcaaaaaaatggtagctttagcaaagccggtttttgagcatattgaaattgcaacttttattgcacaaggcagtgccgaccaagtagttcctgctgaaaaaagtgttaatttcttaatggaaagtattcctggtccaaaagaattatttatattagaaggttcgaaacacgtgatttgtcaggacgaacaagcggacaaattatttgcagctgttttaacatttttgcaaaaagatgtcgctgttttaaatgctcaataaagaaaaccgattcagctttcactcgctgaatcggcttttttgttttcaccaacagaatctcgggctattaaattagtagcaagcgccagatgaacaaacccttcatctggttttcttatgcgattatacatgagttcgacagccttctcacccatatagcttaggttggtacacattgtagttagctttggattgcttagtacagtaaactcggtattatcaaagcaaataatcgataagtcattagggatattatagccttttgattgcaagtaagtattgagaataaacccaagtcctgagttgacacaaaaccaagcagtagggagttcgtccagttcatctaaagttctatataatgtcgtttgttcttctttgatacgagtgatggcgtatttttcgttaaaaggaatgtgatagtagtgcaa

SEQ ID NO: 1330 - DNA, 554 bp, Listeria monocytogenes-4B
tatacagagctaatgcaaacgattttccgagcttctgtatatgataatgtggcggaaaacataaacttcaagtgaatatgaaagctgctacaccagatgcgagcggtaatgtttcctacgaatatgaaattcaaatggacggaaaagcattaactcctccagtaacaggaacacttaattacaatgcgcagggcgaattaacaaacccagacgcacttaaaaatatccaaatcaattccacagtaaacggcaaacaagtcaatatgggcttaaacctaagtggcttaaccaactacggaacaaaccaagtattctcaccaacttctgacggtaaaggcgctgcgactgtaaaagattatgcagttaccgattctggctatattgcaatgagttactcagatggtacagttatcccagttgcccaacttgcggtggctactttctccaatgaagacggcttagtcaaaatggggaacggcgaatatgttccaggattatcttctggcgatgcagtatacggcgttgctggccaaaatggcgctggcggaattagc

SEQ ID NO: 1331 - DNA, 1159 bp, Listeria monocytogenes-4B
  misc-feature (1)..(end): n can be any nucleotide a,g,c or t/u
tcggcaatctgtctcttggaaagaggggaaagtgttacagatggtacgattagtgtatgcggagttaaaccaggcgataccgtcgaaaaatatgatgctatcgcggaagttttaacagataaagtaacagctgaaattccatcatcctttagtggcactatcaaagaaattttagcagaggaagatgaaactctagaagtaggcgaagttatgtgtacaattgaaacagcagatgcaggaagttcggaacctgtagctgaagtagaagaaacagaaacaaaagcgccagaaaaacaagaaacaaaacaagtgaaactagcagatgcaccagctagtggaagattttctccagctgtactgcgtattgcaggtgaaaacaatattgatttatcaactgtagaaggcactggtaaaggtggccgaattacaagaaaagatttacttcaagtcattgaaaatggtccagtagcgaaacgcgaggaaatgaagtctgctccacaagaaaaagcagcaatgccaactcctcctgttcgttctgcagctggtgataaagaaataccaatcaatggcgtaagaaaagccattgctaaacatatgagcgtgagtaaacaagaaattccgcatgcttggatgatggtggaagtggatgctactggtcttgttcgctatcgtaatgcagttaaagacagctttaaaaaagaagaaggttattcattaacttatttcgcctttgtcatcaaagccgttgcacaagcattgaaagaattcccgcatcttaacagcacatgggcaggcgataaaattatcgagcacgcgaatatcaatatttcgattgcgattgcagatggtgatttattgtacgttccagttattaaaaatgcggacgaaaaatctattaaaggcattgctcgcgaaattagcgaacttgctggaaaagcgcgtaatggtgaactaagcctagccgantggaaggcgtctatcgttagttgnnnnnnnnnnnnntnnnnnncnnnnnnntnnnnnntntntnnctncnntttnntnnttttnntttttttttttttttttnttttttttttcctttntnnnntctttttttctttttnttttttttttctcctcgcgcctcttttttcattcccactcccaccaacaaaaa

SEQ ID NO: 1332 - DNA, 1326 bp, Listeria monocytogenes-4B
gtcgctggaaagaaaatgcggaatgtctgttaccgctgaggagtacttgaaatcggatatccattcgggttgtggtggcgtcattcgtccggatgtggtgctttatgaagaagcgattccagagagtgcgatagaccaatctcttgcagctataagacaagcggatttgatagtgatagtagggacatttttccgcgtgagtccgttttgtaatttaacagattatcgaaataaaaaagcgcggatttttgctgtaaataaagaacagatttcgcttccttatccatttgaaatgatggaaagtgacgctgtgaaagttttcgcggagatttgaaaccttgcagtaataggggtggcgtgataaaattttcttaaccggcaaattgtccggaatatttagagaaaatgcatggtcgttttcttgatgaaaataaggagtggagagtttcatatgaaccctgaccccgagagtcagcagattatcttgcagttaattcttattgtggtgttgacgatgctcaacgcattctttgcctcagcagagatggcccttgtatcattgaacaaaaatcgtgtaaaaagccaggcagaaaccggtgataaaaaagcggatatgctagctaaactcgtagatgatccaagtaaatttctagctactattcaagttggtattacgcttgcgggattcttctccagtgcgtcagctgccactagtattgcgactagacttgaatctgtttttggaggaagtagttttgcgaaagagttatccattatcgccgtaacccctccgttatcatatatcacgttagttttcggtgaactttatccaaaactgttcagcacttcaaaaatcagaaaaaatccgcccgtgtttctgcccgaccaatcatggcagatggtgttgtgcttcgtccgttcgtgaaattcctgtctttttcaaccgatattcttgtgaaattaacgagaatcggagaaaaatacggataatgaaaaaatgacgcgagaggaaatgcagctactgattgaaaccggtcgacgtgacggtgcaattgaggtagaagaattacaaatgctccgtggtgcatccgaaccggatcatcaatctgccccccaagcgcccgcgccccccaccagatgcgttaccgattgatgcccccacagagcccgaagaactccctgacgccttattaagtgagaacccttcacgggcccccccccttacaccccgaccagcaccccctcccccccctccccctaccacatatttctttccgctcccgcaccccacacaccacccctcccccccatcgctccaaccccccg

SEQ ID NO: 1333 - DNA, 787 bp, Listeria monocytogenes-4B
ttacaatgatatcttcaaaagaaaatcatataatgatgtgcatcagaccagagttcttttggtagctttctttttaacgtttcttccacttctacaacagaatctttccatctacaaatccctaagcgtttactaattcgttcgacatgtgtatctactgcgattgctggaataccaaagccaactgataaaacaacattggccgtttttctacctacacctggaaggctctcaagttccgcatgcgtctttggtacttcccccattaaattcgattagaattttctcggataatccttgaatattttttgctttattacgatataagccaatagagcgaatatcttccatcaattcttccagtggaacagccaaataatcttctggtgagtgatatttttcaaacagcgaggcagtcacgcgatttactaacacatctgtacattgagcggataagacaacagccaccagtaattcaaacgtatttttatgaactagctcacagtgtgctgctggaaacatttttgccatttcttctatgcataatacggtttgttaaatcgataacaatttgtgtacctcacccttttcttttttcaagccagtcgtatagaggaatcgaacctgcgctttttttcacttccgtttggttaattgcttggcttgtgcgcccattttgatgaaattcttccgctacacgcttggcatcttctattgtcttaactccttgtttcgaccactttccagcacagttcggcgctcaagcatgcatctaagtgcctacagt

SEQ ID NO: 1334 - DNA, 794 bp, Listeria monocytogenes-4B
gcatcgtccagcagtgtgctggaaaggcaaccattgatgcagtgctacaatatatttcgctactcggtgaagattcgaaaggaatgaatcttttcgcggaagatgatgactttttgaaaaagatgaaaccacgctaccggaaaaccgcgcccatttcgattgacgaaaagctggagaaagaaaaattatacacgggtcaatacttttcagcgcatgcagtatcgtactaccaaaataaattacaaaatcttgctattacaagacttgcaaatctttcttccggcaaaaactatcaagtagctgcttatgtacatgaagtcaaatcaattagaacaaaaaagggcgaaacgatgtgctttttaacaattagtgatgattcaaaagaactgagcgccgtcatgttcccggaaagttatcgtaaattcgcgagctttgcacaaaaaggggagattctctttttgcaagtcaaagcagacacaaggaacggagagctacagttaattatcaataaagcagaagatttaaaagaaataaaagcccccgtacgattgttcctaaaattaacggaaccacagcaaatggaacaaattaagccagttttaacgcgttataaaggcgacagtaaggtcattgtgcatcaagcaataacgaaacaaactgctgagctgaaaaatattcaagtaacgccatcaaatgagctgcaagaagcgttagaagagctactcggtaaagagaatgtagtcattaagtctttccagcacactgtggccgtcgagatgctgagagtgccatag

SEQ ID NO: 1335 - DNA, 724 bp, Listeria monocytogenes-4B
  misc-feature (1)..(end): n can be any nucleotide a,g,c or t/u
agtcggatgagataatttcctacctgcccttcctgaaatttgaactaaagcagcttccgtaaaaatacgagcttcacttccaaacaccgctacttgcacatctgtaaaagtaacacctctctctaaaattgtagttgttaataacagcttgattttcccttttcgtagccattccactttctctttacgcaattcatcggctgaatgaactgtcactgggctggcatagcctttattttcaagtgcatttgcaaatttattcatagcatcaatttctggaaagaaaattaaagccggctgatctttcttcttcacatcattcatccactggataagcttaggagttattttccctttagctagattctttttccacgggccaatccagcacgttctcggcacaggcagtttctttcggtgatatcgtccgggaattttcacaaaattacgttttcctcttacacactcttcttgccactttttctctggggttgctgtgattattattgcccacccttcttttgatctggctttcataacggcatattctaaaaaaggatctttcgcataaggaaatgcatctacttcatcaataaaaataacttgaaacgcttcataaaagcgaataagctgatgggtcgtcgctatcacgaactgctntcgttggtcgttatcttttgaatctccatatagacaancaactttccaagacacagatggacga

SEQ ID NO: 1336 - DNA, 1155 bp, Listeria monocytogenes-4B
agagcgcaaacgtgacccgaataccgctgcactggaatagtttccagaaaacctttacggaaaaagtaaaccttaaaagcaaatggcgcaactttgtagtaacgaccgggcagctcctaaaacgcccatccttcagcattccgctggcaacacttagcatcttactaatcgcgagccttatttacgggcttatgggagacaaaatcaactcgcttaaatttatcagtgatgcgaccggacgagtgaccgatatggcgcccttcaaaccaaatgcgcaagtatggctaggcaccgaccaagccggcaactccattctcgaccaattactcgtcggcatcaagtatacgctacttatagctgtcatcatcgcaacgctacgtgtcgtgattggttacattttggcagtaccgctcgcatttttcagcaagccacgaacccgcaattttgttcaatcaatagcggacggaatgcattatctaccactgtcattactcgtctttattatcatggtcaacgaattcatcagctattctggcgttttcgaaacaagcctttttacacgcataaccttccaaattttaatcatggttgtcatcgttttaccaattacaaccaaccgaatcagcagtgaaatttcccaggtgttaaaaaaagagttcgtcttgagtgcgctcgtttttggcggaaatgctcgctggatattaaccaagcatatcaatccacaaatctggtccaaattaattttgatttggattgagcagctcattcaaacgctacagatgttcgtccatttagctatctttggaattttcatcggaggggcaatcatgggcgccgatgacggcatgctaaacccagttatccctgaattatctggtttaatcgcaaacgctaaattcgtgttcgccaaccaccaattctggataattttacctccattagtggtatttatgattttaattctttgtttccaaatgatggcaaattcgcttttgaaacgagaagaagaaagtaaaaaagcctagttctataaaagaactaggctattattatttaaggagtgactgtgtgatagacagtcactgtgacagaagggtaagttggatattgattatttaaaaagtaagcgggattatcgcctgcattttcccaagt

SEQ ID NO: 1337 - DNA, 806 bp, Listeria monocytogenes-4B
aactgtggcacttactcgctgcttgagcgccgacatgtgctggaaaggcactatttccgaacgattaattatgttaaaaaagaaaaaggttattttggagcaagagattgaagacttgcagaagaatttggatacagtggttaggaagattgggatttatgaagagaaggttaagactagacgagtttagctaggtgaatttttctcgtgtacagtaagagaccatttacaacagcatatagaaaaagacaacctgttatgggttgtcttttttgacgttctttttatcgtaaagcttttttgctagggaaaagataatagttattgcaaggaaaattaagagaaagtttatcattagattgggccattggatagttataccctcgtttcccgagaaaaacatctccgtaaatgcacctttcttatctgtcgtactaattacagttagccatctaaaaggtgctccatatatgtattcataaaaactcactttacttccatcagctatcgcaaatgttgggggtatgataaataacgtggtgattaggaggatagaggttgcaaataatcggttagttagccattgtagttttttcatgttagctccttttgggtgaaggttggtttttattgaatagttagataaaaagacagttcttgctgtttgaaattgcacaaaaaccgcttaaatacattgtttaggtggttttccgatatgggttgtgaaggtttcgaacccccgtccctctgattaatagttggttttgtgttaagcagttacacgcatttatgagatgaaaacggct

SEQ ID NO: 1338 - DNA, 1179 bp, Listeria monocytogenes-4B
actgtggcacttgctcctgactgagcggccgaactgtgctggaaaggggaaaagttaatgcctctttctgcaaaactaggagagaataggtacttaaccactttaagagatgctttcatgttggcatttccgctaacaatgtttggttcgattgcggtggttttaatgaatctaccgttttggagtgatgaaacgaaggcagttttacagttgtatcttgggaatgcccaaagcgccactatgagtattatgactgtttttgttgtttttggaattggatattcactatctaaatattataaagttgaagcaatttatggaggggcagttgcccttgctagcttcttgattttaacgccatttttctttaatagtcctgatggagagcttattactggagcactttcgttagatcgacttggggcaaaaggtatgtttatcggaatgattactggttttattgctgcagaattatatcgattttttgttcaacgggattggacaatcaaaatgcctgcaggagttccacccgctgttgctaaatcatttgcagcacttattcccgctatcttaacattaagtatttttttagcaattaatgttatggtacaattcttcttccatacaaacttacatgatgttgtttatactgttattcaaaagcctttagtggggcttggttcaggaattgttccaacactaatcgctttattttttgtccaagtattatggtttttcggactgcatggtcaaatcatcgtcaactcggtaatggacccgatttggaatacgttaatgcttgaaaatttagatgcctataaagctggactcccattgccgcatattattacgaaaccatttatggaagtctttactgttggtatgggcggatctggaatgactttagcagtcgttattgcactagcattcttaatgaaaagtaagcaaagtaaagaaattggtcgattagcacttgggccaggaatttttaacgttaatgaaccggaaatttttggtatgccacattgtattaaatgcaacgattttaattccatggattattgcgcctttgattgtaactactttgaattatttcgtcatggcagctggtattgttcctgctccaaccggggttgctgttccatggacggtgccaattgtcatcaatggtattctcgc

SEQ ID NO: 1339 - DNA, 1073 bp, Listeria monocytogenes-4B
  misc-feature (1)..(end): n can be any nucleotide a,g,c or t/u
tagcggccagcagtgtgctggaaaggttatagaagtaaatccgttctcaagccggacggcgccatttttaagtaaaattaccgaaattccgatggcgaatgtggcgacaagagttatgttaggggagaacttaatcgaccttggttacacgccaggacttgccccagaaaaacaagaaatttttgtcaaagtgccggtgttctctttcgcgaaattgcgtactgcggatacgtcgcttggacctgaaatgaaatcgaccggagaagttatggggaaagatgtgacgctcgaaaaagcactctacaaaggttttgtggcgagtgggacaacgatgcatgactacgggacagttcttttaactgtagcggaccgcgataaagaagaagccgtagaactagcgaaacgatttaatcgcataggctttactattatggcaacaaaaggaacagcaagcacgttagaagaagcagacattccagtgtcacaagtgaaaaaaattggagaaaatcaagaaacgttgatcgattatattcgaaatggccaagtaacgctcgtagtgaacacattaacgactggtaatctacctgagcgtgatggcttccaaattcgccgcgaatctgtagaaaatggtattccggtctgtacctcgctcgatacagcgaaagcaatcttgcgtgtactggaatcgcgctcttttgaactcgaatcgatgaataccagtgaagtaaaacaacctaaagcacgtgtttaaatagaagaaacggggtggaaccgtgttaccgacgcgcatgaaggtccttccctctacccgccctgtctataaagccttccacttccttttgctaggggatccgtgctctccctctgctttcccccccgttttttttgcctctcccttttttttctgctctcctttcttttcccctcccctccccgtctccttccttcctcccctcttctccctcctcccccctcccctctctcccttctcttctnctnctttcccccccccccctccccctcccctccccccctcccctcccccccccccctccaatagaaaaaaaaaaaaa

SEQ ID NO: 1340 - DNA, 1058 bp, Listeria monocytogenes-4B
ttagctgcagaaggctttgacgtaacgaatgtaatggcaggtatgggagcctttcacggtatagtaactaaataaaaaagaagtcgcgactaaaattctagtcacgacttttttatttagctatgttttctttgacggaagaagaggatagctactccggcaatgataatcccaattaacacagtagttgcttgactcgcgtcgccagtgtttggtaaagcggcatttacttctgagttagacggatttgatgcgttttcagagttcgcagattgtccattatctgggttgggattgatatttggattattaggatttggcgtaggatctggtgtgggatcagggccgggagcaggtggtgtcggaggttcatttccctctaccacatttactaaaacaataactgggtcagcatttagtccatctgcacttaccgcatttaaagtcactttatacgttccgactttggctaaatcaacaacgctatcaaaatcactcgttaccttactaccatcacttgtttttgctgaaatatcttgtaaaaattgctggtctgtcttggttgaatctttcgtgtaagaaatgctcttatctgctgttatgactggttttgcaagtatggtcaccgttacttgtgttggcgttgcttttaaaccagcagcattttcggcatttaatgtcaccgtgtagacaccgggtttactaaagtctacaaccgtattaaaatcactagtaacaggcgttccatcatctgtctcagcatgaacatcttttaaaaattgttcttctgtaacagtggtttgttccccataacttattgctgaatcatttgtaaatggttagtgaatgatcgatgtcaaaatagtggtcgtagcttccccctgatacggaataattattgaaatttggcggagtttgatacgatccggcggggttattggataatgcgcatggtttccattttagtaatcgtatcaaaataacttttggtattccacttaccgtattcctttatcgtcaatggtaacggctaccgtaattttggctattaaagtgaa

SEQ ID NO: 1341 - DNA, 512 bp, Listeria monocytogenes-4B
tgcgctggaaagattgtacatgtctctgcaatcgacgacagtgctttaaaagcggccgtaattttcccaataagttctctctccgcgtcagtgagttcataagggttctctggattaatcgtgggaaaatgactgtttaacaacaggtattcttttccctttagatgaattgtggccttttttataatccataaattgaagtaaaagtcggtgatccatatcaaattctttgcgtcgatttataatttcaccttccaatttaaactgaataatcgagatagccttatgcatcctagcaatttgcgtgatttctgcattactatagataatattttcttcgtttttgggctggaagtaggtacaaggatcgtctttgtacacttcgtcggcaaaaagggccagggggcgaagagaaataccgtaactatcttctaaaatatctaaatttaaataacgggcagaaatccgaataacattagccgcacaaaccctagaaccactagccgcgccca

SEQ ID NO: 1342 - DNA, 694 bp, Listeria monocytogenes-4B
agttcaactaaaggaaaactcccttgaatttcataagaaaatcctagtacattatcttgtaacgcaaattccaataccgtttgaatcgaatatttttttcgtccagatttcacgttatactgcacatgatcttgcactgtataacaaatatgctgggccgtaatctgctttgaaattgttcctccaatagattttggcgtacattttttaataacaaattgctgcccttgatatgttaaaattgcttcatttcctaccaagtcaaaaattgctgcattctgtttcgttttgttcacagtaaacgagatagcacgacttgtatttttttcataatcgtaggaaaaggagccgtaatcaatgtctgttagaatctcttccacttctttgtccatactttgaataatcacataatccatatctatcacctaccgataaatgaacggaaaattaaaagcaatcgttacatccgttacacctttgatttcaaaatcgtgacagcctttttcaagggtgataatcccatgattggtatcttttccaacacggcggtgatcgacaagtggaataatattgctcaacagccaaacatctgctttttggagcgctttccgatcctcgaaggatcctcccgtcgtcagattatgaatcgttggtggcccattcccctcatcgcaatatctaactcatgccgaag

SEQ ID NO: 1343 - DNA, 1235 bp, Listeria monocytogenes-4B
  misc-feature (1)..(end): n can be any nucleotide a,g,c or t/u
gataatagagggttttgccgttcatcttcatcgctaaacgaacattatcatccgaataaacatactgacgaactacttttccatcaccatcagtctcatacagaacatcaatactatcgccatcataatgataattcgtcgtcacgccatcgactgttttcgacaagcggcggttatcatcatcgtacgtataactcgtaaacggcttgctctcgccttttttcgtaatgctgcttaaacggtcgccggtatcccatgtatacgtgtacttgccatcgcttgtacggttaccattggcgtcatacgtcagcgcttctccgttccacgaaaccagttgattaccatcattataacttgcggcaattgtttttgtctcgcttccgctgattgctacttgtgtgcggtttccgaagccatcgtaggtgtatgcttttacggtgccgtctggtagtgtttctttggttagttgattgactgcatcgtattcgtaggttgtttttccgtcttgtttgttgtcgatgcttgtacgggtgcttgctgcatcataggtgtagttttcgtctaaaatttgggtgccgcttgcgctactaatagctgcgttggtgactttttgggtgctatcgtaggtgtagttggctgcggtgccgtttcctgctgtgtagacgttaatgtttccaaattcgtcaaactcgaaataggcgtttttgcttccgtcgtttacgcgggtattccggtctaagtcgttgtatgtgtagctgtgcttttgctgtgtagtcgccgcggttaatggctacgttctccgactttgtctgtttttcctttgttngtcttttgttggtttatctttgcaagtgtagtctacgtcaccaccttcgttctgctactttggtgattctggttggcatctccnnaggttttgtcggttacgattctggtaatnttccccggttactttcgttccggttccgtccggatccgttttgtaattaaacgctcgtttgtcattccatctaatcccctcccaactggctgatgaataccatgtgctcttggaatcgctacccttgggcattatggctctgctcacattcccggctccgtcgagtacgtctgttctcggcctattttttcctttccaatttctttccttcctctttcatttctttttgtcttgtccctacttaccnntttgtnttttnttttttccttcatccatactccactgcccaaagaaa

SEQ ID NO: 1344 - DNA, 666 bp, Listeria monocytogenes-4B
gctcagcggccacagtgtgctggaaagattgaccatgctcgcactactgattacgttaacgcccgggacactttccattgatatttctgatgattataaagcaatctatgtccactctcttcacgtccctaatattgaagaagaaattgcaacaattcagtaagtcttatgaaggcgcgattatggaggtgttccacggatgattattcaaatcgctttatccattggtttacttctctattcgatttcaactttcttatatctttaccgtattttaaaaggaccaactacttctgacaaagtgggggcgctggattctattggaatgaacttagtggccattgtagcgctactttcgatgttttatgatacgcatgcctttttggatgttattttacttattgcgcttcttgcatttatcggaacggtttcctttgccaaatttattgagaaagggaaggtgattgatcgtgaacgtgataattgagattattatttctattatgattttaatcggtggtttgcttagtattcttgccgcaatcggggttatcagattgcctgacgtgtacactagaacgcatgctgccgggattagtaatacttttggtgttagcttacttctgtttgcaacggttggttactttttccactcaggcgaaagtt

SEQ ID NO: 1345 - DNA, 870 bp, Listeria monocytogenes-4B
catgatatcgtctgtcaggccacctcaagttgtaaaagcgatgtgcacaaaaagtcacacaacgaactagatgaatatgtaggtcttgcggcaaacgatccaaacagttatcattactatatgaatgaattgttattctctaaaaaagcatttaaagaaagtttcttacctaacggagaggcgacggatgcagaagcagaatgcgcacgttatgaagaaattttatctgagcacccaattgatattcaagtgcttggaattggaacaaacggccatattggttttaacgaaccaggaactccttttgattcgttaacacataaagttgttttaacagattccactcgtgaagctaataaacgctttttcgaaagagaagaagatgttccaacacatgcttattctatgggaattaaatccatcatgaatgcgaagaaaattatcctacttgcttttggtgaaaacaaagcacaagcaatcaaagaaactattaaaggacctgtagatgtgaattgtcctgcttctgtacttcaaaatcatccagatgttactgtgattcttgacaacgaggcggcgtcacttctataagaagagggcgggaaaatgatcgataaacaatcaggaataccgacttacattcagattcagagtgaaagtaaaaagaaaatggaagatgggggttggaaagtaggcacttctattccagctgaacggctacttgctgaaatgtttcacgtgagccgaatgacgggcagacaagccatttaaggccgtcccgatgataacattttacaaagacgggggggagcccggacctttattgcggcaacgaaactaacctaccgactggaaggcggtgccacttggacc

SEQ ID NO: 1346 - DNA, 1019 bp, Listeria monocytogenes-4B
atctacatgcatgcttcgatggccgaacgtgtgctggaaagaacttgcgcacgtgccgcgtttaaggcttccctaatttccgcatcactaatattgccattttcataatcatctagtaactgattcatctgattttcatattcagcgcgctctgcacttgataaatcaagttctgatgcaagcatttgaaatgaatttgttaagctgttccggtctattctctattcaggtgtttttggttgttctaaagcattgtctaatgtctttttagcacttcgcaaataaccatttgctgtattaagaagattattggcatcttcccaagccgctctaccttcttctaattccatctcagcttgtgaaagagctgtttcgccttggtcaatctgtgtttttgcggtatcaagttgtttttttgcgcttcttagttctgcttcaccgtttgcaatctctgcttcgccatgcttgattttggcgtcatagcttgctttggcagcattatattcagaaaatccttcttctaattgtgctttggcatttgcaagtttagcttcattttcctgtagttctgcttttcctttgttaatttctgctgctgcatcgcctaatttattttggtccttcgcctcgattttattgaattctctcttctccgccgctctgccgccgccccgcccccccctcctcctatccttcctctcccccagcctacatcctccctccactccccggctcccaccctccccacccctaccgcatcgctctcttctccctctatatcggtttgatcttcgtctccgcccccgccgccctccggcccgtcccgtcccccttctctggcgttacccctcactccgccccgttccccgatctatcccaataccatgtcgtcatctccgcttttcaccccccgcctatttcgccagaaattggcctgtatacctgcctcatcgcgcctcttttcacccccctactcttcttctccctcctcctctcataccccacttcacctattataa

SEQ ID NO: 1347 - DNA, 690 bp, Listeria monocytogenes-4B
  misc-feature (1)..(end): n can be any nucleotide a,g,c or t/u
tttttatgctgattatgttgggtgttgcttttttctccggacttaaagcaactggacccgatatgcttctaacagccgacaattattttaataagtatgaattagctaattttaacgtgcaatctacttatggactagatgagacggacaaggaagcacttgaagatatatctggtgtcgcacaagtggaactcgggtgtgcagcggatactttaatgaaagataaaaatatcgtaacgaaactattttctacatctaaaagcgataatttaaatcaatacaagatagctagtggccgtttaccagaaaaatcaggggaaattgcactggatgacaatgaccttgttcataaaaatgtcaaaatcggcgacgaagtaacttttgttaaaagtgatggaaataagttaactaacacgctaaaaaaatcaacttataaagtagttggcttcgttagctcaccagcttacatccagaaatctgaacgtggctcgagcacggttggaaaaggaaaaacagatgcctttggtgtgattccagaacaggattttgatttaccagaatacactattgctaatcttacttttaacaatttagcagcanaacaagctnttagtgacgaatatgtatgcacccaccaaagaaatagataagaaaagcgtcgaaaaagctttagcagaccacccagaaaaa

SEQ ID NO: 1348 - DNA, 736 bp, Listeria monocytogenes-4B
  misc-feature (1)..(end): n can be any nucleotide a,g,c or t/u
tatcgtccagcagtgtgctggaaagaacttccgacaaactgaatctcaccgccatgttttcctgcgtgcggaccgacatcgacaatatggtcggcaattttgatcacatctgggtcatgttccaccacgagaatcgtatttcctttgtcgcgcaatttcacgagtaattcattgagtcgatgaacatctncgcgcgatgaagactcgatcacttggtggagtgagaaaatataaagcaagtcagttaagctactattcaaatgacgaatcattttgacgcgttgtgattcaccaccagaaagagaagcagtttggcggtcaagtgtcatataaccaagaccaatatcaatcaaatgttgcaatcgctctgtgacacttttgaccattggagcagcgatagggtcatcaatactcgcaatcgttgcttttaattcatctaattgcatcgctgtgaagtcggcgatatttgctccatttattcgacaaaataatgcttgcgcggagagtctcgtgccttcgcaagttgcacaaggcgcaatatgggcgaatttatcgacacgttctatagttgaggcggacattacgccttctttatgatatacaaacgattgaatctaggaatctacccttcatatgtagcgtgcatgctagccatgggtgtgagttggaaaacttgaatgtctagaccttgggtcaccttgttggattgtgcttgtgaatcacgtcgctcgataag

SEQ ID NO: 1349 - DNA, 1091 bp, Listeria monocytogenes-4B
  misc-feature (1)..(end): n can be any nucleotide a,g,c or t/u
gctggaaagataaattggtatttcaagctagtattatcaagaatgggattaaagcagcaactgagaatcctgcatcaaaagttagcattcaacctgtcttttcccacgaagttgctacagataaagtttctaatcaacaacaaagtggaagatgctggatgtttgcagcattaaatacgtttcgccccctactaaacggaacgcttggtttgaaggattttgagttatcacagaattatactaatttttgggacaaacttgagaaagcaaattactttttagagaatataattgaaacagcaagtgaggatgaagatagtcgattagtttcgtggttgcttgatacaccccaacaagatggtgggcagtgggatatgttagtttcaattattgaaaaatatggagtggttccaaagtcagctatgcctgaaacgtttcaaagtagtaagtctgctgatttaaaccatctattaaatgaaagacttcgtacggatgcggttattttgagaaatgctattgctgagaagaaagatactgcagatttgaaagaagaaatgcttgctgaggtctatcaactcttagttatgactctaggcgaaccacctaaagtattcaattttgagtatcgaaataaagacaatgaatttaaacaagaattacaaattacacctaaagatttttatgaacgctatgtagatatggatttgaaagattatattccacttattaatgcaccgaccaaagataaaccttttaatcaagcttttacagtggaatatttaggcaacattgtaaatggtacacctattaagtatttgaatgtagaaatggatgtcttgaaaaaagctgctgctgatcagattaaagatggggaaacagtttggtttggatgtgatgttggacaactttcagaacggaataccggtattatggatacggatattttcttgcttaatcagacttttggctntaaaactgcgatgactaaagctgaacgcctggattataaacacagtatgcttacacatgcgatggtattaactggagtgaacattgctaatggagaagtaaatcgctggaaagtggaaaat

SEQ ID NO: 1350 - DNA, 566 bp, Listeria monocytogenes-4B
gaatccggttagcgaaggaaaacaaaaggccaacttaaaaaatcaagcgaatcggtttatttaacagacccaggtttattaagtgatgcggaacaaagtagttatattcgttctaagcaagcaacattaggtttgttgacgagtcaattacaaatgtacaaacgaggttatccactatctagtgtatggtgggatgcctataatagttattttgaaaatggaaaagaatctagaatggctaaacaagtgttatctagtttgtattacgaaaataaaacaaaaccactacaagaaaaaactgccaaaaacttatttggagaaacaatccatgcgagtgtctcgagaatggagaaatttttcagttgcgaatttcaacattttgctcaatatggtttaaaattagaagaacgaggtcattttcagctacaagctgtagatatgggtgaaattttccatggagcaatggaatggatttcagcagaattaaaaagaaataatctggattggggcagtttaacagaccaagaatgtagacaaatggcgaaattagcaatgactttcctagc

SEQ ID NO: 1351 - DNA, 906 bp, Listeria monocytogenes-4B
  misc-feature (1)..(end): n can be any nucleotide a,g,c or t/u
tcgaagcaggaatgaacgttgtacgtcttaatttctggcacggagattttgaagagcacggtgcgcgtattgtaaatatccgcgaagcatcgaaaaaaactggtaaacaagtggctatcttacttgatacaaaaggtccagaaatccgtacaaacgacatggtcggcggaaaattagaattccaaacaggtgatgttgtacgtgtttctatgactcctgttgaaggaacaaaagaaaaattctccgtgacttacggcgaactttacgatgatgtagaaattggttcttccattttacttgatgacggcttaatcggtcttgaagtaatcgaaaaagacgaagctaatcgcgaactagtaacaaaagtacttaacccaggtgtacttaaaaataaaaaaggtgttaacgtaccaaacgtttctatcaacctaccaggaatcacagaaaaagatgctgctgatatccgctttggtttagaacaaggtattgattttatcgctgcatactttcgtacgtcgtgctacagatgttcttgaaatcactaaaattctagaagagcacaatgcaactcacgtacaaatcattcctaaaatcgaaaaccaagaaggcgttgataatatcgacgaaatcgtacaaggatctcaaggcctaatggttgctcgtggggacctcggtgttgcaattccagctgcagaagctccgattgtncacaaagaacttatcagaaaatgcatagactcggaaacctgtgctaccgcgcacaaatgcttgattgatgcctcgtacccacgtgcaactcgtgctgaagcaagtgacgcagcgaatgccgagcttgatggaacagatgccgctatgccgaccggcgaaacagccgctggggatgatccagaaaagaaaaaaaaataa

SEQ ID NO: 1352 - DNA, 712 bp, Listeria monocytogenes-4B
  misc-feature (1)..(end): n can be any nucleotide a,g,c or t/u
gaccacttgttggaggatttttagtagaccaactttcatggcattggattttcttcatcaatgtcccaatcggtattttaacaatcctacttattttgctttatttacgcgaaaaagtggaacatgtcaaactaccaattgactatttaggtgcctcgttctttacggtggctctgcttggattattatttgcgttacagcgagccggggaatcactcaactggacagaaccgctcgtcgttattctttttgccgtttcgattgagttatttattgctttttattttgtcgaaaaacgtgcaaaagatccgattatgccatttgtattatttaaaaacccaacggtgttaattgggaacttaattggtttcttgattagcgccttcctaattggaattaacgcgtctcttccactgcgggcccccggaatgctcgggcncggtgctcccattgccggctccatgctcgccccgctccccccttcctggatcctcggcccctccctccccccgccccctccccctgccccctcgcccctttccccccccccctcgccctccccccctcctccccctccctctccctctccctccctcctccccccctccttttcccctcttcccccctttcccncttctcccttcccttccttcccccctccccgcccccttntttctcccctcccctataacaaaacacaaaaaacaaaaaa

SEQ ID NO: 1353 - DNA, 730 bp, Listeria monocytogenes-4B
  misc-feature (1)..(end): n can be any nucleotide a,g,c or t/u
ttgatcaccaattgttgcaaatacttcgccccatgaaccacagggattaaagccataagcatgtatttttagcaagccatcttttgttggaaaaaagagagcttcgtatttacctggtttagtcatatccggtggccccttccgcattgaagtaatcatttctaactgaaaatgattatcattattaaaactatcttatagtattctacataaaagtgcaaggttttttaggtatattttcagacattttgcttttcttcctttttaagctataatggaatgaaatcacgaagcttactcccacctgattttcacgggattttcttataaagaaaggtgacgaaaatgacaaaatctattcgaccagaattacgcgatattcaagtaagtggtatcagaacttttaatacacgagtgacgggtattcctgatatgatccgtttaacacttggcgaacctgactttccaacgcctgagcatgtcaaacaagcggccatttcagcaatagaagataatttcaccaactatacacccaatgccgggatgccagaattactcgaagcagcttccacttattttcatgaaaaatatgacttgtcctatagtataaagaaattatcgttacggtcggcgctacagaggctatctccgttgcctntgcaacgantttggagcctgaggatgaagttatcttatcagaccctatttatccaggttacgagcctctatt

SEQ ID NO: 1354 - DNA, 857 bp, Listeria monocytogenes-4B
  misc-feature (1)..(end): n can be any nucleotide a,g,c or t/u
tgcgctggaaagtatgatggaccgtggtgttactggtctggatgttgtgaaagcgttatctgctggcggattcgatgatgttgctgaaagtgtactaaatatgttgaaacaacgtgtatctggggacttccttcatacatctgccatcattgataaacactggaatgtcattagttccgtcaatgaccctcatgattatgcaggtccntggaaccctggttactcgcttagagggctgaacgctgcggagaaattaaaagatattgctgttgcagttgatgcaaacgaattagaataagctacttcccattttttataaaggaggattaagagacatggttgaaattaacgaaaaagtactccgcggaattatctcggaagtactagatgaattacagctaaaagaagataaagtttctttccaaaaagaacagccaagtgttgcagtttcggatgaaagctttttaacagaagttggggacgcggagccgggtagacaaaaagatgaagttgttattgcggtcgcgccagcttttggtaaatatcaaacaaaaaatattgtcggtgttccacataaacaaattttacgagaagtgattgcaggtattgaagaagaagggttaaaagcacgtgtggttcgtgtattccgttcttctgacgtagctttcgttgcagtagaaggcgacaaattaagtggttctggcatttgtatcggcattcagtcgcgcggtacagcattaatccaccaaaaagatttacaaccactttctaacttagagctattcccgcaagcgccattaattacgctagaaacataccgagcaattggtaaaaacgcggcgaaatatgccaaaggt

SEQ ID NO: 1355 - DNA, 737 bp, Listeria monocytogenes-4B
gaatgtaaaccgtgcgctggaaagatgattagatgacttttttcctgaaagaaattaccaccggttgatgaacgcttggtaacaattgcagcccatattgatgatgacgtaaccgaggaagaaatgcgggatattttagcttatatagagatgaagaaaaaactccatcgcgggatgtgattttattgtacgaaaaatcgtcattaaataccatgatgaggtaacaatcagagaagaaaaaatgccttacaaattgccaggtctttatttaaatgggacgatttttattagtaaggatcaatcttccattgaaaaaggctgtgttttagtagaagaattgatgcattacaaatacactgtaggtaacatcactaaacaggaaacaattatggataaaaaacaagaaatttttgctcgtcgtaaaggttatgaggaactaataccgcttgatgacatcattgcttgtttttatctaggcttacgagaatattttgaaggtagccggagtttttagaggtaacagaagaatttttgcgccatacagttactcattacgcagaaaaaatggtccgatgtatgattatggtggatatttcattaattctggcaattccattgatgtttacacgaagtcttgaaagactctcctatctatggagggtctctttttggttgatttctctcagggaagaaaagtagtcttattgataaaccctaaattgtgctaagaggacttt

SEQ ID NO: 1356 - DNA, 753 bp, Listeria monocytogenes-4B
agggccgacatgtgctggaaatttcaatttccaaaagactttttatggggaggagctgtcgcagccaaccaagcagaaggcgcatttaaagtagatggaaaaggaattagtttagcagatttgcacaaatatcataaagggaaaacaaatgatgaaatcagtgaggaacaacataaaggagtaagtttggctgatatcaaagcaagtatggaagacaaagtgaactattatccgaaacgccacggtatcgacttttatcacacgtatccagaagatttggctttgcttgctgaaatgggctttaaaacatttcgaacttcgctggactggacacggatttttccaactggcgaagaaacagaaccaaatgaagcgggattaaaatattatgaccaattaattgataaaattatcgaacttggcatggagccaattattacgattttacattacgaaacgccggtggaaattgtcttaaatcacggcggttggcataatcgtaaagttattgatttatttgagaagttcgggcaaacggaacttgatcgctgccataaaaaagtaaaatcttggattatcattaaccacgttgatttaattgtattggccaaccattgtagcttttctggttgtcgtctttcgaggccgttgattcttgtctcgtccgcttcgttctcccgctctcgtgttgcgtatgggtcggcgcgcccgttcgctgagtagtcttgtctctcgagaatcaataaacaaaca

SEQ ID NO: 1357 - DNA, 897 bp, Listeria monocytogenes-4B
tattgctaattcatagtgattatacattattttttctaaaaatcggttctccttcacaaaaaaagccttctaattgtgaacattttgtgacaattgcaattcttaaacaacctaattaaaacaggcttagataattatctaagcctgttttttctattttcgtttcagcagaagaccacttaatgacaaggctattaggattactcctaagccagcaaaactatttgtatctcctgttttaggaagacttttagttattcttatctgggtcgtttttggactatcctcgctgttttctgatttcttaggcgtaactggtactgctggttttgttggtggcacagttggttcgtatggtactggtggtaacggagtaggcggtattggtgttggtggcactggtgttggtggtactggtgttggcggtactggtgttggcggtactaatgtgttttcttttgttacttttaccggctggtcagtctcaccagcgatgatttcaaaaacaactggcgtcgtatcaagttcatatccaattggggcttttgtttcgacaaattggtatgtacctggtactaaatcagttacgtttaaaacgccattttcatccgtagttaaaccagtttgtaatgtgtttccttctttattttgtaattcgaatgttgctccggctagagttgctttggttgctgagtctagctttgttagttccacggagccaacttctagtgtgttttcttttgttacttttactatttgatctgtctcgcttgcgatgatttcaaacttactggactgttgtctaacttgtaccctgttggagcactcgtttccataattggtaactgccgggtcctttatcagttacttttagaaccctctttcatctgcagaaaa

SEQ ID NO: 1358 - DNA, 696 bp, Listeria monocytogenes-4B
tcaagcggtatcgcacatagctcagctgttagcagaattatttctaaattaaagcaagagaaagttatcgtgtataaaaattcatgcttttatgtacaaaatcttgattatctcaaaagatatgctcctaaattagatgaatggttttatttagcatgtcctgctacttggggaaaattaaattaaatcaaaaaacaggatgtctcaatgaggcatcctgttttatattttattcgaataaagaacttacagaagcattttcatgaacgcgaacgattgcttcgccaagaagagctgcaacagataattgttccattttgtcaatccatttttcttctggaagagcgatggagtttgtaacaactaatttttcgattggcgattcttcaatacgtttcatagcaggacctgaaagaactgggtgcgaacaacatgcgtaaacttttgttgcgcctgcttcacgcaatgctttagcagcaagtgtgattgttccagctgtatcaataatatcatcaataatgatacaaactttcccttctacattaccaacgatgttcattacttcagctacgtttggacgcggacgacgcttatcaataatagcaatcggcgctttcaaacggtcagccattttacgagctcgagtaactccaccatggtcaggggaaactactactagatcatcacctaaatgac

SEQ ID NO: 1359 - DNA, 701 bp, Listeria monocytogenes-4B
actaagatacttttagctagtaatctaatatttttttctattgcaaactgccaattagaaaccattagaaatcgataaaatttggcgataataccttttccactactttcgacgagatgattgatcaaaattaatatcgctgtatttagaataagcccctgtgacacagtgatagccttcagcaaaaactggacaaagccgtgtaacatgagataatagaaaaaaagaattttgttaggggcgaataaaatgaagaaaatcggctttattggcgcaggtaatatgggaactgcgatgattcggggcttagcacaagcgaatttagataacagcgaagcaatcattgttggtggtcgaaatctcgaaaaattaaaaccactggaagcggcatttactggcctgcaaataacaaccgataccgaaaaactcgtagaacaagcagatattattattttagcggtgaaaccttacactatcccagaaattttaacgtcggtaaaagagcagctaacacctgataaaattgttatttctgtagcagctggcgtaactatccaagatttagaagaactcacttccgcaaaaacaaaaattgttcgtgtgatgccaaatacaccagcgcttgtcggtgaagcaatgtcatctatttcgcctaacataaacgtatcatctgaagaattaatgaagttacagctattttt

SEQ ID NO: 1360 - DNA, 524 bp, Listeria monocytogenes-4B
ggtctttaacacctattttatatggtgggaatagttccttacccgaagctggaccacaattaaaacaatctagtggtggtggattcgccgatgcatctgttgatagtgatttaattagctatttacagaaaaacaataccggagaaacctacttatttgggacaacagatgcaacaacagcaggtccttatattattaaaacgaaagaagctgttatggcacttggtggtttcaatggaacagatccaactctaactgtaaaacaattaaaacaaatgattcaagccggtgaaataaaatatttctatctcccatcaaatagtaaagcttctgactcagatgtggtaaaatggaataaagaaaacggtacagaaattgatagttcgaagtggagtagctccggttctacggatgatgacaccacttctagcgcttcttttaatatgcaaggtggcgctcaaggaatgaatggcactggtacaggaacactatatcaattaaaataaagaagaaatgttaaaatc

SEQ ID NO: 1361 - DNA, 731 bp, Listeria monocytogenes-4B
caacgtccatcagtgtgctggaaagtttgggaaatccaccttcttgcaaagtttagtgatggatttagctcgtcaacataatccagagcagttgcatgtttatttgttggattttggtacgaatgggcttttgccactgatagatttaccgcatgttgcggatactatgatggtggatgaagttgagaaagtgcagaaatttttacgaatctcgcctaaatgaaataaaaacaaggaagaagcttcttagccaatatcgtgttgccaatatagagcagtatgaaagagcaagtggaaaagaactacctaatattattattgttctagataattacgacgctgtaaaagatgcaggcttaggggatgattttgaaaaaatcattactcaaattactcgtgaaggtgcatccattggaatgtttatgattataagcgcatcaaggcatatgagtttgagaacacaaatggctactaatattaaacaaatgattgctttatatctaattgataaaaatgatatatcatcaactgttggtcgaacggatacaccacttgaagagtatccaggaagagcgcttgtaaaattagaaacaggtacaacatttcaaacgacgttaccatcgcaaggagaagaaacaattcatcagattgaaggtattcggaatgaaccaaaattaatgagagaaggttggcaaggagaacttccagagagtgtaccaatgataccagac

SEQ ID NO: 1362 - DNA, 1067 bp, Listeria monocytogenes-4B
gataactagtataaaatcatctgagtatcatctatatatcccagcagaattagtcgtcgactatctcttttaacttcaaatcaaattccgatgcatatatatttgcaaatactgcgctgatagcacttccttgaggtataccaaatttatttttattacataaagttttgttatttttttgaaactctctaaatttagaaatattttcaaaataactttttttattagagcgtttgatactttcatcacttccatattcctcattcaaaaaacttttttcataatatccatatttagttattgatcgaaacacattaaaccaatcttttgacagccttggctgatttaacacttctgctaaatgctttttaagtaattcgtgatttattttatcaaagtaattagtaaaatctcccaccaatatataagcttccttataattaaccatttgattaatgatttcagcagcaaaatcaatattagatttccccactttattgtttcgatatgcagatacacaatcatctatacctttttccatacaaaatttattgtaaaaatccttgttcaacacttctgcataatatttataaataaagttatccatatgtccagcatacataattactctatctttagtcttaattggccggttgtcaaactctggatttttttcttctattcttttttcaaaagatgatacataacgtattaacggtaaaaagctatgatttccaatcttcgaatgatcagttacatagctttctacattttcaattttaactctataatcaaagtgtaaataattttttgttttatattttgttgaatctaattttgttgaatctagttttgttgaatctagcatcttaaattcacgccttttttttggagcggaaagggacaacaagtccgacacttaattaaaatccctttctgcgtctctttaggtcaatattcccatacttatgaccattgaatatatgagagaagtcgaatgatttaactattatgttataatatagacgataacccgaaaggaaccacatgtatgaaacttataatta

SEQ ID NO: 1363 - DNA, 755 bp, Listeria monocytogenes-4B
  misc-feature (1)..(end): n can be any nucleotide a,g,c or t/u
tgctagctgctcgagcggccgacgtgtgctggaaagaactccctgatattattatgtgggatcgctatcaaacagctctttatgcaccaaaaggagtgcttgaaccgctagataaacttgtcaaagaagacaacgtgaagatggatgatttttatgaagaatcagtgaaagaaatgacctatagtgataaattatatggtttaccgttattgaatgataatcgaattgtgttttacaataaaaaattattacaagaagctggcgtaaaaccaccaactacgtgggatgaattagcaactgctgcgcaaaaaacaacgaaatgggatggaaataaaatgacgcaggcaggaatgtcacttcaagatgttggcttgtttaacttgtatttaatgcaagcaggtggcgaactagtgacttctgacaatgaagaaacggccttcaattcacaacaaggcttacaagtgctaaattattgggatgaaatgcacaatgatttaaaagtgtgccgacgcggcttggatgatgggtcggatgcttttgcagccgggaaagaagcgctgacgtgcagcggcgcgcgggctttgcgccgtcgtgctggggcgccccaccttgattatggcgtcctccacccacctcccggccccgctggccctcccggcccctccntggcccgctcttgctctcccctggcttcccgtgccgcccctccccgtcgccccctggcccccttcacaggcaaaaacaaaaaaaaaaaa

SEQ ID NO: 1364 - DNA, 862 bp, Listeria monocytogenes-4B
aagctcagctagcagagttgaaactcgagacagtgaaaaaagaaacaaactaaaaaaagaaggtgagcgcaaatgctcaccttcttttggttttaaaaatcatcacttaattcttgaatgttttcaacgtgtactttattaactaataaccctcgattggaatcattggaccagaatgggccgtccaattctttcgcttcactggagctgattttatttttattataaaaagtggcttccacattgtagcgattccctttttttactgcatcccaactctcttcagaaagtggtagtgtaattgatttgtttccagcgccatcaattttgccagtgatggtattgttttttgatttttggtccaccacgaaattaaaggtaacgtctacttttgacgaagcgtgttgataaagataataaccgccaaaaagcaggatagctactagaacggtgaaaatggggattttacgcatagggaatttcgcgcctccttatctgttctaaacgttcttcctttttcattataagtgtaaaagctaagaagcggaaggggtaaacgccatttctcattgattttttagaatagaggccccatttttaattaattcaccattttaactattcattttgatggtttatcttgtaatgcgtcgattccggtttcgccagtgctgattttaacgacttctgcaagtgagtaaataaatacttttccgtcgccgggttcgccagtacgtagcgtttctttaacgacacgaagtacatcctcaaccgggacagtggaaacaacgatttcaattttcattcgctcgtgatatcgctctctttttgtacccgataagtcgataatctttcaccaaca

SEQ ID NO: 1365 - DNA, 1242 bp, Listeria monocytogenes-4B
tatgccactcgcttgcgcaaataaaagtttacttctactggatctacattaataactgcaaaaatagcaataatgagtgctaaaataatccccgcaattacttgccactggactttattttctttcatgttttttctcctccttgcacaattatcttattatttacccgtttctaggctattaaaaacgaccgaatctctttttatgaaattcggccgttcgtttttatacgacaggttgcccattattacgtggttttttctttttaactgtgctaattgggcctttttttcgtagttgtcgtgctttgaatacgtaccacaattgcattgccataaagatggaggagaatacactcgaaacaagtccaacaagtaaggcgatggagaagttcagaatagactcactaccaaatagtacaagtgccagtacggtgaaaataaccgttaaaatggtattaattgaacgagtgaatgtttggcgtaatgctttattaaccacgatcgcaatttcttctttcgttttgaaacgttgcatcttcatactaatatcccgtatccggtcggcggtgactatcgtgtcattaatggaataaccgataaccgtcagcaccgcggcaatgaaggttaagtcaacctccagccttgttacactgaagaatatgaagatgataaatgcgtcgaatagtaaggacagaatcgccgcattacccatataaaattcaaaccggactgcaatataaagtacaatcagcacagacgccacaccgagtgcccagaagccatttttggcaagttctttaccgacagttggtgaaacggtactaatgcttggttcgtgcttatacttgtcctcaaaatagcggttaaatttagctgcatggttgtgtgataatgcgcctttgtgagaaacaccggatgttttacaccctgctccttggaaaacggtgtggtcgccgcggggtgtccgtcgcgttgtgcgccttcctttgttcccctctttgttcccgcttgtccgcctgtctccccgccctccttgtctgttctctcgcgcgccgtctccttttccccctcccctcgtctgttttttccccctcgccgccccccccccccttcgcctccccttcctccgtcccccctcttccctggccccgctcttcctccttcttcctctccgcttccgcgtttgttcctttttgccccgtctctcgccggcggaaccacataatcccccacttccccg

SEQ ID NO: 1366 - DNA, 840 bp, Listeria monocytogenes-4B
  misc-feature (1)..(end): n can be any nucleotide a,g,c or t/u
catatcaagtactttattgctattgtagaaacggtggaaggaagacgctaaatcatttaagtagcgaacgatacggtgtggcgctctttttgtagcagcttccgcaacaacatccgcgaactcacctaacacttttaataaatcatattctgcttctgtttgcagtaagctcatgtctgcgtcttttgttacctctagaccttgttctttaccagaacgtaaaatgctagaaattctggcgtgcgcatattgtacataataaactggattatcattagatgtagatttcgctaagctcatatcaaagttcatatgtgtatctgaactacgcattgcaaagaaatatcttgttgcatccagtccaacttcttcaattaagtcacgcattgtaactgatttaccagtacgtttactcattttaacttgaacaccgtcttcaaataagtgaactagctgaatgatttctacttctaattgatttggtgagtagccaagcgcttcaattgcagcacgcatacgaggaatatagccgtggtgatcagctccccaaatatcaattaacacatcaaagccacgctctaatttgtttaagtggaacgcgatatctggtaagaaatacgtataactaccatctgatttgattaaaacacaggtcttctgtcatcttcaaaatcagtcgttcttacccatgtcgcgccatcttgctcataaatatagccattttcgcgtaaacgttcaaaccatggtaatactcaattttctacgtcggtccagaacncggcgngccggtntaccgancaagncnggnnagtaacctgatgcnttttcacagtcaatctc

SEQ ID NO: 1367 - DNA, 1235 bp, Listeria monocytogenes-4B
aagcccagccagaaccaaaacgtgctgcagcagctgcattgaatttttctttaaattcgtcaaaagtaccgaattcgctttcgattgctgcttttaaattaccagttggagcgccgccaccatttgggctaagaatagaccagaataatgtatggttagcatgaccgccaccgtggttacggacagcgccgcgaatatcttcaggaacgctatctaagttagctactaattcttccacagatttgcttgcaagttcaggatgaccagcaaccgcttcatttagttttgtcacataagtattgtggtgctttgtatagtgaatttccatagtttctttatcaaaattcggctccaaagcatcataagtataaggtaatttaggtaattcgtaagtcattaaaaattcctccttgtattgtttttacgtgaaaagaaatgacgtataaggcaaaagtttcatgtcctatttcaatagaactactatcaaccttaaaaacagtttcttcttacaccatttagcctaccatgctcctgaaatgcttgcaatttttctgctcagtgatgtttcaacattgattttgcaaccatttcgagctatgattaagtttaggtggaaaaagtacgttcttttgcacatacatgtatctttttccctgaaactcagaagttaaaccattaggcgaggtggggaaaaaagaatgaatgtttttaaacgctcctggaagagtccatgctcccctgtggttttttcctctgtttttactgatgttctgctgatcggtctcccgttcatgcgccggtgtttcgtgttgggtgtcgtctggcgttgcttcttttgttttctttttcccccccccctttttcgttccctcccctgtggttctctgtccttcgttgctttttttcttccctgtgcccgttttttcttccctgtttccccctgtcttccggcttctgtctgtctctctctgtggtgttgttttttgttttcccccgtgctgccttttttcggtcggtgcgtcgttgtctcgtcattgtgtttctccctcggggccccctttgggcgcctgtggcgcgccttcgttctctgctcttcttttttttttgtttcccgcttcgtcgttctttcttttctcgtcgtgttggccgctcggttcctcgccccctgtgtgtggtgcccggtgcgccgtcgtttgctcccccccctactttttataaaatataaaaaaaacaag

SEQ ID NO: 1368 - DNA, 956 bp, Listeria monocytogenes-4B
gagtaatagttgcataccaagacaaacgccaagaattggtttaccagcggtagcaatttcttttaatgttttatctaatccgcgtcgagtgagttcttgcatggcttctggataagcaccaactccgggcaaaataacaccatcagcttgagcgatttctgttttatcactagaaattttgttttgtaacccgataaaatcaagggctttactgatgcttttcgtatttcctgtatcgtagtcaataataacaatcatttacaggacccctttagttgaatttacacctttgatttctgggttaatcgtgattgcttcacgaagagcacgaccgaatgctttaaaaagtgcttcgattttatgatgcgtgtttttgccataaagaacgcggagatgaaggttcatttccgtgttaaaggcaactgcttggaaaaattcttccactagttctgtgtcaaaatcaccgagtttagggtttgttaattcggcgtcaaaaactaaataagaacgaccacttaaatctagtgcgcaaaagccaagtgattcgtccatcggtacataagcggagccgtaacgattaatgcttgctttatcagcaagtgcttcttttaaacaaagcccgagtgtgatgccgatgtcttctacggtgtgatgcgcatcgatatatgtatcaccatctgcttttacatttaaagttattcggctgtgtttggcgaaaagggtgagcatgtgatccaaaaatccgactccagtagaaataattgattctgcttgggaatctaggttaatggaaagctcaatagaagtttcagcagtaatgcgtgttttagtcgctgttctcatttagttttcctcctcaaaacgaatttgaatggctttggcatgggcgtctagaccttcttttttagcaagtaaaacgatagcatctttttcctttgcgagtgcttcttttgtat

SEQ ID NO: 1369 - DNA, 698 bp, Listeria monocytogenes-4B
  misc-feature (1)..(end): n can be any nucleotide a,g,c or t/u
aaatggatgatatagtagaagaaggagtacaacgcgtacaagaacttcctatggataaaattttcccgaaccaattccaaccacggacagtattcgatcaagataagattgatgaacttgctcgaactatccgaattcacggcgttattcagccgattgtggttagagaaatggaaccggattattatgaaatcattgcaggcgagcgtcgttttcgtgctgtgctttctttagaaatggaaaaaattccagcaattattcaaaatttagatgatgaagaagtagcagcgattgcgttaattgaaaacttgcaacgtgaagaattgacgccaattgaggaagcgaaagcgtatcggagtttactagacatgcaggacgtgacacaagaagcccttgcgcaacgtgttgggaaaagccagtctgccattgcaaacaaaatgcgacttctaaaactaccagaaactgtccaagaagccgttcttaacaaacaaatttcagagcgccatgctcgttcgttactcgcattagaaacagaagaacagcaagtcgcaattttagccgaaatagctgaaaatcactggaacgtcaaacaaaccgaagcaagaattcaagaaattntgggcgtgaaaaaaccagtagctactaaaaaaaccaaaccaaaacgccaagctattagtcgtgacgtgcgtatcgctatg

SEQ ID NO: 1370 - DNA, 725 bp, Listeria monocytogenes-4B
aagaagtagagattattagtttccgcgatttataagagcatgggcctgtcaaaggatgtttatttggcaggcttttcgttaggttaaaataataaatgttgtcaattttatagaaaacgttttataatagagaaaatacggacaaaatacgtgaaatagctttttaatatacggaattttatcaaagggagagagattatgaagattcgtcgcagtgaacgattaattgatatgacgcagtttctattatcgcatccgcgaaagttagtgccgcttacgatgtttgctgaacgttatggctcagctaagtcttctattagtgaagatttggttatcataaagaaaacatttgaagacagagggattggtacgctcgaaactgttccgggtgctgctggtggtgtgcaatatatttcgatagcgggaaatgacgatgtgctggattttgtgcataccgctctgtctacaattgcggagcccacccgtttgcttccagggggctatctgcgcttatctgatttacttggtcaaccagccccgcctctacccttcggccataccctaccctcgccctcccatcccccgccctccttcgttattctgactgtcgtcactacaggggctccttttgtcccttccggtgttgcctttcgcccttgcgcccctttgtttgtccttttctctcttttctctcctccctcacgacccaatacaataaaccaaaa

SEQ ID NO: 1371 - DNA, 684 bp, Listeria monocytogenes-4B
atgaatgttctccttctgctcctaaagtctagaagccttgaattttatgtagtaacgatagaattcattctaccataaaagttaactgagtgaagtacatcggaagactgatttgtttttagtagcaattcgccccccaaaaaaagaaaaaccccagaatattttccagggtttagaatcaactattaaagtaattcccatcaacaacttcgatttgtttttctttcatgttcacattttttatttttacaagagatacgtaatcatccactaagcgctcttccgcatattcggattcaactaacacgccaattccaactaaatgcgcgttgaattcttctagcagatttttcataccattaattgttcctccagctttcataaagtcatccacaattactacattagagccttcagctaagcttcgtttggataattccattttttcgattcgtttggatgaacctgaaacatagttaatgcttacagttgagccttctgtcactttgctatcacgacgtacgataacaaaggggacacttaaatgttcagcaaccgcttgtgcaatcggaatccctttagtcgcaacagtcataatcgcatctattttttggttattgaatttcgttgctaaaattttaccaattgctttgagcgttactggttctccagtaaatcagataa

SEQ ID NO: 1372 - DNA, 885 bp, Listeria monocytogenes-4B
  misc-feature (1)..(end): n can be any nucleotide a,g,c or t/u
tcccgatatcccaggatcagagtcagtgctattcatggggtagaagaatggtgactgtcaaagtgttaaactaaattcgtataaaaacgaggctgactcatagggcctcgttttttctttgtccaaaatgtggtatgatatatttacttattttataaaaaaggatgtagtaattatgaacgggaagcctgtaatacatgaatttatagtcgtagaaggacgggacgatacaacggcaattaatcgttcagttattgctgataccattgagactaatggatctgccctttcacaagaaacaatagaaaagattagacatgcacaagaacttcgcggcgttattatttttacagatccagattttcccggtgaaaaaatccgaaaacaaattgactcagcggtacctggctgtaaacacgcttttatcaatcgccaagacgctttgccaaaagcaggtcgtggccttggagtggaacatgccagtagcgctaatattcgggaagcactcgaaaacttccatacaagtgggacgcctgcagaaaaacaatttatctccaaagatattcttattcatctcggtcttcttggaggagcgggagcgaaagaacgccgagaaaaaatcggtaatatactaaaaattggctatacaaacggaaaacaactgcaaaccagactagaatcatttgcaatcagtgaagaccagttagtagccgcgtgccaaaagattatgcaggaggaagaaaatgagtaaagatattgcaactcccggaagaacgacagaaatcctaaagaagtatggtttcttatttaaaaaaagtctgggtcaaaactttntaatcgacagtaacattntgacacggattacagatacagccgaaataacaa

SEQ ID NO: 1373 - DNA, 1145 bp, Listeria monocytogenes-4B
ggtcaatcctttgcacataatctttgccttcaggccaaccaaatccaatattttcaccttcgcttttgccgtgcgctctagcatcaggcattaaaacgttgtaaccaaatttttcatgatacattcgagcaagacctgccatttcgactttaccgcttttaccgcgtaaccgtgggctaaaatgatggttgtgttagatggtttatctgctgctaaataagtagcaacaagtttcagatcgtctgctgaggtttctgtccattgcgtgagattttgcttttccatccaagccacattttcttcccggtttttctttgctagtttggctgtggcagtggtttcgtctgttgttgcagtgtcattcatgctggaattgtcacgagctaaagcataactatacaagtaaaaacttgcgcaaatagtaataatgacaagtaaaccaacgataatcgaactagaaataattaaaatctttttcattgtttgctcctttttttatgcagattacatggattccagttcttcgcttatttgttcccattcttccattaatttctctccgtcagcttttacggcgtctagctcttgagtgatttcaagggctttttcatggtcttggaaaacttctgggttcgttaattgaagttcaagctcggcaatctttttgtccgttgcttccatggatttttctacttcttctagtttgcgttttctttggcgaagaagtttttgttgttctttttcttcttgatagtttaattttcgaacagaggaggtcgcttccacttgttcgccttttttgcgtcgatcctcggcatcaagtcgtgccagttctttttcttctgctaatttttcttgataataatcgtaatctcctaggaaaacggtcgctttttcgggcgctagttcgacgattttagaagcaattcggttaataaaatagcggtcatgggaaacgaagagaatcgtgccttcaaaatcaattaaagctgcttctaaaacttctttactttcaatatctaaatggttggtcggttcatcgagaataaggacattggcttcaagtaaagtgagcttagcaagggcaagtcgcgctttttcgccaccacttaaagactggacattttttaatacatcatcatctg

SEQ ID NO: 1374 - DNA, 1278 bp, Listeria monocytogenes-4B
  misc-feature (1)..(end): n can be any nucleotide a,g,c or t/u
aagttcagtcttacttgtaaaattcattatttaccaagcgatggtcgtactgaactttttagttatcttgatttttggtattcattatttaatgactggcgtgacacaattgaaattccttgttttactagggtttggtgtgcatgttattgtcatcgctgcgcttattttagtaggaagaagccaaaagttcacgacaaaattagtgcacgttttacttataccaacacgtttatttatgaaaaaagaaaaagtttctaatttaagaaatacattagatgagaaaattattactttccatgaagaaagtagccgaattggtaaagattggaaattaattgttcgttgttgtttttatacaacgttgcaactttggatttacttctcaatccctttctttattttacaagcgattggtgtgacaggaattggcctgtatatggcgattacgtatcatgcttttattattatgtttgcgacagtcatgccaacgccgggtggggctgggggagctgagtatactttcactttgttattcggtatgttactcggtccggcaaaactcctaatggcacttgttttatggcggattattacttattatagctgcatcgttttcggggcgggcgcattattaataaaagatacagcttcgaaaaaaattaaaccgcgtatcaaagcactcgcaaaagcaccagccaaaaatataccacaatgattaaaagcttgggacgtaatgttcccagctttttagggaaagcatttcttgcaaagtaaaacaaattaatggataatgaaacagtattacatgcttcaagaaagaagggtacatttgtgacggataaattgattattcgaggcggtaaaaaattagctggtactttgcaagtggatggcgcaaaaaatagtgcggtggcattaattccagcggcaattttggcggagtctgaagtggttttagaaggtttaccagatatttcggatgttcacacactttataatattttagaagagcttggcggcacggttcgctatgataataaaacagcagttattgatccaacagatatgatttctatgccacttccatcgggaaatgtgaagaaattacgtgcgtcctattatttaatgggtgcaatgttaggccgatttaaaaaactgtttttggactaccatgcggatgatacttacggccacttaccatcaaccanactatctaaggttttagtgcttcgcgcaccacaactacaaacgagcaatgtgcaataaatgagaaag

SEQ ID NO: 1375 - DNA, 739 bp, Listeria monocytogenes-4B
aaaacgaagaaataatctttgtttgggtcactataatcgatatcactataaacatgacgaccaaatttggtaatgtagtaaaattctccgccttcatttttctcgaagaattcatctagagaatcgtaataggaaagttttacgttatcccagtaatcaagtccagcacgttttaacattttatcatctgtcgaaaaaccaagtggacggattaaatgtaagtaagtatccgtcccggcacatgttctggagatatttccggtattcgctgggatttctggttgatatagtacgatatggtttggcattgcttttcacctggtttctattaatttgttatggctgttaattcttgtaatacttgttcatcttgttcggtttgaagtgcttgctcgacagctttttcggcatcgcttccaccgatttttcttagcgcccagccagccgttcctcgaatgactggtcttggatcgttttgtaaacagtcaattaagtctggtacagctgttttatctttataccgcgctagaataatgatggcatttcgctgaatgggcttcttcccacgccacgaacccgccatatcgccaaattgttctttaaaagcgcgattggaaatgtgtaatagtggttttaattctggtcgaacaagctctggatccggctccatcttatcatgaaagtggaaatcatctttccagcacacgtcggccgccaagcagcagcaagtacctaagag

SEQ ID NO: 1376 - DNA, 697 bp, Listeria monocytogenes-4B
tatacgacgattttccctgaactaaataatacgttgattacatcggacgaatatgagccgaatttcaacctttacaaaatcattgaagacaaagcatcgattttaatggatcaaggtgtggaagatgatgatattaagaaatttatcaagatggatatcgatattcaccttaacagcttttacaataagtttaaaaatacgatccacaatcgcgaaaatatcttaaaaatcgtcaatgaagagatcctgaattttgcggaaggtgttgaactccgaattgaacatcagcttggtaaaaagttaaacgagcgcttcttgcttgcatttagccttcaccttacctcttttattaaacgaattgaaagtaacaaaccattaaaatatacgaatatcgaaaatgtggtcaatgatcaaccggaagcctatgaattatcacgggaaattaaggatgatattgaggctactttccacatccgggttcctaatatggaagtcatgtatttaacactactcattagttcccttttaaaagaacaagaaaatgctcgtgtcgccgtactcgtcgcaacgcatgggaataatacagcgagtagcatggttagtgttgcgaaaaaactactcggtgaaggactcgtggaaggaatcgatatgcctcttgatcaaagtccgaaaatcgtgcttgataaattgaccgagc

SEQ ID NO: 1377 - DNA, 719 bp, Listeria monocytogenes-4B
  misc-feature (1)..(end): n can be any nucleotide a,g,c or t/u
cgacagggtgctggaccgaataagccgagccaggatgaaattcaacttcgcattggtaagcttcttcccagcctttcgctagctgtttcaaacgagtccaaacaatctccattgtttcaggggaaagcgttcgaatggttccatctaaataagcagtttccgcaatgacattttgaatttcttcttcttgaatgcggccaatcgtaataactgcactatccattgtttctttattccgacttataatcgtttgcatttgcccaacaaacgcactttctgcgacaaccatatcattcgccaaatgaggatacgccgcgtgtccaccttttcctttaaacgaaataaaaagttccgatgtattcgcaaaaagtaaacctggcttaattgcaatttctccgactttgtattctggtgcgatatgaagcccataaatgctatccggtcgccactcggcaaattgacgggttcccatgatgggttgggcgcgacctggacgttcttgagagggctgcggaaccgcgaggcggttttgtccccgctgcgtcgctgtcccaccgcgccgcgcccgccggcccgggtggtcgtccggccgccccccccccgccccgctcgccgccgggcgaggtgcacacgcgccggctcccccgctcgggctcgctcgcggtgttccgcgcgcgcgccgtccccgcccccgcccaaaagccaagtncccacgccca

SEQ ID NO: 1378 - DNA, 961 bp, Listeria monocytogenes-4B
accagagcattacggaacgcttacgtatgttgatgatgccggagtttggcatgaggagaaagtaatctctgaggttggcgactacggccgcgtttatgatggtttgtatgatgcaattattaacgggaaaccaaaacaagtaactgacgaagaaaccttgctacaaatggagattttagaaaaaggcgtcgaagcttgtaaataatgaaaaattgtccgcgggagcaagcttgcggacaatttttttggataaaaatgattgatttcgttcatataaacaaccaaaatagccctaaaaatgaactttttgcataatacacccataatattgaatgaagtcgttcagcgtgatatagtgtaatcaaacaagtgaagcgcttactttgttgagagaggatgtggattatgaatatatcgaatttaattaatgaagaccgaattatttttgataatcgtattcaaacaaaacaattattatttgaaaaagtagcataagtactaagtgaagaagggtctataacaaatccaaaaaaatttatacgtgacttatataaacgagaagaagaaacttctactggaattgaagatggttttggcatccctcatgcccaaagtaaatatgtcaaacaaccatcgcttgattctgatcatcctggccttatcaatgatcatcccggatccgaccactctccccctgcctgacatctccccctccgaccacccctattataaccccttctccctcccccaccctcccccctttctctgtcatcccccccctcccccgtctgctcccctcctcccgcgtcgactttccactccccagtcacatcggcggctcccacccctcgtcacatcccccaagactgtgcgcgcccccggagagctcgcaccaaccggagctgccaagtacccgcttcccccatgatatcctctcctcacccctcgccccccccccccc

SEQ ID NO: 1379 - DNA, 1385 bp, Listeria monocytogenes-4B
ataggggggggggggggtaggggggagaagacggggactctgtggaaatgggaaaggcggggaaggcggggttgggagggaaaggggagagggagagtggggggtcgggaaagggcggacggggtggagggggggggggtggaggaaggggggggtggggggggacggggggggggataggggggggaagtggcggagggaagggggagaggggggggggagaggggggggagggagggagggggggggggggagaggggaaagaggggggaagggggggaagggggagggacaagcgggggggaagggcagggggggggggaggaaaggggggacggggggggggggagggaagggacatgcggaggcaaatggactggagggggggaggggtccagcggggggggggggggggggtaaggaaggagctgcggggggggagatgcgtgggagggggggggagggggagtgagggaggatatggggggggatcattcgcggaggaggggaaaggggacatcacttgagcaggcaagaatgagggggagtagtaggaggagcattacatattaatccaaagagtgtgggaggatacgttcttggcgagcatggtgaatcacaattcgttgcttggtctgcggtgaaaattggcggggtaagcatcacggattataaaacaacaacaccacttgatttaccagcattaaaagatgcagttcgtggtggtggttggaatattttgatgggtaaaggctggacgagttttggaatagccacagctgcagcggggattgtcgatgcgattttaacagatgctaaacaagtttttccattagctgtattttccgaaaaaacaaatgcgtacatcggacaaccagcaatcattggtgcaaatggcgtgatacatcttttataaccgaaactaactacagatgaagcggctaattttaatgcatgagctgaagtcattaaaacacgtgtaaaagtgatgcgaataattaggattgccatggataaaatacgggaataaaatggcgatcgctcgtgaaatggggaagacacatgggggtccatacaacggagatggggatgagtggaaagggctccccccccgggtttatcactccgcgtccccctcacccgccgcgggctcgctttcccccgccccgctgccgccgcgagagttcgtcgcctcccccattcctagccccccccccgctcccctcgcaccccgccttttgcgtggccgccgccttttcccgcttacacgcccgtgaggccgccccccccgcgatcccccctctaccgtgtgcccctcatccgcccgcggcctcccgccatcgcctccttccccactccgcgccctcatactcctcttattaatc

SEQ ID NO: 1380 - DNA, 715 bp, Listeria monocytogenes-4B
ggcaataactcgctgtttattacgaatcggataaactttttggcgaattaatacgttttcttgtgtttttgcaagtagatcgttagagttcatacctgtttccaatgttctaagtacacctggctcattagaccttagggctgtttctccgactactttgtttttgtaaagtgatttggttgtttttggtggtgtatgatgaataacaagtgcttcactagttagcttattgtatacatgaataaatacatgtacatgttgatacatgggtgaaacacttaacgactaggatgggtgaatcaatccttggatatccggctcgcatgcatctgcccccctccggcgcatccctcctctggtccccccccatccccatcgccacgcgtcggtctatttattattacccgcttctctgcggccgctcgtctcagtcccgtcgctgcccctcccccaccccccgcccccgcccccctcaatccacaccccacctctgtacatttttccgcccgccctattctccgcgcgtgtcaaacgagggatagactcggggagctctccactcttctgttagatccccacacccccccgcggcccgacggtgccgggtcgcgcgctctacccttttttctgccgcgatatgcccatttcccaatatcactccaaagtggctttacacgagagcggggcatccgaagtcgagcgtccccgccgaatt

SEQ ID NO: 1381 - DNA, 631 bp, Listeria monocytogenes-4B
  misc-feature (1)..(end): n can be any nucleotide a,g,c or t/u
ggcattgaaatcacttcccaaacaatcgaacaaatggtagatcgtgttctagaatacccagaaaaaacacgcattcaaataatggctccgatcgtttctggtaaaaaaggaacccataagaaaactattgaggaaataaaaaaagaaggctatgttcgaattcgtgttgatggagaaatttatgatatcaatgacgaaattgaaatcgagaagaataaaaagcattctattgaaatcattattgatcgcattgtgattaaagaaggtatcaatactcgtttgtatgactccattgaagcggctcttcgtttagctgatggttatgcggttgttgatataatgggcgataaagaattattatttagtgaacactatgcgtgcccttattgtggtttttgcgttggcgaattagaaccaagaatgttctctttcaatagcccatttggcgcntggacaacccgtgatggacaaggcactaaacaagaagtcgatgtcgacacagttattccagatagaagtctgtctctaaatgaaggagctattattccttggcgcccaattagctcgcaatactatccacaaatgctagcttcggcttgtaaagagttcccaatagatatccacacccagt

SEQ ID NO: 1382 - DNA, 1277 bp, Listeria monocytogenes-4B
ccacgagtgtgctggaaaggaaaaacgttatctccataatacttctggtcacaaatacggcctcgtttatcctggtatcggttgggtcctttggaaagatgaaagctacctaccagaagaacttatttttaaagtcagctaccttggcggagaaatgccaaccatgcaaatcaatttctcccgcagtgcgagccacactcatcggggggtactacaatttcttacgctacggcttcgaaggctaccgcaccattcatcaaaaaacaagcgatgtagcacaataccttgcccatgcagtcgaacaaaccggctactttgacatttataacgacggctcccatttaccaatcgtctgctataaattaaaagacgacgctaacgtaaaatggacattatatgatttagcggaccgcctccaaatgcgcggctggcaagttcccgcatacccactaccaaaaaacttagaaaacatcatcatccaacgttacgtctgccgggctgacctcggtttcaacatggcagaagaattcatccaagatttccaagcctctattcaagaactaaacaacgctcacatcctcttccatgatacccaacaatccggcgtccacggcttcacacattaataaaaaggctagcctctcaaataggctagccttttttcatgttcttttattctaagcgactgaatcgccctttctacatctacaagatctctgtcaaaaaaagccaaggaaatcggaataatcataccatctaccgattgctttaattccatttcacagttcggatgacaaagcacaatcgctggctcacttgactacgataaaacctggttcaactgctgcaccgaatcaaacatcgcctcatgcaccgacaccttccccacaagatctcgctccacctgaaacttacgccactcgcacttaatccacttcgcggaacaaatgaaagtctgtcccccgctccgccgcctcccatcccccccccatcgcttcccactcccctttaccccatttcgttaacccaatttacgcccccctctccccctcccccttctccgttttacccccccccctcctcccccctccaccgcacccccccaccccgctacatccccacccccccatcacactgccacaaacccccccccgtcttactgtccccccttccctctcgccctccccaccccacaccaaacgtgcaaccacgaacacaacaaatctccacccccctacaaccaagcccctccaccccctcaccccccccccccgccc

SEQ ID NO: 1383 - DNA, 1142 bp, Listeria monocytogenes-4B
  misc-feature (1)..(end): n can be any nucleotide a,g,c or t/u
agttgcggagaaagcattaattaataccgaatttcaaatgccaattttacggaaaaaccggttggtggattctggtgcgaaagggttttattactttatcgccgggcttacaaatgcttattgtggtaaggcggtttctgaccccgttcgttttacggaagtagagcaaacagcggaacataggcatgttgaaacaagcgagccgaaatatcgttattgctcggaatttattatcaaacaagcgactatttcacatcaacatttacaggaaattctcgcagctaaaggggattccttagtaattgcaggtaatgagaaacaaataaaaatccatatccacacaaatgaaccaaaagaagttttaagcctcatggcagcatacggcgtgatgacgtatcaaaaagtagatgatatgcgtctgcaatatgaagtcacaaaaaagcctcgcgcaaagattgctatagtgaccgattcgatagccgatttaccagaagcatttttactggaacaccaagtacatgtattaccgatgaatattttagctggagaagagaattttcttgataaattgacgggtggcccggacatgatgcaagaaaaattaagaaaacaaacgaaaatgagtacagcccagccaacaatccgtacggtggatgccttgttatcttttttagaacacaaatatgaacatgtgcttgttatctccgttgcggcgaaattaagcggaacttatcaattaatcaaacagcggataaaagcgcgggagttgtcctcggactggatacgtgtaattgattctaaattaaattcggtcgcgcaaggaattttagtgaaacaagcagtagaactagtggaatcaggtaaatcatgggaatctatttatgccgaagtggaacaaatgattgagcggacctttatttatgtggcggttgcagatttgtcgccgatggtccaatctggcagaattgcacgagtgttaggaaagcttgcgcacaaatcatcactgtatgccattgcgagttcggacgagtccggtgctggccgtgcgtgggggtgtccccgnggtcctggccccgcgtcgaaccggtcgtgcgcggaatcccgggattgcgcgtggcggagcgtgccatgggacatgggga

SEQ ID NO: 1384 - DNA, 719 bp, Listeria monocytogenes-4B
ctatcgtccatcagtgtgctggaaaggtaaagtcgtaatatgctttttgaaatgcatggtaataacggtagtgtcgacggggatccgcctgcagcaatgcgttatacagaagctcgcctttctcctatatcagcagaacttttacgcgatattgaaaaggaaacagttgactttattcctaactttgatgatacatctagtgagccaactgttttaccagcacgttttccaaaccttttagtgaatggttctaccggtatctccgctggttatgcaacagatattccgccgcataatttaacagagatcatcgaagctgttattaaacgattagataacccactttccacaacggatgatattatgaaaattgtcaaaggtccatatttcccaaccggtgggattattcaagggattgatggtcttcgaaaagcttaccaaactggaaaaggacgcgttgccgttcgttctctaacagtaatgggagatcttcgtggcgggagaaaaccgctttcatttcgtgaacttccgtttgaagtttatcccgctgcttttgtccttcgcttgggtgagcttgcatccgcgataatattttctcgctttcacttcatccccgttcttccgtttccgcgggctttgttgtttttttggttgttcgcgtctgccccgttttttgttttcttttctccctttcttgtacagttttcatacaaataaaa

SEQ ID NO: 1385 - DNA, 1367 bp, Listeria monocytogenes-4B
cctataggcactctccatcgctgctcggcggccacagtgtgctggaaagtcttatacagttgcttaattttcttgatctcactactcgttaatgaagtggtaggttcaggtgatttcgagccaccatcttctttataataagtcgtaatctgattgggtgaaaaagttgtcccaaaaatctttgaaagactttgatttactccatttccaagcccaaatgctatttaaatagcgataattccaatcgaggtgccaagtgctacgagcaaatttcggaattttctattgaaaaaacttttaaaagaaatttttgcagtagcccaccagtttagtcttaactttttttcgtttttgtgggtaactttttggacaacttctttttttctttcaaatgaaattacttctccatctgctaggcgtaataccgcatcagtttggtctgcaatgtttaaatcatgggttacaactattacggttgtcccttttgcggccaaatccttaagcagtttaataatttcatctgaagtaacactatccagtgctccagttggttcatcggctataatcatatctggattattagcgagagaccttgcaatcgctaccctttgcttttgtccaccagatagttgtgttggttctttgctagcaaagtcttctagccccacttgtttcagcaaatcaagcgctctcgcatttcgatcgctttctgctaattcaggattcaaatataactggaacttttacattttcaataacagacatatgattgactagatgaaagctttgaaaaataaagccgatatgattaaaatgataggcatctaaatcaatatcctgtaaatcttccccattgtataaaactttcccttcataatcagtgtcaagtccactaataatatttagcaacgtagacttcccactaccactttttcctataattgctgcaaattctccgtcttgaatggtcacattaatatctttcaaaactggtgtttcgtttttctttcctaacttataagattttttaaggtgtttaatttctaacatttattctcctactttcaaatagtatccatttttttagatttcatatagatgtaactgcctgcaataactgaacataagcctacattccaaacaatagatagaagggaaatatcaaagtgtccattaggtaaaatggaaatgattccaggaccgttataaatatgcaagtagtattcagctagtaaattgacaattaggatagcaaagagaagtagaataactgccgctttttgaagagaactcgccttcacatgatcttttaaccaccctaccggaataacaaagtaacaaacaaacatagcgataaataaaaacat

SEQ ID NO: 1386 - DNA, 710 bp, Listeria monocytogenes-4B
  misc-feature (1)..(end): n can be any nucleotide a,g,c or t/u
tggcattaacgcaagtcttgacgacctacaatattacatcgtagctagtgcaaacagtgaaaacggcgacacaactttcgacattccagcaggcaaatacgcaaaattcgtaacaagcgaaacagaccgcccggctctagacggcttcatcggcgcagcatacggcgaggttagtcaaagcgatcggttggcattgcgggatcgtttaatttggaggatcttagagaagctgagtttacgctttatattccggttgttagtaagtaaattgaggagatctctttcggatgaaaggggtctttttttatgttaataattaaaaaaatcaaaaatgcactaataagttctgcatttgagtatgttattgcacagaggttcacaaaacgctcacaaaagggatgtagttgcgatgctataatagaagagtggaaaactacaaattactgaatgatgatcttcaccttaaaaataggagtgacgatagattgaaaaaactagattttaacagcaatgatgctaattataatgcagaatttttaatgaaaatattaaccactttaaaagatattaccaaagttaagcagtttactattgaaatgatagatgcagttccaaatgatcaagagcaattcaaggaagaaaaacggctatctagcgaagaagtatttgattttaataatttaactttccanagacacaggtggaccgat

SEQ ID NO: 1387 - DNA, 906 bp, Listeria monocytogenes-4B
catagttatatttttctcggttttagagtatatcccatcacatcccatgggcattgccagcccccccatgcctcccaaagaatttttcaacagctctagtgtaaaatagctctttatgccttattccgcattaggaatgacaccaattgctggacactcgaaaaagttagtttctcctaaatccatcttttcagaagggaaactaaagcaaatttatgcggttttagatataaacgaggaaatgtcgtttgatgattttaatgaaaattataacggccttaccgctcaaaatattttatcgatttgataggaaataacgtccaaagtaaagggacgctagttttccattatatttgacgtactatacaaaaactttcccaatttgctcaaatagaaattctcgaccaaataaaagaatgaaaatcaagaagagcatgacaatactaaaaataaaaatgccgaatgtaagatcgcgtggatagctatagtcatggttttttatatcctcacttaatgaggctaatttggcatcaaattggtcaattaacgcaacaaaattggtacggccgataaaatcacattcaattttttctaatttattttctgtatgaaagaatagttccatcgtttctggaataggatgtccaaagctcggacgagaaggttggaagttataacttattcttttcacatttgcaagatgaatcgtttttgtttcgttgcgtttatgaagaataaaagcagtctttgtgacctggatccattcttttggcgggagtataagtttaacaattaaatatcctataaaaaatatagtaataagaccatagtaaaataattctggtttttctattgacaataaagttaataagccaaacatgaaaataaaagataaagaagttaaag

SEQ ID NO: 1388 - DNA, 814 bp, Listeria monocytogenes-4B
gactaacattatcagtgacttcaagcgcgcaaaacgaatgggaattttcacatttaatatcagtcccgcgcttactggtgcagatcatgttaaagccgcagatattactgcaaaaaacgtgtatgacattaaaggtgtgtcggttaagtcaaatcccgattacttcggtgctgctaaaggaaaaaatcttattatcgttcaactcgagtcattccagcgtaatttaacgaacgtcaaaattaacggtcagtcgattacgcctacattagatagcttacaaaacgaaaccatgtattccaaccaatttttccaaactgtctctaagtcaaatacggctgatgcagaatggtccgtttatacatcgactttcccaagtggatattacacgaacacacaaacttacggcgaccgggtaatcccgtctatgcctcgtttacttggcaaaaatgattataaaacagcgaccttccatacaaatgatgctagtttttacaatcgcgatgaattttatcctgctgtaggatttgataagttttatgatcgtaaattctttggcgatgaggacgttattggcttttctcctagtgatgaagtgctttataacaaagcctttccgattctagaagagcagtccaaaaacaaccaaaaattctatgcgcaattaattagtgtaagtagtcatatgccatttgatattccaaaagatatgcaagaaatcgacttaccgagcgatttataagatacagaacttggtaactatttcgaagcggctcattttgcggataaacaacttggtgaattcataacaaaatag

SEQ ID NO: 1389 - DNA, 1322 bp, Listeria monocytogenes-4B
  misc-feature (1)..(end): n can be any nucleotide a,g,c or t/u
caccatgtgctggaaagtttcttttgtaatgttatgaaagaagttttcccgacagccatccttcactgggaagactttggacgcgcgaatgcaagtcgtattctgcataattaccgcgataaaatttgtacatttaacgatgatattcaaggaaactgggccatggtggntgctgcctgtcttgcgaccctccagnttncaaattacattaagcgagccaaaaatattatttttcgggctggacctgcttggatcgggatcgctggtcacttaatgctcaaggatgccggaaacggggtttcttttgaaacgcggaaaaaaattttttttttttccaccccaaagggttaaggcttgtaatttgacccccttaattcccgggcaaaaaaaatttccactcccgcgacttgggggggttaaagggccccccataccctgtgaaaacttattgggaaccccctctttcccccaatgttaaattggtttttttgggggtgaccgggcccctttaaaaaaggcttccgccaaaaaaggtcccccagtttcccaaaacccccaccggttttttgccctttttttatcccaccaaaattatcccgaaccaacccggtttttggtttaatttccggggcacaatgggaaaagcgcttattgttacaggtagcccttccaaaccagtagaatatcaacatactacttatgaaatcggtcaagcgaacaatgcacttctctatccggggctcggactaggtgctcttgtcactcgtgcgaaatatattacagatggtatgctcgctgctgcttccatggctgtcgctgagcagatttcaccaaacaaagcaggcgcagcccttctaccacatgtgcgcacccttcgcgaaacatcgcgtgcagtagccatcgctgtcgctaaccaagctattaaagaaaacatccatcaagtcgaattaacgaatgtcaccgaagctatcgagcgggaaatgtggcaacctatttataaaggagtttagatatgttttacaaaacgaagcaatcactagatcaactcgtccaaaacggctccactccgggaattagttatcaaataaaaactaattatctggaagaaaataacatcatgggattaaaatccgtttttccagaagcagaaatcttaccaagaacaacagaaaacatttatgatatcgcttctttgaccaaagtaattgctacgactactcgtattttgcaacttatcgaacaacaaagattccaattaaacgaccctattcaaatgtatttaccagatttccggtacaataatgttacgattntacatttac

SEQ ID NO: 1390 - DNA, 1277 bp, Listeria monocytogenes-4B
  misc-feature (1)..(end): n can be any nucleotide a,g,c or t/u
tatggggccagcagtgtgctggaaagagaattagtcaaaacaattatcgaaccacttttatcaggaatttactgccggagatatatacaaaatgagtttacgcgccacttttccacaattcgaacaagcagttaaaaaatatgggaatttgatggatggcttaaaagaaagtagcatgcaaacgacagggacaaaagctactattggtgcttttcgaacattagaaggcgggctagatgcgttaccaaaagccattgccgccgcacttccaaaagaaaatttgcatacagcaaaacaagcaacgaacattacgaaaaagaatagctcttacgaaatttcttttgtagatggcgataaaatggaggcagatggcgtcattatcgctgccacacatgatgcgctaattcatttattagcagaaaaaacgacagaaccattcgcgggacaaccgcttacgactctcgcaactgtctcattagcatacaatgaacaagatgtaccgattttaccagatggaacaggctatctagttgccagaaccgctccatataaaaccactgcttgtacatgggtgcagaaaaaatggccgcatatggtaccagaaaataaaatgttactacgaggctttgttgggaaagcgggagaaacttggttagagcaagcaagtgatgaagcaatcgtttcagctgttttgagagattatgcggaaatgatggaccttcacgccgcgccacttttttatgaagtaagccgaatgaaatccgcaatgcctcaatacttagttaatcaccaggaccgactaaaacaattgaaaaagaacatcaaagcagattacccaggggtttattttgcaggaatgagctacgaaggtgtgggtattcctgattgcatcgcaggagctcaaacagccgctaaggaattagtagattacttggaagaggtgtaacatgattaaaggaatcggactagatatgattgatttagaacgtgtaaaacaagtcgtggaaaagaatccacgctttatcgaacgtgttttaacagaaaaagaaattaagcaatttgaaaaatacgaaggtaatcgcaaaatcgaatttttagctgggcgttttgcagcaaaagaagcatatgctaaggccgatggaactggttttggncaacatttaagttttacggatgtagaaattttgcaagtagaagatgggcgaccccatgttactttaccagtcaaatcaggtgaaaacgnttttgtgagcattacccacacagctagatcagcc

SEQ ID NO: 1391 - DNA, 935 bp, Listeria monocytogenes-4B
attagtaatgcgtggtgatcgtgtacaccttgtgcctgccaatgagtatttagctacacgtgaccgggaagcaattggacaagtgctggaatatcttggtgtttccgttgcgttaaatgaatctggtttagacatagcccaaaaaaaggccatttatacagcagatgttatttatggaacggcttctgaatttggttttgattacttacgcgacaatatggtacgccaaaaagaagataaagtacaaagtggacttgattttgttttaatagatgaagcagattcaattttaatagatgaagcgagaacgcccctactgatttctgaccgtaaagaagaagatttgtccctttatcatacagcgaataagcttgtgaagaagatgatgaaagatgattatgagatggaagaacataaacgctttgtttggttgaatgatgctggaattgagaaagcccagaagttttggggtgtcgaatcactttattccgcagaggcgcagtcagaacttagaattacgatgcttttaatgcgagctcatttcttgatgcataaagataaagattatgtggtgcttgatgatgaagtattaattatcgatccacatactggtcgtgcacttccagggcggcgctttaatgacggactccatcaggcaatcgaagcaaaagagggcgtggaagttaaagaagaatcacgtacgctagcaacaattacaattcaaaactacttccggatgtataagaaaatttctggaatgacaggaacggctaaaaccgaagaagaagaattccgtcaaatttataacatggatgtcgtagtaatccccaccaatttacgtgtaaatcgggaagatatgcaagatgatattttctatacgaaaaagggaaaaggtcgtgcgattgtgtatgaagtatcatggcgctatgaaaaag

SEQ ID NO: 1392 - DNA, 891 bp, Listeria monocytogenes-4B
ggaaatggtgaaggtgaccctgttatgaaagaaaaattaatgcaagcctatgcctggtttcaaaaaaatagtaccgtcgtaaaaatcgtttttattacttttgtgatggcttttgttatttttgaaattattaatattgcgacgggaattgactatccatctctaaaagaaaatttaacttctcaaagtccagaacaaatatttattatgtttattgttggcttaattgctgtcactccaatgctattgtatgattatgtcatcgttaagttgttgcctggaaagttttccccaagtcatgtgattgcctctggttggattacgaatacatttactaatattggtggttttggtggcgtatcaggtgccagtttaagagcaagtttttacggaaaaaatgcatctcataaagaaatattactcgctatttctaagattgctttatttttagtatctggtttatcgatttactgtttagtgtcattagccactttactcattccaggatttgctcctcgttttgttcattactggccatggtttcttgtgggcggcctttgcttcccccttttgttctcccttccttgtggttttgtttgttttctttcgttgtttctttttttcttttgtttctccccgtccccttctcctcccgtcccgctccgcccctccccccctcccttccccctttccccccctcctcctttcgtctcgctcccttctcctctttctcttccgcgccgccccttccctccctcttttctctctcttccctttcttctcctcctcttccttccctcccctctcctccctcctcctctccctctctctccccgctcgtcctcgtggctctctcccgccccccccttcccccataaaaaaaaaaaaaaa

SEQ ID NO: 1393 - DNA, 726 bp, Listeria monocytogenes-4B
ctagcggccacagtgtgctggaaagagaagatggcgatattcttgttacggcttatactgaccctagttggactcccgcatttgtatctattaaagggcttgtgaccgaggttggcgggcttatgacgcacggagcagtgattgcgcgcgaatacggccttcccgctgtcgtgggtgtcgaaaatgcaactaccattataaaagatggccagcaaattcgcatcaatgggacagaaggctatattgagattcttgattaaaccaaaaacccagtaatctccattttaggaaatactgggttttttaattatgctttttttctccaaatataaaacgcggatgatgaaagtaatatcccggcgaatagtgtttgccacgggttattatctccagttttcggaagtttagctgttgttagttctggagtattttcccctgctgttactgtgatgttattattttgggctggcatactagttgcactcggttcatttatagtgattgatccattggtaggtttcgagtctgattcgtcagatgggctaggaataagtggcgtttctttactgaaatgtgcgtacaaattaatatcgttcgcaggcattttcatcgtgttaaaatcccattttgttccgcctacttctgcgtcataccacccatcgaaaaggaaaccttgtttggttggagcagtcggttcattaagtaaggtatcatatgttatcgttt

SEQ ID NO: 1394 - DNA, 823 bp, Listeria monocytogenes-4B
gcacagtgcgctcggaagacacaccgcttgtggagctagaagtttcaacagcggcggactctgagaagcacgtgtactttgatttaactaataagctcttaggacgaggttattcttatgtcataaaagcggatgttgtttggaatgataattatgaagatcatcatattgaaattaattgcgatgcaatccatatcaaaaaagaaaaaccaaccgttgaatacgaaattttaagccgcacagggagcgaaatccaatgcaatgtgtatgtagaagatgacgaagagatctatgcgggttgggaacccttcaaattgctggttttattcggtggtctgatccggtgcgcggtgggaaaatggggcggcccgtgggtccgtcgcccgggacggacgcgcgtcccttgcccgcgccgggagcctgtcgttttgcccccgccggccccgtccttcccggcgtcccccccccccccccgcccccccccccccccctccgctcgccgccccctctcgcctttcccctcccccctcccgctcgccccgatttccccggcccgccctctgcgctgtcccctcgccccctcccgcccctgccggggcgccccctttgcgttgtcctcccctgttggccccgcggcgcgtttgtccttttcccccgccgttcccccttccccgtgccggcgcgcttgtgtgtgccccgtctccccccccccgtcttttctgcgccgccgccgccgtttcgtgcccgtgtccccggtgcccggcggtgcctcccgctcccctgtcgcctccgtccccgcgcgcgtgaacaacaaaaccctaaa

SEQ ID NO: 1395 - DNA, 689 bp, Listeria monocytogenes-4B
  misc-feature (1)..(end): n can be any nucleotide a,g,c or t/u
tgctttagatacagttagtgcagaaaatcaggtggaaaatgccaacgttttagttgtttctcacggaatggctattaatacgattatttctttctttgataagtcattaattaatccagacatagctaatgcaagtgttacaagacttggatttgaaaatggcgaatggacaattgagacagtgaatgatttaagttacattgaagcaggtaaattagttttagtataaaaaatccagaatggcactgaggccattctggatgttccgacgcctcctcgcatctcctcccttgctggcgcacgacctttggcgtctccgctccggcctgttgccccgccccccttccttccccccccttttccgtcgtntcttccatctcttccctccgttttcccccttctccgcttttctcctggtgcggccgcgtgggggggggtggcgtctcccccgccccgtcgcgcgcttgcctctctctcccccccgcctcgttgtctcgccttggtcggtttgcgtgccgcgcccgccgctgcctgccgtgtccccgtgccgccttccctcctccctcgcctcgcgctcccctcccgctttctgctcccccccctttatcccgcccgtcgccctttgccctctcctcgcgcgcccggcctgtttgcatttgcgctcccctcgaccacgccacacacaccag

SEQ ID NO: 1396 - DNA, 666 bp, Listeria monocytogenes-4B
accatggctgaagaagacttaaaaggcctttatggaagggaatagcaaatgttaattattcgaaataaacaagaccttaaagaagctattttagagcaaaaaaaagcgaataaaacaattggttacgttccgacgatgggctttttacatgaaggacatatgacacttgtcagccatgcgagaaaagaaacagattttgtcgttatgagtgtttttgttaatccaacccagttcggtccgaacgaagactttgatgcttatcctcgagatgaagcgcacgatgcaaagctcgcagaagaaggcggcgtggatattttatttgtacctacagtcgaagaaatctatccaaccgaactagcaaccaaactacatgtcatcaaacgagcttctgtacttgatggtgctgatcgtgaaggtcattttgacggagtagtaacggttttaacgaagctatttcatttagtgaacccagataacgcctatttcggtcaaaaagatgctcaacaagtggccgttgtttcaggtctagtagaagactactttttccctataaatttacgaatcattgcgactgttagagaagcagatggacttgccaaaagttcacgaaatgtctatttaacagaaaaagaacgaaaagaagcaccggtgattcatgaagcttta

SEQ ID NO: 1397 - DNA, 995 bp, Listeria monocytogenes-4B
  misc-feature (1)..(end): n can be any nucleotide a,g,c or t/u
gcataagccatccgtgcgttggaaagtcaaggttgcccctacggtcgcatgggttgcgtatgcgaaaaacatcgataataatcgttgcacgacgtagtttcgcttattggttacgccatacgctttattgagcgatttcatgaccgcattcatgccattcgaggccgaccataaagtcgcgataatcccgatagaaagtaattcttccatttttgggtgttagtaagttatttaaattttcttctaaaaagtccataatctggtctggcgcgaattctttaatcatattaaaaacggaatctttatcaatatgaagataggcaagtaatgttgccgcgattaagagcattggaaaaatcgaaaacagcatataataagctaactgtgctgcatttcctgaaacatcatttcgacctactctcgcacttactgtttggccaatttgaacaatcccgtttttctttgtatatttaactacttttttccacactgataaggccccctgttctagtcattcgtctggaagtttttcttctactatggtaaaattttgtctattagcttgaaaggagcaaaaagatgaatcttgaaaccccttcacaggaaaacttgaattttatgttaaccgaaattacaacgaaactaaaaatggtgaatgttggtgtttttgaaaatctggagcttgactctgttgattataacgcacttatagatatttatcagctaattaaacgtaaatccaatttcagccaaagagagatgcaattatttgcagaagaattacgccggattcgcaaataaaacaaattccagccactttttagtggttttttgtttggaaataatcggtaccaaaatccactaaatcacgcatatcataaattttcgtcggcgctccgataatcgtcgttgggtgaaagtcacgttctttctttccagcacatgtcgcccgtccagcaggtggangttacttcagttccgtncaaaaggcagac

SEQ ID NO: 1398 - DNA, 722 bp, Listeria monocytogenes-4B
  misc-feature (1)..(end): n can be any nucleotide a,g,c or t/u
cggacaagaactcgaaaacatgaatgaacaacaaatgtccactttccgacgtgacaaactaggttttatattccaagattacaacttactagacacattaactatccgtgaaaatattatccttcccctcgcactagcgaaacgcccagtgaaagaaatggaagaaaaattagcaattatcagtgaaaagttcggcattacagaaatccttgataaatatccaagcgagatttcaggtggtcaaaagcaacgtactgcagcttcaagagcaattattactgcaccaagtttaatttttgccgatgagccaaccggtgcgcttgattctaaatcagcgaccaacttacttgaaagcttgcgtgacttagatgaccgagatgaatgaacaatcatgatggtgacacatgatgcgtttgcggcttgtttgtgcgggcgaattgggtggtgtggaggacggcgaatggtgcgcgggagtggatcgggggactgaaacacgtttggagttctgtggtgggatggtggacgtgcttgttcaactggggggcgactggcgtggcggtgtcgggtgcgcgtggcagccgggtggggggtgggtggggcgctgggccggggggtgtgggcgtgcggggcggcccgcggtggtgggggtggggcgctgtgtgcgtgtgcggtttcgctggggcggcggggtgttggtngtcgagataaaaaaaaaaaaaaaa

SEQ ID NO: 1399 - DNA, 751 bp, Listeria monocytogenes-4B
acggccgaccagtgtgctggaaagagtacttgtaatgacaaaataacgaattttttcgatgaatggaataattactttactattaatgtggttagttgtcgtgccagatagatatttggactttttagatacactgcatattactgaaatggaagttatttttattttaatggctttattactcgctaatactgtgttttcacgaaataggtggcattttgatcaagttggtatttgtctggttgccgctttttcttctggatttggcttccctttctcggcgtcttctggcccggctgggctggtgcgtcccctcttcgctcgctcccttgcgttcccccctccctcccgcgctcgccccgctcccgcccccccctccgcccttgcccccgctgtttctctcctttctttcctctcttttctcccccctctcgctttttctctcttttttctctttcctctccttctctctcctcctctccccgctcctccccttccccctgctgttcttctctctccccctctcctcttcttctttctccgtctttcgtgctctccgtctgtcccgccccctccctcgtccttgctgttcccccttcctcccccgttctccttcttccccgtgccgtcccctccccctgtacttccccccggcctccctcccccccgcttctcctttctccccctcctccctctcgcctcctcttcctttctttttcctttcccctaataacaacacaaaaaaaaaaaa

SEQ ID NO: 1400 - DNA, 777 bp, Listeria monocytogenes-4B
ggcctaaccttttggacgggactgaagttacttacagctgctggacgggcgacatgtgctggaaagcggaagtgctagtatcggctggtcaggcatccaaccaaaacgcgagttaaaaggaggacaagcaatccgtccttttttaccaattacaaaagcagaaattattgattacgcccagaaacacgaattggcatacgaaatcgatgaatcaaatactagtcaagaatacacaagaaatcgttacagagcgcaacttttaccgtttttaaagcaagaaaatccagctgtctattcgcacttcgaaagattttcagaagaaacaagcgaagacttccaatttttggaggcacttgcgagtgatttattgaagaaaaacctcatcaaaaacggcaaacggacaacacttttacttactaactttaaaaatgaagcgaatcctttacaacgccgcgcaattcatttactattgagatatctgtacaatgaagatgccagttttataacggtaaatcacatatatcagattatccaaatgattcaaagcgacaatccatctagttcgattgacttaccaaataaactcgttgcaaacagagcatacgataaacttcattttcaatttggagaaagagaagctccttccgagttttatcatcaactagaactgaatgaccgcattgaattagataataaagcaagtatccgtttaaagttaaaaagttccgttgttcaaacaaatgggctaaatggaatgctactggatgctgaagagat

SEQ ID NO: 1401 - DNA, 711 bp, Listeria monocytogenes-4B
catttcattggagatactcctaaaaaaatacttgatttggcttgtggaacagctgaatttgcgctacgtttaagtttttctggtcatcaagttactggtgtggatttatcaaaagaaatggtggcagttgctaaagaaaaagtggcagcggctgaaatcaatttgccgattatagaacaagatatgtccaagttagcattaaagcaaacgtttgatgtagttacatgcttctgtgattcacttaattatttggaaacagaacaagctcttgaggctactattcaagctgtatcagtgcatttagaaccaaatggcttatttttatttgacgtacattccgtctttaaagtagatcaagggtttaaagattattcatacggagatagcgatgaagagatttcgacgatttggaattcatttcctggcgaacatccgcattctgtcgaacatgaacttaccttctatattttagatgaagatgacacgtataatcgcgtggacgaactgcataaagaacgcacctatccaatcgctacttatgaaaatatattaaaaaaatatggttttacgaaaattgatatttatgccgattttagtcatgaaaaacccaataatacgagcgaaagaatctttttcgcagcaagaaagtaatttttcattattactttctttttttgtgcgattttcaccttaaactatcaaaaaggaata

SEQ ID NO: 1402 - DNA, 770 bp, Listeria monocytogenes-4B
attgtttgggaacatctagcatgcatgctgcgagcggccgacagtgtgctggaaaagaagtggatgcattgggcttttggattaatacggaacttcacgaaggggacgatagcaaattaaatattagtcttgatggaattgaaatgttccactttttcaatggtaaacgaccggcgttttatgctgtgaagtttttgagaaggcttaagggtgttgtggttgctaagggcctctattatattatgacgaagcacgcagacggttatcagcttattttgatgaactgtgcgacgattaatccgcgttattctgtggaggaaaggttcattaaggaagaacaaaaagaagtgcatattagacttacagggcttcacgcgggtgattatcaagtctgccaatggcacttcgaccgtgacaatggggcactttattcgaagtattggttcctgaacagtacgtctgggctagatcaagagatttccggactatattgtggatgcctctcatcctccactcccggcgagttgttgaacccatcccccgacattgcttcctccttgctcctctccatgttgctgccccccctcccttcccacttttccactccccgctccctccgcccctccttgtcctcccttgccctcctcgttccgttctccccccttcgtgtttccctctctttgccctcggcgcttctccgttctttttcgttcttccttctgccggccgtcttgttctcctccccttgtttagataagattaaacaaaat

SEQ ID NO: 1403 - DNA, 987 bp, Listeria monocytogenes-4B
ggttatctccagctgttcggcggccactgtgtgctggaaagtggcctatagcgcccaacttgaactaaaaagagatattgttattcaatcaatcgaaaaacatacaaaaatcgatccaaccaaattaaaaatccgcccaacaatcggaatggaagacccatggcgttaccgtaataaaagccaattccaaacaagaatggtaggcagtggtcaagtcgaaacaggccttttcggtgccaattctcaccaacttgttccaattgaagattgtatcgtccaacaacccgttaccatcaaagtaacgaattttgttcgcgacttactagaaaaatacggcgtgccaatttatgatgaaaaagctggcagtggtatcgtccgaactatcgtcgttcgtactggcgtgaaaaccggcgaaacacagctcgtcttcattacaaatagtaaaaagttacctaaaaaacgcgaaatgcttgcagaaatcgaagcagctcttccggaagtcacttcgattatgcaaaacgtgaatcaagcaaaatcctcacttattttcggtgacgaaacgttccttttagcaggaaaagaaagcattgaagagaaattaatggaactagaattcgatctatctgctcgtgcctttttccaattaaacccgttccaaacagagcgactttatcaagaagtcgaaaaagcactcgtactaacaggcagtgaaacactagtagatgcttattgcggtgttggaacaatcggccaagcttttgccggaaaagtaaaagaagttcgtggtatggatattattccagaatccattgaagacgctaaacgaaacgccgagaagaatggcatcgaaaatgtttattatgaagttgggaaagcagaacacgtattaccaaaatgggtaaatgaaggcttccgcccacacgcacgcgtcgccgacccaccaagaagcggctgcgaccaccgcctcctcccgtcatccctacatgt

SEQ ID NO: 1404 - DNA, 1159 bp, Listeria monocytogenes-4B
  misc-feature (1)..(end): n can be any nucleotide a,g,c or t/u
aagcattagaaattgcagaagcattagttagaagtggtgctgtagatatgctagtaattgactccgttgcagcacttgtaccacgtgctgaaatcgaaggggagatgggtgatgcacacgttgggctacaagcacgtttaatgtcccaagcattgcgtaaactttccggtgttattaataaatcaaaaaccattgctattttcattaaccaaattcgtgaaaaagttggtgttatgtttggtaacccagagattacacctggtggtcgtgcgcttaaattctattcgactgtacgtttagaagtaagacgtgcagaacaacttaagcaaggtacagatgtaatgggtaacaaaacaaaaattaaagttgtaaaaaacaaagtagctcctccattccgtattgctgaagtggatatcatgtacggtgaaggtatttcacgtgaaggcgagcttgttgatatggccgctgaagtggatgtaatcaataagagtggttcatggtattcttacaaagaagaacgtatcggccaaggtcgtgaaaacgcaaaacaatatctaaaagaacatacagatattcgtgatgagatttcaaaacgtgttcgtgaagagtacgaaatcgacggaagcaataaagaacctttagatgaaggcgaagaaacattaagtttactagatgatgaataaataatactaaatacgtgataggaatttacttcctgtcacgtattttttactatttaaaaaaaactaaggaaaataaccgtacatttcattccttttcttgacattgtatgctttgacctataaaattaagttgtatattttatagtgctgggagacaagggggaagttttttcctttgaaaatcggcttcaaatgaatggggagattagcactcggttgttgatgaaaaataagagtgtgccagaattctggccaccgacataacaataacgaaaattgaatagcaaaggaggtgtaaggatgacaatcgcaatcacgatcatctccaggtttgcttttcttaatcgtcggtctagttgttggttctctaatttttaaatctagtacagagaaaaaactggctgctgcaaggctttccagcacactgtgnnccatcgagcagcagtagatggacgtcagtggnnnnnaaaggtaag

SEQ ID NO: 1405 - DNA, 830 bp, Listeria monocytogenes-4B
aatcgtccatcagtgtgctggaaagctgctatcataaagaacacttgcacacgattactctagatgatagcgatggaacaactaaaatgaatcaagtgatagacgatttgcgcaaagagccaacttgtattcccggcataacggttttagaagactttctaacgagtaagcgaaccaatctttcaacgatggaaatgacaaacatagagctaccaaaagaaaatgttttaaaattttacttaaacgataacgcctggtttgcaatacgtccttctggaacggaaccgaaatgcaaaatctatttccaaacaatcggtcaaacagaagaaatagcgacaaaagctatggatgagttgaaaaaatgcgttttagccaaatgggattaataaaaagctggaaattgttttcggacgattttcagcttttttttaaagatttatctataaaaatcgctgaaaaacccggataagcgtacatttaaaaagaattaagtttttttattcgataatagcaaggaaagataagcttttgacgttgaaaagaaatcgttagtgtgttatgatgatagatggaagtttattaggtttatatttagcctagtgattaatgagggcttttttatttgatgcgttagaactgctataatggcagagaaattttctgatgccgtgaatcattttgcttggtgcgcccaggcttttctattgcagaaaaatgaaaatgaaagatagcagttttcataaaaacaactgcaaatgaacagacaaacaatcgtaataagcgtattgtgatgaattataaaagtagctctcctaccaaactttaaacag

SEQ ID NO: 1406 - DNA, 929 bp, Listeria monocytogenes-4B
tggacgaggaatttaaaacaaatgatattgggaaacattttgatgcggtgaaaaataatcgggtgtatgattgggatgaaaatttatttggtatgacagcgagtttgaatgcaccagaagcactacaggaaatggaaaagatgctttatgacaattaagcaaaaaagttcttttggggctgtaattattttattgattgggactattttgtgggcagttcaggcgggaagtttgcaatgtcgattcaggctttttgagtggggtttttagtggcggaaatgagatggtgaatgtcgtgattgataagcgatttccgcggattattattgccctgctagctggtgcggcgctatcggtttcagggttgttacttcaagctgtgatgcggaatccgattgctgatgctggggtgatcgggatttctgctggcgccaaacccgtcacccccacgatcatccccactgcccacccgcctccatcatttacacaacgcgactttccccctccatcgtgggaccaccgggctcgccgcaatatttaccgtggatcggtggcgccggcggcccaacacacccacatatcctccccttctccatcccccccggatcccgcccgcccatgcctaccccccgcggccggacacgctcgccgcccccccccaccacccgcctcccctcccctccccctcccccccctccccccctctcccccccgccgcctccgccccccccccttccctccccccgcgcccccccccgccgaagcgcccggtgccccttttccgccgtcccctccgctattccgccctgccgactgttccccccgcccccgcgccccgtctgcccccccgaatccacatttcctccccgtgttttccacaccccccgcgtctcgctgttgccgccggccacccccacttccccatccgg

SEQ ID NO: 1407 - DNA, 775 bp, Listeria monocytogenes-4B
  misc-feature (1)..(end): n can be any nucleotide a,g,c or t/u
ctgagcagccgctcggggctcgaaagactaccatttggcccaacacctgtattgagtgggtggggcgggatagtaaaggagacattttttaaaatcgcatccgttccattataactaaaattaacgtcccttacttccataaaaatcaccctttcgcattaaaaagattaagaacggaccaccaataataagcataatcacagacgcagggatttccatttgttgaaataacgttctgcctagcgtgggggggaaaagtagcaataaagccccaaataatattgaaaacggcacaagtatttgataatttccgccaactagttttctggcaatatgtggtacaagtaaaccaacaaacgcaataacaccaactaccgccgtggtaattgacgcaaggagtacagcaatcaatgccagccaaatacgtgtcttattaaccggcacaccaaagcctctagccatcttattctcaagccccaacacattgcaccatttagcaagtaaaagcgcgcaaatcagtccaatcggtgcatatgtcaataaaggttccacgtcggaccattttttctttgccaaacttgcggcactactggccgactggcttgaaaccagcgccacttgcgaagattaccgctcacctagtccctgtaaaacccgcttatttcgcattcccctccgccccgcatcgaaccggctcgctctcggtgcgtccccgaccgcatggtcttgnttccccgactgcgcgacccgccgtncagaaaaaatgcgcaccgga

SEQ ID NO: 1408 - DNA, 777 bp, Listeria monocytogenes-4B
gacctgagagtaaactcaaatctcgacacctgccgacagttacaaaacgagctgagaaagcgaaactcagtcgcatgtggaaagcatagaacattggaaagaaaattcaactggtaccatgataaaattaaccaatggtgatatgactggttttggaattctgagtatggaaggattaaaattaaaactttctgatttctacttgttaaatcaaatgagctgccaaatacaagtagcttacattactacaaaagaagaaaaaaataacatcaagtttaaaaaagtggaaaagaaggtagcatttaagaatttttatggtttttttgaaaatatggaaaatgataaatataaagcttccctagcggatacagttagatttccatcggtatatgaaacaattactgaaaaaccaagaaaggttctttactttgataaacaaaattttccggaaattaaaggaaagagaagatttaaaaataaaaatggaactttaagtgagaaagaatacgaatttgagttgaagggatggatagggatccatacatcaacaaaaaaagatgatgcagaaaggaatgatattactttctttagaaataacacctatactcataataaattgagactttatatacgggataaattgattgttgaagattttatggcccagtatattcgaagtactcaagcaacttctggatatattgaaggtgaaattagttttgatattcttgatgtcaatgacttagaagatattacaacatcagatagacaaggatt

SEQ ID NO: 1409 - DNA, 822 bp, Listeria monocytogenes-4B
  misc-feature (1)..(end): n can be any nucleotide a,g,c or t/u
acacgctgctcgagcggccgacatgtgctggaaagtacgtcaagctttcgccagttccagtagttgtaaaagaagttggctttggaatgacgcgtgaaacagtaaaaacgctagctgatatcggcgttcaaaccgtagatttagctggaaaaggcggaacaaactttgcccaaattgaaaatgaccgccgccgtgatcaagcatatgatttcttacttgattggggtatttccaccggacaggctttaatagacatgcaacaccaagatgcgccaaagattgcttatttagcgtcaggtggtattaggaacccgttagatatcgttaaagcattagcgctcggagcagatagtgtaggtatggcaggacaaattatttattcactaaaaaaagagggcgtcaccaaaaccattgaaaaactggagctatggaaagaacaactacgtggcttatttgttcttgcaaatgcgaaaaacatctcagaattaaaaacaacgccattaatcataagtggtgaacttgctaaatggggcgcattacgagaaatcgatttagtcaaactagctaatagaaaataaaaaccagctgctattcatttagcaaagctggttttttatttattgaaccatttctggtaaagtttcatcgattgcttgaagacgttcagtgaattcttctttagataaatgtttcgtataaagatttgcgggatgaacgcggncatcatgcgaacaactacgcaaatattttttctcattttcgatagaagctaggatttgcttatttgcatacgggttagcacaattgatgtaacgttcgcag

SEQ ID NO: 1410 - DNA, 705 bp, Listeria monocytogenes-4B
tggagaaggattgaagaaactatttgagagcatgggagtgtctgttgttctttcaggtggtcaaacaatgaatccaagtacagaagatatcgtaaaagcaattgaatcagcaaatgcagaacaagtttttgttcttccaaataataaaaatatccaaatggctgcggaacaagcggcacaaattctaggagatgataaagttcaaatcatccctacaaaaacaattccacaaggacttactgccgttctttcattccaagcagatcaagatttcctagctaatgcagaagcaatgaaagcagcaattgaagacgtagcaagtggccaagtaacgacagctgtacgtgatacaacagtagaaggtgtcgaaatcaaaaaagacagcttcatcggtatggttgaaggcaaaatcaaagttagttgtgcaacattagaagaagccgcttacgaaacactggaaaaactacttgatgatgatagcgaaatcattactatcattgttggtgaagatgcagatacttcaaaagcagaaacgcttgctgataaagtaacagaagcattccctgatgtcgaagtagaaattcacgaaggcgaccaaccagtttatccgtatatttttgctgtagaataaagacgcctctgtaaatgaatagaagaaaggatgattttagtgaaatttaatagcgtatttgatattattggtcc

SEQ ID NO: 1411 - DNA, 939 bp, Listeria monocytogenes-4B
ggtattctatcttagaattaaaatttatctcttatccagagcggtagagggactgaccctttgaagcccagcaacctacacatataagtgaaaggtgctaatctgttgcaggagtattatcttctgaacgatgagagcaaaggtataattatagcctttctctattcgtgcgcgttttgtgcaaaatagagagaggctttttatatgagacgtatttggagagaattgaaggaggaaaataaattggctaagaaccgtcatctatttacatcagaatcggtttctgatggacatccagataaaattgcagatcaaatatctgatgcaattttagatgcaattatttcaaaagatccggacgcacgtgtcgcttgtgagactactgtgacaacgggtttagtattagtatttggtgagattaccacctctgtttatgtggatattcctaaaatcgtgcgtgatacaattaaagaaatcggctatacacgtgcaaaatatggtttcgatgcagaaacgtgtgccgttttaacagcgattgatgaacaatccccagatattgcgcaaggagtcgacgaagcactagaatcaagaagtggtaaggaaatcgatgcggctattgaagcaatcggagcgggagaccaaggattaatgttcggttttgcaacagatgaaacagaagaattaatgccactggcaatctttttagcacatggcttatcacgtaacgttacataattacgttaaacaaattaattagactacttgcgtcccgatgcgaaaacacaagtaactggtggaatacgatgaatttaatcaaccagttcggatggtacactggctgtttggcgctattgatgcggacattacgcagagcaatcgataaactgacactgcctttcaacgtggctctatatcactttctcactggcctgtgtgcag

SEQ ID NO: 1412 - DNA, 776 bp, Listeria monocytogenes-4B
  misc-feature (1)..(end): n can be any nucleotide a,g,c or t/u
cctttggcacttaccccatgcttgagcgccgacgtgtgctggaaagagctgctccgataatcgccaagttatcgccttctgttccaccacttgtaaaaattatttctttttctatagcatggatactatctgcaattgtatgacgagcttcatccaaagcttttcttgcctctcgtccagcgtaatggatactggaaggattgccgtacgtatttgtaattgcgccaagcattgtttggataacttctggatgaattggacttgtcgcagcatggtctaagtaaattctattttccattttttatcgcgtccttttttgtagacgaattcctgttcgccgttaatcgtttcttattgtaacagcaatactcctgtaaagtaaagaggaataactcctatttacacgcaaaaaagaaaccccaatcgtaccgtttaggattcccttcctttgaacccgctatcaattaaagcaggtgggtgctctgtctaacggtttgcacttcctcgtgtgaaggcatgtgcgccgcgccggaactccaagctccctaggtataaaaaattgttcggttcaaaaatattaggaactatatcgaatacattagggtttcttttcttcatttagaataccatagaaaagacgaaatttcaatgttagcgacttttcatttggcactttttttattctttttttgctttattttcgttaattttttgatacacanccagcattgtctgctcaaatttagaagtgaatttcggcgcataatacaatttga

SEQ ID NO: 1413 - DNA, 347 bp, Listeria monocytogenes-4B
gtttttaatggggtgaggggggcattttactccgtgccaaaccacatgaagtcaaaatgattatgattgatccaaaaatggttgagctaaatgtctataatggcattccacacttgctcgcaccagttgttaccaatcctaaaaaagcagcccaagcattgcaaaaagtcgatgcgcaaatggaacggcgctatgatttattttcgcatacaggtactcgtaatatgcaaggctacaatgattatgtaaaaaaacataatgagctgaacgaagaaaaacaacctgaattgccttttattgttgtaattgtagatgagttagctgacttaatgatggtagcttccaat

SEQ ID NO: 1414 - DNA, 702 bp, Listeria monocytogenes-4B
actagtgtgctggaaagggcccaagctggaacccaaattactactccaaagtttggaaaagcaacactacttcctacaaagacgcaacgaaagccttaactggaacgtacgcaacagacacagcctatgcaacgaaattaaatgacttgattagccgatataatttaacccaatatgacagtggcaaaacaactggcggaaactccggaagtactggtaacactggaaattctagcaacaccggaaacacctccaatgcaaaaatttacacagttgtaaaaggggactcactttggagaatcgctaataaccataaagtaaccgtcgcgaacctaaaagcttggaataatcttaaatctgatttcatttacccagggcaaaaacttaaagtaagtgctggttccactacatcggatacgaatacatcgaaaccgagcacaggaacaagtacatccaaaccaagtacaggcactagcacaaacgctaaagtatacacagttgtaaaaggtgactcgctttggagaatcgctaacaaccataaagtaactattgctaacctaaaatcctggaacaatctgaaatccgatttcatttatccaggtcaaaaacttaaagtaagtgccggttctacttctaacacaaatacttctaaaccgagcacaaacacgaatacatccaaaccaagcacaaatacgaacacga

SEQ ID NO: 1415 - DNA, 701 bp, Listeria monocytogenes-4B
gattcaagtggtggtgctggtttacaagcagacttaaaaacgtttgaagaatacggcacttatggttttagcgcaatcacaacaatcgtaacaatggatccagataacaactgggcgcacggcgttactccaattgatgcgcaacttgttcgcgagcaacttaaaacaatcctttctggtggtcctgttgacgcaatgaaaacaggtatgctcggttcaattgacatcattaaagctacacgcgaagccatcgacaaatatgatttaaaaaatgtcgtaatcgatccagttatggtttgtaaaggggaagacgaattaatccaaccagaaaacgcggaagctatccgcgacctactgcttccaaaagcaacaatcacaacaccaaacctattcgaagcaggtcaattatccggtcttggcaaattaactacattagatgatatgaaaaaagcagcgaaaaaaatcatcgaattaggtgctaaatacgtagttatcaaaggcggaaaagccctagaaagcgacaaagcaattgacctactatatgatggcaaagaatttactatctatgaagtagaaaaaatctctccaagccacaatcacggcgctggctgtactttcgcagcagcaatcacagctggacttgcaaaaggtttaacggttgaagaagcagtcgcaaaagcaaaagactctgtcactgcagc

SEQ ID NO: 1416 - DNA, 730 bp, Listeria monocytogenes-4B
  misc-feature (1)..(end): n can be any nucleotide a,g,c or t/u
ggccgacagtgtgctggaaagcagatcaatatgacaaaaagcccaagagagaaagcggggcgcaccaattattaagctgggtgctagttatcgttgcagcgcttgcaattgcacttgtgattcgtaactttgtagttgcaccagtaaaagtagaaggaacatctatggttccaacatatcaagatggtgatagaattttgattgaaaaaatttccaagcctgatcgtttgggcatgatcgtgtttgatgaacctccaatgattggttcaggagagcatttcatcaagcgagtgattggtttgccgggagataaaatagcatttaaaaacggtgaattatatttaaatggaaaacgaaaagtagaaaattacttgccagaaggaacattaaccctttggaatccagatccaacgcaaaaaccatacatagcggattatacgctggaggatatgacagacgaaagtactagttaagaaagggaaactatttgtacttggagataatcgcggcgggagttcagatagtcgcgttttcggatttattgatgattccatggtaaacggtacagtgatacaatttggaaaataatgtgaagtccgtgaagatactttttcgcggatttctctataaaatgagcgttttttcgtttattttccagcacanncgtgcggcccgctcgaagcatgctgctaggttgactnttagtgcncccncaaaaaangtaaatctc

SEQ ID NO: 1417 - DNA, 702 bp, Listeria monocytogenes-4B
atgcaggtttttttcaagtgcggctcggtaggttcccatcgccattaaatcattggttgcaaaaatggcactcagattttcttggagtaacttttgcgtcgcaacataaccgccattcatcgtctgatccccgcttacaatccaagtatcttttacagtaagtctatagtctttcatgcatgccaagtaaccctcgcagcgttcatgtacgtcgtgaaaacatgtgtggcaaataatcgattccatgcccgtatggcctacggggatgcagtgctcggcgcggatatgcggcgcttggaaatcgtggcgtgcactctgcccgtgctagacccgcatccccccttccaccccccctctgttcgccgcccacccccgccctccgtgcggtccggcgccctccgccccccccccctcgcccccccctccccccccagccccaccgccatccagagtccttcccctcgccgccacccgccccccccactccccccccccccccattcctccccccaccccgccttccgatggccagccccccccccgactcatcgccccccccgccccactcccaatcggtcacctccgccacacctcctcctcccaccccccccccgcccctgcgctccacatactccccgccgtgtcacgcttgtatccgacccaccccctccttctgccctttgccgcgaccctcccaacatt

SEQ ID NO: 1418 - DNA, 868 bp, Listeria monocytogenes-4B
  misc-feature (1)..(end): n can be any nucleotide a,g,c or t/u
aacagtgtgctggaaagggaccgtttagtttttttcaggctaatttagcgattcagctggaagttgagcggattttcgaaggagggaaagccttgtgataacgaatcagcgggatattgataaatattatgatatgttagtggagaaaaattcgaattatgaaggcgtattttttgttggagtgaaacgacgggaatactttgtcgcccaacgtgtccggcgaagaaacctttaaaagagaattgtgagtttttcagtacagccaaggaggcgctacttgcatcttaccggccttgcaagcgttgtgaaccactctccaatccgacgaaattgtcgccagctgtgaagttgcttgttgatgcaattgagaaaaatccagagaaaaaatggacggataaagattttgatgaattatccattagcgcaaatacagcgcggcgccagtttaagaagcagtttgggatgacttttattgagtatgcgcgttcgcggcgtctcggtcttgcttttaagcatattcggggtggaaattcgatcattaatgcacaaattgaaagtggttatgagtctggaaatgggttccgagatgctttttcaaaaacgatgggggaggttcctcacaaatcaaacgatatcatcattttatactccgcttggcttgagactaaacttggatcaatgctcgcaatttctgatgatgaaagtctattgcttctggaatttgttgatcgaaaaggcttggaaacagaaattaaaaaattacgaatgcgcttaaacgcggctattacacctgaaaaaacagtaataattcaacaaactttccagcacagttcggccgtncaggcagcgcgncagttggctactaggc

SEQ ID NO: 1419 - DNA, 719 bp, Listeria monocytogenes-4B
atcgtaatggttacggcaaaccagaaggaatagttattcatgaaacagcaaataattcatctactattacaggtgaaatcaattatatgagtaccaactacaacaatgcctttgttcacgcttttgtagacaagtctcgtataatccaaatccatcctactgaaaatggtgtttggggagcaggacaatatgctaatgctcgttttatccaagttgaattagttcgttcgaagacattcgatgaatttgctcgttctattaataactatgcctattatgctgcgtaccttttagatcaatataaccttcctgttgatagcgcgcacagtgacggcaaaggaacagtctggtcccacgatgcagttacacgttatttaggcggaacaacccatactgatcctgtttcttatttcaaccaatggggttataatttcaatagttttgctaccttgattaatgaaaagcccaaagcgattcacgctcgcccagttacttacgaccaaatcgattccgattccggcgcctcagtctacgctcgagctaaaactgcccctggttctgccgcctggcctttccctcttccaacgtaggctcttcctcgcccctcttccttctgtctccccccccccctcctcgccgctcttgccccccgctcttccccccccccttcttgccgcctcttcccccctcccgcctctcccacgctgcaacataaaaaa

SEQ ID NO: 1420 - DNA, 909 bp, Listeria monocytogenes-4B
tgtcactgtgagctgctcgacggccgacatgtgctggaaagacttcaagctggtgcgctaattagcacatacacggcgagccaaggtttacttttaatgattcctaatatgtacaaaattgccggtgaactattgccaactgttttccatgtttccgcaagaacaatttcggcggcatcgctgaatatttttggtgatcatagtgacgtgatggcagcgcgtcaaacaggatttgcgatgctagcagaaggttccgttcaagaagtaatggacttatccgcggttgctcatctggcttcactaaaaggaagtttgccatttttaaatttctttgacggcttccgcacaagtcatgaattacaaaaagtcgaagtactcgaatatgacgaattagaaaatttgctcgacaaagaggcattacaacaatttagaaatcgcgcaatgacaccaaataatcctaaaactttaggttcgaaccaaaatccagatatctttttccaacaaagagaaaccgtgaaccgttattacgaggaaattcctagtatcgttcagaattatatgcaagaaattaatcagcttcgtggcacggattatgacttagttaattattatggagcagaagacgcaacagatgtcattgtggcgatgggctctgtaacaccagtcatcgagcaagtcattgattacttaacaacccaagggaaaaaagtcggtttgctaaatattcgcttatatcgtccattcccagcagaaaactttttagcaaaactaccgaaaacagtagaacgtgtggctgttttagaccggacgaaagaacccggatcaggcggagaaccacttttactcgacgtgcaaagtgtgctgtatgatagtaaacctcgtcccctccactagtatgggatgtagatt

SEQ ID NO: 1421 - DNA, 1012 bp, Listeria monocytogenes-4B
tatccatgtattgtactttgtatcattatgattgcatttaacttaattgcagatggcttgcgtgatgccttcgatcctaaaatgcgcgattaaaagagaggtgaggaaaaatggaaaagctattagaagttaaagatttaaatatttcattccacacatatgccggtgaagtaaaggcgattcgtggagttaattttgacttatataaaggggaaaccttagcgattgttggcgaatctggttctggtaaatcagtaacgacaaaatcgattatgcgtttacttccagaaggtaactcagaaattaaaagtggccaaattttatttaacggaatggatatcgctaaagctcacgaaaaacaaatgcaaaaaattcgtgggaaagatatagctatgattttccaagatccaatgacatcattaaatcctacgatgacaattggtaaacaaatttctgaaccacttattaagcaccaaaaaatcagtaaacatgaagcacataaaacagcacttcgtttacttcaattagttggtattgccaacgcagaagaaagaattaaacaatatcctcaccaattttcaggtgggatgcgtcaacgggttgttattgcgatttcacttgcatgtaacccacaaattcttattgcagatgagccaacaacagcgctagatgtaactatccaagcgcaaattttagatttaatgaaggatttacagaaaaaaattgatacgtcgattatctttattacccatgaccttggtgttgtagcaaacgttgcagaccgtgtagctgttatgtacggtggtaaaattgttgaaatcggaacagttgatgaaattttctataatccacaacatccttatacatggggactaattagctctatgcctactttggatacagatgatgaagaattatttgttattcctggtacgccacctgatttacttcatcctccaaaaggggacgcatttgctgcgcgtaataaatacgcaatgcaaattgaccttga

SEQ ID NO: 1422 - DNA, 1215 bp, Listeria monocytogenes-4B
aataaaaaaattaagaataaaaccgcttaacacacacacgaaaaataagcttgttttgcacttttcataaattattttatgaagaatgtagaaacaggcttatttttttaatttttctagaagaattaacaaatgtaaaagaatgtctgattgtttttccatataatataagcatatcccatagtttaagccacctatagtttctactgcaaaacgtataatttagttcccacatatgctaaaaaacgtgtccttaactctctctgtcagattagttgtaggtggcttaaacttacttttacgaattgaaaaggagcggtgaaatgaagagtaaacttatttgtatcatcatggtaatagcttttcaggctcatttcaatatggcggtaaaagcggattctgtcggggaagaaaggctccgaaatgatatacaagccaaaaggaaccctgctgatttaaaagctttgccagattcctgcgaagcaaaagatttttataaaaattttaaaattcttgatatgacaaaagataagctaggcgttacgcattatacgctcgcgctaagttctgatggttacttgactgataatgatgaaataaaggtccacgtcacaccggataataaaatcacttttataaatggagatttacagcaagggcagcttaggattactaatcaaataaaaatcacagaaaaaaatgctattgaaaaagcatttgaagccattggtcagagtgaagctcatgtgaaaagttatattggaaatccagtgaaagaaaaagaaatcatcatcaattccagaacgaaacgcttagtttataatataaaattgatttttgctgagccggaagttgcgagttggattattcaagtggatgcagaaaccggcgcaattttaaaaaaacaaaatatgctttccgaggtagagcgggctgatacccacaaagattttcaagcgcttggtaaaggagctaaccgattactccagagaccattacatgtcatgaaaataaatgacctgttttacttagtggatagaactcataaaggactcataagaacttttgatttaaaccataaaacggacgcatcttttggaaaagtggtgtcgaataaaacgaatatgtttacggatcccggatttagttccgcggtggatgctattttttccgcaggtgaagggtcccattcctttaaaatgtgcccaacaacag

SEQ ID NO: 1423 - DNA, 923 bp, Listeria monocytogenes-4B
cactgcatgggcaccagtgtgctggaaagacacatctctttcaaatgttacaatacgttaggactataaaaatctatcatggacaggagtgatggcggatggcaaaacgagattactatgaagtgcttggtgtttccaaaagcgcctcagcggacgaaataaaaaaagcttaccggaaactgtccaaacagtatcatccggacataaataaagaagcaggcgctgatgaaaaatttaaagaaatatcagaggcatatgaagcattaagtgacccacaaaaacgtgcgcaatatgatcaatatggacacgtagatccaaaccaaggcttcggcggcggtgctggtggcggatttagcggtggaggattctctggatttgaagatatctttgacacattctttggtggcggtggacgtcaacaagatccaaatgccccaagacaaggtagcgatttacaatatactatgcgtcttaaattcaaagaagctatttttggtaaagatgcagaaatcgaaattcctcgcgaggaaaactgtgacacatgtcatggttccggtgcaaaaccagggacaacacctgaaaaatgtagccattgtggtggtaaaggttccattaacgtggaacaaaataccccatttggtcgtgtagttaacaagcggacatgtcaatactgtaatggtactggtaaagaaatcaaagaaaaatgcccaacttgtcacggtaaaggccgtgtaactaaaacgaaaaaaatcaaagtgaaagttccagctggcgtgaacgacgggcaacaaatgcgcgtatctggtgaaggagaagccggcattaacggcggacctaacggcgatttatatgtggtatttgtcgtaattccagatgagtttttcgaacgcgaagcagatgatatttacgtagaagtcccaatc

SEQ ID NO: 1424 - DNA, 1034 bp, Listeria monocytogenes-4B
ctgtggcacttagcagcatgctgagcgccgacgtgtgctggaaagagggtttgacggtaaagatattgttttcgcgtattccgtccagaacatattcatgatgagccaatcgttattgaagctaatcctgactatacgttcaaagcaactactattgttgacgagcttactggtggtgaatttatgctttatagccgggttggtacacatgaattacaagcactttttgatgctcgctcggaacaccaacgagacgaagtacttactttagcattcaaaatgtctaaatctcacttcttcgacccagaaacagacgataacttaactgattaatattcgtagaaaaacccgccaagctcggcgggttttcttatttttcaaaaggaaatttaattccccactgcgttctaacatcgctcataatcgtgataacatcatgttggtgactgataagtcttgttttctggggtggcgatgctgtgttccgtggctgtaatgccatattctaatggtggactcgttctcgcaccctcgctgtgctccgcggcgcgcacccttcagcgccagttggcggtcccgccgtcggtttttcttcccgcaccgcttctcttcgtccgcccgggaccgccgggccgttcggccggcgtcgctgttgtgctgcgtgtttgcctcttccctgtctacctccgccgtcccccccggcctctcccctctctctccccttttccccgttttccccctcccgtctctgtgcggtgctttgctttgcgcgctctgccgcgccggttttcgtctgcctgtctcgtttttcgtgcgcattgcttccctgccctgtcggtttcgtatgtctggtgtgggttcgcgggtcccccggtctttcctcgccccgtctccccgtatttccccctcgccgcgtcctctcttgccccgtgccgggcttctttgtgcggggagcaaccgtacacgccttctctgaccgcgatctcgtatggcagcctgtgtccgcctgcgcaggtggctagggcagcctgcgg

SEQ ID NO: 1425 - DNA, 1330 bp, Listeria monocytogenes-4B
  misc-feature (1)..(end): n can be any nucleotide a,g,c or t/u
tgtgggggtagcgacggccgcggcgcggaggcgcggggggcggggggggggggaggtggggtaggaggggggggagggggcgagagggaaacgggggcgggggacggaggggcgggcgaggcggggggggaggcgggggcggcaggaggggacgggggggggggagcgggcgccgtcggggcggggcggagggggtcagggggagggggcgggggagagatacgggggggcgcggggagagaagaaagcgcccccgagggggggggagggaggaagggagggggagggggggcgggttgtgggaggagagggggggggtggtttttgggaggacaggaggggcatggtgatgggcggggtgggcgtggtagtcgttcgttatgggcgatgggtgcgcttgggatgagggctggccgcgtgcatccggtgggtttgtgggggggtaatagcaagccggcagccgcgatgtccgagcatgggattggcttctcttagtccgttgattcggtttgtaataaaaggaacggttcgattcatcgcgccagccaattgttctatttcttgcttcattgttggtaaaaattcatgtaaaggtggatcaagcaagcgaatgtttaccgaacgaccgtctgcaatacggaataattcattgaaatcggctttttgcatttcttttaaaattgctaaaacagattcgcgctcgtttaatgattctgctaaaatcatttnggcgtacataaggaattcgttttttcatcanaaaacatatgctcgggtacggcaatgtcaataccctgccgcacaaataaaagcgcttntttaaagtctgctggggtatctgcatttactcgataatttaacctttcttcgctttaacccaggcataaggttgggaaaatgacccccaattttttgcttttctgaaggcattttttcccagggaaactttggccgggactccccttcaggggaagagcccctccccttttttccagggggttccccccttggaaaaaaaaacaccctttatttcttttttatttaaaaaaaaagtttgggcgcaccccccccggaaacacaatttttttcccttttccccggggcacaaagcgggggggggggaaaagctctcccccccacgaggcgcgggtaaaaaaaggcgttactccccgggcccctgccctcctattttccccaggggaaaagcctctttttgcacacttaaaaggaccggaaatccccctttttggggggttgtgaaaacttctttttggcttttaaaaaaaaattttcgccccgtttgaaccccacagggtttgggggagaaaaa

SEQ ID NO: 1426 - DNA, 1148 bp, Listeria monocytogenes-4B
ccctcgatgtccatctgtgtgttggaaattgctttttcggggagtatacctggtgcttttattctgctaaaatagattatctaaaggagggaaccgaaatgaaagcaactggaattgtggtggaatataacccttttcataatgggcataaactacatttaaataaagcgcgcgagttaactcaagcagatgtggtgattgctggtaatgagtggcttgtttgtacaacgaggcgaaccagcgattttgccaaaatgggaacgtactaggatggctctcgctgctggcgttgacatggtggttgaactccctgtctcattcgcgacacaacatgcgacgattttcgcagaagaagcagttcgtattttagatgccattcatgtggatacgctgttttttggcagtgaacatggagttgcggaagattttacattagctgcgaaaaaagtagtcgaaaacgaagcccgttttgatgaagcgattcagctggcgttagttgataagaaaacttcttatgctagagcttatacagaagcttttaaaaagttgttcggccagaacttgctggatatcacgaaacctaataacattctcggtttccactacgcccttgctgcccagaaacaaaacccgtccatttctcttcactccattcctcgtgaacatgcaggataccatgacgaggaagcaaaccatgaccaaatcgcaagcgcgaccgcgattcgaaaattaatacttgctgggaagttagaagaagctagccactatctccctgcttcttctatagctattttacgcaattatgaggggccatttttatcgtggacagattattggtcattcctgcaatatcggttaattcaagcaggctcagaagaactggaaggaattcgcggtgttagtgaaggaattcaaaaccggatgcagcaagcagcgactaaagcgcaaaacttctctgattttatagaattaaccaaaacaaagcgatacagtaatgcgcgattacaacgaacggctttacaaattttattaaatgcgaggagtcaaactagctccccttacatccgaatactcggcatgaataaaacggggcaacaatatctatcgcttcataagaaaaatatttctctccctattatcacgacggt

SEQ ID NO: 1427 - DNA, 696 bp, Listeria monocytogenes-4B
  misc-feature (1)..(end): n can be any nucleotide a,g,c or t/u
gcaatcgtgaaaattgaaaatggctatattgaagcaactgctgaaaaattagttggtgctaaagtatacttagatttcccaagtgttggagcgacacaaaatattatgatggctgctactctagcagaaggtactacagtaatagaaaacgtggctcgtgaacctgaaattgtcgacttagcaaacttccttaaccaaatgggtgctagagttatcggtgcaggaacagaagtaattagaattgaaggagttaaagaattaactgcaactgaacattctattattccagaccgtattgaagcaggaacatttatgattgctgctgcgattactggtggaaatgttttaattgaagatgcaggtcccgagcatattagttcgttaattgctaaacttgaagaaatgggcgtgcaaatcattgaagaagagaatgggattcgtgtaattggtcctgataaattaaaagctgtggatgttaaaacgatgccacacccaggttttccaacagatatgcaatcgcaaatgatggttattcaaatgctgagtgaaggaacaagcatcatgactgaaactgtttctgagaatcggcttatgcctgtngatgaaacgcgtagaatgaacgctgatatcgaaattgaaggacattcctgtcttatcnctggcccagctgaattacatggagcagaatctgctgaa

SEQ ID NO: 1428 - DNA, 896 bp, Listeria monocytogenes-4B
ggttatttgttggcacaataatctgcttcgtcacttcgtcgtaatccacttttgccacgttgtaaatttccttctcatttgaatcacgaatccaaacttcttgaaaaccactaattctacctaaatcatctagttgcgtataaactggtagcgtgatatttgtatcctcaccaaaaacaacattttgatctggcaaagttccgatttgacctagtacgattactttatccacaatagtaggcggcaacacatttaaataattataacttaaatccatacttaccaaactgtccaaatgagtgaaatccgtcatttctgttctaaattggttcgtttgaaaatttactttctgcaaatttttcaagtttgtaaaatctggagcgtcttccgaagctagtccacaactgctcatcaacaaggtttctaatttaggaatattagaaaagttaggtaagcccccaacaatagttcgattactaagatcaagatactttaattctgggtagttttgataatcgggaactgtaatgttttcaggtagtacctcgcttgatagatttccttctgctctcaaagtatctaatttgggcaaggttggtaaatcaggaaagccagtaaacatggtttgtgtaggataaatcatactattatttacattggtaaaataagcatttcctagcatttgtaaatcttcatctgtgaggtaattggtaaaataacccaaccctagagatgtcaccgcatccacatcatcttgggtaattacatctgtcacatcttttttaccaaagttctccaccatatcttatgctaaattttcatctgggaaaacatcgattattctggctgtaatggattactctgactatttgacttcatctataagtgaagacaca

SEQ ID NO: 1429 - DNA, 763 bp, Listeria monocytogenes-4B
  misc-feature (1)..(end): n can be any nucleotide a,g,c or t/u
ttggtgtgtttctgttgcttttattaggaaggggagggagagggcggcagaaagagaagttcgggttatggggccgacagggaacgtcaagcagttcctctaagcaccgagaagctccattggtgcaacaggtatggaacacgtatctgcaaaaggctctggtgctgctgtaactgccaaacatgacggtattgtagaacacgttgaagctcgcgaaatctgggttcgtcgtgtatctctagtgcatggcaaagaagtaactggcggaattgataaatatactttacgtaaatttgttcgttctaaccaaggtacttgttataaccaacgtccaaacgtagcggaaggtgaccgcgttgttaaaggagaaatccttggtaacggtccatcaatggattccggtgaactagctcttggtcgtaacgtactagttgcattcatgacttgggatggttataactacgaggatgcgatcatcatgagtgaacgtcttgtaaaagatgacgtttatacttcgattcatattgaagaattcgaatcagaagctcgtgatacaaaactcggacctgaagaaatgactcgtgatattccaaatgttggggaagacgctttacgcgaccttgacgaacgtggaattatccgtgttggtgctgaagtaaaagacaacgacttctagctggtaaagtacaccaaaaggagtcggattactcttcgggcatgtgnccctcagcaaggccgttactttatggtnnnaaagtcagct

SEQ ID NO: 1430 - DNA, 1271 bp, Listeria monocytogenes-4B
cacgcagtcgttctggtaaagcttctagcccaacggttgattggatatacttgatattatcgatttgcctaacagccgcattaattgtcttgttgagattcgccgtttcacagttcactagcctgttcaccgaattccgcatatcacgcataatccgaacatcctcaaaatgaagaagcgcgctagttgctccgataatactcaagaattccgtgattttttccgcttctttcaaataggtaataaaaccatttttccgttcaagcgttcgcgcattgagatcgaattgattcatcaaagcgcaaatcgcctcattgtgctcctcataaacagagaaaatttctaaatgataagaagaagtttccggattattaactgacccacttgccaaaaaggctccacgtaaataagcacgtttggcgctcctcttcttaacaaatcccctatcaatcgatttcgtaaacgtcatcggtggctctagtatccgtaaatcttacaaaatcccccgtgtacctgacttcaagcgaactatataaacattattgtttttcaacttcattttgcgacgtacaagaagttctattggcacttcgtataagtctttcagtaattgatacattcgtctagctatggctgcattctcggtttggacatccattatcactaattgattcgaaaacgagatggcaccattcattcgaataaaagctgcgagttccacttttgcttttctatcacttacgtccatatgggttaattctttcttggtttccgatgcaaatgacatggcttactcactccttttcaatagtttggttaggtaacatcgctaaaagcgcgtccgccaccttttcagcggcatggcgcacaaggccatcctctgtagaaagaaaatcttgataaatggcttctacgccaagctcttccattcctttggcattatgctctacttgcgcaacatcctctgggaataaaagttctttcggaacagtcgtcgtattaattaacgttttatctataaaagattttcccacatgctcatggataactttaatatgatccgcatctgagaaaaagtcggtttcgccaatttgcgttaaaatgttcgtaatgtatactttcggagccttgcttgctataatttcatcagctaattccgtaagtaatagatttggtaaaatacttgtgtataaactccctggaccaataacaatcaaatcagcctctttcactgcttcgactgctgtcggatatggttttacattctctgg

SEQ ID NO: 1431 - DNA, 792 bp, Listeria monocytogenes-4B
  misc-feature (1)..(end): n can be any nucleotide a,g,c or t/u
tgccctttggacggacttaagtaactacagcagcctggcgccgaacgggctggaaagtggaccttgaaaaagaggccacctgcactacttgctcgcgtgcggaagttaccacagaaagataagtaacacgggcaccctcattatcgggcacataaaggtttatgcgttcgcctctatgtacttactgnattaccaactgtgttaatgttttcagcgtcgccatcagagatttcaactccgaactcgtcttcaagttccattactaattcaacaacatctagagaatctgcacctagatcttctttgaaggaagcttctaaagttactttggattcctcgacacctaaacggtcgacgatgatttttgtaactttttctaatacttctgccatttttcacttcacctccctccaagtattatataggattatttctcctacgtaaacaaaaatatttaaagtaatgcgagccaattaaattcgcattcattaaccaattttacatcaccattccgccatcaacagatagtgtttgaccagtaatatacttcgaagcatcgctcgctaggaaaagaactgcatttgcaatatcttccgttgttccataagcaccaagcggaatttgcgctaacattgcttcttttgttttttcatctaatttgtcggtcatatctgttgtaatgaaaccaggagcaacagcatttacgttaataccacggggcgcaagttctcgagcagttgtttttgttaaaccgataacgcccgctntacttgctacgtaatttgcttgaca

SEQ ID NO: 1432 - DNA, 740 bp, Listeria monocytogenes-4B
aagtttctacatcaaaattagttaaggcacttccaaagaatactggtgtttgttcaccggcaataatacgttcccggctaaaatcatttccagcctcatcaagtaacataatttcttccaatgcttgatcataataaagtaatttttgaatagcatgtgcttctttcaaatcaccatcttcaccaagtggcaagaaacgctcatcttcctctgaacgatattgttcaatcacacgatgatagcggtcataaagcccagcaagctctttccccataccaattggccagttcattggatacgattcaatgccaagaacttcttctaattcagcaagtaattcaagcggcattttcccttgacggtccattttattaataaaagtaaaaattggaatcccgcgcatccgacaaactttgaaaagttttagcgtttgggcttcaatccctttcgcagcatcgataaccataactgcactatccactgccatcaatgtccggtacgtatcctcactgaaatccgagtgacccggtgtatccaaaatattaattcttgaaccattataatcaaactgcaacacagaactcgttaccgagataccacgttgtttttcaatttccatccagtcacttgtcgcaaacttgccagatttctttccctttacagtcccagctgaacggataacgccaccgaataataataattgttccgtaatcgtcgttttcccagcatccgggtgagaa

SEQ ID NO: 1433 - DNA, 630 bp, Listeria monocytogenes-4B
cctaattggcactctagcatgcatgccttgagtcggccgtcagtgtgctggaaagttgcttattctgatgttaacggcagcacaccaccagaagaaaatgaaggagattttgatcttgaaattgtaagaacaaaacaattttcattaaaaccgatggatagtgaagaagctgttttacaaatgaatttgctgggtcatagtttctatgtttacactgatgcggaaacaaacggtaccaatattgtttattctcgtaaagacggcaaatatggtttgattgaaacaaattaatttaaaataataattaacagatgggggccaatcttggtctccattgttttactcttagatgaagaatttatggcgtttggataattttattgattaaaaagagataaccaagttgatattttagttaataagtgatagaataacttgatatttaagggaaataatcctgaaagttatataaagaaactggcccatgacggcaaacccggtaaggagaatttaaatggttggcctttgaaaaaaatttttgatcggggaaaaaaaattttaatttttggggaaaaaaacccaagaaatttttgctttcggggggaaacccggggtttttggagaaagact

SEQ ID NO: 1434 - DNA, 1102 bp, Listeria monocytogenes-4B
  misc-feature (1)..(end): n can be any nucleotide a,g,c or t/u
tggtgttggggaggggagaggtggcggaggggggagggagaagggaggggaggggaccgcggggagaggggacagggccaggagaaaggggagggaggaggggaagggaggtagggggagggaggaaggggatgggagtgataggagagggagcggggaggggggggggggaggggagttagacaggagggagggggagggaatgggagaggaacgggggggggggtggggggataggggaggagaggagatgggagggggggcggggaggaaaagagagggacgagaaaaaaagggggggggtaagggaacggggaggggggaggagggggaccgtagtcggaggaggataaaagacgtcagcccaatgtaagttattcccagcatcattttaaccccaactatgtgcgtccgtttatatggtaatgatgccgtaaaacgattcgctcttgtgtagcgctcaaaaataactgccaaaacccctaaaataaaaacactcaccttaatcaatgtaaaaaacatttctacttgaaaataaaacataaatggcatgtaatctacaaactcatcttgaacaaaatttgtatacattggaaccgctaaatacgccactgtcaaactagctttcatttcctcatcagaagttttaaattcaggattttctttctgttgctttaaaaactcacttgattcgtagtactctttttgactattccatctatctgcgtctgacattagtcccaaagtaattcctaagaaaaatagtatcacaacacccaaaagcatccatctcatattacgccattctcggtaccataaacctcgattaaacattattagccttgtccctcctgtctgttttaaatctcgtaataatctattttatcatttgctaaatgcaccgtgaaaatgtcttctatcgagatcgacatttcttctagcaaaaccggttcttctaaacgcaattcggcaagaaaactgctagcattttcagtcactagaagcgtgtaaatncgcccattacgatacaataattgcgcgttatttttcacaaaatcaggtatttttttcgttttaaatgcaacttgtattttcaccggat

SEQ ID NO: 1435 - DNA, 1298 bp, Listeria monocytogenes-4B
  misc-feature (1)..(end): n can be any nucleotide a,g,c or t/u
taaacgcataactgaaatacgcactctcctcatcaatagtcctcctttacaatccagttgaattataacacagaacctacgttcgtaacaattcaataaaaaatactaattttggacttttatgataagacattctaaactcgcgcacaagagcgactatacagcacttttcactaaaaaaagacttttaatgatttaaatatttcacattttagaaacatttacacgtgaaatactattagactgcgtataactgttcttttgcattctgatacaattatgtttacaaaagaagattggagaaaacgtcatgccaaaaaatttatataattatcaagaatttattcgtttatcccatgaaggaaaaatagcttttgaacaaattgatgtaccaaaaaacgccagcctattaacagaaaaaatcgatatagataaccatatttatcttgtagttgatggatatattgctttgattttaaatgatggtagccaaaatcccaaaatctattctattcaaggtaaaggaacatttttgaactattttacattactcgaccgaagtaataatcatttcaattttaagactctctctggatgttcattatataagtattcgaaagcagatatggagtattttctttcaatgtttcccgaaaatttcggattccaatttttcataatgaaaaaccagactactcacatttactttaaaagcttaatggcaagtagtccggcttctgaaaaacttaatatgaccttttcgaatatggctttgttacacggggttctgagtgatgatgacacagtaatactgcctcaagcaattaaaacaagccatccttttnnnnnnnnnnnnnnncnnnnnnnnnnnnnnnnnnnnnnnnnnnnnnnnnnnnnnnnnnnnnnnnnnnnnnnnnnnnnnnnnnnnnnnnnnnnnnnnnnnnnnnnnnnnnnnnnnnnnnnnnnnnnnncnnnnnncntnnnnnnnnnnnnnnnnnnnnnnnncnnnnnnnnnnnnnnnnnncnnnnnnnnatnnnnnnnnnnnnnctnnncnnnnnnnnnnnnnncnnnnnnntttnnntccccccnccccccactgccccncccccccccccccccccctcccccncccccctttcctcccctcccctcattttatcncnccnnncccncgnccgcccccccccnccctcttctttcccgctcccatgngccccccccgctccttctctctgtctttcgttctccctctcgtttgttccgccggctctctacttcctggngcgagcaccaaaaa

SEQ ID NO: 1436 - DNA, 648 bp, Listeria monocytogenes-4B
  misc-feature (1)..(end): n can be any nucleotide a,g,c or t/u
atccacatctattccgcgccctgccacatctgtcgcaattaagaaacgggatttgccacttttaaaatcatccattgctcggaaacggtcttcttgtcttaaacccccatgaattttactaacttttacatcaagtaaatcggtgagttcatcgacttgatttttcgtattgcaaaatattattgcgctatccggattttctgtaatcaaaacatcttttagcgttttttctttattatctgtttgcatctccacgtggaagatagggtttgttttttccgatgccatttcgattaccattggatcatcttggtagcgtttaatcaaatcttgcatttcttctggcatagttgctgagaaaaatagattttggcgctgttttggtaaacggctaagaatatcttcgacttgatcaataaatcccatgcttaacatttcatctacttcatctaaaactaaatgggcaaccttgtcgacattcagtgatcctttttcaatatgatccagcaggcgaccaggcgtcccaacgacgatatgattcttttggcttagttctaatttttgtttcgcaaatggtgattgtccgtatattgctgcagctctgacacgtttaaatcgtncaatattcgtacattctgtcttgacttg

SEQ ID NO: 1437 - DNA, 808 bp, Listeria monocytogenes-4B
acggccgccactgtgctggaaagtaatacaggcgatttctagaacaaatcgaacttttgaccttaatagcaaaccacatgggaaagtacgtttttatcgccaaggtgatgaaatgcgcgaatttgttgaaaatgcgctacgtatttatacgagaggtggcaatgatactcttcaagaagcggaagaagagacaaaaaatcagctgcctaaagatttagaaaatgacgatattcttgcaaagccccagagccaccaaatcaacgaactagaagaagctatcttaagattgaaagagcttgctggcgatgattttagtcaagttccacgaggccaaaatgatctaaaagaatttgttggtcttgctttaactactcaaaccaagatccagcaattaatccaacagggttatgagctaggaagcgagattgaggagctaaatgaacaaggtgaagcgactggaagaatggttcgtttgaacatttcaagtattgatgaatttggtgctttacaagctcgtttatatgatgctaaggagaaattacctcctgaagagcgtccagatctcactgaaataaagattggaattgaattttatcatcacgagataattgactatgatatgttagttgagcttctgaatacctttatggacgaaaaaaataaaagtaataaagatgctatcgaaaaacacatcgtaccaatggatgaagaaagtcaacatgaaatccatggaatcgtggatgatattgaagcaggtcatatcacagaacattttacaaccgattctcttcaggaaacacgtaagaaa

SEQ ID NO: 1438 - DNA, 840 bp, Listeria monocytogenes-4B
tcaataatgaagaagaaactatctcaatcggtattacgcaatcttctttgcctatggaatttaacacaatcattaaagagttctatcaacagtttccaaataaaaaattatctatcgttagcggaagtacaagtgaattaataccaaaaatagctaacagagaactaaccatcgcatatgtcgctgaactcgaaaaagaaaatttatttcaagatagccaaatcatctcacaaacgctctcatgggataaactagttttcgcaggcaacacagctggaaaatcagtccaaaaaatattagcggaagaacgattatacgtcttcagcaaacaatgttattcataccgcgccctggctgctctcattaacgatattaatatcccaaatgtttccatatcagagatcaatattcccgaaacacttgttgaaatctgcaataatgaacttggtattggaattatccccgaaagcatcgcactaaactatcattttctaaactatgaaacattacccacagaatacgcatcacttcgaaaaacattaatttatcatgcagatcatacaatttcaaatggggaaaaatggcttatcgaaaaaagtaaaccagcattcaaaagttaagttgttgattacaaccctttcaaccagctagctatttatgataaggctccccccgaacaattcgaaacgcccggtaaacctgctccaccagcaccaatctcatcaactggtgtggcagcgttaacctcccaaacgaaatccgctcattactccgcttcaacaccgcctcactaagccccagcgatccaccaatcacaaacgtcaccttactcttaccata

SEQ ID NO: 1439 - DNA, 1127 bp, Listeria monocytogenes-4B
  misc-feature (1)..(end): n can be any nucleotide a,g,c or t/u
cggaaggggaaaatcgaagtctgaaaccgggcggggctgaggtgcgactggcgaaggagcgcatcatgctccagaagatagttgatttggagtatgtccctgggcggcgcatttttgttaatgttcaagaccaatgtggaaggagcgatttgcacgtttattctagcaccgattttggctgtattaatggtttacttcaacgagcgaatgaccaaagtaacaaccgggatttttaaagatttagggaattttaatgctggagtggaaaatgcaattagcggggtgcgtgtcgtgcaagcattcgccaacgaaccacatgaaaaagggcgttttagagtgctcaaccaagcgtatcgtcagtcaaaattaatgttctacaaagtgatgggcttgagtttttcgtttaactattttctgatgcgattgattagtttatttgcccttttattcggagcttattttacgattaatggcgaaatatcatacggggaatttgtcggatttatcttgctaacaaacgtgttcattcgaccaatcgagaaaatcaacaacgtaatcgaaagctatccaaaaggctttgcagggtttaagctattcctagatttcatggatacgtgaaccagcaatccaagacgaaaaagacgcaaaaccagccaaggcgttccgcggtgacattgcttacaaccatgtatcttttgaatatagcgatgggaaaaatgtgctaaatcatataaatctttctatcaaagccggcgaaaccgttgcctttgttgggccaagtggagctgggaaaacgacgatttgtaattcgttaccacgtttttacgatgtgtcagctggagagattacaattgacggtgaaaatttaacgatttactttaccgctttacagccaatcgtgcgtgcacagatgctttgttcgcggatgatcaactttnnnnnnnnnnnnnnnncnnncntccctnnncntnntctccccnccccccnctttttcttcttccctcttccctcctctcctttntttttttttcccctcttcgccgcctcccccttttctttttctgtctcttttcttccggctccttttttttttcttttttcccgtttcataaaaaaaaaataaaaaa

SEQ ID NO: 1440 - DNA, 1145 bp, Listeria monocytogenes-4B
  misc-feature (1)..(end): n can be any nucleotide a,g,c or t/u
tttttttttttgcacctccgcacacccgagccaaccccgccacccggggcacacgccaccggggcgccacggcccggcccaaagggcgcgcccccaccacacgcgcgggccaaccgcggacaagagcacgacgcccgccacaccagaagcaggaacccaaaaggcccccaccaaagcaacccgcaggtcattaacacaggtgaaagaagtggtgaagttcattcgccagacaacgtattttactttgatatttctgcgccaacagaacttggtggagacggcggtggtggaacaaacccagaacaactatttgcggctggatncggagcttgtttcaatagcgcgttagaattagttctaggaaaagctgggattgaagcaaagagcacagtaacagcaactgtcagcttatatagtgatccagaagacaacggttttaaaattggtgtcgtattagaaggaactatcgaaggacaagataaagaaaaaacagaagcactacttaaaaaagcacatgaagtttgtccatattctaaagcaactcgtggtaacatcgatgtggaaattaaagtaggttaatgtttaaataaaaaaaaccatatgacttagatcaactagtcattggcttttttatattatcttctgcgtttgcggccaagcccaacgccattttccattttcttcaatgttttattagccacgcgagcagctttttctgctcctgcgtctaatatagtgtccagctcctcagattttagataagcatagtacctttcttgaattggctcaagttcagcaacaactaattcagctaaatctgttttaaaatcgccataaccttttccaacatatttttcttctatagtagaaattgtttcgccagtgataacagaatagatagtctgtaagttagacacacctggtttttcttctttattatattcaataataccactagaatcggttacagcgcttttgattttttttctaatggtagctggtgggtcaagtaaaaagatagcatttttcaaattggcatcagatttactcatttttttcgttggatcttgtaggacatactcgtgcgcttgttangatgatctctgctggaattgctatatgtgagcaatatgtctcattacatc

SEQ ID NO: 1441 - DNA, 899 bp, Listeria monocytogenes-4B
aatccgttgtttgtttttgatacttttgtcattggttcagggaacagatttgcccacgcagcatcacttgcagtagccgaagcaccagcgaaagcatataatccactcttcatttatggaggagttggcctcggtaaaacacatttaatgcacgcagttggccactatgttcaacaacataaagataatgcgaaagtaatgtacctttccagcgaaaaattcaccaatgagtttattagctctattcgtgataataaaaccgaagaattccgtacaaaataccggaatgtggatgtcttacttattgatgatattcaatttttagcaggtaaagaaggaacacaagaggaatttttccatacatttaacacactttatgatgaacaaaagcaaattattatttccagtgaccgaccaccgaaagaaattccaacattggaagatcgactgagatcccgctttgaatggggcctaattactgatattacgccaccagacttagaaacacggatcgccattttacgtaaaaaagcaaaagcagacggattagatattccaaatgaagtcatgctttacatcgcaaaccaaattgattcgaatattcgcgagctagaaggcgcactcatccgagtagttgcttattcttccctcgttaataaagatataacagctggtcttgcagcagaagcactaaaagatattatcccctcttctaaatcacaagttattacaattagtggtattcaagaagcagtcggtgaatatttgcatgttcgtttagaagattttaaagcaaaaaaacggacgaaaagtatcgcattcccgcgccaaatcgctatgtatctttgaagagagcttacagatgcctgattaccaaaaatcggagatgaatttggtgg

SEQ ID NO: 1442 - DNA, 709 bp, Listeria monocytogenes-4B
  misc-feature (1)..(end): n can be any nucleotide a,g,c or t/u
gtacctgttggggaaaccgtccaaggaagaatgctaaatgtatatggaaaagcgattgacggcaaaccagaaccagctgcggaagtaaaatggccaatattccgtgaccagcctttacttcgagagctagatacgaataaagaaattctttacactggtattaaagttatagatcttatttgtcctattttaaaaggtgggaaaacaggtttattcggtggagcgggtgtagggaaatctgtcttaatgcaagaattgattaataatatcagtatgcttggtggtaactctgtatttactggggttggagaaagagttagagagggaatcggcttgtataaagaattagaagcaagtggtgtgctccctcaaacaaccgttgtacttggtcaaatgaatgaatctccaggtgtacggatgcgcgtggcattaacaggactaacgattgcccaatatctaccagatgaagcagaaccaacatgtgtcattctcccctcgatgctgccttcgcctccctcccccccgggcccccgcatccccctcccgccctccgctccccctcccctcctgcctgctcctcccgccccccccctgtccttgtcccggctccgctccccnccggccctcgcctccctcctccccccgcgcgctctccggctgcctcctccgtcccgccccccccgcttcctctatccccccatcaaccaat

SEQ ID NO: 1443 - DNA, 525 bp, Listeria monocytogenes-4B
  misc-feature (1)..(end): n can be any nucleotide a,g,c or t/u
ggatgagtcggttaaatcaagcgaatgttttagcgatgagtggtcgtgcgattgaggcagctggtgatgtggatgtgcttttgctcgataaaactgggacgattacactgggaaaccgcaaagcaagcgaatttttgccagtggatggtgtgacggaacaagagctggcacatgcggcgcaactttcctcgattgcggacgaaacagcggaaggcaggagtattgttgtattagcgaaagaacggttcgacattcgcggccgagattttgctgaaatgcacgcagaatttgttcccttcactgcaacaacccgaatgagcggaattgactatcaagaaaatacgattcgaaaaggtgcggcggatgcggttcgtgcttacgtaagagagttgnnnnnnnnnnnnnnnnnnnnnnnnnnnnnnnnnnnnnnntnnnnnnnnnnnnnnnnnnnnnnctnnnnnnnnnnnnnnnnnnnnnnnnnctnnnnnnnnnnnnnnnnntnnnnnnnnnnnnnnnnnnnnctct

SEQ ID NO: 1444 - DNA, 1118 bp, Listeria monocytogenes-4B
  misc-feature (1)..(end): n can be any nucleotide a,g,c or t/u
tatggggccaccagtgtgctggaaagatttgctcgaacgttcaagtgtattcacctctttttataacttctccataactgtctcggcgcgttcccactcaggaaaagaatcaagaaaagcaagtacttctctggcttctttttctgcttggatgtgcgaggaagatacgatagcaaagctaatttccgctcgctgccataaatcctgataatccgtttcagcaatggagatattgaatttttgttttgctctcgttactattcgtttcaggatagctcgtttttctttgaggttttgcggttcctgcatgaaaaattcactaacgactgattgaatcattttctttcaatttcttccataacgtacgcttcaatgacatcatcttctttgatatcgttgaagttttgtactgtgataccacattcgtatccttttgcaacttctttcgcatcatctttaaagcgtttaagtgtagcaatttcgccttcaaagacaacaattccgtcacggataatacgaacgccactatcacgagtaattttaccatctgttacgtaacagccggcaattgtacccactttggaaacattgattgtttgacgaacttgcgcttgaccaataattttttcttggaattctggatcaagcatccctttcatcgctgcttcaatttcatcaatggctttatagataacacggtgtaaacgaatgtctacactctcgttttctgctgcttcacgagcttgagcggttggacgaacattaaatccaataacaattgcattagaagctgcagcaagtgtgatatctgattcattggatagcaccaacagcagtatgaataatttacgtacaccttctattgaaatcgaactcactaatcannnnnnnnnnnnnnnnnnnnnnncnctnncnnnnnnnnnnnnnnnnnnnnnnnnnnnnnnnnnnnnnnnnnnnnnnnnnnnnnnnnnnnnnnnnnnnnnnnnnnnnnnnnnnnnnnnnnnnnnnnnnnnnngnctnctnntnnccncnngnnggnnngnnnaaancgttgcgctcctcaccgcccgggcttgcgccgagtttcacccgatgttttcttgcctgttatttcatta

SEQ ID NO: 1445 - DNA, 706 bp, Listeria monocytogenes-4B
tgaaacaaattcaaaaaatgcaaaaggaaatggcgaaagctcaagctgatttagaagctcaagagttcactggaactgctggtggtggaatggttacagtaaaagctactggtaaacgcgtcattacagatgttgttataaatgaagaagtagttgatccggaagatatcgaaatgctacaagatttagtacttgcagcaacaaatgatgtattaaaacaaattgaagatacaacttcacaaacaatgggtaaattcacacaaggattaaatattcctggaatgtaatattgtttggtttgagactcttggcttatttacaagagtctcaactatttttcaatagaatgttccacgtgaaacatttgtattttgaaggtgagaggaagacgaattatgcattatcctgagccgataacgaaattaatagatagttttatgaaattaccaggaattggaccaaaatcggcagctcgactagctttttatgtgttagatatgaaagaagacgatgtgctagattttgcaaaagcccttgttgatgcgaagcgaaacctaagcttttgttccgtttgtggtcacattacagataaggatccatgttatatttgcgctgatacgtcacgcgatcgaagtgttatctgtgtagtacaagaattccaagatgtcattgcaatggaaaaaatgcgtgattttcatggcttata

SEQ ID NO: 1446 - DNA, 721 bp, Listeria monocytogenes-4B
atatctgtcttgccctactataatgaaagatcattttgcactaaattttcatatgtttcgcgggcaacgattaatttatcgactccgttttccacaaaaacaactggtggtcttgggatacggttataattacttgccatcgcataaccataggctccagtacaaaataccgccaaaacttcaccggcgtttgatttcggtagtggtaagtcccatattaacatatcaccagactcacagcattttcctgcgatagccactgtttcttctgcgactttctctgggtttgccgcaagaacagcatcgtaatgcgcatcatataacgctggacggatattatcagacatgccgccgtcaactgcgatataattccgaattcccggaacttctttacgcgatccaactttataaagtgttgtacctgcttcaccaacaagggaacgacctggctcaatccaaatttctggaatatcaatatcgttattattagccacatcccgcacttcatccataatttggcgcacatattcgctaggttcaaaaggttcatcttctgccgtataacggacaccgaaaccgccaccaagattaagtactttggaatcaaatcccagagtttggtgccattcaactaatttatccataatacgacgagccgctaatttaaaacccgttgtttcaaaaattagcgacccaatatgacagagtctttccagcacac

SEQ ID NO: 1447 - DNA, 1459 bp, Listeria monocytogenes-4B
gtattccaacactaaaaaataaaagtgattacgatgaagaatatgtagaggaagcaaagaaatttcgagatgcagcaaaaaaagaaattaaaaatatcgcaactgattggttttcacgagaagaaataaattatttatctgacttagaaaaaatgaaaccagacatcaaaaccttgagtagattagtgaaaaaatttgctgaaaatttctttgaagaaaaacagcaaagaggagtattggattttaatgatttagaacacttagcattaaagattttattaaaagacaatgaagcatcagaagttgctaaaaactatcaaaaacaatttaaagaagtattaattgatgaatatcaagatactaatatggtgcaagaaactatcctacgactagtaactaattcaggtgaggaacaagggaatttattcatggttggggatgtaaagcagtctatttatcggttccgtttagcagaaccaacgctatttatgacgaaatatcaaacttaccaacaagatggaaatggaagcggaatacgtattgatttgtcgcaaaactttagaagtagaaaagaagttttagatgcgactaattttatatttcatcaattgatggataagcacattgctgaaattgattatgatgcagcggcggaattaactttaggcgcaagttttcctgaaacgactgatatggcgacggaactactgctaattgatatgaagtctgtggagagtgaaactgaagatgaattgtcacctcaagaattacaaaaaaatcaagtggaatcacgtgcaattgcaatgaaaattaaagaaatgatagacaataagtttcctatatttgataaaaaaatgaaacaaaacagaccgattcaatatcgagatatagttattttagctagggcgatgacaagcgctccagatatggaagaagcaatgaaagttcaggatatccctttttacgcgaataacaattctggttattttgaaacaacagaagtagctacgatgattgcactgatgaaagtgattgacaacccttaccaagatattccgctcgctgctgttttacggtcacccataatcggtttaaacgaagaagagctaggacaagttcgtatggcgaaaaagaatggttatttctatgatgcattgttaacatacaaagatacaaccgtttcggaaactgcagataaaatgagtgattttattcaacagttaaataattggcgtgagttatctatccgggaaaacttaacatcattaatttggcaaatctatcaagaaactaatttttatgaatttgttggtggattaccgggtggcaaacaacgccaggctaatttacgtgcgttatatgaccgagctaatcaatacgaaaaaacatcttttcgtgggttgtttcctttccagcacagtggcggccgtaaaagcatgcatctagttgccccacagat

SEQ ID NO: 1448 - DNA, 1751 bp, Listeria monocytogenes-4B
gaacaactgactttgcgcgagcttaaataaactaacagctgagcaaaaggaatccctgcactccgtaaatctttggtcgctaaatgagccgccaagtcttttctcgtaacggcttgttctgaaacaatttccgaaacgacttctgtagccttatgaagaacctcatctgttaagcctaatttcgctcggcatggcttacatattttatctatggaaggcgcaattaaatccatcatccagtgataatctttggctgaaaacaagtgaattgttccgcgcaaaagccatgtccggataatttcaccattattaatcgcttgctctacagccttttcacttggcgtcgtcattctactcccaacagcccagagcgactgaccatagttttgcgattgcattgctccaaaatgaaaaacaattctttccggagagtcactccacgcagtttgtattaatttctgactttgaaagcggttttctattattgtgtttgcgtccatctgttaacctctttttttagtttattgtagcataaaaatcccctccagttcgataagctggaagggattttttcactattagaaattaaagttgtctggatctgggccagttctttcgtctttatttaaaccgctgatttttgctacttcttcttcgcttaattcgaagtcgaaaatatcagcattttggattatacgttcttggtgaacggattttggaatagtcacgacaccgatttgtaaatcccaacgtaagataacttgtgcaactgatttaccatgtgcatcggcaatcgctttgatttctgggttagaaagtaatttcccattacctagtggagaccaagcttctactacaatgttgttttcagcacagaatttacgtaatggttcttgtgttagttgtgggtgtaattcaatttggtttaccattggcgcaatttccgcgtcttccattaattcttttaggtgatgttcgtggaagttacatacgccgattgcgcgaacgcgtttatctttatataatttttcaaaagcgcgccaagtgtctttgaatttacctttgactggccagtgaattaaatataagtctacataatcaagttctaatttacgtaagctttcatcaaatgcagccaaagtggattcataaccttgctccgcattccaaagtttcgttgttacgaataagtcttctctcttaacgccagactctttaatcgcttgaccaacgccttcttcatttttgtaagcagcagctgtatcaatactaatgtaaccagcttcaatcgcccatttaacagaatttactgcttcatcgccgtcctgcactttccatacgccaaatcctaaacggggcatttctacaccatttgcaagttttactgtatcttttaagttcaatttatccgcctcctaaaagtaataacacgtttactatacaccttagagtatactcaaaggcaaacatttggcttttcgattttcaaggtgctattattaagaaaaaagaggtggttttagtgcaacaaacaatcaaagaagcgtccgaacacacgggtttaagcgcccatacgattcgatattatgaacgagaaggattaatcccttttctagcacgcgataaaaataataaccggatttttgataatgatgcccttcactggcttgaattactcacctgtttacgcgtcaccggaatgccccttgcgaaacaaaaagaaattgttgaactaactaaaggcggtgacg

SEQ ID NO: 1449 - DNA, 1227 bp, Listeria monocytogenes-4B
atttctcaacaagaacttgctgacatacttgatttatcaagaccgacagtcgcaaaccttatttccggccttattaagaaaggtcgcattttaggaaaagcttatattttaaatgaagccaaacaaatcgtttgtataggtggagctaacgtcgatcggaagttttatattaaagacaaggcccaactagccacatcaaacccagtgcgctcaacacaaagtgctggcggggttgctagaaacgtaggcgaaaaccttggacgccttggaaaagaagttatattactcactgcttgtggaacagactctgactgggaagctgtcaaaaatgctagtaatacatatatgaacttagattacgtcacagcattcccaagcatcgcaactggttcttatacagcagtgctcgaaaacaatggagatttactcgttgcactagcggacatggatgcatatgatcacttaactccagatgtactcgcaaaaaatgaaggcttgctgagtcaggcgagcgcaatcattgcagatttaaactgtccgaaagaaacactagaatatcttggcagctttgctgaaattaattcaattccattagtactcgttcctgtgtcttcacccaaaatgtctcatttaccagaaagacttgatcatgtaacttggctaatttgcaaccgagacgaatcagaaacgcacctaggaatgactatcaaaaatgacgaagactggcgcttagctgcacaaaaatggttagatctaggcgtaaaaaatgtcatcgttacaaatggcagtaaaggcgcagttgcagcaaacaaaggtgaaggtactatttttgaaccagcaattgtaattgaaaatattgtagacgtgacaggagcgggagatgcattttgctccgcggttatctacgcatggttagaaggaaaagcattgaaagaaattttaagagcagggagcgtaaatgccgcgcgaacactcgaatctgagtataccgttcgccaaaatttatcgacatcccaactacaaaaagacatggaggaattcaaatgaaaaattatttatcattatccgaagaagtaaaacaagcaaaagcagaaggaaaagcaatcgttgcgctagaatctacaattatctctcacggcatgccttatccgcaaaatgttgaaatggcacgtgacgtagaacaaattattcgcgataacggtgccgtaccagcgacaatcgctttaa

SEQ ID NO: 1450 - DNA, 1481 bp, Listeria monocytogenes-4B
agtttggcggtggggctattctccatcgtagcactattaatgcgggcgattgctgggagttggaatgacaaattcggaccgaaagtacttattatcgtgggctttttgattttaattttaactacagtgaacttttattggtcaacggcggtggcggccttacttatattacggctttttcacggggctggctggggtatcggaacaacttctattgctacaggcgtttctaaactcgtgccaccaagcagaacgggagaaggtattggtttttatgggcttacgactgcacttggaatgtcacttgcgccgattatcgctattttaattatgaattatttttctttcgatgttttagtgacgttttcgcttgttttgatggtgtttattttaattttgatgacacaggtgaaaattccaaaatcagaaaagattgtacatcaaaaaatgaaattgtttgagaaaacggccttgcttccggcgggcttgtgtttattaatggctattccgcttggtgggatccagacatttatgatggtatatggaacagaactggggatttcgacaacgtggatatattttatcgggcaagcgattatggttcttgtaagccgtttgtttgctgggcgactttatgatacgaagggacaccgttttgttattattccaggagcgctttcgatgataattgggatattaattctttcttttgcaactggtgcaatcagcttgtttatcgcatcgttattcttcgggttaggttacgggatgtcgcaaccggcgcttcaagcactggctgtggaccgggctgcaccgcacaataaaggtaccgcgaacgggacttttctttcgggaatggacattggaatggctgttggtagttttggtttgagtattgttgcgacttactacaattatgctattatgtatcgcacagcaattattgcacttgttgtattttttgctgtgtattggtttactttaggacgaaaagtgaaaaatagctaacatcttttgtgaagtgtttttcaaaaagtagaagtgcgagaattgctttaaatagcggtttctcgtgcttttttaatgtcagaaagtttaaacatcacatttatttgtagatttagtataaattttctgaaaaacagctctgtttctgctataatatacaaaagtacaaaaggcagtgtttacttttaagcgctgaaaaatccgaatattgtgtagaatatcacaggttcggcttttttatttcttaacaacagaacttcgaaaagcataagtgtaacgaggaaggctcatatctggccaataagtattcgattattggtgaaaatttttgtaagtaattggggaaatttgaagacaggagagatgttgagtggaacgtgtttataatttttcggcaggtccggcagttttaccagtaccggtacttgaaaaggttcaaagggagctactctcttacaatggttcaggaatgt

SEQ ID NO: 1451 - DNA, 957 bp, Listeria monocytogenes-4B
actagctgatattaaaggcattcgtggagaaattagtagaagaacttcaaatccgtttagccgaccaagaaattaccattactatttccgataatgcaaaagcatttattgcggaagaagcatatgatccggtatatggcgcacgaccacttaaacgctatattgtgcgtcatgttgaaacgccacttgctagagaaattgtatcaggtaaaatcatgccacattcatctgtagaaattgatttagcagataaagaatttacttttaaagtcacagaataacatagaaaaggtttgacacctcgcttgaaagggaaaactttggttggattagtcgtttagaaaatagacgaaaatggaaggatgaggaagatgaaattagtattaattcgtcatggtcaaagtgaatggaacaaattgaatttatttacaggttggcatgatgttgacttgtcacaagaaggcgttgtagaagcaatgactgcaggaaaaagaattaaagaagcgggcttagaattcgatgttgccttcacttctgttttaacgcgagctattaaaacacttaattatgtgttagaagaatctgaccaaatgtgggtaccagttcataaatcttggcgcttgaacgaacggcattatggcgcacttcaaggtcttaacaaacaagaaactgctgaaaaatatggtgctgaccaagtacaaaaatggcgcagaagctatgacactcttccaccgttattagaagaaaacgacgaaagacaagccaaaaatgatcgccgttatcaactccttgatacacacgctattccggcaggtgaaaacttgaaagtaacattagaacgcgttattccttattggatggacacgattgctccagaaattaaagaaggacggcgagtagtcatcgcggcgcatggtaacagtttacgagcattagtgaaatttctagaaggtattg

SEQ ID NO: 1452 - DNA, 723 bp, Listeria monocytogenes-4B
ttattttactattatgcatcccatcactacgacgaaatgattcaacaaattaaacattctcgagaggccacgaatcgttttagagaataaaagaagataggtagtagcttgataattaaagctactgcctatttttttactagcaattataaataaaaattttaatattaaaattatatattgaaattttatttcatttatattatactgtgttggaaggagtggttaaaatgttagagaatttagcaacagaagaacgaaatgaaaaaacgattgacttagacacactttctccaaaagaaattttagcagtaatgaatgaagaagatttaacagttccaatagctataaaaaaggtcttacctcaaatcgagttaattgtaagcggtgtcatctcgtgctttcaaaaaggtggccgtttgatttatcttggtgccggaacaagtggaagattaggagtacttgatgcagctgaatgtgttccaactttcggggtctcaaaggagcaggtcattggcttaatcgcaggtggtgaaaaagcttttgtagctgcaatagaaggtgcggaagattcaaaaatacttggcgaaaacgacttaaagcaaattaagttaactgcaaacgattttgttattggtattgctgcaagtggtagaacgccttatgtaattggcgcacttgattacgccaaatctgtcggggctaaaaccggagcaatttcta

SEQ ID NO: 1453 - DNA, 680 bp, Listeria monocytogenes-4B
ttcttctaatagccattatctgtaccagaaatctgcaacgccgacctaccggaaagcagaacttcattgaatgggttatggattttgtcagaggtattattaatagtaatatggattggaaaaccggtgggagattccatgtacttggtattacgctactaatgtttattttcgtagctaatatgctaggactgccatttcaaatcgcgattaacgatgaagtatggtggcgttcacctacagcggatccaattgtcacattaacacttgcgataatggttcttggcttaacgcattactatggtattaaaatgcgtggtttcaagcactattttgttggcacttactttagtccaatgaaatttttattcccacttaaattagtagaagaatttgctaatactttaacgcttggtttacgtctttacggtaatatttttgccggcgaagttttgttaaccatcattgcaacacaacttgctcatatgaacatatttgtaggtgtgctagcaataattcctgcgttactatggcaaggattctcaattttcattggggcaattcaagcgtacattttcactatgctgaccatggtttatatgtcgcataaggtaagtgacgaacattaaactaactttcaaataagtcatttataaaagtaataaaaaataatattcaga

SEQ ID NO: 1454 - DNA, 584 bp, Listeria monocytogenes-4B
atgataatattcgtcgcacgtccaagttctaggaaaatcgaaagtaagaacaattctttcgtcatcgcaatgatttcggtattggtagtaaataaactcataatgtggttcctgcgaaaaggtaaatcgaaacgctgaccacaattgcgacaaccaaaccaatcttccactacgtagaccttgcttataagctttatcgatttcttttgcaccaaccgcgcgaccgataataatttgagaggcctgaccgagcgcgatagcaaagagtgcgacaaactggctaaccgtcgaagcataaacttttgtggtaagcgcctctgtaccaagaatcgcaataattgcggtaacaactagttgcgagccggcatacgataaattttccccagcagagggaaggccaagccgtaaaatcgaataaagtaattttttggaaacttgctccagttttttgaaatggaaagtatagccgatatattttcgaagcatccagatggctagacccattccgacgaagtttgcgacagcagtggaaataccaacacctgctaccccgtaatctaagtatgcaagcgggccgtacagga

SEQ ID NO: 1455 - DNA, 717 bp, Listeria monocytogenes-4B
caccaatggtgaaatacatataccggagcgcgatatgttgcgttgtgcttcagcagtgatccaaaaaatatgtgctttcacttacagcgggagtgagcgttggggcgctgaatttatctggtgggcaagaaacaacggcaacgattatttttggcattatcgcttgttgttcgatttatattcctaccattgcttttttattagctgggagcaaacttaacaacgcattggatagcacgcgtaaatggcttatccaaaacaattcagtgattatggcggttcttttcttatttattggtttgagtgttattagtaaggcgttttaaaaataaagctgttttttcctggaacataggagaaagacagctttatttttttaataaattaaaagaaatctgttctatttttgataatactttctaaataattagttgttcgaaaatgacactagactaaagccgaactagcgaatataataagattatattcatcctctaactattaaaattttactcactgggaagaaattaagcgggggagttatttttttctaatgttatagacttttgattgaaagaggctttttgtagaataaaataatgtaaataaaaaggatgggttaaatgttagacaagttgttgggaaaagctgccgtagttaccgaatcttcttatggcattgagagatttttaggagaagatgaaacaattattcaga

SEQ ID NO: 1456 - DNA, 1195 bp, Listeria monocytogenes-4B
aaagtgcaggattttcttgccataattcagctaatgttttgcctttatattcgccgtttttgattaccgaaggaccgttcggatgagcggaaatcgcccagtcttctccagtagtatcagacgggatatcgtaaccaaaataatcatgtaatttcgttccaccccaaattcggtcttgaaaaacagggtttaaaaataatgcttctgtcattataaaattacctccattccagcgtttttgctgggttttgtcaattaaaagtatatactaataatggcgaagatgctagttatttcccgcctaaaaagcctctttcttttatttgttctgttaaatttggataataaggtctgtcataaaatttggctaaccgttcggtataagaaacaaagccttctcgctctgaaaacggaataatctcttggtcatatgcttctagtaaaggcatgacatcagtttggtacgtctcttcaaaataaactgcttcttttggcaaacgtggttttacaggtgcttcgacatccggaacgccaatacaaagtcccacaacgggcatgacgaattctggtaaatttagaaattcagcggttgccgtaatatttctgcgcaaaccaccaatacaaatcgtcccgtaatcaagcgactcagcagctgttaaagcattttgcatacaaagtccgatgtctgttgccgcaaccattagtaaatcttcttccccggcaatttggaaacttttgccgtgcatgtcactcgctacttttacgcggtgaaaatctgccacaaaacaaagaaaaacggaacattctgctatgtaaggttgatttccgcaaagttcggccattttatttttacgttcttgatctttaatcgcaataatcgaatagtgttgaccattaatccacgacggggctgcttgagctgctcggataatcgcatctagattttcttccggaatctcaaccccttttttatatttacgaaaagagcgatgatttcttagcaaagttaatacgtcattcatatttatgcctcctagatttatcatttagttaaagtatagcttgtttttaggcaattgttaatgttttctcttgtatttctgccagatattttctacacttaaagaaaaagaggtgaaaagatgtgcgccaacaccaatagattttaaatggcttgaagaaaacttcctgactg

SEQ ID NO: 1457 - DNA, 866 bp, Listeria monocytogenes-4B
cctctttcattagctgggaatagccggaaataaaacgtaaatcgcggttagttaaaatcccaactagtttgcgctctttctcgttgttcacgattggaacacctgagatacgatatttacccatcaaatgctctgcagcaaaaacttggtgatctggagtcagataaaatggatcaataataacgccactttcagagcgtttcaccttctcgatttcttccgcttgttgttcaatactcatattcttatgaacaacaccgattccgccttggcgcgcaattgcaattgccattttagcttctgtaattgtgtccattccggcactccaaattggtacatttaatttgagtgatggagccatttctacacttaaatctacatcatttggtaatacgtccgatttcgctggaacaagtaaaacatcatcaaatgttaagccttcttttgcaaattttgtttcccacatgggtcgcaaacactccttttttattggtactcgcttttttatatagaaaaaacgcatcatcttatccttattttcataaagaaaaaatggtggaaaatatccacatcatgcgacttgtcttctataatcatgctgaaatagccaatgtatatttttagttattgaatatgatgttacaagaagcttggagctatgtcaagaaggttttccgttgttgttttattcagaaaatatagtaaaaaatgtttcacgtgaaacatttgaaaaagccgcctaagattgttatcttaaacgacttcactgtttattaatttgttgtataacttcaaattttcttcatcgaaacaaacaaagcgtatttcttcaatacttgtgtcatactcttcttccgcccatttgc

SEQ ID NO: 1458 - DNA, 1159 bp, Listeria monocytogenes-4B
  misc-feature (1)..(end): n can be any nucleotide a,g,c or t/u
atcaccagattcgatagtatcgccgtcagaaacataaatgctgctaacttctccatcgaaaggcgcttgaatcgttgtttccattttcattgcttctgtgattagtagtggatcaccttttttaacagagtcgccttttttaacaactacttgaatgactgaacctgtcattgtagctccaacatgttcagggttagttgtatcaatcttacggcgtgcaataacagtggattgaacgttcatatcttggatgttaatctcacgtggttgtccatttaattcaaaatagataacacgtgtgccatccgcaattggttcaccaatagaatttagcttgattaaaaggattttccctttttcaagttctacttcgattgtttcccctaaacgcattcctttatagaatgttggtgtatcaaggactgttacatcaccatatttattaatcatttcttgataatctaggaacacttttggatacaaaatataggaaatgacatctttttcagttggttcataacccattttttcttttaattctgctttgacttcaacaaagttaactggttccattaaagcgcctggacgatctgtaagtggtgtacgtcctttgagtactagtttttgaagtttttctgggaagccgccgtatggttgaccaatttcccccataaagaattcgataacggaatctgggaaatcaatggtatcgcctttttcgtatacatgttcttcggataattcattttgaaccataaatagtgctaagtctccaacaactctggaagaaggagtgactttaacgatatcaccaagcatgggattaaccactgtgtacattgggtttgactggagtgccatcggaatgtctagtctccactgatatcggacatgttcccttctatgcccccccctgggtctttgttcgttcggtggggtcggttgttcgcgttcgtggggctggcttcctcccttccctttttgtcctctccctcttcgtcccgtgtctctgcngccgccgttttgtcttcttctcccgtcctccgtccgcgttctaactcgcgcttctgcctttcgttcgtcgctgccctttctctgtccgtcggcggtgggggcgggtggcgcgccccgtccttgtccccacttaataacaaacaaa

SEQ ID NO: 1459 - DNA, 892 bp, Listeria monocytogenes-4B
tgaagcatctttttgccactgtaagccagaaatttcacggactttgtcgggttttgtaacgccagtgtccaccccaattgtggctgtaattgttttaaaggtagagcctggtgcgtaacgatttgcgtatcttgctaggaaaggtaggcgctagtcgacattatattttgcgtaatcttcggaagtgatccctagcaccatttggttggcatcataagaaggggtgcttactaacgctaatagttcgccatttgtcggattaatcatggtcacagcgccagtttcggaaccgaggctatcaaaagctttcttctgaacggctgcatcaatcgttagtttaatttcttcgccatcttttttatcgattttttgtaaagtatcttcttgcttggtttggtcattgatgattttaattgcgccaccatttttaccgcgcagttgtttgtcatagtaacgttctaagccacttttcccaatgacatcgccaacgctgagttttggatttttttcaatgtcttcggcgctaacttcaccgacatagccaatcaaatgcgaggttgcttcatttaatgggtacgtcctcatttctttttgagcatacgtaagtccagtagcctcaggtagattatctttattcaatgtaactaaaggaacgaagctatctgcaaggacccatttttgatcgagctgtttgttgatgtaatcagtggagacttctagttttttgctaatatccgcaatgtttttcactttctcgtcgccttcaccaagcttcgaaggcactacaccagcttcggcaaattgaccagtagtcgcgagtggattaccatttctgtccactatttctttccagcacacgtcggcgctcagcatgcgatgtaagtgcccaaag

SEQ ID NO: 1460 - DNA, 805 bp, Listeria monocytogenes-4B
  misc-feature (1)..(end): n can be any nucleotide a,g,c or t/u
agcatgctcgagcggccaacgtgtgctggaaagatcctaacgcacaaattgatgtacaatatgcaaacgatttcgctaaagcagacaaaggacaacaaatcgcttcttccatgtattcaagtggagttgacgtaattttccatgctgctggtggtactggtaacggtgtctttgcagaagctaaaaacctgaagaaaaaagatcctagccgtgctgtttgggtaatcggtgttgaccgtgaccaatgggacgaaggaaaagttacagcaaacgatggcaaagattacaatgtaactcttacatctgaaatcaaacgtgttgatatcgctgtagaagaccttgcaactcgtgctaaagctggagatttcccaggcggaactaaaattgaatacggtcttgataaagatgctgtagggctttctgaacatcaagataatatttctaaagacgttcttgctaaagtagaagagtacaaacaaaaaatcgttgatggggacattaaagttccagaaaaaccttgattttatagttataaaaaatgagtaatatgaacgaagtaaaaccttttatgaaagtcggtatcaaacgtaccggctttcataaaaaaataatttgtaagcgttttaatttgataggtaaacccttttactaaaagaaaataatcggtatattggaatttatgattgcaatgaatgccatttagaaataaaataaggagatggcttttttaatagcttaaaaatgcaaggtaaactttcgtacatagatggtattataaatcgcattntacaacataccaaagtaa

SEQ ID NO: 1461 - DNA, 842 bp, Listeria monocytogenes-4B
ctgggtaggttccacactccccattgtggtgagatggatgccctcattaaacctgtcttcgaggccttcgcagcatttttgtacgatacattcgacgtcagctcttcaaaaacagataaaagtctgcgctcgctcaattttcgttttgcattcccgccagataagcattcatgaatataaatgatataggctaaatcgagttcgataataatttgaccgagctccggattacccaggtcgataatgcagaaaatgtagctatcgttcggcattgtttcgatataaccactcgcaaaggaaacttgatctgcaagggttgcttcggtatgaattggaatccggatacgctgggaaacaaactccatgctttttttcgtaaaagcggatgcaatcgtctttaagctttcgaggtgttctgcgccaaatttctctggtttatgaaagtcatagggatgaaagcgcccaaagtcgccaatttccgtactttcatcaactaccttaccttcacttatttgggaaagcagggcgtcaatttgttcttgacttaatttatcgctcattttttgtcactccctagctctcatgaagaacttccctctcctaatttcgttattttgacaaacatcttgccgtcttttgtcaaaatctcaccgtaaccgatgcatttgcctgaaatcgtaattttaaccacattagctgtggaatcttctaaccgaaaaacggtccctttttttacatctagcaaactaccgactggctgtttcgtacgtcctaattcgaagtcgattctgagtgggatagtatgagataatttctcattcacctaaactccctactgaatg

SEQ ID NO: 1462 - DNA, 1000 bp, Listeria monocytogenes-4B
caagataaaaaagtattgattttgtatggtggtggaagtgtagaacgttttggaactttagataaagtaaaaaccgctcttaaatcacgcgaagtaggcgaatttggtggcattgaagcgaatcctacatacgaaacgttaattaaagctatccaactagttaaagaagaaaactatgactttttacttgcagtcggtggagggtcagtgattgacggaacaaaattcgttgcagcgggagcattgttcgacggtgaaccgatggatatttttggtagcggaattggcgaaaaacgtccgattacaaaagcgcttccttttggaacagtactaacacttcctgcaactggttctgaaatgaatagcggtggtgtaatcacttttgtggagaagaaagcgaaacttggctttggtagtgcttatacttatcctgttttttctttacttgatccagaacttacatacacacttccaaaacgtcaacttgcaaatggtattatggacgcgtatgtgcatgtaatggaacaatatatgacttatccagtaggtgctttgctgcaagatcgttatgccgaaagtctactacaaactttaatcgaaattggtccagatgttatcaaagaagataatcatgattataatacacgtgctacttttatgtggtcagctacaaatgcactcaatggaacattatccagaggcgttccgcaagattgggcaagccacagtttaggtcacgaaatcaccgcactttatgggattgaccatgcacgtacgttagcaatagttctcccgtctcttttaaatgttcgtcgcagtgaaaagcatgagaaattagtccaatatgcggaacgagtgtgggggattaagagtggtagtgatgaagaaaaaatagacgctgctattctcaaaacacgcgagttctttgaaagcttaggagcaggaactagatttagtgattatgggcttggcgaggaagtagtggacttacttgttgatc

SEQ ID NO: 1463 - DNA, 817 bp, Listeria monocytogenes-4B
tcggtgaatcagccggagcagttatcacctcacctaatattgcgtacattcaatcaatcgatggacagccccaaaaaagccgaacaattaacaaactatgatgccttaaacttagtcgatttctgcacactcccgcactacaacaacattccgtttaaaaaaataacgcaaaaaatagttgctgactatactaaaagtttaaaaatgcatctgattagcaatcatgaagctattctcgttcgcgatgaagaagtaatcactaaacttgctaccggaaaaacagattgacatccgttaggtttcgatttagaattagttgataatgattatcattttcaactaaagaatggaggaaatcgaaatgatcggaccaggaagtatcgctttaattgtcggagctgcccttgtgattttcggaccaaaaaaactgccagagcttggtagagctgctggagacactctccgcgaattcaaaaatgcgacaaaaggcatgatggatgattcaaaagaagaaactaaaaaagaagattcacgcccgtgactgaagtttccatgagcctcactggacacctgaaagaattgcgaaccagattattaatcatacttctatccttttttctcgctttctttgtggggcttttcgtttccaagccgttaattttatttctccaaaaagatgacttaccaaaagaagtgattttgcacgtttttaaagtgacagatgcttttcaaatctatatcgaaatggcgtttgttatcggactagtcttagtatttgcagttattttatatcaattatgggccttcgaaaacccgg

SEQ ID NO: 1464 - DNA, 814 bp, Listeria monocytogenes-4B
  misc-feature (1)..(end): n can be any nucleotide a,g,c or t/u
tggagttgcgatgttatgaacgacttcgatctaccactttttttcttctcaaccaatacacttttctatacaaaagaaccacctgctttcttccaaaatcttgctgataaaagtcgcttagatacaggacacaatagtttttcgctcgtttctattaatgaaaaaggtgtttttgatgaaaacatgcatcaatttttaaatgctattgtcgttgcggaagatgatgcctcaaaactaaccgaagttcgcgctgctctaaatgaagcgaatggtattattgtcctttcttcacaccataataatttagaaatacttcctgctaattctgacaaaaaaacagccgttgaagcgcttggaaagcattacaatattccacgcgaaagaattattacttttggtgatggcgaaaatgatattggcatgctacaatatgctggaaccggtgttgcgatggcaaatgcaagcgataatgtcaaagcagcagcagatcatcttactgacacgaatgaagcagatggggtttacaaatttctaaaagaattcatttcataagagaagaggaaaagggatgaaaaaagggattctaaacgtattattagtttttgctttaattgcggggctttccgtaccaagttctatgcaagttgaagctgctgcaccaactataaaagtgcatttcattgatgttggtcaaggagatgccattcatatcaaagcacctagtggagaagatattttaattgatgcaggtaacacaggtnaagggaaaactgttgtacatatttaaaaaattaaagtaaagaattgaatatag

SEQ ID NO: 1465 - DNA, 732 bp, Listeria monocytogenes-4B
aaaagatttggcaatttctttgtcacttgaagcatcagaattacttgaatgctttcagtggaaaacagatgaaatagcgttaaaagaaaatcgtgaagaacttttaaaagaagtagctgatgtgcttatctatgctcttcaaattgcagagagtatgggggcggacggcgaggaacttgttcgaatgatattagcagagaatcgtaggagaacttggccaaagaaataaaaaaagctgctttaccaaatgatgataaggcagctttttattttaataagaataagaacgtttacggcgttttttggaacgaatcattgcaaaaattcctgctataactaagataatagaaatgatacatacaccaaaaccgataagtccggtaatgctaaacgaaaagccaaaaccaatcaaaccaatcagaagtaacactaagccagctaatttcatttgaaaactcctttcagaaatcttatctctattatataggaattatctgaaaaaaataagactttaaagataaaaaatttttaaagatgaaatgcattgatagagcatcagttcgcataagttggaaatagtcaagactgcaaaggaaaaaaattatctgttatagtaagaaagtgagagaagcaaggaggaaaacatatggattttaaagagtatcaaattttagcgaatagaactggctgcacacacgaacaggcactaacaaattacggacttggtattac

SEQ ID NO: 1466 - DNA, 1086 bp, Listeria monocytogenes-4B
ttaaaggaaatgcggccattgctaaaaatacaagtagcggtaagcggattctaggtaaaaatgtcacagaacctggagaactggctggggagatttattatttctcgcatcgcaatccattttgggactatgtaatcgtgcttgaaccgacaacagtattagaaattagcagcatcgaccaagaaactcttcaaaccttagatttagctttacaaaaccaactattagtcaatttattaaaaagtgttactagaaaatttgaatatataggtgaaaaggtacgaatggtttcagaagactctgttcgtgcaaaaataagcaattatttatttggcatccaagacgatgatggcagtatcgaattaacagaaacaagagaagaaattgccgactatcttgatattacaagaccttcactttcgagagaacttggcagaatgcaaaaagaaaatattattcgtatcgaaggaagtagcgttattattttagatgcgattatatttgatacttttattgagtaactagtaaccagcgttacatcttttcgtatgcggtaatggtaagctattcgtattaaaagaatgaatacggaggagattagatgttattaactagaaacgaaccttttaccgcagaaaaaatacaagcaaagacagacatccttgagctagttcaatttgaacgattttgtcgcgacaatgcactttgggatgaaatggaaacttgctttacaaaagattcaaacgtaaaaatttcatggtttcaagggactggccatggctttattgaagcatcaaagaaaatgaccaatcctgcgccacataaaatatacaatacgcaagtttggattaataacgatcgagctgtggcaattatgcaagccactatccaaacacgcaccatcattaatggagtagaaatggaactcaattctgacgccaaattagtcacacgagttgagcgaatcgaaggcagatggtatattaatgcgtttgaaggagtttatgagaaagactcgttgatgccaatcattcccagtaaacttgcagatgttcctgctgagttgttagctaattttagaaaaag

SEQ ID NO: 1467 - DNA, 716 bp, Listeria monocytogenes-4B
  misc-feature (1)..(end): n can be any nucleotide a,g,c or t/u
aaaaatagtgttttaatgcttcttctagagcctctaaaccttcatcgtttactagagaagtggaaacaatcgggtttctcccgcaagttcacgcactctatttatatcaagctttgtttccaaatctgttttatttaaaacgaccancataattatgacccgcggctgcttcaaataacgcttcatcttccactgtcagctcttcgttttgatttaatactagcaggataaaatcggcatccgccaaggcttttcttgaacgttctacaccaattttttccacaatatcttctgtctcacgaattccagctgtatcgattaaacgcagcggaacaccacgaacattgacgtattcttctataatatctcgcgtcgtcccagcaatatctgtgacaatcgctttttcttcttgaattaattggttaagcaaagatgatttcccaacatttggtcgaccgataatagccgttgctaggccttcacgaagaattttcccttggcttgctgtttgtaaaagttgctcgacggaagcgcgaactagctcggttttctcgagtagcattcgctgggtcatttcctccacatcatcgtactccggatagtcgatatttacttcgacttgcgctagtgcatccaaaatttcttgacgtaaattgcgaatcaaccgtgaaagatttccgtccatttgccgaattgccacgcccatcgcccggtct

SEQ ID NO: 1468 - DNA, 1316 bp, Listeria monocytogenes-4B
gggatgcgcgtaaaatgtatattgcttgtctagggcatggcgaaagcattaggagaatatgtttccaaaagtcttgttacatcgagaaagaatgtagttttcacctatgattcatttattatggatattttgccacaaattgttgaaagagatgatttgattattattatttctgaaagcggtggcaccgaaaacaccctttcgctcgcggaacatttaaaatataatttatcgaatgtcattgcgattgtgaataatcccaatgcccagatttcccaatatgtggagacgattatttatgcttccagtgaggagtttgatgaagattcatttaaacatcatcacgccccactgttaattgtgattgacttgattctaaatatttttgaacagcaaaaaaaacttatttaaaatatttttatgaaattgcttgacatgaaacccatttcatcatttaaaactaatatataaggcaatgaaggagacgaatgatatgaaattagatggggtatgcaagattaattagacacttggaatggagtatcaattcggagagttttacatcgatagagactatcttgtttttgaccaagattttagtttgggtatgaaaaaaagacaaacgtttccagttgcaaaattagggcatattgcgctagttcgagaagaagaggaaatcatgctaacatttagctgcgataatattgaattcgaaataaatggaaattcccatgataatttgcgcgaatttcgagatttacttcaaaataaaggcaccaacagcgcagaaatccaaaaagcggaaagtaagaaaaaagcaagatatacaacgcaccattatcacaacttcgctaaatcttgaaggaggaaattatatgtataaagcaataatttttgacgtagatggaacaattctagacacggagagagctgttttgcattctcttcaagcggttttagccgaagaaggattaagttatgaactggacgaattacgatttgtccttggaattaccggagcagctgcggtggaacaattaaacattctggatccagagaaagtattggataaatggattgaacgagaagcaactttcattgaagaagtagaggtgttcgaaggccttcataaagtactgcatgccattccagaaagcggtgttgtcacttctaaaaacgcgttagatatggaaaaaggtttctctccgtctaattttcaggatcatttttaagcgattgtttgcgcccgtgtttctcccttccccctccgcccttctcccttccccctgctgaaggggttagaaataaatggaaga

SEQ ID NO: 1469 - DNA, 1020 bp, Listeria monocytogenes-4B
tctatcagaattagaattggcggtagaaacaaatacaagtcaggaagtccgagaggaagtaaatacagctaatttagttccacgcaggcaggacgtgccaatgagagaaaaatgcaaggtattcagaagtacgtgatgaaccgacccgcacaggacttcgtatcgctgttgaactaaaaaaagatgccaatgctgaaggtgttttgaacaacctgtttaaaaatacagatttacaagtaagctataattttaacatggttgctagcaataaaaaacgtccggagctaatgggcattatcccaatgcttgacgcttatattgaacaccaaaaagaaattattacgaagcgctctgaatacgatattcgtaaagcgcgcgctcgccaacatattttagaaggtttaattaaagctttgtctattttagatgaagtcattaaattaattcgtggttcaaaagacaaacgcgatgcaaaactaaatcttcaaacaaaatatgatttcagcgaaaaacaagcagaagcaattgtatctttacaactttatcgtttaacaaatacagatatacatgaacttcaaagtgaagcaaaatccttagcagaacaaattagtgttcttgaaaaaatcctaggtgatgaagcagagcttatcgctgtgttaaaagaagagctagcggaaattaagaaaaaatataaaactgctcgccgtacagaagtgcaagcagaaattacagaaatcaaaatcgatacagaagtacttgttgcgaatgaagatgtgattgtttctgtgacaaaagaaggctatgtgaaacgtacgagccaacgttcttatgcagcatcaaacggtgcggaactagccatgaaagaagcagaccatgccgtctttatccaaaaaatgaattcacttgattcgctcctgttattcacgagcaaagggaattgcatttatcgaccagtacatgagttgccagatattcgctggaaaaacctcggagatcacgtaagtcacttggccagtgatt

SEQ ID NO: 1470 - DNA, 765 bp, Listeria monocytogenes-4B
gccgctggaaagccaagatcaaccggctctatttagctgggtaactaagctagatgaattagtgtctccagtcaaattgtttaaaaaagctggcacggcttttaaaggtgagcgttttttctggcaaaatccagaaatgacactgaccatgaccggttttggtgtaacgaaacaatttttggcggagaagaaaaaagatgcttttcttggactgcaagagaaaattgagaagagactgcgaactagtgtaaccaatgcaaccgtagatgctactggaccaatttactttggtggttttgcctttgatcctgagcgtgatacagagaaagaatggcaaagttttaaagatggcttgttttatttaccactatttatgttaacgaataaagatggtaaaagttacttaaccgttaatttgtctatctactctgatgatacggaaagcaaattagaagctgtttttaatcaatggcaaaaaatcattcatcaagaggttaatgaagctgaaatggcattacttacagattttaaggagattggcaaagaccatttcctagaaactgcgagtgaaattatcgatatgattaatcattcagaagatgtaaaaaaagtggttctagctagacgaatgggcttgcgtttccagcgccaagtagatagtgccattattttggaaaatatgctagcaacacaagaaaatagttatttcttccttattgaaaagggaacaggggtctttttcggggcaactcctgaaagattact

SEQ ID NO: 1471 - DNA, 838 bp, Listeria monocytogenes-4B
atcacaaaaggtctcaaagaagaaagtaattcgatgctcgctcaaggcggtgtcgcagcagctgtgtccaaaaacgataccccgaaaaagcattttagcgataccttccaagccggttgttttcataataaagttctcgcagttaatcaactcgttaccaacggtccaatcgttatccaaaaattaatcgcagaagggatgacttttgacgaacaaaatggtgaactttcgcttggtttagaaggcgcacaccaattgccacgaattttacatactggcggtgatcaaaccggcaaatttcttactacttttttacaagaaaaattaacaaacattcactggcaagagcaaaaaatggctatcgaaattataaaacagaacgattcggctatcggcgtgcattgtttagataaagaaaatcgactacatacttattacggagaacatattattttagcaagcggcggacttggacaactttttgcagttacgacgaatgcggcgacaatttccggtgatggcttatcgctagcttaccgggctggtgcgaaactaaccgacatggaatttatccaatttcatcccactcttctctttctaaacggacgttgtcatgggcttatttcagaagcggtccgcggtgaaggagccaaacttattcgcgcagatggttcggcggtaatgactgatgttcacccgagagctgaccttgcgccgcgcgatattgttgctgcgacgctatttgcagacccccaacatggcaatgagagttttccttgatatcacgcctttccagcacatggcggcgctcgaacatgcatgcacagtcccttacggt

SEQ ID NO: 1472 - DNA, 766 bp, Listeria monocytogenes-4B
ctagccaacttgatgacatgactcacttcttggagagcttcacggggcagctagcgcctgtcggctcagcgactgttcaacgactgccgctgtttttttcgcatcactttccgtaccagaaaaatgacgcctgactctggccatctgctcgtcaaatctggccgcatccagactcaaatcaacgaccagatcgcctaccggttcagccataccggactcctcctgcgatcccttctgatactgtcatcagcattacgtcatcctccgtcatgtccgccacatccggggaagcggggataacttcattcccgtccgggccaaagcggacacctccggcaagccctgccgctttctgcatcagcacatcatcttcaggctcttcgtcagcctcgcgccggttcagcagactgaaatccagcggatgcatacccggatcgctgaaaaacaggctgagcacggtgtacgtcagcccggaaaagtgcatatccagcagaacatcatgaaagtaatgggtactgtaaaagcggtgccagtcggcatactccgtggatgacatcccggcaagcatggcacgccagtcgggtcgccccatctcacgcgccagtttcagggcaaaactcagctcaccgtcgaacactttcccgcagaaacaggctctgcgggcccggcgtcctctgtctgttcaggggcattattcaccacaaactcatacataccagacagccggtacaccacgttttcagcatgagaaattgcctccgtgggc

SEQ ID NO: 1473 - DNA, 992 bp, Listeria monocytogenes-4B
ggtaagagaaaaattcgaagcaagaagaacaccagaataacagtagagaataagactagtggatattggaaggtcttcattaatgcgtttttttcctccgcttttcttttcatatggacgccggtttcgtgaattgtttgcaaaaagtaaccgtgactagaagcataatgaagttgtgaacaaatgaattcaggaaatccgttttttgaaagagcataggaaaaagaatttccgtttgcaagtgaagtgataatttgttcatatcttttgcgatatttgggcgaagtaatgcttaaatagctaatggtcgcatctaatgagaatcccttttcgagtaaactggcaactctaattaaaaattctccgtcctctttccaattagtgcgctgaaaaaaaaccataggcaactcctttctcgaatgttcttttaatagggtatttaggcttaatctgctgtttattagattggaaataggcttttatctcttgttgcgtaagaacttcatagatagctgttctttttcggtgcaaatgtgtacaaaggggatggcatttttctccgcagaaggtgcaaactaggtgtgtcagcttctgaaaactgattcctagtaagcattgcgctaattcttctgagctaataccgaattcaagtaatcttaataaaactccgtaagcatctccggcatgaaccgtgcttaaaactaagtgaccggttaatgcagcacgaacaactattttagcggtttctgcatcgcgtatttccccgataattaaaatatcaggatcatggcgtaagacggagcgaatgatgggtgcataggtaatgcttgctttttcgttcacttcgatttggagaaagccgggagaatgatgttcaacaggatcttcaattgtaatgatttgcagttcatctttattttctatagaagaaacaaggctatacatagaactggacttaccactacctgtgctaccggaaaaaagaaacaagc

SEQ ID NO: 1474 - DNA, 688 bp, Listeria monocytogenes-4B
aatgaacacgatggtatcgccgttcacacatttctcgatgatattgttggcgctatcgctgcggccgctgcaagtcggcttgcgcatagttatcacgacgacatcgttaattaaacaaaaaccagtaaaacaagaggcttattcctccaattttactggtttttctttccctaattttacttctacttgccgaatcgagtttttattcattgaacgaacgataaagcggtatccctcatgttcaatctcatcaccagcttctaagtcaaaacgttcgagtaacatccatcccgataacgtatgaacacccggcccttcaattgggacccccagtgcttcctcgacttcaagaagcggctcagatccttcaataatataatgattcaaagctacttttcgaatccctttcggaccttttgcttcttccatatcaccaacaattacttccatgacatcttctagcgtcacaatccccgaagtcccgccgtattcatccgtgagaacgacaaacggctcactttcttgctgcattttcacaagtaactcttccaaaatcatgccttcaaacacttctaaaacaggtgtaataaatggttgaatagattgcgtcacaatcgtttcatcttttccaagtccagccataaccgcactgactcgtagcattccgataatatgatctttatcttca

SEQ ID NO: 1475 - DNA, 763 bp, Listeria monocytogenes-4B
gctttgtgctggaaaggacagtcgaagtttaatgcggctacttacattaaaacactaccaagatccacttgatcaaacgcagcaagtggtgacactcagcgaattactggacctaaaaaacaaagcaaagcaagtctttattgatgatgttttaaaaaattatattattcgcctagttgatgcgactcgaaaacacccttccgttgcgctcggaattagtccgcgtggctcgctcgctttcatgcaagccgctcaagcttttgcgcttattgaaggtcgagattatgtgattcctgatgatattcagtatttagcaccgtatattttcactcatcgtctcattttgaagtctgaagcttattataatgaggaaacagccgaatccattattgcttccattttgaaaaacacgtcagttccggtagaaaagaggtagctaaatgttgaaaaaacgcctcctattagcatttcggtggattattatgctaattatttacgctgggctttggacttatacgttatttcaaggtgatactgctagctggtttttaacctatttctttagttttatcctgttacttttatttttgtcctcgatttatccactaaaagcgtggaaagtgaatcggcgttttgttaaaaatacctatcatgatggcgatttagttgatatgcaagtatcattcactcgaaaatcgcgttatccggtgggttatttgctattccaacaaaaaatacccgctagttttggcaatgtgagcgc

SEQ ID NO: 1476 - DNA, 1602 bp, Listeria monocytogenes-4B
agcaagtccagttaaattgagtgtaacaagtggaccacaaaagaggggcaacatccccaaggcacggccaagtgcccagcttcattcaccagttgcaactagatagccggttttaggagcaattataatgcacatcagagaaagcattttagcagatatgcgagtggcagcaacgattggatgcacacgaagaaatccgaaaaagtgtcgagtttttaaaagcatatttaaaaaagaatacgttcttaaaaagctttgttcttgggatttctgggggacaagattcgactttaacaggaaaactagcacagatggcgataagcgaaatgcgagcagaaacgggtgacgatgagtaccaattcttcgctgtgagcttgccatacggaacgcaactagatgaatcggaccgtcaagatgcactgaactttatggaaccagataatcgtttaaccgtaaatattaaagcttcagtggatgcgagtgttgcggcgcttgcggaagcgggagtggaactatctgatttcgctaaaggtaacgaataagcgcgcgaacggatgaaagtacaatacgcaattgcagcgatgcataaaggcgtagtagttggaaccgatcactccgcagaagcagttactggcttttatacgaaatacggcgacggtggaacggatattaatccacctcccgcttgatttaaagacaaggcaaggcgcttcttaaagattttgtctgcccagaacatctatatttgaaaaaaccgacagcagatttagaagataataaaccggcacttcctgatgaggtcgcgcttggtgtgacttatgaccaaattgacgattacttggaaggtaaggaagttccagcagatgctgcagcaaaaattgagaactggtttattaaaaccgaacataaacgccatatggcaattactatatttgacgatttctggaaataggaggctgtttaaatgaaagttggttatggtttattaactgcattttatacacatccaggagaaaaagataatttagtgaaaattttgcttgaagcggctgaaggattggatgattacaacacgtgtattcagtatattgtcagcgaatctgaaaccgagccagacacggtgtttgtttctgaaatttgggtcgacaaagggcatcatgcagcatcacttgataacccagctgtacaagaaaccattgcacgcgcaaaaccgatgataaaagaaataaaacaaatacaagaattagacatactcggtggaaaaggcatataattttaacaacaagaatgattctggggctctcctggaatcattttttggagggatgacaaatgcaaacgttgatgattgtttgtgctggcggtgcgacctcaagcttaatggcacaaaatgtcgtgaaaagcgccacctcggacggaatggacgctgttttactatttccagatgacgtacaatacaaagatccgttcctcgacacatatagccagcgggatctggttgtccggatgggtccagtctttccagcccactgggcggcgtccctgcgggatgccaggtgcgcccccacccgggcggccggtggggcagagtaggcgatgagt

SEQ ID NO: 1477 - DNA, 1186 bp, Listeria monocytogenes-4B
  misc-feature (1)..(end): n can be any nucleotide a,g,c or t/u
aaattgcgataactctttatttaagtcgtttgtaagcggtgaacgtgataagttccaagtttatttgccgttccacctaaaagtgttatttcatcaagcgcattagttacgagcgtttctttcccttctgaaagtacatcaatcaagaaaaagtactcgcctaatgaggttttaagcggtcttgattcgattttacttaaatcaatatcccgccaagcaaacgtagataagactttatgtaacgcacctggcatattgttaggcaaaataacagaaatagacgttttttcttcttcttttggtaataaaattgaaacaggtttacgacttaaaacaaaaaatcttgtttgatttaattccaagtcttgcgcattttctttgacgatttcaagcccgtactcattcgccgccatgcgtggtgcaatagctgcgacaagttctgtcggattattactaacccattttgcagcataggcggttgaaggtgtaacttcacgctccactccgtataattccgcctgaagaaatgtatgacactgggcaagtgcttgtgggtgggacattacttttttcactgatttccaagcggatacgtgtgctggatgaaccattaaatgttgcgcaatcgggagaacaatctccgctactacagggacacttgaaaaatgaaataagtagtccagcgtgatattgacgcttccttcaatcgtattttcgattggagcgacagccacatccacgtcttccttttcaattgccataatacaatctggaatcgtactcttagctatcatctcttcttttggaaaagcctttgctgctgccgcgtgtgtaaaagatgctgctgggcctaaataagcaattttcattttcaactctccttttatcgtagctaggaaaaaagcgtgcgccaactaattggagcagcactttaaaaatccataaattcaaattcataatcaagcaggcgaacgatatcgccgtctttagcaccacgttttctaagcgcctcatcgacacccattgcacgaagctgacgagcaaaacgactaatagatgcatcgcgctcgaagtttgtcatcgtgaatagacgttcaatttttgcaccacttctttccagcacacgtgcggccgctcgaggcagctagtanngggacttttagtgcnnnnnnaaaaaggttaactc

SEQ ID NO: 1478 - DNA, 931 bp, Listeria monocytogenes-4B
  misc-feature (1)..(end): n can be any nucleotide a,g,c or t/u
aggaatattatagtaaccatcgcagtgcttttggcgaaggtttaagctttacgactgatcccaaaagtctaccaactgacacactgaaaagcgatacgattaatcgattgaaatccgaaggggtcacgctagaaagcagttcctatacggtggaaggtagcgattatccaacagaaataattctaactttagatgaaaatttcactttttcagatgttgattgtttggttaatggaagcagtaatccagagttagttcaacaaaccgcatacggagaaaatggcataaagcttagtatacaggcgcttggaagtacaccggcagagattaaaatcaccggaaaagcgaagttgcgagaaggtgtgaatgttccattaattggtgctgtaaattggaatgctacactgcagcaatatgagaaaaaagaatatagtgaaatgccaacaattccatcagagcttgatcctactaccccggatacttcattaatagttagaaaagaacctgtaccgattaaggtcactgcaccaacatatttgaatgagacgaagagttctgtaaaagcaattactaatacagtaaaagattactataaactacaagcattatttgatttatattacggaattgatgcgagtgattctggacaaataccggattttagtaattatcaagtgacattagaaaattctgcgaaagcatcctcgtattattatatttttaataaagaagatgtgattggtagctttgtaaatcttactacagatcggtttgtggcagattatacgaaaaaaatcaaagcttttgagaagcgaattgatgactacaaaaatacaatggctgaggccaattccagatcagaagacgtaacanatagattnaacgaaacgacgcacgacgctatgaatctatttattttaaataccaatct

SEQ ID NO: 1479 - DNA, 1414 bp, Listeria monocytogenes-4B
  misc-feature (1)..(end): n can be any nucleotide a,g,c or t/u
gaagtttgcttatttaagtcgaattggactgaacgatcagcactacatttttacgaccaaacatttttgaaatcgtagcgaatattaaaccaaaaccaaattgcgttcttttagcttatcngatttctagaaaaagaacacgtatttcagttagcgaaaattgtggatgaattaaatatcccagttattgcttatggtttaaaaaatgattttcgaaatgaattattcgaaggctcgaaatacttgctattatatgcagataaactagaagaaatgaaaacaatttgctggttttgtgctaaaaaggcaacgatggttctgcgcgtggatgacaaaggaaaaccagtttatacaggtgaacaaattatgattggcggaaatgaccactattaccctgtgtgtcgcaaatgtcatgccaatccaccaataaaataattaaaagaggtgttgaaatacaatgtatgatcgattacaggcggtggaagaccgttatgatgaactaaatgagttattaagtgatccagatgtagtatcggatccaaaacgactacgcgacctttccaaagaacaatccggcattactgcgacagtcgaaacgtaccgcgaatacaaaaatgtaaacgaacaaattaacgaaacacaagaacacctctgagagaaaaactagacgatgaaatgcgcgaaatggccaaagaagaattcgcggaacttcaaaaagaaaaggcagacttagaagaacgactaaaactattactcgttccaaaagatcctaatgatgacaaaaacgttattttagaaatccgcggagcagctggtggagatgaagcagctttatttgccggcgatttattccgtatgtacagtaaatattgcggaatcacgtggctggaaagtagaaatcatggatgcgaacccgaccggtattggtggttacaaagaaattattgcgatgatgaacggaaatgatgccttttcccgaatgaaatatgagaacggtgcgcaccgtgttcaacgtgtaccagaaacagaatcaggtggtcgaatccatacatcaacagcgacagtagccattttgccagaagcggaagaagtggaaattgaactgcacgataaagatatccgcactgatacatttgcgtctactggtgccggcggacaaagtgtcaatacgacgatgtcagctgttcgcttaacgcatattccaactgggattgtcgtatcgatgcaagatgaacgttcccagctgaaaaataaagacaaagcgatgaaagtattacgcgcacgtgtatatgataaatttgaacgtgaagctcgcgaagaatatgatgccaaccgtaaatcagctgtaggtacgggtgaccgctctgaacggatccggacttacactatccgcaaaccgcgtaccgacctcgat

SEQ ID NO: 1480 - DNA, 1069 bp, Listeria monocytogenes-4B
ggcgtggcgcgggatgtggtggaaggaacgcgaatactggactatttaaatgcagaaggaatacagcatccgcatatttgttatagtgagcaaattggaccaattcaatcttgtgatacgtgtatgtgcgaggtggatggggaacttgtgcgggcgtgcagcacgaatctgacagacgggatggaaattaaaactaattctgaattagcgaaagatgcgcaattagaagcgatggacaggattttggaaaatcatttactgtattgtacggtttgtgataacaataacggtaattgcaaagtacataatacgacggaactgcttggtgtggaaaaacaagaacgtccttaccgcgaaaagggctatttgaatgatttttcgcatccgttttatcgttatgatccggatcaatgtattctttgtgggcgctgtgtggaagcgtgtcagcaagtacaagtgaatgaaacactttcgattgattgggaacgtagtcagccaagggttatttgggatgatgatcgtccagcgaatttatcgtcctgtgtttcttgtgggctgtgtgcgacggtgtgtccttgtaacgcgttgatggaaaaatcaatgcttggccaagctggatttatgactggcttagacgaagatatgctagaaccgatgattgatatggtgaaaaaagtcgagccgaattatcaaaccgtctttgctgtgtcggaaatggaagcagcgatgcgggaaacgcggacgaagaaaacgaagacagtttgtactttctgcggggttggttgtacgtttgaggtgtggacgaaggatcgcaaaattttgaaagtcgagccaaccggagaaggtcctgtgaacaaatttgctacgtgtgtgaaagggaaatttggttgggattttgtcaatagtgagaaacggattacgacgccgctcattcgcgagggtaatgaatttgtgccggcgagctgggaagatgcaattcatctagttgcgaccaaactgcgagaaattcacgctaaatatggaaatgattctattggatttattagttcttctaaaacacccaatgaag

SEQ ID NO: 1481 - DNA, 1032 bp, Listeria monocytogenes-4B
gtattaaaaaacttgaagagcattggcgtgatatctgaaatgaaactaacgctcataaactcaatggagtaccattgtcagaaattgagtttggattaattcttcaagaattacaacgtattaaaacaccgtatgatgctcaattattattagtgggtgcaggtggagtagggtcaattcctattacgcgggatgatggttcaagcctggaagttgaaattttttatgaagatgatgtagcgggcgggcgctctcggtatgaaattgtcaatcaagtaagatttgataatctacctaaaggattaacaacaaaacgtataattgatgtagctttacttattaatggtattccagtagttcatattgaagaaaaagatgagcatttacaaaatcagtggcgagcttttgaacaactcaaaggttatcatggtgacggactgtataaaggattgtttgcttttgtacaagttcaagttatcatgagtcaacattcggcgcattattttgctcgtccaaatgcatttgaacaatataataaaacttttgtgtttggctggcgggacgaaaataataaagatattacggatgcatttgaatttattcatcaagtaatgagtatccctgctctccaccgcttagttacagttaatatgatcccggatgcgtcaaatgataacataatggtaatgcgcagctaccaaattcaagcaacaagagaaattttacaacgcatgaaagaaatggaagcaagcggacttgtgcaaaaagagggcgggtatatatggcatacaactggatcaggcaagacagttacttcctttaaggttgcacaactcttagcgtctgcacctagaattaaaaatgtactatttattgtggatcgtattgacttaatagaccaaacactcgaaaattttaaaagtttcgcatatgctcactttaaaaatcgcattaagaaggttaatggaagagagttaaagagagaattaaagagaaaaggctcctcgcaaattttattgatttcagttcaag

SEQ ID NO: 1482 - DNA, 705 bp, Listeria monocytogenes-4B
gtacattaaatgcagttaccaataataaaaaagatatggaagttgtagcagccgaggcgaaaatgagcggcacggttattcttcttttagatgaagtacatcggttggataaagcgaaacaagattttttattaccattacttgaaagtggcgcgattatcttaataggtgcaacgacaagtaatccttatatcgcgattaatccggctattcgaagccgaacgcaaattttcgagttaaaacctctaacggtagaagatattatgataacaatggaccgggcgctttcagataaagaacgcgggcttgggaattatgatgtagaaatagatgaggttgcgaaaaaacattttgcaacggcgagtaacggcgatgtgcgaagtgcgctgaatgccttagagttagctgtcatttcttctgaaccaaatgaggatggtgtgattcatattacgctcgatgtggcagaggagtgtttacaaaagaaaagtttagcccatgacaaagacggcgatgcccattatgatgtattaagtgcttttcaaaaatcggttcgtggtagcgatgtgaatgcggcactccattatatgggacgtttaattgaggcgggagatttagtcagtattagccggagaatgctcgttatggcatatgaggatattggtcttgcgagtccacaggccggggcgcatacactcgcagccattc

SEQ ID NO: 1483 - DNA, 1436 bp, Listeria monocytogenes-4B
  misc-feature (1)..(end): n can be any nucleotide a,g,c or t/u
agctggcggatgaagcttattgtgtaggtcccgcagcaacaaaagatagttatttaaatatgtccaacattattagtcttgcagttttaacgaactgtgatgctattcatcctggctatggtttcttagccgaaaatgcagatttcgcggagttatgcgaagactgtaatattacttttatcggaccaagtgcttccgctatttcgcaaatgggaacaaaagatgtagcccgcgaaacgatgcgtaaagcaggtgttccaattgttcctggttcacaaggaatcgttaaggatgtagaagatggcaaaaaaatcgctaagaaaatcggttatccggttatcattaaagcaacagctggcggtggcggtaaaggtatccgtgtagcagaaaatgaagaaaaattaatttctggcattcaaactacccaacaagaagccgaagccgcatttggtgatcctggcgtttacttagaaaagtatattcaagatttccgccatgtagaaattcaagtgcttgctgataaccatggtaacgttattcatttaggagaacgtgattgtagtattcaacgtcgcttacaaaagctaattgaagaatcaccatcacctgccattgatgaaaaaactcgccaaaaaatggggaaagctgctgttaaagctgccaaagccgtgaattattctggcgcaggaacgattgaattcattttcgatcaccatgaaaataatttttactttatggaaatgaatacgcgtatccaagtagaacacccggtaaccgagcttgttactggtgttgatttagtgaaacaacaatttctagttgcttctggggaagaactacaaattaaacaagcagatgtgaaattaacaggttgggcgatggaatgtcgaattaacgctgaaaatccagagaaaaactttatgccagctccaggtgaaattaaattttatcttcctccaggtggcttaggtgttcgaattgactcagcagcatatccaaactacaaaatcccaccatactatgattcgatgattgccaaagtaatctgttatgcggaaacacgggaagaagtgattcaaaaaatgaaacgtgcgttgtccgaatttgccattgatggcattccttcaacgattccgttccatttacgtgtattagataatgatgtgtttttatcaggcgacttcaataccaaattcttggagcaaaacgatgtaatgaatctttctaaggagggctaaataatggcttatacaaaagatttgcgtaaacaaaatgatgcaccgcttggcaaaattgagattgcacctgaagtaatcggcgtaattgctggacttgccgcaagtgaaattgaaaatgttgcttatatgcaaggtggctntgcaacagaaatgcgtgagaaattcagtggtgctgtaaactaccgtaagggcggtaaa

SEQ ID NO: 1484 - DNA, 1007 bp, Listeria monocytogenes-4B
actaagtacttaagcatctcgacggccacagtgtgctggaagaagaacaagttcatattaataaggtgatgtcatgaaaatggatacattaggatttctcgaattaaatagtatttcgaaaggcatcgaggcggttgacacaatgctaaaagcggccaactccgaattgatttatgctaaagcaagctgccctgggaagtattatatattaattgccgtgtcagtagattctgtagctcaatcaattgaagctggaacgaagattggtgcggcaaatatcgtcgggaatttagtcattcctcgcgtgtccgaccaagtaattaaagcaattaacaaaacggaagtgccagatgagatgaatgcagttggtgttatggagtattattcctgttcaggatcaattattgctgcagatgccgcagtaaaagctgcagatgttcagttaatggatattcggtctgtaacggggattgctggtaaatctttcgttgttctaactggtgatacagcagcatgtgaagcggctgtggaagctggacttgcggcagccaaagaagaagcacttttaattaataaagtagttataccaagacctcgtaaagaagtttttgagagtttaatctattaaaaagataacaatatattgtcatagagtttttgagaaaggtacgcactgactgtggttgcgtgccttttgaacaatctgacaaaatagtggcgcttaaatatgataggattattttgagatagtttgtctagatgaggagtgaagaaaatgagttttgatgataataaagagcgtgtaatacaagaatatgtaccgggaaaacaggtgacgctggcgcatttaatcgccaacccaaaccgtgatatttatacaaaattaggattagaagaaggcgcaagtgcgattggaattttaacgattacgccaagtgaggcttccattattgcgagtgacattgcaactaaatcaggtgacgtacgaattggctttattgatcgtt

SEQ ID NO: 1485 - DNA, 1683 bp, Listeria monocytogenes-4B
tcaacagaattaaagtaccattttcctgaccatcgtcttattcggtgcaagaagttaatgtgcgtcagaaggtatggagtcatatgaaacagatttagatggagtggtttggattcttgacccaattgacgggacattgaattttgttgaacagcaacgcgattttgcgatttcacttgcagtttatgaagatggaatagggcagcttgcttatatttatgacgttgcacgcgatgagctgtattttggagaaaaaggaaaaggtgctacagtaaacggcagaactatccctaaacttgacccagcaatagacctaaaagatacgctattaattgctaatttgagcgtgacaagaaaattcccaaccatgtgggaggcggtaaaagcttctagaggattacgattacacggagcagcttcactggaatatatggatgttgctactggacgagcgggagcctatctttctgctaatttagccccgtgggatatagctgctggaaaaattatcgtcgaagaattaggcgggaaagtgacacggattaatggtaaaaaaatcaatatgttagaaaaaggaagttctattgtagcatcgccaaaaatccatcaaaccttattagataactacctgccttaaagaaagcgctcaacataaaaaaacttgttttcagaaaataaaaatcgtgccaaatccgctcagctatgctataataggtaagttgatttaaacgagacgatagcgacggaggaaaataaatctattatactcccgtgcttggctagtcttttcgataaatgtttggatttttaatttattatgaaacaagattgaatttaagaaatgatcttcgtaatgtagcgcccctcgcccacgttgaccatggtaaaacacctctagtagaccaattactacgccagtcaggcacattccgcgacaatgaaacagttgcagaacgcgcaatggacaacaatgatttagaaagagaacgcggtattacaattttagcgaaaaatacagcgattaagtatgaagatacacgtgtaaacatcatggatacacctggacacgccgatttcggtggagaagtagaacgtatcatgaaaatggtagatggtgttcttttagtagtggacgcgtatgaaggtactatgcctcaaacacgttttgtactaaaaaaagcactagaacaaaacttaacaccgatcgttgtagtaaacaaaattgaccgtgattttgctcgcccagaagaagttgttgatgaagtattagaattattcatcgaattaggtgcgaacgacgatcaattagaattcccagttgtttatgcttctgcaatcaacggaacttcaagctatgattctgatccagcagaacaaaaagaaacaatgaaaccacttttagacacaattatcgaacatatcccggctccagttgataatagcgacgaaccattacaattccaagtatcattacttgattataatgactatgttggtcgtatcggtattggccgcgtattccgtggaacaatgcacgtgggacaaacagttgctttaattaaacttgatggcacagtaaaacaattccgtgtaacgaaaatgttcggtttcttcggactaaaacgtgacgaaattaaagaagcaaaagcgggtgacttagtagcacttgcgggaatggaagaa

SEQ ID NO: 1486 - DNA, 804 bp, Listeria monocytogenes-4B
aattacagctgaaagagctggcgattacacatgtttcttcaagagacaccgcggcaatttggcagaagcaacttgaaaaagaaaccggggaaatcagctacttagtggatagttcggcagccattgcgattagtgctggactcggaagtgtcgcagttgcggggattaaaaaggaggaaacgatatgatgtattggacagtagcactcgctttacttgtttactttatactctggtttattatttcaaaaataaaaggaaaatattcgctcgttgatattgcgtggggcggcggctttgttgttgtagcatggactggatttttaacgacatttagcatgacagcgcaaagtataaccatacttgttttagtgacgatttggggtgtccgtttgttttggcatttagcgcgccggaattggaacaaaccagaagattatcgctacgttaatatgcgcaaacgctggggaacgacattagttaatttgaaagccttcttaaatgtcttcgtgttgcaaggtgttttattatttattattgctttaccgattacacatagttttgctaatgaaacagcgacattcgcttggtggcaaatcctcggtattgttatctggattattggctttatttttgaagtcggtggcgatttgcaattagaaaacttcaagaaaaatccagccaataaaggcaaattattaacaactggattttggtcagtcacacggcatccaaattattttggtgaagcacttagttggtggggtgtatttttagttgcctatacgcaattaaatgatctcta

SEQ ID NO: 1487 - DNA, 1195 bp, Listeria monocytogenes-4B
aaatcgctattaaagcaggaattccttataaagtacccggagtcacaatcaatgaagtttgtggatctggcttaaaatcggttatgcttggtaggcaagcaattcagctaggggaggctgacatcgtagccgttggtgggaccgaaaatatgtcccaagcaccacttttacttaatcccgagctagctggcgaagaaatcgatccaaaaaaactaagaaatagcatgttaattgatggtttaacagatgtttacggcgagtatcacatgggaattactgcagaaaatgttgcagagaaattctccgtaaccagagaagaacaagatgaatttgcccataactcacaaatgaaggccgcgaatgcacaagaaaaaaacctttttgaagaggaaattattcctgtaaagcttccagacggttcattttttgaagccgatgaaacgattcgcgcgaattcaactctagaaaaattagctactttgaaaagcgtattcaaagaaggtggaacggttacagccggcaatgcttccggtatcaatgatggagcttccgcaattattttaatgtcgaaagaaaagtcagtcgcggaaaacattccttatatcgcaacaatcaaagtaacctctgaagttggtgtcgatccagcacttatgggttacgcgccatactatgcagtaaatgaagctttaactaaaggtggatattctatcgatgacattgatttattccatttaaacgaagcttttgcatcgcagtcagttgcagtggctcgtgatttaaaaattccagaagagaaacttaatatttacggtggagcaattgcactaggccatccaattggagcttctggtgcacgcattattgcctcattgttaaatgagttaaaacatgaaaataagcacatcggtgtcgcttccttgtgtgttggtggtggtattggtattgcaattatccttgaaaaagcttgatagtagtacatttaatgttagtaaaaagctaaaatcagctaatagttgattttagctttttatgatttcatttttgtcttttttgtgaacaaaccgccaatttgttttgtgaaacttcttacaaaaacaagtatttgtacggttttggtgctagaatgtaattattctaacaagcaggaggacattatgaagcacactaaaaaaattacatttagctttattatatt

SEQ ID NO: 1488 - DNA, 1260 bp, Listeria monocytogenes-4B
aggaagacaaacaaatacacaggctacaccgactttagatagtttggcacgtgatttaacagttattgctcgggaagataatttggatccggttattggccgttctaaagaaatccaacgtgtgattgaagtgcttagtcgtcgtacgaagaataacccagtacttattggagaacctggtgttggtaaaacagcgattgcagaaggactagcgcaacaaattgttcgtaatgaagtgcctgagactttacgtggaaaacgtgtaatgacactggatatggggactgttgtggcagggacaaaatatcgtggtgaatttgaagaccgtttgaaaaaagtaatggatgagattcgtcaagccggcaatgttattctatttattgatgaattgcataccttaattggtgctggtggagcggaaggtgcgattgatgcctcgaatatcttgaagccgcctctagctcgtggtgagttgcaatgtattggtgcaacaacactggatgagtaccgtaaatatattgaaaaagatgctgcacttgagagacgtttccaaccgattaaagtagatgagccaactgtagaagaatccattcaaattttacatgggttgcgtgatcgttatgaggcgcatcaccgtgttgcgattactgatgaagcgcttgaggctgctgttcgtctatctgatcggtacatttcagaccgtttcttaccggataaagcgattgatgttattgatgaatctggttctaaagtacgtttgaaatcttttacaacgccaaaaaatgtaaaagaaatggaaaacaatttatccgatttgaaaaaagaaaaagatgcggctgttcaagggcaagaatttgaaaaagcagcgtcattacgcgataaagaacaaaaacttaaaaaatcattagaagaaacaaaagcgaattggcaagaaaagcaagggcttgaccatagtgaagtaacagaagagattgttgctgaagttgttgcaagttggactgggattccagttgcaaaacttgcggaaacagagacaaataaacttttaaatatggagaaacttttacatgaacgcgtgattgggcaagatgctgcggtgaaagctgtttcgctagctgtacgtagagctcgtgctggacttaaagatcctaagcgtccaattggttcctttattttccttggacctactggtgttgggaaaacagaacttgctcgcgcgcttgctgagtctatgtttggcgatgaggattcaatgattca

SEQ ID NO: 1489 - DNA, 1206 bp, Listeria monocytogenes-4B
tggtcgagtagacttacttacagcggatgaagaaattgccttagcaaaacgtatcgaagctggcgacattgaagccaaaggacgtcttgcagaagccaacctgcgccttgttgtaagtattgcaaaacgttatgttggtcgcggtatgttattccttgatttaattcaagaaggtaacatgggactaatgaaagccgttgagaaattcgacttcaataaaggatttaaattcagtacttatgcaacgtggtggattcgtcaagcgataacccgtgcgattgcggaccaagcaagaactatccgtattccggtgcatatggttgaaacaatcaacaaactaatccgtgtacaacgttccttattgcaagacttaggtcgtgatccttcaccagaagaaattggtgaagaaatggacttaccaactgaaaaagttcgggaaatccttaaaatcgcacaagagccagtttcccttgaaacaccaattggtgaagaagacgattcacatctaggcgattttatcgaagaccaagatgcaacttcaccgtccgatcacgcagcatacgaattactaaaagaacaattagaagatgtgcttgatacattaactgaccgtgaagaaaatgtacttcgcttacgttttggtctagatgatggtcgtacgcgcactttagaagaagttggtcgtgtatttggtgtaactcgtgaacggattcgtcaaattgaagccaaagctttacgtaaattacgtcatccgagccgcagcaaacaactaaaagacttcctggaataaagcacaaccgggcaggaggacaaaccgttctcctgcctttttaatgaaaatgaaagtagggaaccaaatgaacgaagagcaattatcgaagcgactcgaaaaagtggcttcttacataacaaaaaatgaacgaatcgcagacatcggaagcgatcatgcttatttaccttgttttgcagttaaaaatcaaacggcttcgttcgctattgctggcgaagtagttgatggaccttttcaatctgcacaaaaacaagttcgttcttctggcttaacagaacaaattgacgttagaaaagggaacggtttagctgttatcgaaaaaaaggatgcgattgatacaattgtgattgcaggcatgggtggcacgttgatacgtactattttagaggaaggtgccacaaaattagccggtgaaa

SEQ ID NO: 1490 - DNA, 728 bp, Listeria monocytogenes-4B
aatccttgcatatttctatacaagaactctttttcttccttattcatcttttgcatctgaggtatcttttatttcgggtattgctagccaaatagaagttggttcgccttccattgtttcatcgagtacgaaggatccgttagaatagcgatccgttattcgtagattggcaacgtctatttcaacaatttggtctgtgtttgtttcgataaataggtggtcgttattatcagcaagagttataccaatgaagcgatgtggattgcttttcagttcgcgtaacatcaataagccacgtttcgctcttgagattggttcaaattcgcttgctttcatttgtttgagtgagccacgttgtgtggcaagaagaatatgtttttgttcgttcggcataaggactataccgccaataactatatcatcttgttttaagttaatcgcttttacacccgctgttcttgcacctgattctggaatttcagtaatagaataacgaaggccgtaaccatttttggttgctaagaaaatatcttctgtgccatcaatcaaatgaacacttaacagttcatcgtcaccttttaatttaattgccatcatggatttagaatagcgttgtggtttgtaattcgtaatagctgattgcttggtcatgccgtttttagtaacgaataaaaagcgtttttcttccgtaaaggcttgaattgcaatagcagaacggatttcttcac

SEQ ID NO: 1491 - DNA, 1364 bp, Listeria monocytogenes-4B
ttaagcagtgaagttgctgctcagtaggctcctggtaaggcacgccaatttcctgattctggatgagccagccaactatttggatatctatgcaatggaagcgctggaaacgttaatcaaacaattggcggggacagtactattcgtgtcgcatgatagaacttttgttaaccacgtggcagaacaattactcgtcatcgaaaataatgaaatgactttccaccggatgactttcgcggaatatgaagaaagtaaagcgccaagtcgcatcacagaagaagataagttgattttagaaatgcgcatgtcagaaattgcagccaagcttatgcaaccgaatttaaagcccacagaaaaagccatgctcgaacaagattatcaagaaattatcacaaaaagacaacaatttagttaaattgttgtctttttattcaagctaaataaaaaatatagtcatttatattttacttgatttctgcaaaagataggcttagaatcaaatagttattaaaaagagtaaagaaagaaggaatcccatgtttagtcatcttccggattcattcctccaaatgaataccatttttatttctattttgattgaggcactgccgtttgtattaattggagtatttattgctggctttattcaaatgtttatatcagaacaatttattgcccgtgttattcccaaaaataaatttctagcagtcattgttggctcgtttattggtgtatttttcccttcctgtgaatgtggcattgttcctatcgttcgtaatttactggcaaaaggggtaccgcttcatgctggtattgccttcatgcttaccgctcctattatcatcttagtagtattattttcaacgtatgttgcatttggtagtacgtgggaagttccgttgctacgtgttgcgggaagtcttgtagtagctctcgttgtcggaaatattatcgcttatttttataaaggaactggactcaaagagcgctttttaaaatatgaagcagctagtgaaaaagtggccgttccagcaacaaatctagcgcttgctggtggtccttctgaaagtacgacaactaattttcaagtcctaacaagcgacggagcacttacagaagacgctcataaaggacacgcgcaccaccatcacggtgaggagcacgcgcatacaaaaatgacattgagtcaaaaaatatggcataccgtacaacacgcagtcgatgaattcttctctgtaggtaaataccttgtgtttggggctttaattgccgcagcgatgcaaacatacattaaaacatccacacttgtttccataggtcatggtccgattttatccatcttacttatgatggttcttgcctta

SEQ ID NO: 1492 - DNA, 1302 bp, Listeria monocytogenes-4B
  misc-feature (1)..(end): n can be any nucleotide a,g,c or t/u
tgtcggccgacagtgtgctggaaagtattttcaggagaagtgattgaggttggtagtgaggttacagatattgagattggtgatagggctgccggatgcccagcactctattgcggagagtgtgaatactgtaaaaaaggcgaattcgcccgctgtcggaagctaacagtaatcggagcaagacatcccggagcctatgctgagtatatcaagcggggcagcagaaaatgtagtaaaaataccagacgaattagattatgaagctgctgcacttgtcgagccttccgcagtggtcgttcatgggttttatcatacgaaattacaagcaggcgatgatgtcgtcgttgtcggaagcggcaatataggtttgctagcaattcaatgggcaaaagtttttggcgcaaaaagagttattgcaattgatgtagacgataaaaagttagctcttgcaaaagaagtaggagcagacgtcgttattaattctttaaaagaagatccattagaagtagtcgcagcacatacagatggtctaaacgctgatttagttgtcgaagctgcgggatcacctattacatctgcccaagtttttgcctatgcgaaaaaaggtggaggcgtcgttttcctagggattccatacgccgatgtaacaatcgaacgtttctattttgaaaaaattgttcggagtgagcttactgtttggggctcatggaatgcaatttctgcaccatttccaggaaaagaatggcaaacaaccattcatttcctagccaataaacaaatcaaaattgaaccaatgattacacatcgtctttcacttgctgaaggaccagaagtttttgagcgaatctatgaaagaaatgaatttttcgggaaagtattatttttcccagaataatagggggattttaggatgaaaaagaagaaaatttatgtttgttgtgggactggaattgcaacttccactgttatttccaaaaaagtgcgtgcggtactagacgaaaagcgcattccatatgaaattagtcaatgtacggttcaagaagtagcgtcaaaagtaagcacatctaagccagacattattgttagttcaacaacagttacaggtgatgttggtgatgtaccagttgtcattggaagatcatttttaacaggcctaaaaaaacaagatacaatcgatgaaatactcgcgatacttcaagattaaagggagggcacanaatggatattattctagatttctttaaatatattatcgggcttgggtgtacagttatgatgccgattatcattaccattctaggg

SEQ ID NO: 1493 - DNA, 846 bp, Listeria monocytogenes-4B
tatatgggacattctcattggtattttgtagtaatgcaatattatttgtatcgtgagtatccgcaagtgcagcaataggtgtaagtgctatttgactagctagagaacttaaaactataaggctagcgatagtttttttcttattaaacattatttaaataacctctttccttgaattggaatttaatgtaattaaagtatagcactcgattttggggcgttagtttaattctagtagcattaatatggtatattttgtcgaaataatgactaatgagaatcataaaaaggtaaatcgttaatttaaactttaacagttagcgctattaagtacttttactcagaaaacctctaccatcttcttgttatttcagctataatgaagtaattgaaaactaaattaaaggattaacaaggaggaaaacgatttgaacattatgattgcgctgattcctgcattactctggggaacagtaccgctaattattacaaaatttggcggttcaacaagacaacaaacgatgggaatgacactaggggcactcacttttgcggtaatcgttttcttctttactgacccagtttatacgcttaaaacagtaggaattagttttataacagggtgtttatggactgtgggtcaaatgttccaactgcaagcattcaaaattatcggtgtttcaaaagcaatgccgatttctacagggatgcaattagtcggaacaacactttgtggggtaatcttatttcatgaatgggatacgacacttcggattattttaggttttattgcacttgcactaattgttggcgggattttcttaacatcctatgctgaaaaagaag

SEQ ID NO: 1494 - DNA, 977 bp, Listeria monocytogenes-4B
gcgctggaagtcttgtgaagagcgtactgtatcgtttgagggggatacgaatatagagagcagatggaagaagctggtatgattgtttctgcaacaagtccagatggtcgtttagttgaagtagttgaattagctgatcatccttggtttgtcgcttgtcaatatcacccagaattcatttctcgtccaaatcgtccgcaaagcttgtttaaagattttgttggcgctgcacttaataataaataaggtaataataaaaatctcccagccataattggctgggagatttttattattattatttagtagcactaaggttcgaagcttttgtccaaccaataaaggtggagcttgttcttattcgataccaaagttgcccttcgaccgttgcttgtttatccacggttagtttttgacctttgtaagcagctaaagtgccccatctaacatccgcatctacaacaggaactttgtagtacgcttcgtttactttgttcgcaatcacatagcgagttaaattagtatctttctccatgctttgcttatagaacgtatcgagtgcacgagtatcaacccaaccgattactttcccgtcaatgctgaattgataccaggtagtaattactgttttagcttcgcgcaagattcgcatgtttttaccttggtagaccgaaagttgattaacaagtttagagccttccgttctgtaaggttttgtccaaacggcattgcctggcgcagtttttactctagcataggctgtggcgcctttatcatattcaattttatcgtatggcgtagttgttgttaagttcgaagcttttgtccaaccgataaaagtagtgcttgttctaacgcggtaccaaagctgtccttcgaccgttgcttgtttatccacgggtagtttttgatctttataagcagctaaagtgccccatctaacatccgcatccacaacaggcactttgtagtacgct

SEQ ID NO: 1495 - DNA, 819 bp, Listeria monocytogenes-4B
aaatgattggaaaattagttgtgaaaggatttgagtaataatgagtgaaaaacaagttgcgctatatatcgcggttagtttggacggttatattgcagatgaaaacggaagtgtcgaatggttagaatctattgatagtgaaggggatgcgggttatgaagctttctttgacaacgtagatacagttgtaatgggccggacgacgtatcaacaaattttctcgcttactgacacgttcccttacagtaaaaaagatgtctacgttttttccaacacgaaagctgggacaaaagatgagtacgctgactttgtagctgggactgttgatacatggctgaataacattgatggtgaaaaaatctggcttgtaggtggcgcaaaattagtgcaacaatttttaaaagagaaggcgatagatcggtttgtgataacgattgcgcccattattttaggaaaaggaattccactctttgaagaagatagagagcacgcgctagagctagaagaagtaactcgtttcggccagtttgcccaactaacgtataaaaacttggaggaaaattaaatgaaaattgctgcttttgatattgatgcacaaaaaggttttacgccgctttgtcccgatgaattaccggtttcgggcggagacaaaattgtgccagaacttaattttatggcaagtcttgcttctcttcgaattggtagtaaggacgcccatccgcaaaatgccgtatgggtagtggattccaaagacgaaatgttggctgaactcgaatatccaaatgcagaccgtacttgggtaaggcactgtgaaccagg

SEQ ID NO: 1496 - DNA, 1075 bp, Listeria monocytogenes-4B
tttaggccgctacttgtcataatcttatcacgaaaaagcaggaaagaaaagagtcaaccacccgtttagccgatattcagtctttcgtcgtagtatgttacaatagaactttgaaaggatgatgccttatcgcaaatacagttatcttagtcgatcaaccaacacttgaaaaaatgaaacaaacatatctcccattttctaatccaaagctaccaccaggagctgttttcgctgcaaaaaaaaccggtgtttccatcactggctacaagtcgcgcaaagtgatgttccaaggagtaaacggagaagtagaagcaaaaaaatgggtggcgactcttccagaatcaaaaacaaaagcaccttccgtctctaaaggaattcttccggcaaacttcgcatcaaaaaatgtcattggttcagatgaagttggcaccggtgatttttttggaccgattacggtttgtgccgcatatgtggacgccgaaatgatgcccctgttaaaagagctaggtgtaaaggactcgaaagcaatgaaagatccagaaatttgtcgtattgctgagaaaatcatgccacttgttccgcacagtgtgctgctttgccctaatcctaaatacaacgaactccaaaaaagaggcatgaaccaaggacaaatgaaagctttactacataaccgcgcgattgaaaacgtcttgaaaaagctcgcacctgtcaaaccagaagcgattttaattgatcaatttgctgaaaaaaatacgtattatcgctatttagcaaaagaaccaagcattattcgagaagatgtgttttttgcgacaaaagcagaaggattacatctctccgtcgctgctgcttcgattattgctcgttataaatttgtgcaagcttttgatgcgatgtcaaaagaaatatggcatcccacttccaaaaggcgcaggacctcatgtggatgctgttgcagcggaaatcatcgaacgatttggtctggaaacattagcgaaatatacaaaacagcatttcgctaatacagagaaagcattaaaaatggttaaaaagtaaaaaaacatctcgtcaataa

SEQ ID NO: 1497 - DNA, 712 bp, Listeria monocytogenes-4B
gattgggttagatcaagtgtctaatgctaaaccagatcctgaaggtattgagatggctctttctttattaaatgcgacaaaagaagaagcgattatgattggcgataattatcactgatatgtgaagcgtggaaaaaatgcggaaaccctaaccgcgggtgtagcttgggcgattaaaggaccagaacatttggcgcagtttcagccagatttcatgttagaaaaaatgagcgatttactcgcaattgttagggacgaggaatagaatttgaggcggctggatagggttaaggcgacccgatgatacagtcaacaccctttttcaagtgtataaaacgatttctttttggaagggtttgaagaatacgctagtaatagaacttggtcgtttttttccatggatgggcggtaagcgtgcaatttatcgcgcatgtcttggaatggaaattggcgagaagactgccattgcctataaagttatgccggatttattttttccggaaaagattatgattggcgaaaactcaattattggttatcacacaactatcttgacgcatgaatatttactttcggagtaccgtgttggggaagttgtgattggtcgggatgtgatggttggcgcgaatgtcaccattcttccgggcacataaattggagacggggctgtgattgctgctgggcgggtgtctcggtggatgtcccggctggt

SEQ ID NO: 1498 - DNA, 1403 bp, Listeria monocytogenes-4B
  misc-feature (1)..(end): n can be any nucleotide a,g,c or t/u
atcgaagctttcgaagccattttaccgaatgatgtagtatttattaagccaaaaggtggttttcatttatgggtgaaattaccagtcgaaattcgctcgattcgtgattttgatatatttttagcgaatgatttacttgttatgccaggatttttatttggggtaaaataagcggttatccgtgtaacttatgcgcggcttgagaagacggaagcgagacgtatagctgaaataataaagcaaatattaatagaaaaaaagtgcgaggaagcttgatttaaagctatcttgcacttttttcatattccccaaaaaatccttctaatctataatagaaagtaacccgcgattttaactcatcacaataaatctttctgccaaaagcgaagttgtgatgaatcaccatttttatgtaagggttatcatttactattaatataagggaggggaaagtagatggaacagaattgtaaggaattaattacttatctgctcttgaatcggcaagtgaatcttagaaatgtttccaagaattttaaagtatccaaagaagcaattggcgcacagattacacaaataaaccatctactaaagtcagaaccaattttaattgaccatgacatgatttttgttacagatgtatgtagggaagcttgttaccggcttttaactgcggaagaacaacagctgttttcgttttatgaggtaaatattcgtcgcaaacttatcatgattaaattactacttcataatcattatatgtcactcggagcgcttgcggactacgtttatgtaagtaaaaacaccatgcttacagatgttaaaagtatcaaagagagtctgcatgagtttgaaattcagcttgattattcgaggagagatggctacgctgtttctggttcagaatttctgattcgtaatttactagcagaacttattcgcgaagtcgttcagaccccatacgggaaatttgtccttgatgaaaagaagctgattactgtgagcgaagtgtttttactaaaaaaacggctcgaaaaggttgaaagtaagcttcaaattacctttacagatgagcagatggaagaattgccctatattctccacggcatcatcaaaagatccaaagtaacaaacaagaaatggacatttaaaattgaaatgtatgacatcaaaaaaacccgtgagttcccgataatgaaagaaatgttttgggggtatgattttttaagtgaaaacgatttactttacttatcgttacaagtcctcgcttcgaacttagtcgagtcggcgcttcatttctcagacagtgaagaaatcgcctacgcagtcgacgagttcattcgtttactagaaactttccagcacacgtcggccgtcaggcatgcgggtaggttactancagc

SEQ ID NO: 1499 - DNA, 1433 bp, Listeria monocytogenes-4B
tccatgcttcgagcgggccgcacgtgcgctcgaagagtaaaacaactcggattcttcaagcaatcctcagcagcaccgcaacaagtgacacagaagtaattaagcgcgtattaactaattttggtatcatcgattattttgacttcatttacgcctccaattccgaattacaaccagggaaaatggaaaagccagacaaaattatttttgatttccactaaatggttttcaaattgataaaacggaagcagtcatggtcggaaatacattcgaaagtgatattattggtgcaaatcgtgcaggaatccatgcgatttggctgcaaaacccagaagtttgtttgcaagatgagcgcctacctcttgtcgcgccgccatttgttatcccagtttgggacttagctgatgttcccgaagcccttttactattaaagaaaatttctgcttgacctgtaatgcattacacagagtaaactaaaaaagtggaagaaattagccaggaaggggcgaacgaaatgactgaagtgaaaaaacaatttccaaaaggatttttatggggtggagcttctgctgcgaaccaagttgaaggcgcttacgatgtagatggtaaaggcctttccacagcagatatggtcaaattcattccaaaagaagaacgcacacaagatcatgcattagatgtatctaaagcagaaatcgaagcaattattgcagggaaagtagaaggtagattccctaaacgtgatggcgttgatttttatcatcactataaagaagacatcgcattatttgccgaaatgggctttaaaacattccgactatcactaaactgggcgcgtatttttccgaacggtgatgacaaagagccgaatgaaaaaggccttgaattttatgataaagtgtttgatgaattattaaaatatgacattgagccacttgtgacactttctcactatgaaacaccactaaatcttactttaaaatataacggctgggctgatcgtcgcgttatcggatttttcacgaactatgcggaaacagttttcaaacgttataaaaacaaagtaaaatattggctaacttttaacgaaatcaatgttatttcacttagcgcatacactggtggtggcgtgcttttagaagacgcgaagaatccacttgaactttcttatcaagcaggacatcaccaattcgtagccagtgctcttgcaacaaaattggcgcatgaaattattcctggatcacaagttgggtgtatgttagcgcgcatggcgacttatcctgcgactaacaacccagatgatatcctaaaagcacaatacgaaaaccaacaaaatctatttttcacagacgttcatgctcgcggtgaatatccaagcttcatgaatcgtttcttccaagagaacgacattcacatcgtaaaagaagttggcg

SEQ ID NO: 1500 - DNA, 869 bp, Listeria monocytogenes-4B
tccacttatgttaactctggaaatgcttcttggatgcgtgtttgcaagccaagattagaaacaaaaaggaaaattttgatgcacggtgtttaagccagtatattttgcacgtagcaaaaaactgctagcgtcttaaacctcggatacggaaggttccattgttttcgcaaccataattaacaagtgtgcttataaattttttaattaatttgaggggtgaatagtttgtcaggacattcaggacatgatgtaaaatatggacggcatcgtacgcgtagaagttttgcgcgaatcagtgaagtacttgaattaccaaacttaattgagattcaaacagcttcttaccaatggttcttagatgaagggctacgtgagatgttccgcgatatttcgccaattgaggattttgcgggtaatttatctttagaattcattgattacgatcttggagaaccgaaatactcggtagaagaatctaagaaccgtgatgcaaactatgcggctccactacgcgtgaagttgcgcctaatcaacaaagaaaccggcgaagtgaaagaccaagaagtatttatgggtgatttcccgctaatgactgaaatgggtacgttcattattaatggggcagaacgtgttatcgtttcccaattagttcgttctccaggtgtttacttcaatggaaaactagacaaaaatggtaaaaaaaacattggttctactgtcatccctaaccgtggggcttggcttgagtacgaaacagatgctaaagacgttgtacacgttcgtattgaccgtacacgtaaattaccagtaactgttttacttcgtgcactaggctttggttccgatcaagaaattattgatttaatcgg

SEQ ID NO: 1501 - DNA, 716 bp, Listeria monocytogenes-4B
tgttccgactattgttggaatgacgtttccatgtaggcgagagccaatgctaaaatcaactttcttcacaaaatcgaaccaactaggcatgctagtgaaatattttactcgaccttcttgataatacttatgttggatatttgttgggtagccattgatatcactagagatatctggaccgccggcatacattaaatggaattcgtctaggtgttgagggataaagtgatagtctttatatgtagtaatcatgttgttaaggaaattgatagctatttctgaagaagttggggatgcattaatagcgatggtggattgatctgttaagtgaaaatctcttatttttatttctcgtccgaatgtataaagggacggacaaccaattactcggaagtcaagttctgcgttaaatcctagtttttttaaataatctgcagtaatttgtcctcgaaccccaatttgagctgatttttctaggactgctttaacaaagttagtaacatcttcatcaaaagaaaaaccttcgtctagttgtggttcgtaattcgctcttaacccgacgcctgttacgatgactgggatttttaatttgcgaatgagttgggtgtaattgcggagtactggcctaaagtcgtctcgaaatgcgtcagctaaaggcataacatagaggtcgtaattttcattgattttttctgcgagattggggttagatgaaa

SEQ ID NO: 1502 - DNA, 1187 bp, Listeria monocytogenes-4B
  misc-feature (1)..(end): n can be any nucleotide a,g,c or t/u
tgcactcccgcgccggaaagctgctaacgatattgttattttatctggtagggtgcgcgcgtcacttggaaatgatttttacaataaaataattcaaatttgcaaagaaaaaaaagctgaatttatgattgatacaactggacaagaactgctagatgcattaccaaaccacccgattctaattaaaccaaatcaccacgaactagcagacctatttggcgtgaaacttggtagcgtagaagaacttatcccatacgggaaaaaatgtttagaattaggcgcgcaacatgtaatcgtgtccatggctggtgacggagcgcttctatttacaggagaagatgtttacttcgccgatgcattaaaaggggaactgaaaaattccgtaggtgctggagactcaatgattgcaggctttgttgggacttttgataaaacgagagatcccgttaaagcttttgctgcaggagttgcaacaggtggagctactgcattttcaacagatttagcccaaaaagaactaatagatgaactattaccgcaagtgaagataaccaaaataacagggaggaactaaaatgagaatcactgatttattaagcaaagatgttatgattatgtcattacaggcaacgacaaaagaagctgccatcgatgaaatgattgcttcgttaaagagcaacgggaaaattaatgatgaggtgctgtttaaagaagctataatgaaccgtgaagcacagagttctactggtgtaggtgaaggaattgcaatgcctcacgcgaaaacaaaagcagtaaatgaaccaactgttgtttttgctaagagtgaaaaaggattggattatgatgctttagatggtcagccagcacacttattctttatgattgctgctccagatggcgctaatgcaactcatttagaaactttagcagctctttctagattattggttcatccagcgtttgtgcaatcgttaagagatgctaaaactccagaggaagtatcattattcacatgacagagaccagagaacagcgtgtcactacgacgatcgctccgctaannnnangaannggantnngcnagnttccgntgtcanggaatgcatctttgcgaatcacgaatgaacagtgatacattnngnnanttnncagaactggctataataggtgacgaataaagagaaaca

SEQ ID NO: 1503 - DNA, 1305 bp, Listeria monocytogenes-4B
gctggaacatgaggttctgctcggagaattgacatatttgcttgaagaaagcgaaggcattcgtattgaccaaaatattttagtggctcaagtagaaaaattagctgaggaacaaaagattattacggaaaatacacgtgtttacatgccatcactctattattcagagagcggctttgcatatcacgtgaagagaatgcttaaacaaacagaataccaagaacaatttccgcaatccgaatttctgctagctctaggagaattagaagaacggattggcgttcactacggagattcgcagcgacaggctttagaacaagctttaatgtctccgatgctcgtacttactggtggtcccgggacagggaaaacaacagtcattaaagggatagtggagctttatgcggaactaaatggtgtgagccttgatccccatgcttacaaagatggagcgactttccccgttcttcttgctgctccaactggccgtgccgctaaacggatgtctgagtcaacagggcttcctgcgatgaccattcaccgtttacttggaatgaatggtcaagaacaaatggatgatgatgcagaaagactgattgatggacgactgttgatagtggatgagatgtcaatggtagatatttggcttgctaatcaattattccgtgctttaccagcgcacatgcaagtggtacttgttggcgaccaagatcagttgccttcagtcggacctggtcaagtactcaaagatattctgcaatctgaacaaattccaactgtagctctttcagatatttaccgccaaaaggacttctcttccattattgaaatggcgcattatataaaagaaggcatgttgtcagctgatttcaccaaaaatagcgccgatcgctccttttttcattgcacggtaaatcaaattggtgatgtagtcgaacaagtggtaaaaaatgcaaaaaacaaaggatttcgagcaaaagacatccaagttttagcaccaatgtatcgtggtcctgcaggcattgatattttaaataaaaaactacaagaaattttcaatccaaatgatacagggcgtcgtaaagaagttcaatttggtgacataaagtatcgcgtgcatgacaaagtactgcaattgattaatcaaccagagaaaaatgtgtttaacggtgatattggtgaaattgtgtctattatatacgccaaagaaaataccgaaaaacaagatctgattgtcgctcaatttgaccaaacagaggtttcttactatcggcaagaatctaatcaattgacccatgcttattg

SEQ ID NO: 1504 - DNA, 1041 bp, Listeria monocytogenes-4B
aggtatcaaagtagatacgccacttcaagcctatttccgcattaactcggaaaacatgggtcaatttgagcggacactaattattgtggacgaaaatgccagcgtaaactacgtggaaggctgtactgctaccgtttatactacgaatccccttcactttgctgtcgtggagatcactgtaaaaccaggcgcttactgtcgttacacaaccatccaaaactgggcaaataacgtttacaacctagtaacgaaaaggtactttctgtgaagaaaatgcgacaatggaatggattgatggcaacattggttcgaaattaacaatgaaatacccagctgtacatttacgaggcgaaggagcacgtggaacgaccctttctatcgcgattgctggtaaaggccaacgtcaagacgctggagcaaaaatgatgcactatgcgccgaatacgtcctctacgattgtgtcgaagtcgatctcgaaacaaggcggaaacgtaacgtatcgcggaattgttcattttgctcgtaatgcagacggtgcacgttcgaatatcgaatgtgatacgctgattatggataacctgtccacatcggacacaatcccgtacaacgaaatcctaaacagcaacatctcattagaacacgaagccaaagtttccaaagtatccgaggaacaacttttctatctaatgagccgtggtttaagcgaagaagaagcgacagaaatgatcgttatgggcttcattgaaccatttacgaaagaattgccaatggaatatgccgttgagatgaaccgtttgattaagtttgaaatggaaggctcgattggttaaataaagcaaaagacgaactttttagttcgtctttttttgatgaaatccaaaaatagcagggaataaatctggcttgtatttttataaatgaagtgatatattggttccaaccatttagcaaaggactgataattatgacagaaattaaatatttagaggtactgataagatccattcttccaccgtgctagtgataaataaacatgtaata

SEQ ID NO: 1505 - DNA, 1190 bp, Listeria monocytogenes-4B
gaagtgaaacgaaaagtcgcctatatccagaaagcttttacgacaaataaacaacttaaaattacgtatatcgctatgagtggcgcggaaacaacgcgggagatttcgccgcaaaaattaaacttgatggatggaagttggtatttagaagcctattgccacaaaagagcagcgattcgtcattttaaattaacgcgaataacttctttgaaagaaataggtaaatcgattatgtacgttgaagaaacggagcaccagcctgcagaaatgaagaaaattgtgttggaatttccgaaaaatcagctcgggaaattgttggattattttttgcaagaagaaatggagactggagacgattatgtccgtgtaagctttttctatgatttggagcgcaatataataccgtttttattgatgtttggaagtgccgtgaaaattttagaacctgcatcgcttcaaaaagactacaaatccgaagtggaaaaactttattttaatttgaattgttgacagatagttgtcaggttttgttcgctataatggttttaaaaggaggcggcaaataatgattttacaagaaaatatagagatttttgggaaaaagatacgtgtaaacaatgataattttagtccgattgcagagctttggggtgatgtaatggtagataagcctgcaggagatatttttgcggtatatagtaattatgcaagtgattacaaaggtgactatgatttgttggtaggaacaaaagactgggatgaagagaagagtgtcttaattaaagctggagattatttagttttttctgtagataatgcgagtcataaaggcgtggaagaaacttggcagaagatttgggcgcgagatagtgaattaaaacgagcgtacaaaacagattttgaatggtatcatacgagtggcgagatagatatatatatttcaatatgaaaaatcccctcgcaaggaggagattgggtgattatttaagtttttctgctgctttagagggaacttctttttctgggacttcttcataggaagttacgcctttgtcttctttaatatacaattttaaataagcacctttgcgtaaatttttgtctgcagaaaaagtaacttctgtttctttcccggcttcatcatatgctggcattgtataggaatagttgaagcttacgtttttgccttt

SEQ ID NO: 1506 - DNA, 1127 bp, Listeria monocytogenes-4B
  misc-feature (1)..(end): n can be any nucleotide a,g,c or t/u
gtgctggaaagatgatttttgtttttggtcgtgattaactgtgaccgatgccaaaataggaatagcggatatgcctaaaatgggcgattattacataacaacattggttgaaaatggcacaatgccaactacaattccactcgctggtttcgatgaatggattatcggctaccgagatcgctccgtcgttttaccggaaatatggcacgatgaaattatgacgaaaaatgggattttcagaccggcgattatcacggagggcaaagtagtcgggaaatgggaaaaaccaaagaaacgtgctgaattagacggagatttctgggaccgttacatccagtttcgaaatatgctatagtcaagtagatggataaattttaatttgaggtgataaagctatgaatgcttttgataaattttacaaaaaaacagtagaagaacgacgcgcaattttggcggaatatgccgacttaaatgaagaagagcaggcatttttagcttctacaggggcgctttcttttgataaagcgaatcatatgattgaaaacacgattggcatttactcgctgccgctcggattaggaatgaacatgcttttaaatgataaacattatgtggtaccgatggcgatggaagagccttctgttgtggcggcccaaagcgctggggcgaaacttattggacaaaatggcgggataactggaagtgcaacaaaacgaaaaatgattggtcagattgagttgatttctgtttctgatatccaagcagcaaaagaaaacatcattgcgaacgaagaacaactaattgctatcgctaaccaagctcatccatcgttacaaaagcgtggcggtggtgcggttgaaattcaagtcagaacagcacaaacagcgaatgacgaaacgttacttatcgttcatttactcgtagacacccaagaagcaatgggcgcgaatatggtcaatacgatggtcgaaaccttagcgccagaattagaaatgttgacgaacggaacagccaatatgcgcattttatctaatttagtagatgaaagcgaccgcacggcgtgttgccgatttatcaaagctactcagactgcgcgtctatgacactngacagctggatatgctgtg

SEQ ID NO: 1507 - DNA, 854 bp, Listeria monocytogenes-4B
  misc-feature (1)..(end): n can be any nucleotide a,g,c or t/u
gttttcttttaacgcggaatctgtatctttgaagacaatccctaaatcttctaggtcttgcttcatattgtgataaactacttcggattcatactgtgcagatgccccagccaaatatttttgttcggcttcaggaatacctaatttatcaaaagtacgtttaatttcttcaggaacttcatcccaagagcgcactgtttgttcagacggtttcacgtagtaagtgatgtcttcaaacttaagttctgacaggtcgccaccccaagtcggcattggcattttataaaattgctccaaagacttcaaacggaattcaagcatccattctggttcttctttaatattcgaaatttctcttactactttttctgttaatccgcgttctgtacggaacacagaggtatctttgtcatggaatccatattggtattcgccaatttctggaatttcagtcatgtcgtatcctccttttcgctacttattttgttccttctttttcaaaaatcgctctctccattgctttccaagaaagggttgcacatttgattcttgctgggaatttcgcaactccggcaagtgcctcaacgtcgccgtattcatcaatcgtttcatggtcatgaccttgcaccatttctgaaaattcacgtgacatttttagtgcctctttctcggttttcccaataatgctttgcgtcatcatcgaagcagaggccatcgaaatcgaacagccgctaccagtgaattttgccgccacgattttatcaccaaccatttttaaatgaagatgactttccagcacatgtcggccgcccagcagctccagttaccctcagtctnctnaaaaaggtcagcct

SEQ ID NO: 1508 - DNA, 853 bp, Listeria monocytogenes-4B
actgactctgaacgtaatgtgtatgagttgccacaagaacgttggttaactatcgcactttatttaatgcaaaatgaaccaaaagaaaaacggatgaaactagtagaagaagcttactgggctttaagtaatttatatatgactgttgcaacaccgacacttgcaaatgctggaaaagttggcggtcaattgtctagttgtttcattgatactgtagatgatagcttgcaaggtatttatgacagtaatacagacgtcgctagagtttctaagcacggtggtggtgttggcgcatatcttgggtatgttcgttcaacaggagctgctatccgcggcgtcaaaggcgcaagtggtggcgttattccttggattaaacaattaaacaatactgcggttagcgtagatcaattaggtcaacgtaaaggcgcgattgcagtttatttagatgttttccataaagatatcgaatctttccttgatttgcgattaaacaatggtgaccaacgtttacgcgcacatgatgtattcactgcagtttgtatccctgatattttcatggaagctgtagaacgtcgtggcgagtggtatttgtttgatccacatgaagtaaaagcgaaaaaaggctggtacctacaagatttctacgatgaatcaaaaggtgaaggtactttccgtgaaaaatatgaagaactagtagcagatgaaacaattagcaaaaaaattgttaaagctattgatatcatgaaacgtattatgatgagtcaattagaaacagggaatccattcatgttttaccgtgatgaagtgaacagaatgaacccctataaacatgaaggcatggtgtattctaaaa

SEQ ID NO: 1509 - DNA, 1664 bp, Listeria monocytogenes-4B
gctatccgattcaattagcgtacctattatggaaaagtgccaaccgtactggtcattttaccgaagaatttagaaaagcattgcatcaaatcatcgaagtttttaaaatcgaacaaaaacatacagagcaaagtccgtatcgttttgaacgagaaaatgtgcgtcaatcagataccttaaataataacggaaaaggaacggatgtaagctatactggtatgtcttggagtggctttagaccaagtgatgacgcatgtatgtatggctaccttgtaccgagtaatatgtttttagttgtagtgatggattacgtccaagaaatcgcagcggcgttttacccggatgataaagaattgctgaaagatagcgcagatttacgaaaagaagttgctgcagggattgaaacctatgcgaaacaagcgcatccgtattacggtgatgtttacgcgtatgaagttgatggaacagggcgtaaattatttatggatgatgctaatgtgccaagcttgctcgctgcaccataccttggtttttgcgaaaaaactgatcctgcataccaagcgactagaaaactaattttaagccgagaaaatccttattttgtcgaaggtagtgtacttacaggaattggtagtccacatacacctgatcattatgtctggccgattgcactcagcatcgaaggattaacggcagaaacagaagcggaaaaacaagccgttttagagatgctgattgccggagatggcggaacggattatatgcacgaaggtgtcaacgcctcgaatccggctgaattcacgcgcgactggtttgcttggtcgaatgcgatgtttagtgaatttgttttaagcatgtgcggtgtgtacgtaaaaggcagcccattaagtaaattaaaaaagaaaagtctgggcgaaaactcaggctttctcttactatcaaaggagagaaaaagaatgaaacttattgataaattttcagttattagcgactggattatccggctcgtctggacaaatttagtatggcttttcctcgtattgatcggcgggattgtgcttggctttatgccggaaacggttgctttatttacgataacgagaaaatgggcgcgggtctatttacatgtaccagttcggaaatgtggttggcgaacttatcaacaggcgatctgctccgttaatctacagcccgcccctcctccgctcatccccatcccgatcccccgccccctccccccccccccccccccgcccacccccaccgcgccgcacacccgccccccccaccccccccccccccaccgccccccaccccgccccgccacaccgcaccacacgcccgccgcggccggagcccacaccagggacaacgcgcgcaccggaccttctttgacccgactacgacaatacacgccttacggcccaccaccccatctcgaagccgtccgcgtacgcgaacacggaactccacccccccacctccccctcgctctcgcccaccggctccccctctcctaccccgcgcagagagctccccccaccgcctcaacccccagcacgcaacccccccgcacgccccctcactcgccgcccatcctacccccatctagtagcagctagcgcgcccaccccgcgagcagcagacagcaatcaaacaaacag

SEQ ID NO: 1510 - DNA, 1071 bp, Listeria monocytogenes-4B
agaatttagtaaatcacttgatatgccaaacttttagacgacccaacgcttgcgatgtacagtttaacaaaacaaattgaacaggtacaaagtgatacaacattaagcggcgatgaaaaagtggaaaaactaaaaactttggaagaaagcttgaaagaatacgatgaaaaagtaaatgaatcaactacaactgaagatgaaacaacaaatacagaagcaaaataagggagaatggaccatgaatagagaggctttattaattgttagtaacgggcagcaatgtcataaaaaccacttgtctcctgaaaaagtcgtgacaattgggaatacaatcgaacacgaaatcacttatcctgaactggctgagtcgattgaagttaaatacgatgaaggctcttggaatgctggaacaacagcgctccaagcgaatcaagctgtaaatgtagagaacttagcattctatctatgccaagatttacatacacaagtttatgatgttgtaacgaatatttctgtgacatttggcgttggaatagaaaatgatgtcacattagatgatacaaaatcagattttatacttttacgtgatgcaaaggaaaaactgtttaagttacaagtattaaatggcgaagtttatcataacttttctctagtaacggaagactgcgttctagaaccgggtgatcagctctatacggacggtgtgacgattacaatcggaaaagaagatattagtgtgctagctgtgaaaaatcgcgtgacgagcaaattagcgcctttatttgctgcggataattcttttggcgaagactatccagattaccaccgttcaccgcggattatttaccgtgcgcctgaagaaaaaatcagcatggcgaaaccgtcaagcaaaccttcaaaacctacagatggtttaattaaaattattttaccaccacttatcatggtagcaattacggtcatgatttcgattttccaaccacgtggactttatattattatgacaatcgcgatgtcggcagtgacaatcacaatgggcgatcttaactacattaaatcacgtaaaaaata

SEQ ID NO: 1511 - DNA, 1132 bp, Listeria monocytogenes-4B
tagcagcatgactcgacggccgaccgtgtgctggaaagaagggcggagaattatgcttttgcgagctgcgctaggtatggcgatagcgatgattctgatgggactcgaagcaatgtataccaatttgttggtttgcgcttattaatggggattttttcaggatatatttcaacagcaaatgcccttattgctacacaagttcctcgtcatcgttctgttgggctctttgggcattatccacggcggcggtttcgggtttttttattggcccgttaattggcggagcgctgtctgatacatttggcgtcagaccagtgttttacatcacaggagtacttcttttaggtagctttttcctcacactgttctttgtgaaagagaaatttacaccagtagaaaaaaaggaaatgcggtcggggaaagaagttttcttgtcgcttaaaaacccgggcttgattatttccttatttattacgacaatgatgattcaaattgcgtccaactcagtgaacccgattttgacattatacgtgcgtgatttggcaggaaatgcgcaaaacatcgcttttattagtgggatgattgcatctgttccaggggttgcggcacttattgcggcaccgagacttgggagatggggagaccgaattggttcggagcgaatattgttaggtgcgctcataggttcaatgttactccaaattccaatggctttcgcacaaaacccactacaacttgggattttacgtttcttattagggcttacagacggcgccttgcttccagcggttcaatcattgcttacaaaaaatacaccgcgcgaggtttcaggtcggatttttggttataatcaatcgtttcaatacattgggaatgttatcggaccgcttgttgggtcaagtgttgccgcccattttggttacggagatgtcttcctcgtagttgcaggctttatttttatcaatgtactaatcagtttttatttcaaccgaaaaatgcatggagagaagggaaatcatgccaactgaactaataaaattaccaggaataggtaaaaaaatggtgttaatgttaaatgaaattggggttgaagaggttgctgatttaaaagggaagaatccgcttgagttat

SEQ ID NO: 1512 - DNA, 1003 bp, Listeria monocytogenes-4B
cgtataggcactctagcatgcatgttcgagcggccgacagtgtgctggaaaggatttgactaaagctgcacctattttcttgatctttatttctattttgggaccgattttggaagaacttgtctttcgaaaagtgatttttggtgggctaagtaacgtgacgaatattcatgtggccgcagttattagttcgcttttctttggattacttcacggagatatttctttcttacttacttattttgtcatcggactaattctttgtttcctttatacgaaaacaaaacggattgttgtttcgatgggtgcccatattttaatgaatacgattgttttgcttttgagtcttggaattattgggggataatatgaaaaattcattaataaagcaaagttttttatattttgcacttggtcttgtatttgtatattttgttgttgttcgtgtggctgattatggttatgatgtgcttgcatgtatactaattatcatgacattaatggattttggtattggcatcggtctgattatcactggacttaaaagacgtaaaaaaaacctgtagaaagtaagtgttgcttaccttctacaggtttttttattctgttttcgctggataattttccaggaaatagattaacgtttgtaattccgttgtaagatcgatatggtgcacacgaacttgtttcggaacactgatacgagctggtgtaaagtttagaataccttttacatctgcttcaattaaacgatcaaccgttacttgcgcttcgtcagctggaactgtcagaataactacttccacaccgttttcacgaacaatttcttccatatcaatcaaatgatagattggaatatcttgttgaacactacctactttcgctggatccacatcaaatgcagcaacgattttgatattattatttttcatgaaattataatgtaataatgctgtacctaggttacctacaccgattagtgcaacatttgtctgtttgtcct

SEQ ID NO: 1513 - DNA, 688 bp, Listeria monocytogenes-4B
cgacatgtgctggaaagaagctggttctaaaattactgatgacctttctggtggattactacaagacattacaaaaggtgcttcgatactcgggatgttcgtcctcgccgccttggtgcagagatgggtaaatatccagtttgcgccaattatctcgaaagttaaacttgatgaaggtgcgtatattgattggagtcatcttccacaaggcgctcaaggtatcaaaactgctttagaacaacaacaagcaggtttagctctttctgaaattaaagtaacaaccttgcaaaataacttggataacttaatcccaggacttgcagcagtagctcttacattcctatgtatgtggttacttaagaaaaaaatcagcccaattatcatcattctaggtctattcgtagttggtatagttggtcacttaatcgggcttctgtaaaaataagctgatcgaaaagaggctggtgcaatattcaccgagcctcttttcgtttagatatatgacacagataaacgaattacggtataataaacaaaacaagcgaaaagaaatggagcgaatacagttggttcaatcgattaatacaaaggtagacttaacaatagatgccaccgcgtatactggacttacagattacgggaaaattatgattggcgacaaaggttttgaattctttaactcacgtga

SEQ ID NO: 1514 - DNA, 920 bp, Listeria monocytogenes-4B
taaaaggcgaaccgtttgatatcgttgctgaaacagtcaaacaaacagcgtttaaaatcactaggatgggtcaactcgttggccaagtcgcttccgaaaaactcggcgttccttttgggattgtcgatttatcacttgcaccaactccagcgattggtgattcggtcgcacacattttggaagagatgggactagaaatggttggaacacatggcacgacagccgcactcgcacttttaaatgacgcagtgaaaaaaggcggcgtaatggcttgtggacatgtcggtggtttatcaggcgcattcattcctgtttctgaggatgcgggtatgattgaagctgtgcagcaaggggcgctcaacctcgaaaaattagaagcaatgacagcaatttgttcggttggtctggatatgattgccgtaccaggtgacacaactgccgaaacattagcagcaatgattgcggatgaagcggctattggcgtcattaacaataaaacaactgctgtccgagtgattccagcaagtggcaccaaagttggcgacatggtcgaattcggcggcttacttggcacggcaccagtaatgccagtaaacggaaaatcgtctgtggacttcattgctcgcggcggtcgaatcccagcaccaattcattcttttaaaaactaacaaaaaaggtttcctccaaatttgcgaggaaaccttttattatgtcgtttttcgttcaactaaatgaaaatctaaatcaagcagtggcaaattgctaccaaataattgattcataatgagcgtaaaagcattttcagctgcaatttaccggggtgtggatcttggggttatatccaaatgcgcgctattttctatttcgaaccacaatcgcaaatcttccggacactgtaccagccgtttgcttctgcaaaa

SEQ ID NO: 1515 - DNA, 1334 bp, Listeria monocytogenes-4B
  misc-feature (1)..(end): n can be any nucleotide a,g,c or t/u
gcctaaggcacttgcagctgctcggcggccgacgtgtgctggaaagaactcccgaagaactcatcctttattccaattcaaaaaacgaacatttcaaccaattttataataaatatccaactgctaagctagctgataacgaagccgaaattttcacaaaagcagatcatagcttcgtttgtaagttacctctcgcagttttaccacttatgaaagattgtgctgcggtattgacacctgatcgtcatgtgatttctattgcagctggtgtgagtacttcagatattattgaaatcactccgggtttacaggtaagtaaattaatcccttctctcacaactgctgttaatgttggaactactttgattgcgcacgctgacacagtgaatcaagctaacacttcttggttagaaacgacatttgagcattttggacatgtaatgactatccgagaggaaaatatggatatcgctagcgatttaactagctcttctcctggaataattgctgctattttcgagcaatttgtagaagctgctcttagaagatcttcattatcagatgcggaagtatttcaaatgattaattttgctttagctgggacttctaaattattagtagaagaagattacacgtttagtggcttaattgaacgcgttgctacaaagggcgggatcactgctgaaggcattgaactcagtgaggagcagttaccccaattttttgacgaactccttgaccgaactcaaacaaaatatgcttctagtaaaaaagaaattcaagcacaaaagcaagatttacttttataaaaaagggttgcgactacaaatcgcaacctttttttattcatgctctggattaatttccacatttactcttcttggtttacttccttcgtgaggtccaactacacctctttgttccatttcatcaatcaacctagctgcacgattatagccaatacggaattttctttgtaacatcgaaacggaagctgtctgcatttctacaacaagctccactgcttcgtgatacaattcatccgttacttctccttcgacttctggaatatcatcaggaatcatttcttcgctatattgtgctttttgttgcgaaataacgtaattaactacatcttctacttctgcatccgataaaaaagcgccttgaattcgggtaggtttactagagccaactggaagtaacagcatatcgcctcgtccaagtaacttctctgctccgcccatatcaagaatcgttcttgaatcaatggaacttgaaacggcaaaagcaattcgagacgggatattcgctntaattacgccggttataac

SEQ ID NO: 1516 - DNA, 1352 bp, Listeria monocytogenes-4B
  misc-feature (1)..(end): n can be any nucleotide a,g,c or t/u
cgacagtgtcgctggaaagtttcgtcaggacttgcgattcagcgacttcgtttggcgctggatgatgtgtgagcgcgtcctctacttcgaacggtccaatcgtgtaaccagagctaataataatatcgtcattccggccttggaaccagtaataattatcttcatcgcggatagcgcggtcaccagaaacgaaataatcaccgggggttgctttttgcaaacgttctggttctttatagtactctttgaaaagtgctgggaaatctctacgcatcgcgatatcaccaatttcaccgacaccaactggatttccttcagcgtcaataattgccatgtattctggcataatcggtttacccatcgaaccagggcgaatcggcgtatcaaccagtgtcccaatcaacagtgtactctccgtttgaccgtagccgtcgcgaactttaatatcaaaattttcttggaaaacttgaattacttcgcggtttagaggttctcctgctgatacggcgctacgaagggaacttaaatcatgttcgcgcaaattatttactttagccattaagcgatattctgttggcgtacagcacagcacgttgattttttcttcttccagtaaatgaagttgtttttcaggaatgaaacgaccgttgtaaatgaagccagtggcaccttttccgagtacagaaaggaaaggagaccaaacccatttttgccaaccaggaccagctgtggcccaaacgatatcgtcttcgtgaatatcgagccaatggtcagcagcgatacgaatatgcgcgtaaccccagccgtgaatatgtacaacgcctttaggattacctgttgttccactcgtgaatgcaagcagacaagcatcatcgcgcgaagtttccacgcgttcaaattcggttgaagcggcttccattaatgtttcgtagtgatcccagccggataatttctccccaacaataatttttttcgaaacagaagggatgctttcaattttatcaaattcagcagtcattccattgtaagaaacgattgcttttacgtttgcatggtggatgcggtattctaaatcgtgcgctttgcgtcgctcggatgccgggatgactttcggccccgctttccctgcgcccctgtgagtttgcgctcctttccggctcctctaccgcggactgccccctccccggccgccgtcttttcctgccctgccctttgcctcgttgttcgtttcctttttcctcctccttccgtcctntgcctcctccccccccgcccccgcgcttggtccttccctctctcgcttgcccctgtccgtccgcgctcttcctcccgctcacaaaaaaaaaaaaaaa

SEQ ID NO: 1517 - DNA, 1247 bp, Listeria monocytogenes-4B
actcttgggccacctagatgcatgctcttacggccgaactgtgctggaaagagttgtagaaattcactatgttgacgaaaataataaacaactgagctccgccactaaaatttctggaacagtaggagataattacacaactgagccaaaaaatatcgacggctatacgctaacaactacaccagataacgcaaccggaacattcaacacaagtagccaaacagtgacatatgtgtatactaaaaatatcgtagcagcagagcctgtaacagtgaattacgtggatgctaatggcaaaacgctcgctccatccgaaaccctaaacggaactattggcgacacatataaagcaaccaccaaacaaatcgacggctacacattatccgccgaaccaaccaatgcgactggacaattcacaaatagcgcacaaactgtcaactacatttacacgaaaaacacaaacatcgaccaacctttaccagataaaaaaacaacgaaaccgtctaatttaaagacaaccgaagtgaaaaaagcttcagataccctaccaaaaacaggcgattccgcaccatggaaatcagctctacttggggtattcctatcatccacagctctagttatctggaaaaagaaaaaatagtaaaaaagccggtcaggattaatttcccgaccggctttttgatttcaatcttcttccacttggatagaaacacccacatccagtaattcctcaactgcatcaatcacagaaaactccccataattgtatactgcatcatctacaactaaaatcggcaaagcttccattccatttttatcaatcagcatttgaacccgctctggcaagtccactttcccgacctctcccagcttaatatcaaacacaatacctgtataatcaaaatgaatttttcgctcagcttcacttttattcataaacactttccatatctcaaggttgatctcagactcattttcctcagaataaaagtaactaatttgcttcatattaaaattatttactttctaaatcatggacaaacagcccacttaataatttcggttcaaaccaagtaaaatttggcggcatgatttctgcggcatctgctacactaagtaaatcgtccattgtcggcgggtacatcgcaaatgccactgaatgactgccattatcaactaaacgcgctagctcgctcagtccacgtattccgccgacaaaatcaatgcggttatcacggcgaatatct

SEQ ID NO: 1518 - DNA, 838 bp, Listeria monocytogenes-4B
atttgcccgctttcttccccaatttcggcaaaagtattggaatcggcaaaaaatcttaaaatcgtggcgaatattggtgccggttttgacaatatcgatgtaaaaaaagcgcaagaattgggcattgcagtgaccaatacgccagatgtgtcaacggaagcaacggcggaactaacgcttggattgattttggacgtagcacggagaatttcagaaggcgaccgattatgccgcgaaacacccgagcaattcaaaggctgggcaccaacgttctttttaggtactgaattaagtggcaaaacgctcggaattattggattaggaagaatcggacaagctgttgcaaaacgtgcggctgcttttggaatgaaaattatttattctgggcaccatccgaaagaagcagcgaaagagtggaatgcagagtttgtgagccaggaagaattattgaagcgcagcgatgttgtaacaatccatgcggcatacagtcccagcttgaagtatctgttgaacgaaacaacactgaaaacgatgaaatcaagtgcctttttgatcaatgctgctcgcggtcctgttgtagaggaagctgcactgattaaggcattagaagcaggcgttatcgccggcgctgcgctggatgtgtttgagttccagactaacattggcgaggatttggctaaactggataatgccgccttaacaccgcctatcggcaaccccgctgtggcaacactcccacccctggcccccatcaccattgcccatgctcccccctgccccacctcgaacagccccgctcctccccgcccttcgcgcccccgcatctcccaccaacaaa

SEQ ID NO: 1519 - DNA, 1253 bp, Listeria monocytogenes-4B
  misc-feature (1)..(end): n can be any nucleotide a,g,c or t/u
ggacttagtcacttagagctgctcgagcgccgacatgtgctggaaagaaagcgtacaaataattaaaaagccaagcaacgtgtacccaatcgtatagggatcaagcgtgtgcccaactaaaatagtcgtaatcgcaacaatactttcaccaaatgtgatgataacaaataatccaaaacgttccgcaagatgtggaaaatcaaccggcactttgcgcaatgttttagctaaaaataacggtaaaataatatcaactgcaatcccaagatacatcactaaataacgcgcaaatccttcaaaaaacaccgaagtcgcagttgtcaaaacacctagtagaaaaacactcccaagaagtatcgccactttccgcgcatttcccgtcaactgcttactaataacaaaatactggataaccgtaattaagcgaatacctaaataaccaattaaaaaagtataatacgtatttgaaaacgttaaatcaaaactcgctgtcatcaaaattaagaaaaacatttgcggcaacatataaagttcgggtagtttgattttctcaccgaagcgattgaaaaacattgtctgcccaacccacgcccaaaacatcggcgtgaccatcaataaatattcgccaaaataaacagctgttttatccggatgattatcgacgctaagtaacagatgcgtcgttgaagcaacagcagttacgaatattaaatcaaaaaatagttctagccaagaaacttttctttccgccacaatctcaccccattattatttcttttttcaagtataccacgtgaatccgcttgccttttgacagttgctcgccgtgaaaagtataatggaaggacaaaatcatggaactactgagatgggagaattaaaaatggtaaaaacatgggaagaatttttaaaacaagaagcgaaacagccttattttatagaattaatggaagcagttaaggacgcgagagcaaaggggaatgtctatccgactgaagaagatatgttttcgtgtttccgcttatgtccgtatgatcaagtgaaagttgttattttaggacaagacccgtatcatggtcctggacaagcgcatggcctaagcttctccgtgcaaaaaggggtgcgaatcccgccaagtcttcgtaatatttataaagaattaaagacagacttagatattgaaccagctgaccacggctatcttgccaaatgggcagagncaggcgtacttttaatgaacacgagttggagcg

SEQ ID NO: 1520 - DNA, 1257 bp, Listeria monocytogenes-4B
  misc-feature (1)..(end): n can be any nucleotide a,g,c or t/u
tgtatagccgttttctagtgtgatttgacagttgagttctgttagttgattatccgtcgcctggcaatctatcgttgcgcctttgaaatttattttaaattgatgtgaaagtgaggatgtttccttaatttctatgaaagctaaatttagtttagtggaggctaaataataattttgaatcattttttcatattgtatttgtgtcttaaagatagaagcagtaccagtaacgattaaaattgaaataagcgcaatgaaaatggtaaatgggagcgtaaatgcattagtcttcatggattggataccacttctggtaatgcgaatacagatgtatatatctgagtattagagtcttgcaccgttaaatgaagttgtttttctttcttgattaattgataatctttcacattagtaagcaatggttcatgtccttttccatttacttgtcgacgaactaaatcgttataaatagaaataggtgataagatctttgccattacaaacagcnagcttgagcctatcaatctgaatattagtcgctttttctaattctagacgagtttgaatgagaaaaagttgccattctgttgtctgatcaatgttactaatctggatagtcttgttatagcattgaaaaaataatggaatgagcgagctaatacttaaaatgatcgtaatagacaagattgtttcaagaagagtgaaagcaggtgagccatttctaaaagatacatttttcttccgatttattttttgcacaaatttggatacctccttgataatggaaactttcgatacgttcatccttaaagttaactggaacgcttttgtgccgtaatagttcgctatgttcgtaaatttcttgatagactctgctagtttctttttgatagtctagtttttcaaaaatagtcattgctgtgggtaatagaaaactacaaaccattgaaaaaaggagaagtgaaaccatgctttcaactaaagagaatccgttaattttattcaattctaaaacgcccctttccgatttgaaatattagcttgtagttatttgtcgaacttgtcaggtgaattgccgaaaaacgattaatggatccatctgtactcgagaaacgaaaatttgctatttttggttgtgttaagttgaccagtgcgagaatggcacgatccccagcgtgctcgagccttcgtttgcgatgacccgcggttcttcgatcgcctgatataacggactgagctataagaaaagaaataaaa

SEQ ID NO: 1521 - DNA, 1109 bp, Listeria monocytogenes-4B
tgaataccttgttcgacaattttatgagaagaaatctttttaatatttgctacgaagccaattccacaagcatcgtgctcattttctgggttgtataggccgtgtttttttggtaaattagtttgtttcatcctagttcctcctcttcaaaaaccgaatccttctaagtctttctggtaattatttaaattaactgataattaaccagcgattcagcttaccttacatttcttgtagtatctattttattccttttcatttatcgaaacaatatatataatagaataaaacaatctcatttcgagaacaattggaggtaagaaatggaactacgacaattaaagtattttatggaagtagcccgtgtcgagcatatgaccaaagctagtgagaatttacacgtagcccaatctgccgttagtagacagataacgaaactcgaagaagaactcggcgtacatttatttgaccgtgttggaagaaatatgcaactcaccagcgttggtcaagatttcttaaaacaagcagcaatcgccttaaacgagctacaaaaagccgaagcactcgtgaccgaatataccgatcccgcaaaaggaactgttcgcgtcggcttaccgaactccctgtctaccaaagtgttgccatccgttatttcgacctttcgggaaaaatatccgcaaattacctaccagtttatggaaggcaccaatgaagaacttaccgagatgctcttaagcggcgtccttgatatgacttttttatcgcccgtcccagaatctagcgaacaaattgaagccattcgtttttttgatgaaaaattgaagctaattgtccctaaaacccatccacttgctgaaaacttcaccgtttcactaaaagagctcgcttccgaaaagttcgtactttatccagaagactttgatttatataaaatcgtaacaaaagctgccaataaaaaaggatttgagccacaaatagcatttcaaagtagagatttttatacaattcaaggacttgtcgtagcaggtcttggtaatagcattttgccagaaatgatctttccgagcacagttgcggctgctcaggcatgcgtctagttgcccccaagt

SEQ ID NO: 1522 - DNA, 1184 bp, Listeria monocytogenes-4B
ctgtaggcactctacagcatgctcgagcgccgacgtgtgctggaaagtggccaacctgtcgtagctaagttttctggaatcgtttccgctttttccatggcctctttgatccaatgaaattaattggattttctcatctttatcaaatgtttcataagcaaattttaaattatcacctaatccatgaagaaataaaaatggtatgccttcaccttggatttcatttttaaagtaagttccctcgtgtttaaataatggcatattttataatccactcctctgaaagtatttatccagtcgatttaatatatttcaccatcaatccatgtagttagaacttcaaaatttttatcaagtaaaactaaatcagcgacatagcctttttcgattcgaccaaaattgttcattcctaaaatgtctgccggcgtacttgctgccatttgaatagcgtcttgtaagtgaatcccaaattcattacttaactttaaggatttattcatcgtcacggtacttgaagctaatgtcccgtcttttaagcgagctatgccttccttaaccgttacttggtgaccgccaaaaatatactccccgtcgccaactcccattgcttgaagggcatcggttgtgagaaccattttatctggtcctttaattttgtgaataaggcgcacgattccgggatggagatggacaccgtctacaatggcttgaacgcttaccgaattattttccaaggctgctgtaacaagtcctggtgcccggtgatgaatggctggcatagcattgaagcaatgtgtgatgtgggttgctccttgttcgaaagcattttgcgcctcttcataagttgcattggaatgtgcaatggcgaccacaactcctctttttttcaagaagtcaatgagttcgatacccccaggcaattctggagcaattgtgaccatttttatcagaccatctgcttcatcgaagatctttttcatttcttttaaatcggggtgtcttaaataggctggattttgcattccttttttttctatattaaggtaggggccttctaaatgaattcctgcaattttggcacctctctcttttccaatgacttttttagtttgcttaatcatttggatcaagtcttcaaaagaagaactaaccgaggtgactaagaaactagtacatccggttta

SEQ ID NO: 1523 - DNA, 938 bp, Listeria monocytogenes-4B
gtgcggaaataacagtcaacctagtcgtatgctgcgagcggccgacagtgtgctggaaagaagaaaatttcaagctaaatctaagcaaaaaagttaacttcttttcgcttggttttttttataattaagttgtagtgaaaatacggaagttctggccagcggaagtattaaaaatggaggtttggacaatgaaagagaagttatttcaaaaactagacgaaaaacgagatcgcatgatagaaattcgtcgttacttacatgaacaccctgaactttcttttcaagaggaaaatacggcgaagtatattgcggatttttataaagaaatggactgcgatgtgcggacgcatgttggtgggaatggcgttgtagtaacgattgatacaggcaagccgggcaagacacttgcaattcgtgctgattttgatgcacttcctatccaagaagaaacaggtctagcttttgcatctaaaaaccctggtgtaatgcacgcttgtggtcacgatggacatacagcttacatgcttattttgggcgaaacacttattgaaatgaaacaagaattaaccgggaaaatagttattttacatcagcatgcggaagaaactcctcctggtggcgcgattcaaatgattcaagacggggcgctggatggtgttgataatgtccttgggattcatgtgatgtctacgatgaaaacgggtgaagttttctaccgtgagggtgcaattcaaactggtcgctcttatttcaaacttaaagtacaaggtcaaggtggacatggctcatctccgcatttagcgaatgatgctattgttgcagcaagtgaatttgtagtagctgttcaaacggcgattagtcgtcgtttaaatccatctgatgttggttcgattacaattggttcttttgatggaaaaggtagctttatgtcatcaaga

SEQ ID NO: 1524 - DNA, 813 bp, Listeria monocytogenes-4B
aagccctctacacgcatgctcgatgggcaacatgtgctggaaagattaggtggcatgaaccagaccctattgcagctgctaaatttcctggttcagcttctggttcaagatggactgctcaaattaagataggaagtaaacaagtaacaataaataaaggatggacaaaaaagcaaaactcaaatgaagtgcatattccaataaaaggaaggtaataatatgaaaaaaattatgaaaaaagatgattattctaaaatgccatgggtatcagcggaggatttatatcttttatttgaacaagcactcaaggactttaagcaaagcaaattaagtaaaaaagagttttttgatattcttgatgaattgactatgaggcaagtagatacctatgaaattttaaaagaacctttgagaggacagctcgacaatgagttatataatttatggaacacagaaaattatgatgatgtagatattattacatcattgttaattaatttaggcttgaaaaatacttataataaaatgaaaaaatctattgaggatacttcggaaatatcaccagaaatacttgaggaaatacaagatgcaattgaagaagtcggagataatatagatgatccatatcaagattatatgaagaaaatgtggaatgcgattacagtgggcaagaatggtttcattgttggtgctaatcctgtgtgcatcaattaaggagcgtgttgtgatgaaagaattgagactgtgtctagatatcaatgtcctgctgtttgggtctctaactatgcggggatctcaaagaaaatgaataac

SEQ ID NO: 1525 - DNA, 1402 bp, Listeria monocytogenes-4B
agattccatctggtttgttttattatggggattactaggacaaagtaaacagatatagctgatcaacttaaagggagtttatacatagaaattatattttgtttaaaagatgagtgttaaataaaaaggtttacgggaggataaaatatgaatggattaacagcatttttggaaaagtattttgtgccagtagcagcgaaaattggttcacaaaaacatctagttgcattacgtgatgcttttatttcaacaatgccaatcactatggctgggtcaattgcagtacttttaaatgcgttttttagggattttccaactgactggggatggacaggatttgtggaagcgatgcaaccacttatcgggattaatggatatgtatacaatgggacattagcaattgtttcaattatttttgccttttcactagggtataatttatcaaaagcatatgaagtggatcgattagctggggggctagtttctcttgctgcttttgttatgaacttaactgttactgtaagcttagatgcagtaaaagctgcgattgcggcttctaatgcaaatttcgatgtaaatacgttaccaaaagaatttgctggaatttacggattctttagcctaagccaagtaaatggtaccggcttgtttaccgcaatgattttcggttttatatcaactattatttatgcgaaattaatgcgcagaaatattattatcaaaatgccagattctgttccaccggctgtaagtaaagctttcgcggcgattattcctgcgttagttgcactttatgttgttggtattattgactgggcattcttcaaaatcacaaatatggacgttattacttggatttccaaaacaattcaagatctgttattatcactttcgcaagggtacggagctgttttactagttactttcttagtacaactactatggttcttcgggattcatggtccgaacgtacttgctccggttctagaatcactttggggtacagcacaactacaaaacattagtgcggcacaagaaggcgctaaattaccattcgaatgggtacgtggttctttcgatgcgtatgtatggatgggtggatcaggcggtacgcttgtactgattatcgcattactaatgttctcgaaacgagcggatgcacgaacagttgcgaaattgtctcttgcaccaggtatatttaatattaacgaaccaatcatgtttggtttaccgatcgtattaaatacaatttacttaataccattccttatcgcgccaatggtaatggtaacaatcgcttactttgcatcaacacttggcattgtcggcccagttaaaattgcagtagtttgggtatgccgccactttgaattcttttagcaccggggagattgatgcacaa

SEQ ID NO: 1526 - DNA, 885 bp, Listeria monocytogenes-4B
tggtaaaatgttttttctggggcacgagaacccgaataagcagacagccataccagccgcatatcccatgctgatattgaaagaattgtacgagacgtgaagacatacaaaaaagaaactctcgtcgttatcgataatacgcactggggcgtcgaatatcgcgaaacaccaacggattatcaaacccaatttggtcatgcgattttagatgctggtgctgatataattatgggctctcaccctcatcgcctagaaagcgttgaaaaatataaagataaatacatcgtttatagcatgggcgactttgcttttggagctgatcctacgctactttcccgtatgacatcgatgttccaactgcgctttacgaaggaagataataaaatcgttctaaaagatatttctatcgttccaacttatgaaaattcagatggtagtacgacagaaaacaattatcaaccgctccctgtgtttggtgatgatgctaaaaaaatcgtcgatgaacttaaccgtattagtaaacctatcgagggcggcgtaacagaatacacttacttcgatccattttgataataaaaagcgtagatatcttctaacaaagatatctacgctttttttatctagctattaaagtatcgcaaattgcatgagccataatataagaagaaacactaccaagaactagcttttctactcggttcatcccagtcgctccgcaaataattaaatctgcttggaactctgctggaatatctgtggaaagtaagattttcggattacctttagcaacaaaagtttctacttgtttcactcctgccgttctagctttttctgcgtattcattaacgctcgtttttaattctagttcggctcttcttctaagct

SEQ ID NO: 1527 - DNA, 1364 bp, Listeria monocytogenes-4B
aactaaagtcaatctacagcatgctcgaggcgccgacagtgtgctggaaagtaatttttctagttgttttcggacattttctccaaacatttatcgcggattatgcgggtgttcgtgtgctttatatttatatctacacgtttcacatgcctgctttcgtgctaatatccggatttttcgctaaaagttttggtaagcccggttatttaaaaaagacgatgaaaaagctcattttaccttatgtgttttttcagctaatatatagtattttttattattttcttttaagtaaagacaatctttctatccaattccttgatcctgaatggtcactttggtttttactaagtttgtttttctggaatataatgttatttatttttgcaaaaataaagccttggaagtcgatttgcattgctctcttcgttggattggttgctggctattttgatattattggggggtatttgagtttatctcggacacttgtttttttcccgtttttcttagttggctattttttaaagaaagaacatttttattaccttaaaacgcattttgtcatgattctcgggggcattttcattgttttacttctatcatttattacatttcaccctaacttaaatgataaatggtttttaggttctaagccttatgcaaactttgtggaagtaaagtcgttaggtctattcattcgcgcacttgtctacttgattagttttggtctccttgcggctctcctccccctctcccctccttagaggcgatttttcactggctggggttttccccccccctctccccctctccctccctgctcgtccccttccccccgccccgctcccgcccctcccttttctccccccttccccccccccctcttccttcctttcctttcgtcccttccttcgccccccgcggcgcccccgtccccccccccgtccccccccccccccccccccctctcttcccctttctcccttccccccccccgcgcccccctccctccccccccggtgtcccgcttttctcccccctccccccgcctcgcctctcctcctctccccccttctcgtctccctccttccttctgctcctcccctctctcctcctcccctccctccctctctcgtcttccccctccgctctcccccctccctccctccgctggtttccgctcttctttcctccctcgcctctcgtcctccccgtcctgcgcctcctccccttttccctcgctttcgttgcctttgttctcgctttccttctcccgcgcgctccctctctcccgtgtctcgttgttccctcttctcgctgtccccccgcctatctcccccgctcaccacaaccacaaaaaaaat

SEQ ID NO: 1528 - DNA, 986 bp, Listeria monocytogenes-4B
  misc-feature (1)..(end): n can be any nucleotide a,g,c or t/u
gataaattggttgatacgtttctgggatttctcgttcaataaaattttttgtcatgctttcttctacttctgaaagcatttcgcggagttctgtcgttgcatatttcacaggcgttttaatatccccgatgaaaagctctgaataatcgtggtttagcgctttttcgtatagtgcacgccaattcacttcattcccagcttcttcctctacagcaccgaaaaattgagcaatggatgtaactttatatgaatgttctgcaacagagtgctcttgatatttaaattttcctgggcaacgataaatgttttctaaatctgataaactttggaaatattgatgaattcccatattatccctccatccttcgttttattcttcacgtttttgttttttattggccggattagtgttttcgatttcacgcatcatcagcgccgcagcataaccaattaaagcaatcattgcggctgagtaagttctaaaattatcggtagcaaaaataaaaataattgctgaaaataaaagtgtggtcagtattccccagctaaacaactttgttccgcgcgccgttccgactttcatatgcgaataaataccaacataacaaacgaactgaatgataataaattgcacaacagataaaccaataactgctgtgagattactattccaaacaactgctaaaatcgcaataataatcatcacaataatccctataataacaatgaacttctgcattggtgataatttcttcaaaatacttcctccaagcttttatttgttacttactttaccataatctctgtttatttgggataaaaaacacccatcattcctaaaaggttttctgagcgttcttacttaatgatggtgcacgtggcgaattgcttgtgtgagtaattctaatacgtgatctttccagcacacagttgncnctcnncacgtgcagctgattaaactgncaattncgtncaaaaaggggcaa

SEQ ID NO: 1529 - DNA, 775 bp, Listeria monocytogenes-4B
taaagaaaattacacgaatgaatggggcgcatatggaacttatcgctttttaaaaaatattatggggctgttggattgttcaagaaattgcgcgcatggacgactacaagcatagttttgctgagatggctgaggaagcgagtaattatccttatttcaagcaaattattaatgtcaatgatgccaggtttaataacccggaaaacatggtggatgagattaaattgtattgccaagaaactggacaaactataccggagacgattggagaactgacaaattgtgtgtatggaagtctggcactctattatgcactagaattggagaaaatgactgaaattactggtaagaaaatcgaaaaactttatattgttggtggaggaagtaatgtagctatgctaaatcaattaacagctaaacttgcagggatagaagtatttgcgggaccttctgaagcaacggcgattggaaatttagttgtacaaatgattaatcaaggtgaaatcgaatctatgcgtgcgggaagaaaaattattcgaaattcatttgaaattggcgaattttcttgtggtgatgtgagatttgaggaaataaaagaaagatttactaaggtacttgaatttaattaggaggcttttagaatgggacaagaaacagaaattagtaaacgataccaagtggcgaaagaacgttatcaagcaattggagttgatacggaaaaagcgcttaaacactgaaagacattaaaatttcgatgcactgctggcaaggcgat

SEQ ID NO: 1530 - DNA, 707 bp, Listeria monocytogenes-4B
accttctgacgtagaagaacgtcttttcatcgttgtagatccaatgcttgcaactggcggatccgcaattatggctatcgattgcttgaaaaaacgcggcgctcgcaacatgaaattcatgtgtctagtagcagctcctgaaggcgttaaagcccttcaagacgcacatccagacgtagaaatctacgtagctggtttagacgagaagttagacgaaaatggttatatccgtccaggcttaggagatgctggcgatagattattcggaactaaataattaacaatctcctcggtttagtgagataaggaattataaacagtgttgctttttggcagactgggaaattttttgtcgaactatttctgaggagtttttttataaggaggttcgcaattggctaaaatcaaagtaatgagtatctttgggacaagaccagaagcaataaaaatggcaccactcgttttggcactagaaaaagaaccagaaacatttgagtcaacggtagtgattacagctcaacaccgtgaaatgctagatcaagtcttagagatttttgatattaaaccagatattgacttagatattatgaaaaaaggccaaactttagctgaaataacttcgcgtgtaatgaatggaatcaatgaagttattgcagccgaaaatccggatatcgctgtagttgacggtgatacaacaacaagtaagg

SEQ ID NO: 1531 - DNA, 1234 bp, Listeria monocytogenes-4B
taattggtttgatgactcgtaaattgcgcacattttgaatgaagcggtttgtgaatggactggggcagaaacatttgtgatgaacgcaggcatttttatgacagactttgaagcagggattgtgacggaatttgatatccaccaaatgttaccgcatccgctcaacgcgattgcttttacgatgtctggtgaggagcttgaaatacttattgacggaatctaccgaaagaaagctgaactgcaagatattccgcttcgaggttttggtttccgaggcgagtattttggcaccgttttgatggacagagctggttttgatgcggaaaatcaagtggcactttttgataataaaccgattgataaaacgcgggaataccggattgcgacgcatgatacgtttgtgttcgcaccatttttcccgatagtaaagcaaattaaacgaaaagaagtatatacaccggagttactccgagatattttaaaatggaaacttaaaaaaatgtacggacaggaggaagacaagtgacgattacgattcaagatttaaactacgagattatcaccaattatcgcgacgcttttgacgaggagaagttaaatgaacggtttagcgatattcttgggcgatatgattatatagtaggcgactggggttacgatcaactccgtctcaaaggcttttttgaagacgataaccgcaaagccgcatacgacaacaaaattagcacgttaaaagaatatatttacgaatactgcaattttggttgtgcgtattttgttattaaaaaagtaaaatagtaaatgaggtagtttggaattgaagaattataaagcgtatttaattgatttagatggcacgatgtatcgcggggcagaagttattcctgaggcgatcatttttatcgaaaacttaaaacgtgcgggaattccgtatttatttgtaacaaacaattcaacaaaaacacctgggcaagtagcagaacatttaactgacatggggattcaagctgtaagtgaggatgttttcacgacgtcacaagcaaccgtgcaatttatgatagaacaaaaacgcgaaaaatcggtttatgttatcggtgaacgtggaataaaacaagaactaacagataatggatttgaaataacttctagtaatccagcttttgttgtcgttgggcttgaccgggaagtcaattatgagaaattttcaaaagcagcgcttgcggttcgcgctgga

SEQ ID NO: 1532 - DNA, 1320 bp, Listeria monocytogenes-4B
  misc-feature (1)..(end): n can be any nucleotide a,g,c or t/u
gaagatactggtgttggccttgcaactgttatgttcggaccgctcgttgtcagtgtacttggtgtgattgtcttacttttccaagcgttactacttgcacacggcggtattacaactcttggctgcaaacgcaatgtcgatggcggctatcggaccaatggctaggttaaggtcgaatacaaagctgcccgnaaattattctgcaacaaaagagctacgattttcttattttctatcacagttgtcttagcatcctacttaactaccaccgtgcagcgcggacgcgttgtcccagatccagcatccggcatgatggcatctattctgaagttcatggcgattttctgtgtgacacaagctccaattgcgattgccgaaggattgctaacggtcgtcatgtccattcttatcagcccacattgaccagaaaaggtggcacaattacgatgaaaaaaataaatatcaatgtcattttaattctatgagtagtaatgttaatggttagtccattcttcggcaataaaacgggagaatacggcggctcggacggggaagcagaggcggagatcaccaaaatcgatccaagctatgaaccgtggtttgaacctctttatgaaccaaaaagtggtgaaattgaaagcttattatttacgcttcaaggttgtatcggaacaggaattatcgcgtatgtcattggtgtaagtcgtggcaagcggaaagctgagaacgatgttaaccattgataaatatgcttatcaaaaccggtggatagctttttcgccatcattaaaagcattattttatgtcgcgattctaatactcgcgttaactggtcctgtgctcatccaagcaatactgttcttctgcatggtaccattgacgctctatgtcgttaaaattcactttaaacaatatttgaaatggctccttttaccattttcatttctactttttagtttactttcgattctcatttcgatttctaaagatccaagcagttttctcgcttcgatttcgattggaggtttttatcttggtatttctgacgtgacgattacgacggggacacaagtatttttacggagtatggattgcttagcgcggacctactttttgctgttgaccgagaccacgccgccatcgacacatgggttgaatgggatcccttttcctcctcgccctctgtgccttttcattcgtcctgccctattcgtctctctccgctccccttccccctgccggacgcccctctcatgcttcgtgcctatttgtgttattttgatgtttttggatcttggcgccccgcaagacaagaaggag

SEQ ID NO: 1533 - DNA, 689 bp, Listeria monocytogenes-4B
gaagtttatgcaaatttagtcgaaatttttggtaaagaatctgtttatttatctgcccaaaaagaaaatccacgtcttttcacaaaaatagaaactttttctgcagaagaaaatgtaccggttgttgcgacgaaaaatgtacaatatatagaaccaaaagatgcgcaagcaaaagaagttttaacggccattcgtgataatcgaacggtcgattggacaacgttaccacttgctggaccaaattattttacctcacaagaagacatggaacgtgattggcaaacggagttcgaaaaacgggcatgcttagaaactggtgaacttgcagatcgttgtcatgtcgaaattgctttggatcagcatttattacctagatttccattaaatgaaggacaaaatgcatcagatgttttgcgtcaaacagcctttgcaggattaaaagaacgaaatttattaggtgtggaatatcaggagcgtttagaatatgaattaaaagtcattacggaaatgggttttgcagattactttttaatcgtttgggatgttattcgttattcacgcgaggcgggaattttaacaggtccaggtcggggctctgcggcggggtcgcttgtttcctatgcactcagaattacggatgtagacccaattcgttacaatttgctatttgaacgatttttaaacccaaa

SEQ ID NO: 1534 - DNA, 1330 bp, Listeria monocytogenes-4B
  misc-feature (1)..(end): n can be any nucleotide a,g,c or t/u
ggaacaccaaccaatgtcatgactgaacaaactttagaggatgtttttaatatcaaagcagatattttaattgatccccgcagcggtgtccctctttgcctcccctacgaaacttgcaacggatgcgaaattgtaaaggagcttgattccagtgccaaatgaggtttatgatgtaaccattatcggcggcggtcccattggcctattctccgcattttatagtgggcttcgttccatgaaaacaaaaattatcgatgctgaacctgctgttggcgggaaagttcgctacttttttccagaaaaaatcattcgcgatatcggtggtattcccgccattaccggcgaaaatcttgtcgcaaatttaaaacaacaagcagaaacctttcatccgactattgtttgcagtgagcgagttgtcgatgtgacaaaactatcagatggcacttttcaattaacttcgcataacggttcgatccatttttcaaaaacgattgtcattgctacaggtagtggcacgtttgaggtcaataaacttgaagctctacatgctgaagattttccatttgcaatccattatgatgtcaaaaatatcgagcaattccgcgataaagtagtagtggtttctggtggtggaaattccgctctcgtctgggctcagacactcgatcccattgccgatctttgttcaccttgtttaccgtggcgattattttaacgcacacgtggtatgtgtccgcgctcttcctccccccttttgttcggggtccatatccccccatgctcttcgttggtttctgcgggtcccgcggggcggtgtttcgttgttttttgcccccccgccgctccctcctcctctttctcccccccccctcccctcttcctcctccttcccttcccccctcgcccccctccccgttcgcttggcggcccttcgctccccccccccccctcccctcctccctttttccccgtccccctttccccgtccgccccctcttcnttctctgtctcgcctcctctgctttttccgttcctctttgctctctcccgtccttttctccccgcgtgtctctgccccgcggttctccctgtcttcccgcctcctcccgtcctgccttttccttcccctccgtctccgccccgcccttccgcctttctgcttttccgttttttgtgtcgttcttcctcttccgcgttctgtcctccgcgtctcccttcgtcttttcgcctctctttctccccccccttcggcctgcccgcgcctctcctcctctctctccgcgctcgtccgcccctcccgctgccaactaccaaacaaaaaacaactaaa

SEQ ID NO: 1535 - DNA, 1130 bp, Listeria monocytogenes-4B
  misc-feature (1)..(end): n can be any nucleotide a,g,c or t/u
actatagcacttgctgcatgctcgacggccgacgtgtgctggaaagaaatttgctttcgttaaaaaaggaacaaatccctccgttccaagtgacgctgtaaaaatcgaattaccatcagagaaagtaaaagtacttcttcgcgtagaacaaaaagacgatcctgaaggtgcagtaaaacttcaaaaagcattcaaattcgatgcaccagacaatataaaaatcaaagaaccacttgagattccacatttcactaatgcagagttcttattagaagaaatttattccaatttggaagaactactagcaacttatccagataaaatgccaagagcaactgaattccaagataaagcaagacaagtggcagcctatatcgagcttggtgatgagcaaaaagctgaagtaagaaacttaattgtgaaagaagccattccatattttacaaatggtgcaaaaggatttggtacacaaaaaggcggatggtctgttacttacgtagctggcgcgttcgaaaatgatattttagcgcgagcaatcattaattacggcggtatttgggcgaattctattcaagaagcactatacttcatcggtcaaaaaggtacggataatgagttattaactggcgataaagtttataaaatccattttcccgcagatgaactnccatcagaactggcagatgctttttggtcccgtaccttatacagtgttccagattaccacgttatcccaaataaattaaacaaattctgcaccaataattactcaggtccaaaacgcagccaagatggcagcttgacgctctacaatgcgtcagaaaaaaaaaaaaatgtagatccgggaaactggcggccaaacaaggctggaaagaggaattcactaaaattccgactatatgttccgaaaaaagaagtgttggaagggaaagtaatcttaccaccgctggaagttataaaataaacctaaaaagctaagtatgcaattaccaattttgggtggtaacatacttaggcttcttgtatataaaaataaaaacacttgcactttnttatctttccagcgcncgttcggccgatcgagcatgcgactcattngctnncaagcacgtcncaccacgnttaagctc

SEQ ID NO: 1536 - DNA, 1333 bp, Listeria monocytogenes-4B
aactggtttaactgcattaatgggtgtcacggaaccggcaatgtacgggataaatgtggtatataaacgtcctttcatggcgtcgttaattggtggggctgctggtggtggctttgcaatgatgtttggtgtaaaagcgtatgtcttaactggtaacggtggtattcctggacttccaggtcttgtcggagatacttttgtttatgcattaattgcgatggccttagcatttatcgtggctttaattttctcttatattttcggtattgatgagcaaatagtagaagcaactcctgtagcagaaaaaatagcagctgggacagaagttttgcaagctccagttactggtgaattagtaaaaatgagccaagtaaatgatactacttttgcagatgaaattatgggtaaaagtattgcgattaagccaaatgaaggtaaactttatgctccagctaacggcacaatcatttcgcttttcaaaacaaaacatgcgattgctatgcagtcagataatggcgctgaaatattattacatgtaggcattgatacagtgaagcttgatggtaattacttcacggcacatgttgcgacgggtgatgtagtggaacaaggagatttattagtaacgtttgatatggaaaaaattgcagaaaaatatgatacaacaacgatgatggtaattacaaatactaatgaatatgctttggtagaagctaaggatagtggaacggtaacgaaagggaatcaagtaatggaattaaggagtgagcaaaatgagtaatacgaagtttccagatggctttatgtggggcggggcgaccgcggctaaccagtttgaaggtggttataattcaggcggaaaagggcttgcctgtgcggatttattcactggtggaacgcatacagagccaagaagaattaccgcacaattagaagaatccactttttatccaagtcatgaagcagtggacttttatcatcattataaagaggatattaagttaatggcagaagctggatttaaagtgttccggatgtccataaactggactcgtattttcccgacaggaaaggaagcagagcctaacgaggaaggattgcagttttatgaagatgtttttatggagctgaaaaaatatcagattgaaccgttagagacgattgctcattttgatattccgctagcattaacgaatgaggtgaacggctgggcgtcgcgtgatttgattgattactatcttcattattgtgaagtgatttttaaacgctataaacatttagtaaaacactggttgacgttcaatgaaataaatactgcaacaatggaaattgg

SEQ ID NO: 1537 - DNA, 1024 bp, Listeria monocytogenes-4B
acttattgggcactctcgcatgcatgttcgagcggccgaccagtgtgctggaaagtatacctcgataatcatgtactccgtcaaattgaatatttaagctcttaagttctggcaatgttttaagtagcatgatatccgttattgcaccattataactaaggtcaatactatttactttaggaagtgtgtttattttagttaaaatagaatcatcatgtgcactgtgcgaaatatccagtagagttaaactcgtcagcccacttaaatttggaattttatcggatgtaacatcttttcccataattcttaatcgttcaagattactcaacccgcttattggattatagtttgttgcatgaatattatttatggttaaatcttttatattatgagcatattcaatacctgttagatcagtaacatttatattcgctaaagtaatatatgttaatgaattcatttgtgcttcagtaatattcgctgtactcgattgtcctaataatccatttaagtacgctttaaatgttgaatctggaatgttcacattatcctgacttgcttttaatccagtttgctctgcagcaaataccgggaatgttgtttgcgatacggggacagcgagtactgcaaagcataccccaatttttacgatatttgattttactgacataagttattaccatctccactctgttatattcgcctagtaaattttaagaggtatccttaaaagaaactttatgatgtaattatagtctcctcagcatatgagaccaatagacaaaatgtgtacaaaaatggttgaaaaagcaaaatttagtatctttttaggatttttctattgccatctcctgattttatgcggcttttatttggcattccaaactaccgcaaaaaagggctatccttgcccaatgctcgccccatgcaaccatcgtccccgcatccgccgtcccatccatcaccaccttcccctcgccgaatccccccccacggcccccgctccctccccgccgccccgccg

SEQ ID NO: 1538 - DNA, 695 bp, Listeria monocytogenes-4B
gactttattttacttttctcggtggtcccccataataaaacttctcgtatcatagcgatgtcttgatctagaatattccactggtctaccatctttcaaatacactacttgctccacttctaaaactgggtcgtgttccccgcacgctaaatatttttgatcatatctcgttggcttattgtttttacttttccgaaaggcaccgcttatttctttccaagtgaatcttgtaagtatgcataaatcgaatgatgcctaatttctttcgttaaaccaggaactaaatctgccggcatcgttgtatgctctaacacatatggtgcgccgtccaagagccgtaaccgaatcaacttgtacactggctggtctgcttttattaaaagttgttcttgtgttttttcatctgggaaagcaatatcgaatgcaataattttactcgagattcggttgtctcccatcatttttgtcaaaccgtcataatcccgcaaactcgcatcttgcttattagctaaggcatttttcatgacaaaagtccccgcaccccgttgtctgtaaacaagtccttcaagcgctaaaacgtcaaaggctttttttattgtcattctgctacaatcataagctttccacaagctcacttgatcaggaagaatggattctggtggataagctccgctgctattttctccagatacact

SEQ ID NO: 1539 - DNA, 613 bp, Listeria monocytogenes-4B
atcgtgaagaagcaatatattacatttggagaatttttcaaacatctcaaaaaagatgccgttcttttagatgagttcattagtttgattacgattaatgtttcgtcgtttttccgtaatcgcaatcgctgggatgcgctggaaaaacaagtacttccaaggttgcttgaagatagtcgcggcaagcttcgggtttggagtgcggcttgttcatcaggggaggaaccgtactcgctggcgatgatgatggaacgttcagttggcacaaggcattatgatattttagccacagacctcgaaccagctattttaaaacgcgcggtcattggagaatatcaaagccgtcaaatggaagaactaaccgaacaagaacggcatacggcatttgttgaaaaaggggatacatatcagattttgcctaaatatcgaaagtcgattcgttttagacggcacgatttgctgaccgattattacgaaaaaggttttgatttaattgtttgccgtaatgtgttgatttatttcacagcagaaggaaaacaccaagcatatcagaagtttgcagagtcactaagacgtggcggcgttcttttcatcggcgggtcagaacagattt

SEQ ID NO: 1540 - DNA, 775 bp, Listeria monocytogenes-4B
  misc-feature (1)..(end): n can be any nucleotide a,g,c or t/u
aaactcttccgaagtaagaacatcttccgctttgttagacaatacaaattcattgttttctattgttacataatcatttactttatcaattaattcttccggaataattgattcttcatcattttctatagaatccatagttttttcatcaattacattttcagagtctatccaaccaataggtttgttatcttggcttattttaacgtagttacccaaattatcatcagaattactttcatcaatattaacaaattgttgagaataattttgagaattatttatagggtttttttattatatgcatcagttatatttgaaaaaatgtcgtttgtactattacttatcaccatagcagtgtttgaaggtattaatgagaaagccctagtgtctaaccaaccaattactttattatcataactaaattgataatatattgaccttgttgttttggctcttctgattatttcaactctttttccttcataattagaagcaggcgcaattaatttactatcggactgaagataaggtgttgaccatactgcatgtccaataactgtagatataactgccatctgattgtactcttcattaaaatgtacttggtcatagagtgttatggctcttgcatctaaccaagcttttatattaggagttttggtttcactaaattgataataagtacctcttttgttttctacttttctccaaatagttatctttccagcacactgtcgncccctcgagcagcagggacggtttacaancaggt

SEQ ID NO: 1541 - DNA, 1142 bp, Listeria monocytogenes-4B
gcgggctttcacatcttgatagaattcaatggcttcttctaaggaatcagaatgagtgaaaatggcttccgcgttttgagcagcgaaatcgcgccccgtactagacgcgcctgcctggaaaacaactggttctccttgcttcgagcggccgatatttaacggcccttcgacttggaaatactctccttgatgatttaaacgatgtaatttttcaggattaaagaattcaccggtttctttattataagtgaacgcatcctcttcccaagaactccagagtccgcgaaccacttttaaatgttctgctgcaatggtgtagcgatcgctgtgggttgggagatttttcttgctatgatttcgcgcggcgccttcttgcggagaagtgactagattccaacccgctcggccgccgctaatgtgatcaagcgaagagagctgtcttgcgagtgtaaatggttctgtaaaagaagtcgagaaagttccgacaagtccgatgttttccgtagactcagctaatgccgataaaatcgtaattggttcaaaacgattaagaaaatgcggaatcgatttttcggaaataaaaaggccgtctgcaataaatacaaaactaaataacccttgttcggcaattttggcgcgtgtcttataaaaatctaaatccgtacttgctgcggggttgatgtccggatgtcgccaaccatctgttgttccgccaacaccgtgaataattgcaccaaactgaattgtttcttttctagtcattttacttcctccttttcaaacaatgctttttccaaatgttccaatccgatttctgtaactgcttggtaggtccctttttcaatatcgccgatttctacgactgggacataacgaatgccgtatttcgcttgcagtacttctcgcaaataatcatggtcggtgacgtccatatcttggaagacaattttttgctcaggtaaataatctttcacatctttacaataatgacatactactttactgcaaacaacgacgttagccatggacaacttactactttatggattgagttaatgattcggccaagtatcccttgctctcgccccatccacctggcgccccaccaccccatcccgcatatcatgtacctccccaaggcg

SEQ ID NO: 1542 - DNA, 832 bp, Listeria monocytogenes-4B
  misc-feature (1)..(end): n can be any nucleotide a,g,c or t/u
gcgtccgactgtgtgctggaaactgggaaatcttccacaagtgctgatgcaaacgaagctggggcagttattcgtgcagaagttgcagacgctgtatctcaaaaagcagcagacgcacttcgtattcaatacggcggtagcgtaaaacctgaaaacattgctgattatcttgcagagtccgacattgacggcgctcttgtaggtggagcaagcttagaaccagcatcgttcttagcattattggaggcagtaaaataaaatgagtaaatcacctgtagcaattattatcctcgatggttttggtaaacgtgcagaaacagtaggtaatgctgtagctcaagcaaacaaaccaaatttcgaccgttattgggctaattttcctcacggggaacttaaagctgccggccttgatgttggtcttccagaaggtcaaatgggtaactctgaagttggccatacaaacatcggagctggacgtattgtctaccaaagcttaactcgtattgacaaagctattgaagaaggcgaattccaagagaataaagccctaaacaatgctttcactcatacaaaagaaaacaactcggacttacatcttttcggtttactatcagacggcggcgtgcatagtcacattaatcacctcgttgcacttttagaaactgcgaaagataaaggcgtgaaaaacgtttatatccatgcattccttgatggacgtgacttggcaccacaatcatcactagaatatttagccacacctttccagcacactgtcggccgtgtctagcgatccagcctcgggccagtntctgaagtcctgtcaaaaggncag

SEQ ID NO: 1543 - DNA, 895 bp, Listeria monocytogenes-4B
aaaaatattcggacgggggcgacgaaagaatgaagcaactgctgaaaatttttgtgccagtcattgttgtcgcactcctaatgatgctacttgcttcaacgatggggggttctgagggctatgctgggagcaatactctgactatttataactggggcgattacattgatccatcgctcattactaaatttgaaaaagaaacaggcatcaaggtcatttaccaaacatttgattctaatgaagcgatgatgacgaaaattgagcaaggtggaacgacctttgatattgcggtgccaagtgattacgcgattagcaaaatgaaagaagaaaatttgttgatcccacttgatcattccaaattaccaaatgaaaaataccttgatccgcgttttatggatttatcgtttgatgatgataataaatattcgatgccttatttctggggaacgcttggcattatttataataaagaaatgttcccggataaaaatttcgatacgtggaatgcgctatttgatcccgaattgaaaaaccaaattttgctgattgatggggcgcgtgaagtgatggggcttgggctgaatagtctcggttactcactgaacgatccgaataaagctcacctacaagctgccagagacaagctagaaacgatgacaccgaatgttaaagcaattgatggcgatgagattaaacttctcatggcggacaatgaggcgggtgtcgcggttactttctccggagaagccgcggaactgtcaagtgaatatgaagatttagaatacgctcttgttaaagacgggtgcaatttatggttcgtcatctcggtctcccaataaccgtcaaaatggcgctggcgcgcctaacttcattaacttcactgtaaaaaaaaaaa

SEQ ID NO: 1544 - DNA, 1070 bp, Listeria monocytogenes-4B
ctgtgggcactgccatccatgcttgacggccgacagtgtgctggaaagtgctacactacaataaacagttctagaaagtggggaggggcttggataaaaaatttttactgacaaatagtactattggtattattggtggcggacaacttggacgtatgcttgctcttgcggcgaaagcgatggggtatcgtattattgttcttgatcctaccgctgattgcccagctgctcaagggggggatgaacaaattattgctgactatgatgataaagtagcattacgcgaactttccgaaaaagcagatgtagttacatatgaatttgaaaatatcgactatgatgctttgaaaatgacgcaaaacttagtatctgtcccgcaaggatcggaattgctttcgattacacaggataggattttggaaaaagcttatctggaatcagctaatattaacattgcgccgtatgcggttatagtggaacaagatgaaattgaaaatgaaattaaaagtattggatatcctgctgttttaaaaacggcacaaggtggatacgacgggaaagggcaagtggttattcatgatgcaagggatattgaaacagcagcgagattgttgcgatacggctcttgtgtactagaagcttggattccttttgaaaaagagatttctgtggttgtcgctcgtaatttagatgggcaaatagaaacttttccagttgcagaaaatgtacatgtaaataatattttgcatacaactacggctcctgcagatgtggcagatgacgtgcatgaggaagcggaagaaattgcgagaaagttagcagatgtacttcaattatgtggtgttttagcagtagaaatgtttgtgacaaaatcaggggctatttatgtaaatgaacttgctccaatgcctcataattctgggcattttacaattgaagcttgttctatttctcagtttatgcagcatattcgagcgattgttggattgccacttgtaaaaccagaactcttaaaccaggcttaatgattaatattttagggcaacatgtcgatgcaatggataacaaat

SEQ ID NO: 1545 - DNA, 949 bp, Listeria monocytogenes-4B
agggactgtggccactggtcttgctcgacggccgaactgtgctggaaagttgcttgctttgtaactaattgtattccaataataatggggtaatagcggaaatccctaataaaaaactcattatttttttagcatttcttccatccacggcataccctaaaatcgtttttccaattccgtacataacagaaaaagctaaaccaatcattcctagttctgtggtgctgaaatggttctgctcaattaacaatgtctgagctgctttaaagttattccttagaagatagaccgttagataacaaataaatacagacataaatgcaacgataaagtgtttgaaccattgttgcctttgaatttctagtggaacaaaatggttctttctttttaaactgaataatgacattataaatttcctttcaagtgtaattttcattccaaatttagaatgcgatgagcattattacgcaaacgtttccatataaagtctatcaatttttctaaagcaatcacctctgctgtccaaatgctttatttccccttttgcgctgctgaaaatataaaacagaaattctatttccgtcattaacacttgttatcatgcagaaaacaaaaaagcaggaattatcttggggttcccaaataattcctgctttccttttagtaaaatatttcctaaaacccgaaagtttttactcgttaaatcgtattaaactgagcatcatataatcgcttataggcaccattatcttgcgctaaaagctcattatgcgtcccagtttctgcgatgcccgtttcatttacaacgataattcgatcggcatgcttaatcgttgcgagtctgtgcgcgataattaaagtcgttcttccttccgctaactcttctagcgaggcttgaatcacttgctctgtttccgtatcaagcgctgacgtcgcttcatctaaaatt

SEQ ID NO: 1546 - DNA, 1285 bp, Listeria monocytogenes-4B
tcaagaaggtaaaggactattcaaaatagaacaagccgccgaaaaattaatggctgaaaaattcgaccgtttaagaagtaaaggtatgaagccaagagcaattcgtgcgatgattttaggtattccgaatgttggtaaatcaacattaatcaatcgactagcgaaaaaaaatattgcacggacaggtaataaacctggtgtaactaaagcacagcaatggattaaagtgggaaaaacattagaacttctggatacaccagggattctttggcctaaatttgaagatcaagaaattggctacaaattagctcttactggtgcaattaaagatgatttactacaaatggaagagatcgctggttacggtttgcgctttttagaaaaacattatcccgacagacttcaaaactggctgaaagtagagacagtctctgaagatcctatcgaaacacttgcttttattgctgaaaaaagagggcttctagatcgatacaatgatccagattattctcgcgcagccgaaacggtagttcgagaaattcgtcagcaaaagttagggagaatgtcgcttgatttgccaaattgggaagatgaagtccaatgaccgattgcatatccgttatccgagaaaaactaaaccaagtcacatcataacatgatcccttttttcggaaatgcatgcaagatgagcgtaaaggtgtagaaaaacttctggaaactacaaggagaaaatgggaaaaatttcgcaattacggaacaagcttgaagaaatgaaacaatatgaaacagatttattccaacaaggatacaagtatatcgctggagtggatgaagtgggacgtgggcctctcgcaggaccagttgtagcagcagccgtcattttaccagctgatttttctgttgtcgggataaatgattctaaacaattgagtgaagcaaaaccgtgatgctttgtttgaaacgataaaaaaagaagcaattgctatcggagtagggattatagaacatgatgtaattgatcaagtaaatatttatgaggcaacgaaacttgctatgcgtgaagcgttagatcaattaacaccagaacctgattttgttctaatagatgcaatgccactaagatataccgaggcagaactatctcttatcaaaggggatacaaaaagcatttcgattgctgcagcgtctatcatcgcacaggtaacaagagatagattaatgcagaagtcccaatgaaaagtctcccgggtatgattttgcaaacaatatgggctaccgcacaaaa

SEQ ID NO: 1547 - DNA, 1095 bp, Listeria monocytogenes-4B
ggataacttttaaaagcatcgggtaacttgagctgctcggcggccgacatgtgctggaaagatgaacagggcgaggcatgccatcgagtccagtgcgtgcccagtcccataatttaaacgtgaagatataaggagttgcactaatttctaggacgacggtacttggaccaccacaatgaatcgtcccagctggaattaaaatatggtcatgtttttttacagggaagactttaatatatttttcatcgggaattcggtaatttccttcagcggctttttctattttttttcataatcgcttcttttgttgtaccttcttttgttccaagatacacggtagagtcgttatctgcttctaaaatataataactttcatcttgggtctaatggataccgaacttatcttgcgcatactctactaatggatggacttgcagacttaaattccctccacccactgtatcgagatagtcgaaacgaatcgggaattccgtaccgaaacggctatgtacttttggcccaagtaattcattcggaaaatggtttactacattggtagacggaacttcaatccgggtggggtgcaaatcgcatgtataaactattttcttctggaacgccgtcaaatgcccagccgtaattatcagctgcaggatcaagcccaaagttattcttcatccactgacctccccatacacttgcatcaaagtaaggaactactctaaaaggggctttggaaacttgattcaagccatttcgataatcttctccgcgcaccatttttggctcattttttttattgggatcaagtgacaaatctacttgtggataaagcttttggtttggggcgtcacgcatgcgccactccgagaaatcaccccccttcaactcgcgaacgggttgcgtgggcggcgtggcgtcgtctcggatgacgccggtcccctccctgcgccgctgcctcttccgcgcgtcgctcatcccccccggttgctcggaatctaactgcgcccggtcgctcgtgtcatggcgccgcccgcccgcgacgtctttctcgcccctcccccccccttcggaatttccacaccatgctcccgt

SEQ ID NO: 1548 - DNA, 695 bp, Listeria monocytogenes-4B
tttctcgattacttctattttcaaaaagtagaagtggcgaatatttataacaaagctttagacctgcctgctgtggcgctaagtaaggaagacttaagtgttaatattatttatgcagaaaataatcaagattatttttcctatgatagtaatactggggattttaggactggaattatcacggatccaattgcgattgtatatacgggaaatattgactcatctagtattggcgctcatgtaacttcttctgtatattttattgataaatcgaatggtgacgcttttaacgctatcttaccacttattagtaattcaaatgcaagagaaattacccatgtaaggagtgtttatcaagaagtttcaagcgaaataactactttgaaatggcaaatatatcagcaattgataggtacgattatcttagccctatgcttatgctcttttatggtacttcttgtactgtcctattaccgggagaacttatataagcaactaatttatcatgtatttggctattcgttttggaaaagtagtaaatggtttagtataagcaatttgtttgtgagtgttttttccggaatcctcatttttattacttagcaaacaaccggctgccctatattctagccgtgctattctcataatacaactatgcgccgttcattccataaaggcaaaagcgatcgatcaag

SEQ ID NO: 1549 - DNA, 1049 bp, Listeria monocytogenes-4B
  misc-feature (1)..(end): n can be any nucleotide a,g,c or t/u
aagtggcttttatactgtcgatggctatgtgaattcctatcctcttgcttataaaagggctttccgaaaaattattgctggtgagctagacaagagtcctgttttagaagattattatgataattggggtaatcgttgttatatattttctgccgaattaggtaataactacgatttcggcaaggattcgaaaaaacacattatacagttagattttgattcagaggcatttaaaaaggttggcggcgagtatattctatcagccgttccgattgataatgcttcagaagtcggactccagttcgtaaaagccttcgataataagggatcttgctggaccatctatttatccaaagcaactaaataaaagcgtgaggcgtgattttttcttaacgaactaatcgcgcctttcgctttttttgtggtatgattaataaaaggagtgatgattatgaagaaaaccattcagtcagttggtgtttggggcgatagtattatgaaaggcgttcttttcaaccctgaaaaaaatcgctatgggttgcttaaaaacaactgcattaaacgagcatccgaaaaacttggcctgacttttcaaaatcattccacaatgggtcgtacgataactaaaggccatgaaattctaacaaaagacttagcaaaagatgcaacaaatgatatcgccattatcgaatttggcggaaatgattgtgattttaactggacggaagtttccgaaaatccgacagctgagcacattcctagcaccccacttaacatttttgaaacgcccttccttgaaatgattgcccgactaagataactggatcttaaacccattttaatgacattgcctccccttcccgcanaacgttgttttgaattcgttacgagaaatgggctctatacgatcatctcccgccgcttctaggcggcgatgtgcagatgatctatggctgggctggcccatgtggcgttgccgttctcgcccctccggtgctttcctggtcgccctgtcgtcggtcgccctgatcgncaacaaaataaaaaat

SEQ ID NO: 1550 - DNA, 1024 bp, Listeria monocytogenes-4B
tgcagctgctcgacggccgacctgtgctggaaaggtggtgcagaaatctatcgtttatttatggatgtggcagatcagctgattgtgacaaaaattgatgcagagtttgaggctgatactgcgtttcctgaagtggattgggagaatttttccgaagtggcgaaagaattccatgaaaaagatgaaaaaaataagtacaattacactttttatacgtatgaaagaaattagtagaaacgttgcctgtttgcgggcaacgtttttcgagtggagtgagtattaattgttatcaaaaatggagataaataaacgcgctttgaaagaaaatatggcgcttcttgcttgtccgatttgtggcgaagcattcgagtttaaagagccgcagtcatttgtatgcctagaaggtcacgggtttgatatcgccaaaccaggttacgtacatttactaaaacaagcgcataaaacaaaatacgatcaagcattattcgaatcccgtaaaaaagtgattgcgagtggcttttttgaaaaattaatcgaacgagtgacagaaattattgcggagaagaaaaaagaacaacttattttatatgatgcgggttgcggggaaggaagtcatttggcgcgagtcgtatcaaatttacaagcgactggtgttaatgtccaagcggttggcttagatatcgccaaagagggagtgaaacaagcggcacgcgactatcctggtacttcttggacggtagctgatttagccaattgtccgaatcaagcagagacggcggatgtcattttaaatattttatcgccatcgaattacgtggagttcaaacggcttttaaagaaggatgggtttttgttaaaagtagtgccagaagcgaattatttacgcgaattacgtgaatttatttatgttgatgagaaaagtagttattcgaatgagtcggtcacatcacgattagcagaaaagttaagcgtagaacatgtcgaacgagtgacctacaaagcgccgattgccaaagaattattt

SEQ ID NO: 1551 - DNA, 752 bp, Listeria monocytogenes-4B
gtccaataatagcaaaatgttttgaataatgttacggaggtataaaaagaaagtatgtgaaaataaacgtgcaggaggaaaccgataatgacaaaaaaagtcttaccaaaagaagcgtctgaatttacaaagaaagtgaatgagaaagtaaaaaaagctttaccatttgagaacacgaaagattttgaagatgcaaagaaaggctttattggcacttgggatcatgtaaaagttgatacggaagatggccatgcagtttgggatttggatgattataagtttatcgaaggagaagcacctgattctgttaacccaagtttgtggcgtatcgctcaacttaatatgacaaatggtttattcaaagtaacggaccgggtttatcaagtacgcggctttgatatgtcgaatacgacgattatggaaggcgatactggccttgtcattacagatacattaatgtcggttgaaactgcccgtgcggcgcttgaattatactttgagcatcgtccgaaaaaacctattaaggcgattatttatacgcattcccatgccgatcattacggcggtgtagcgggtctaattagcaaagaagatgtaacctctggaaaagtggcacttattggacctgaaggctttatggaagcggcggtcagcgaaaatatttttgctggaaatgcaatgattcgtcgtgcggatgtatgtatggtagccgtttgtcacgcggcgaattaggtcaagtggatgcaagacta

SEQ ID NO: 1552 - DNA, 858 bp, Listeria monocytogenes-4B
  misc-feature (1)..(end): n can be any nucleotide a,g,c or t/u
agaagctgtggctcgagcgtacaaatggcagaagatggagcagcaattattgacgttggtggaatatctactcggcctggtttttcagaggtaacgcctgaggaagaacttaatcgaattattcctgtcattaaagctgttaggacaaaacttccggatatatggatttctgttgatacttggcgtgccgaagtggctgaaaaagctattttagcaggagctaatatgataaatgatcaatggggtgccaaaaaagaaccgaaaattgctgaagtagctgcgaaatataacgtgccaatttgtttgatgcacaaccgagaaaacacgcaatacgataattttctggaagatgtgaagaaagacttattagaaagtgttgcaattgctaaagcggcatccgtgccagatgaacatattattcttgatccgggtttcggttttgttaagacgcctgcgcagaatttagaagtgttacgacgcattgatgagatagtggcgcttggttacgaggttttacttggtacgagtagaaagtcgacaattggtctcgtcttaggaactactccagaggatagaatggaaggaactggggcgacaaccgtttacggattttcgaaaggttgcacaattactcgtgtacacgatgtacttccaattgcgcgcatggtaagaatgacagacgcgattacgggcaaattagatattacaaaattataaagaggtgctttagttggataaaatttatttaaatgaattagtgttttacggataccatggagtctttccagacacactggcggccggatctagccaancagggctcggngcagttactgcagtcctttcnaaaggtcagac

SEQ ID NO: 1553 - DNA, 1286 bp, Listeria monocytogenes-4B
gaagctgcgacaaatgagctggttgttcgtctaaaagcaggagacccttatgtgtttggtcgcggcggggaagaaggagagacactctataaagcgggaattccatttgaagttattcctggaatcacatccgcgattggtgggcttgcctacgctggaatcccagtaacacatcgtgattttgcttcgagttttcacgtgattaccggacatttgaaaaaaggacgcgatccactagattgggaagcccttgctagactggaaggtacgctcgttttcctgatgggaatgactaatttgcctaatatttgtgcgaacttactagaaaatggtcgaaaagccgaaacgggtgttgcgattgtacaatgggcatctcgcggcaaacaattaacggttaccgggaacttacaaaacatcgaacaaaaagtagcggaatctggtatttcttcgccggcacttattgtcgttggtgatgtggtgagcttacgaccgcagcttaacttctttgaggaaatgccacttttccatacaaaagtattacttccaagagcacgagctggaaaaagtatgctcgcggaacaaattcgcgatttaggcggagaagtaacaatgtatcccaatattcaagtagtagatgttgtgccaacgaaaacaaaagaagaactaagcgaagtaagcgaacttcttttcacatccaaagaagcggtagaacgattttttgattatttagcccagcttgatttagatattcgttctctaaaaaatacccatcttaccgctattggcaaacaaacaaaagaagcttttagtgaaaaaggaattattccagatagtttcattaaaaggcggagcacggaattaattttggagcatttaccacggttacagaaaaatgtgagcaacttaattatcggaagcatagttgatacggcagaagttaccgcaattttagcagaagtggaagcgatggaaatgatgccgttatatgatatgcgtcctgtgacagaacgaccatttgaccttgcaagctttgaacaagtttgtttctcaagttcgcgttccgttcaaaatttactcgacgtactaacaaccgaagaaaaagccattttacaaacgaaaacaattctttccattggaaggttcacgagcgcaacgttagcatcattcggtatcaacaattttatcgaagccgaaagcgccacaccagagagcttaattgaactaatccaaaaaacaaaattagaaggagtaccacaatgaaaaaagcgattctagtcgttagtttt

SEQ ID NO: 1554 - DNA, 1274 bp, Listeria monocytogenes-4B
cgattctgagcttgttacagagaagaactaaagactagaagaataatggccgaatacgagcgaaaacgccatttagctgtatcacgccaagctgatttaaaagaaaaactccaaaacaaacaaaaaccaaatatggaacaactagaattcattatgaaagagaaacaactcgaacttagccaatcagaagaaaatacaatgaaacaacgcgaattcgttgcaaaaagaaaagaacttgtcgaaaactaccaaaacagtattcaggcagtggaacaagccgaagaaaattatgcggatattggcttactagctgatgcagcgcgtggtaaaaatgcccggagattaacgtttgaacgatatattttagcgatgtttttagacacgattattcaccgcgccaaccaccgtttatccaaaatgacaagcggtcgttttgaactacagcggaaaatggaaaaagcaaaaggaaatgtccaaagtggcttagaacttgaagtttttgatgagtatacaggattaactcgacatgtaaaaacactttcgggaggagaaagcttcaaaacctctttagcgcttgcattatcactcgcagaagtcgttcaagaaatggcaggtgggatttcacttgaaacgatgtttattgatgaaggattcggtacgcttgatcctgaatcacttgaagccgctgtagaatgcttactggaaacacaagaaaatggccgcttagttgggattatttcccatgtaccagaactaaaagaacgaatttccgcaaggctagaagtaaccgcaacaaatcacggaagtaccactaaatttattacagctagtagctaaaagaccgcatgcgttgccgtccctcgtcttttcctatataatagtagtttagagtaatggacggttttgggaggaagaaagtaatggagcactttacagcaattcaaaataaaatgatcccatatagtgtgaagcaggctggaaagaaactgatggaagacggagaaatcattcagtttcgtgaaaaagatgcatcagaccattttttaacgtattttattgatcaaaatgtcccacaagatgcgcgtgctgaacatcatgcctgtccccgcgccccccttcctttgcgcgccttcgcgccgcccgtgtgcctctcctcctccccgcctctctccccacccgcccgcgcccgcgcccccggatcgcccccctctcgctcccgcccgccccagtccgctccctctcccctccttctacgcctaacaaaaaaaaaaaaa

SEQ ID NO: 1555 - DNA, 903 bp, Listeria monocytogenes-4B
tacacgctgctcgagcgggcgacatgtgctggaaagctactaaaaacgctggaagatccgccgaaacatgtcatttttattttggcaacaacagaaccgcataagttaccgctaacgattatttcgcgggtacaacggtttgattttaaacgaatcacgacacaagatattattggtcgtttgaaatttattttggaagaagaaaaaatccctttatgacgaaaaagcgttgatgattgttgcgcgtgcggctgaaggcgggatgcgtgatgcgcttagcttgctcgatcaagttatttcctacggatcagaagaagttaccgtggatgatgcgctcgaaattactggatctgttgcgcaaaacttgctgacaaaactagtaagtgcagcgtttgacggtgatgcggcggaagctatttcaacgctgacagcactgctagcagaaggaaaagacccagttcgcttagtggaagatttactcgtattctttagagatgtgctgctgtatcaaaaagcgccgaatctggaagaaacactggaacgagctttgattgatgatgattttgttgctttggcaaaacgagcagattcacttaaagtgtatgagttcgtgaaaattttaaatacagctcagcaacaaatgcgtttctcgaatcatccgggtatttatgtggaagtggcgcttattcagttaactcaggcgggtcaatcagttgcaggtggcgggaatgtgccatcagattgcagcttctggaaacgacctctctgacttaacacgttaaatggagcatatgcgtcaagagatacaaacgctgataaacaaattgccatggggctggagctccgccgccgatcatccaccccaaatcggcggtggtttaacaaagcaatcatcacagaaaa

SEQ ID NO: 1556 - DNA, 1178 bp, Listeria monocytogenes-4B
agcggccgtccgtgtgctggaaagtttgaaaaagcagatactggagaagaggcagattatgaatttaaagttagcccgcaaatgacataattcactcaggaacattatcagccaggtgtatttacacaagtggttggtgacgtggtacatcaaaaactattttctatgaaaaaacggaatgtagcgatcgaaaatgtaacgatgtatttcctaaaacctgttcaaatggacgcgacaattattattaaaccgcgaattcaggagatggggcgtaaggccggtgagcttgatgtagagctctacttagaacgaattatgaccggaaaagctattgtcgcttgtgaaatgatggaacggtaaaaagaaatagaggcgatacaatgaaaagtgagattgtacaacaaataaaacaatatgaaacgattattttgcatagacatgtacggcctgacccagatgcatacggatcgcacatggggctcgcggaaattatccagtgtagctttactgacaaaaaagtctattcagttggaaatgatgaaaaggcgctccaatttcttggtatagtggacgaaataacggatgaaatttataaagatgcgcttgtgattgtgtgtgacaccgcgaaccaagaacggatttcagacgggcgttttaaccttggtaaagcacttataaaaattgaccaccatccaaatgatgatgcgtatggtgatttactttgggtggacacgacggcttcttcttgtagtgaaatgattgtcgctttttgggaaatgttttcggatgagttaattttgaatgaaactgctgcaagactcctttatgcgggaattgttggtgatactgggcgcttcttgtatccaagcacaacggaagagactttacgtttatctgcgcatttagtgacatttccatttgatcgtccggcgctttaccgagaattatatgaattaccgaaaaatacggtaaaactttctggatatattttgcaaaactttgtcatggatgaaaatggcgctgcaaccgtttatttaagtgatacgcttttaaacgagtttgaagttgatccgcgcgacgcttccgcacttgtttcgtgtatcgaaaatgtggaaggtatcaaggcatggattatgttcattcaacaaggtcccgtttttagagctcgtttacgttct

SEQ ID NO: 1557 - DNA, 1376 bp, Listeria monocytogenes-4B
  misc-feature (1)..(end): n can be any nucleotide a,g,c or t/u
taaatagcggtgcctgtatttacgatttttacagcgatttctatttggattgggattggtgctgcgactcagttttcctttgcgattggggagaaaaatgtcgcgaaagctcaaacgattttcaccaatgcgattctagctgttgtttcaatcactgttattattggttttatagcgtttatttttaaagtaccattagcttattttttaggtgcgaatgatgatacgattggttatgtgctcgagtatatgaatatcctgctcgtatttggatttgcgcttacactagaaaatattttaagtatttttgtacgtaacgatggcgatcctaatttatcgatgattgcgcttattgtaacagcaatcagtaatgttattttgaactatttattcttatttgtattcgaatggggcgttacgggttctgcgcttgctacgatgattgcaatcattatcggtgtactcattttaattacccatttcttcaaaaaatcaagtcgtttaaaatttgtcaaagtggactggaacaaagcgtttttcaagaaaactttagcaattggcttaccgagctttttagcggaagttggggtgtctgtatttacgctaggttataatatttcgattgcggctattgctgggactgctggtgtggcggcgttctcggtactcaattatacgcacagtgtgattttgatgctgttccttggaatggggtccgcgattcaaccacttattagttattatcggggcgcganagctagacanaaagaaatagaaacgttgaaaattgcgattatggtagcgttcagcactggagtaggctttttgctcgttggtctcttcggttccaacttgctcgtttcgatgttcgggaactttagcccggaaattaaagatttagcaagtaacggtatcaaattattctatacagcttatctgttcatgggcttcaactttgttatgatgacctatttccaaacatcggacaaggtaaaaatggctacatggataacgatatcgcgtgagattattttcatggtcatcttcctattagtgttgccaccaatcattggtatcccgggcgtttggctagcaattccaatttcagaaatgattgtagcagcatccatcatattctataagaagaaaaaacatattctatttaaataaaaatgagacaaagatagatgatatcttcgtctttttaggaaattaatactaaatatggacttgaaaaaggtggaagtaagatgaattttcctttttagagattaattgaatgtgaatggtaaaatgaaaatctacgtttccgtttttgcgtctttccagcacaagtgcggccgctcaagtcatgcggctagtgtgcctcaatgagt

SEQ ID NO: 1558 - DNA, 942 bp, Listeria monocytogenes-4B
gatcaattggcagacatcaccgcgaaggtcattgggtctcaatgtcaggttatggcctgaatgtcgctccagctcttgcacaagcgctatgtttctgtttcgatgaatacagtaactcaatcgtcaaaagaagctgggaatatggttgatctgcattctagtcctactaaattaattcatattgtgcggattggcaaacaacttttaattacgcgtggtgcactgacaacatttagtgttgctaatgatttagcgaaatactttgcgattattccagtgctgttttacggtattttcccacaacttgaagcacttaatttaatgggattaaccagcccgacgagcgctattttatccgcgattatttacaatgcggtgattatcattattttaattccgctttctttaaaaggcgtgaagtatcgtgaaatgccggccgggaaattactgagcagaaatatgttgatttatggtctgggcggtttgattgctccatttatcgcgattaaattgattgatatgctgttaactgttttaggaatcgtttaagagggggagaaaacatgaaaagatttatgcaaatttggaagccggcagtagttggatttctacttttgacattgatgtgtggtgtggtttatccgggtattgtcactatttttgcaagtgcagctttccacgacaaagcaaatggcagtataatagaagaaaaacgagcagatggtacgaccggaaaagttggttctgctgaaattggccaaacgtttactaagcctgagtacttgattggacgggcagcaagtgacggggtggcgacaacttaaccctactagcgaagaacaaaaccatgggtggaaaaacgaatttgcttggcggcctaaactatatccgacgaaccatggcgtcctttcatgggtctccctgccgtaacatgcgaggtgg

SEQ ID NO: 1559 - DNA, 1392 bp, Listeria monocytogenes-4B
tatagagcactcaaaccagtcggaattttcattgcttccgggattattgaagacaaagcgaaagtagtcgaagaagcacttaaaaaggctgggcttgttattgaaaaaatggagcaacaaggggactgggttgcgattatttccaaacgaggagtggaataaatgcaacgttattttgtaacaaatgagctagagaatgataacgaaacactatccattactggagaaaacttccatcatattactcgtgttatgcgaatgaaagaatccgaccaagttttcattgtttttcctagcaaaaaaacatgtattgccgctattacagctataaacgatgatgaagtatttttaaatttagtgaaatggctagaagaagataccgaattgcctatagaaatcaccatcgcaagtggtctaccaaaaggcgacaaactagaactcatcattcaaaaaagtacagaactaggcgcacacaaatttatcccttataaagcagaacgatctgtggtgaaatgggatgacaagaaagtcatcaaaaaaatcgagcgacttcaaaaaattgcgcaagaagctgctgaacaatcgcaccggacaatcaatccagaagttcattatgctgctagtttcaaagagttaatgtttgaccatgttcactatgactttgttatcgcagcatatgaagagagcgccagagaaggtgaggacagcgcgcttgctaacttattccaaaccatgaagcctggacagtctgttttatgtgttcctgggcctgaaggacgcattaccgaaaaagagctaatgcaccctccagaagctaatgcaccaactcgcacgactcggtccgagaatgtcaggaacaaactccggcccattctatcgcggatacgcttttcctccctgttccccacccccctaccctccacactcacaacttttcttttcttaccatctctatccgcccctcggtcacatacccgtgaccgtttccctgtgtgaacccccgtttcccttccctgttttatgtctatagattctctcaacccgcaccacaacatccacacacacttaccaacccccccccccacttccctcccaccccccgccgctaccgccctcgcccacgtgttccataccttttctacgcctcccttccacttccattctaatacgagtatgccccctcgacgtcatattccctccacttttgtattattatttctaaccggcggtggatgaagccaacttttacccgttcattctccatcgttcgcgttatttgatatcccactatttcccccccatttggcgctgacgcacacatattgtcgcccactttttccgccatgactctcgcgacgcgttcgccagctctcctcaccacccccatattat

SEQ ID NO: 1560 - DNA, 1121 bp, Listeria monocytogenes-4B
agctcccaatttaatttgggagctttctttatcaattttccgcggcttcaatctgttccaacatatccggcgtacttaaatcacttcttaagaattccgtcgtttgaggtaattgtagttcaaattctgtttgttgcgcaacttctacggtaccttccagcatttcataatcaaatacatgaccgccgattttacgcatatcgtcaataaaatgcacatgatagccagaaacgccaataccgctaatataagcgggcgtccaaaaaccaacaattgtacccgtaatatattcaaaatggtacgttggttgttcttttaccgcttcaatgagtggcggataaggcctttgttgttttggtacaacgcgcgtatccacataacggaaattcccggtcattttcactgcataaaaaacatttggtccttgtactaattctgcgattttttcttccaccgcttgttttgatgtcggttcggaaacggaaaaagaagtatcagcatcaaaaaaagtggtgctcgcataaggtgtcgtatcttctggctttactttataagcttgcccgtctgatcgtatttgaaaagcttctccgtctaaaataattaattcaccatcaaattggtcaagtgttcctataccgaggtcaccgtgttgtaataattctttgaaactcgttgttccgctaaaaagcccaccaacaagtgctgccattgtagaatgctgaaataatcgattttttctaactgtgtccattattgccactccttgcattgttatatatgaaaagttattttttaataatacagtttaatttctatatgttcattatactactttatatccttaaacaaaagattttaaaccaaattttaaaataaactgttactataacaggatagtaaactgtaatataaaaagagttctcgcatcatacgagaactctttttatacaagtaatgtgtatagggtttgattatcattaatcggaatatagctcgggtcaaagcagcaccccgctcaagcaatgcttcataatccattttatcttgcaacaaaacaccgattattacaggcccattacctcgattcacttttttcgattttcaacttggtgatatcgcaa

SEQ ID NO: 1561 - DNA, 909 bp, Listeria monocytogenes-4B
ataattttgtttcacgtgaaactttttggaatgctcagtggcattctttttttttgtggaaaagcacttcaaaagcattatttaaatttttgcgttataatggctctgtaattgaaagcgcttgatagaaaaggaggatgttttaatgagattttttatcgatacagcgaacgtagaagagattaaaaaggctaacagaatgggattcattgccggagtcacgacaaatccatcacttgttgcaaaagaaggtcgcgattttaatgaggtcattcaagaaatcacatccattgttgacggaccgattagtggcgaagtagtaagtttagaagcagatgagatgattgcggaaggtcgagttattgcaaaaatccatccgaatatggttgtaaagataccgatgacaggcgaaggtttggcagctgtaaaagtgttgacagaagaaggcattaaaaccaatgtaacacttgtgttttctgccacacaggccttgcttgcagcacgagctggcgcaacatacgtatcaccgtttttaggtcgattagatgatataggcgacgatggcttagttctaattcgtgacattgcggatattttcgagattcacgggattccaacagaaattatttcagcaagtgtgcgacacccaatccacgttattgaatgtgccaaagccggagctgacattgctacggtgccatttaaagtgttcgaacaaatgctaaaacatccgttgaccgacagtgggattgacaaatttcttgcagattgggaagcggcgaaaaaataaagaggtaggtttctaactatgaatcaaacatttatcgtgaaaaaagaacatgttagtcaatatccaaatcccctttttgtgaataaaaatgagtctatttgggtgtttgaagaagatac

SEQ ID NO: 1562 - DNA, 910 bp, Listeria monocytogenes-4B
aaagttacttctaatttatttgcatcagcaacaacgtgattatttgttacgatgtaggcttttccatttgcctttttataaataacaccagatcctgaggaagcttcttgttcagaagtcgttgttccatcaagggatgaagatgattggtaatttagaacactcactaccgcattttgtactttgtctactgcttttgttacatctgatgttgtatctactgaaactttttctactttggtagctttattatttgagtttgaagttgtatctgcattgtcaccattatcccaagcgacaaagaaaataataagtcctccgataataacaccaataagtgctgttaaaaagtaaccgataaagtgtttgccgcgtttcggtggttcaccattcccgttaccacttccgccattattcactctattaggtggaactgccccgccaccagttgtaccagcgcgtcttggccctggagccggtctagcaggttctggttctttattacttgcttcttcaaaaaatgcatttgtagaactcgcctcggctgcatcttctgtcgctccggcaaatttctccccttctggggtcacgccttctacaataggagtttcttggactggttgcgcgctctccggtgtatgtaaagtatcctcgacctctctttttggcgtgctttcattctcgctgttttcatttaaattcttttctttctcgtccatgtcttccttcctctctgcaaatttcgcatttatatacttccataataaaccccaaatatgaaaaaacgatgaaaaagctgtaaaaaaacggtgaaacttaaatagtgaagatagatgtagcattatgcagggtctgtgtcaaaaattgctagtttaccccaacatcaataccttctgacataagagtttgt

SEQ ID NO: 1563 - DNA, 818 bp, Listeria monocytogenes-4B
aaagtgacagctctttttgtataaataaaaaccgtttttcttaccagaaaattgaaaaccatagcggacatacatttgattgagcgtctcattgctttcgatgcaatctaaccgaatgaaaggaacggacatttcgatacctaatttttccgcaaaataaatcatttgtttacttaatgaaattccggaaaatgctcgagaaaccataatccggtgtaaataatatgctttatcaattgccaaatcttcccataaatccgtatcccaatcacttggcgtttttctatttatcattgcgcccgcaagtgcacccgcttccgtttcaaaaagggcaacttcaccaagttcaatacgttgttcgatattatggacatcaaaaccatgcaaaatatcgctccactgggttgaccccgactcttttaaccagcgagctgtatctatcattaagtcatttattttcagacggtccgttggcgcagcaaagcggactagaaattccagtccgccagccgtaattttattttggttcattgttatcttttggagcttccggtgtttcgggagcttccggagtctcgggtgcctcaggagtttcaggaacttccggcgtttctggtgtttcaggagcctcaggagcttctggtactacaggcgtttcgggttcttttgttgcctctggtccgaagccttctggatgtgtatcttcagcaaatggatcagcttctgttgttccaatggatttacttcttcttccacgatgaccgtttcttctgtaaaagtgccttctgttgctgcgtataaatcatcgtagaacacaa

SEQ ID NO: 1564 - DNA, 1159 bp, Listeria monocytogenes-4B
acctaggcattcccctattggtggattttttgagcaaatcattcggattaggcatttctgcaaacaaaataccggtcgttatttttgtcattatcgcgctgtctttcacggcaggagcttacttaaccgagattttgcgctccggtattattgcggttgatatcggacaaatggattttgcttactctgtgggatatacgcatggccaagcgattcgaaaagtgctcttaccgcaagccttcatgattgccctaccgaatttcacgaatttgtgcatcggatttttacataccacatccatcgctgccatcgttgcagtcccagaaatcactggaatggcaacaatagtagcttccgacaattacgcgtttctcgaagcatttatcggtgccgcactcatttattggtttttaactattttgattgaagcgattaattatattttggaaaaaaatatcgctaaatatcgaggaggaacagtatgattacaattaaaaatattcaaaaaagctttggtgaaaacaaggttttaaaaggaattgatttaacggtgaaaaagggtgaagtagtaacaatacttggcccaagtggctcagggaaaacaacctttttacgatgcctaaacttactggaacgacctgaaaatggtgaaatttcgatgcatgaccaaataattaactgcaagaaaccatccaaaaaagaagttttgcaactgcggaaaaatacggcgatggttttccaacagtataatctcttttcgcacaaaacggtcattcaaaatgtgatggagggtctaacagtcgctagaaaaatgccgaaaaaaattgcacgtgaaatagcagaacgagagctcacaaaagtcggtttggcggacaaatttagtgcctatccttcccaactttccggcgggcaaaaacagcgcgttggaatcgcacgagctctcgctattaatccagacgtcattttgtttgatgaaccaaccgccgcacttgatcctgaacttgtcggtgaagtattggaagtaatgctagagattgcacgtgcgggtgcaacgatgatcgtcgttacgcatgaaatggagttcgccaaacgagtggcagatcaagtcgtttttatggatggtggactaattgtcgacatggtactcccgagaagtgtt

SEQ ID NO: 1565 - DNA, 1202 bp, Listeria monocytogenes-4B
  misc-feature (1)..(end): n can be any nucleotide a,g,c or t/u
tggaaagttaaaaaacgcaatgggtgtagtcggagagcaactttattatcatgctcacggcatcgattatagtcttttaaatgaaaaatatgttccagttagtaaaagctacggaaaaagccaaattcttgaaaaagactatcatgtgccggccgaagtagagattgtcatccgcgaaatggttgaggaagtagcaatgcgtttacgccaaaatcatgtggatactgctgttattcatctaagtatcggctacagtaaatacagcataaaaaaaggattcagccatcaagctaaaatccctcctactagtagtagtcatgcgcttattccttatttcctgcaactatttagacgttacgatgaacgcgaacctgtgcgctccattgctatttcatgcggtaagattactttgaaaacagggttgcagctcaatttatttgaggatgctactcgaactttaaatcatgagcagttagaaataactgtcgacaaaatccggtcgcgttatggttttaaatcacttatgcatgcaagcagtttattaaatggagcgactggcttaaaacggtctgaaatggttggtggtcacaaaggttaacttattctggtttcacgcggaacaagaaatcctctaccattgttgtaaatatttttggttgttcaatttgtaaattatgtcctgcaaaatcaaggatagcaatcgacgcatgtagatatttttcaagcaatgtaagcccgtctgcgtatcccacatgatcatcttgacgcccaaataagaataatgccggcacatcgaattgcgctttttcgtctggatcaaagctcagcgcatagttcgcagataatcggtctaaaaattctccatctgcattaatcattcccgccatcacttccgccaagaaacgattccagtttcttgctgttaaaataacgccactttttgaaaagtacgctcggtcttcttttgatagcgaccgtacaaacgtatcatcttggtacatgactttttgttcgggtagcgttcttctttctttntcaggatagatgactgggcaaataagtaagactccaagtactctatctggcattttcgctgcgattccgcgggctaaataaccaccatacgattctccggcgagtacgaattgctctccccgaattaccgcttcataaattctagtaaaagggtgagtacatggtca

SEQ ID NO: 1566 - DNA, 1224 bp, Listeria monocytogenes-4B
cgacagtgcgctggaaagcagaagcaaactttgtacttgatgggcaactgtcgattttagatgattatgtcgcactgtacccggaaaaattagcggatattaagcaattaattgcggataaacaacttttcattggaccgtggtttacgcaaacagatgcctttttcgcgcatggtgagtcgattttgcgcaatgcgatgattgggatttttgatagtaaaaaatacggcgactatatggaaattggttatttgccagatacatttggttttaatgcccaaatgccgactttacttgaacatgctggctttgataatgtgattttctggcgtgggattcatcttggtgaacatgttgcgtctccatattttaaatggcaaggacttggagaagaagcgtcgatttatgcgattaatatgccacaaggttacggcacagggatgctccttgaaccaacctcggcatatgtggatggacgcctcgacccggcaattgatttcattgaaaagtacagtaaaacaactgaagttttaattccatctgggaatgatcagctgaatattattagtaactttgccgaaaaattagtggaaatcaacaagatgggacgccatgattatcaacttagtacctatcaagattttattcaatatgttagagagctgcctgacttagaagaatatcgcggggaatttagaagtccggttcttgcgcgagtgcataaaaccattggatctagccgaatgaatattaagctaaaaagcgcgtcactcgagcaaaaattgctaacacgtattgagccacttcttgttattgctaaagcatctggaatttctattagcgagcgtttactaatgcatacgtggaagaaacttttagaaggtcaagcgcatgatagcttggcgggctgcgtttctgatccagttgccgaagatattttgcaccggatgaaagaagccgacgaactatgcgatagtatcgaaaacacgattgtgaagaaaattgccgatgatttgtcacttgcggcgaacgaaattatcgtttttaacacggattcacatgattttgacggatgtaaggaaatacaagtagtaaccgagcataaaaacatccatttcccagcgtttccggacgcaacgattgtccaagaagagttcattccatcgcgccaaaatgtgctagaagaaacgccagctgggaatcgatttattgaagaacctggct

SEQ ID NO: 1567 - DNA, 1007 bp, Listeria monocytogenes-4B
gggcttctggaaagttctatcaagatggttaatagatggtgtctatgaggcgtgattgtcgtatgaagaatggataaagttaaacaactatggacaacctcctgtagtagatgaaaattgggaagaagttccacagaagccaatgcttaaaggtgtgtataaaggttataatattaaaaaaggggacattctgattacaaaggtgacatcttcttccggattattgggacatgctgctattgcgaatgggaatgagtatatattagatattcctggggctggaaaaacgacaaggcaagtacctacaagtaaatggatgagtgattatgatccagaaggatgggtaaaagtttatcgcctgaaggatagttctgttgctaatgccgcagccaattgggcggacaaaaactattattccaccaaaggcacatccaaacaaaatattttcccaaaatacggtatgacaggaagtcgatatagtaagaaccctacttattgttctaaaattgtacttcaagcctattatttcggaacaggaaataagcctgttgtgcaagtatttccgtccttagttactgtgtatgatttaccaaactatttttcaaaagcatataagccacaacaagtgaaatactttaaataaatctcatgtattaggaagtgtcgctgaatgaaaaagtataaaaagtggtggataacgattggattagtgttaattattcgcattctcggatgtatccattggtttgccctccctcccgtccggcgcatgatgctctccctgatttcttccctctcctctccattcttgcctcgcgtgtccaatctagggttctccgctccgattggctctcttaggtggtttccctgcccctctgctgttttttgttgtttttttctttctgctctctccccccccctctctctcccgtttttcttcctgctctctccctcgttgtttttcgctcgtttccccttcgcccgccccctataaaataaaaaaaaaa

SEQ ID NO: 1568 - DNA, 642 bp, Listeria monocytogenes-4B
ggttagtgggattatttctagctggctttggtatagcgggtggtgcaactgtctttgcagatgacacataagatgcgccaaaactgaccgactccaagctacgagatccactttcatctaagatacttgataaagatcggaaaagttctcgcagaagtcggatcttttcggcggggttgtattgaatacaaagatatacctgaaacactataaaatgcaattcttataacggaagatgcgcgtttttatgaacatgatggcattgacccaattcgacttggtggagcagtaattgccaatttgacagacggttttggcgcagaaggtgcaagtaccctttcgcaacaaatgatcaaaatgtcctatcttgattacgcaaataacacacttgcaagaaaagctcaagaagcatggttagctcttcaattagaagacaaatatagcaagaatgacatcttagaaatttatgttaataaagtctatatgtcagaccgtgtccacggcatgcaaacagcttccgaacattacttcggtaaaaatttaagagaccttaccttagctcaaacagccaaacttgcaggtatgccacaaactttccagcacagtggcggcgcctccagcatgctctagagtgccaaaagg

SEQ ID NO: 1569 - DNA, 576 bp, Listeria monocytogenes-4B
ccatacagtcacctagcagctgctcgagcgccgacagtgtgctggaaagggatgttggcatttcggtagatacagcggccgatattacaaaagatgccagctcagtcatcttacttgagaaaagcttaacggttttaaatgatgcggtgatggaaggtcggaatgtattcggtaatattctaaaataccttaaaatgacggccagctctaactttggtaatgtttttattgttttggttgcgagtgcctttattccatttttaccaatgctatcgttacaccttttactgcaaaacttattgcatgatttctcccaattaacacttccttgggacaaaatggatcgctcattttctgaagatgccgctttattgggaacaaaaaggaatgttgcgctttattctgtgcattggcccgggaagctcgatctttgatattgcgacatttctaattatgtggttggtattcagcgcgaatacagtggcggagcaagcattattccacattggctggttcgtggttggcttacttacgcaaacattacctcgttcacatgattcctacagagaaaatacc

SEQ ID NO: 1570 - DNA, 752 bp, Listeria monocytogenes-4B
cagcagtgtcgctggaaagctgtgtgatttggtcccattaccccgggaatgatttgaacaagctaacaatctgatctttcacagctggaatgacaaaactaaatagtagaatgagtaaaccgataatcactaagtatagtaatgcaatcgcccaacctcgcttccacttatgtttctctaaccaatcaatgataggattaaataaatagtaagatatcccagctaaaatgattggtgcagcaacggttttaagaattaccattaacggatcaaaaataaaggcaatcttagttaatacataaatatcaagtgctactaaaagaaaaattagtaaccctaacacaaatttgttttctataaaaaattgtttaaactttgtgaatgaccccttcactttaccaccctcttttgtctaaatttattttcgtttggtactattatatagattaataccctcgttctcattaaattacccataaatttggaaaaaatcagacgcaagttgtattttagccttggattaagccgtctggatcaagttcaagtaaggcgtgagcaaagtagaaatgatagtctgcttggaatttctcaaataattgagccccttctttttggtacataactaatggatcttgttgtccatatgctcgcaagtggataccttcgcgtaattgtaccattgcgtccagatgcataacccacatttggtccattaaattcaaataaacttctcgttctattgcagcaatcgt

SEQ ID NO: 1571 - DNA, 665 bp, Listeria monocytogenes-4B
atcccccaaacaatttcgtacaaaagtttggcagaaaaactagggcggccaacagcaagtcgagctgtggcaagagcaaatggggctaaccaattatccctcatcgtcccgtgccatcgtgtaatcaatactaacggagcattaggaggctacggtggcggtcttgcgcgcaaagaatggctaattaaacatgaaaagatggttccaaggtaacgcggaaccatcttttttcaattatttaacccgtattccaaacaacaacatcaaagcaggagcatgcgaaaaatcaatgctcacgcccttcaaatcttgcggcattgcagtgatagactcaaaaatacatgagctaagatcaacaccatttagcgcgcaatttaaaaactgcgctttattcaaatcaagccgttccaaataggtatcgaccagttgagccccgctaaaatcactattcgtatacgcgcccgcctcaaacgccacccatttcaagttagcataacgaaaggcaacataatccgcataacaatcaacaaaaacgcaatttctaagcgtagcatcgctaaaattcacgccaattaatttacaattttcaaaacgaactcggtgaataattgcgcccattaaatctaaattcgacaaatcacaatgtttaaatacaacatcagtcg

SEQ ID NO: 1572 - DNA, 638 bp, Listeria monocytogenes-4B
tacagcatgttcgagcggccgacagtgtgctggaaagtggcaattaaagaagtttctccgttgataatgacttctccttgtgtcggaggaataacacctgacataatactcgatatagttgacttaccagaaccattgatcccaataagtcctactgtttcaccatcatgaatatcaaaagatacgtctcgcaacgcccaaaaggattgcattttttgacttttcggcatgaacaagcctttgatcttatcagatttattttgatagaggtcatattctttcgacacatgtttaaatgatacttttatatttttacccatctgtctaacctcctataaataatccacgaagcgttcgcggaatttcatgtgtagtgtcgcaccaacaaatagtaatgttagcgtgattaaccagaaatacatcgtgtatgatggagattcccagaagcctttattcattaagaatgtctctctaaagccgtttaccacatagtaaatcggatttagtttgagtaaatctactagccattgcggcaacattgtttctaaattccaaacaatccctgttacgtaaaaaagtacacgcatgacagattgcagcataatataatagtctcttactaaaacgctaattgttgc

SEQ ID NO: 1573 - DNA, 1201 bp, Listeria monocytogenes-4B
  misc-feature (1)..(end): n can be any nucleotide a,g,c or t/u
ccgatcgtccacggtgtgctggaaagtcccgaaagcattaacattgtacgacccgatgaacctggtggcagaccagctgcaccaagaattgtccggcatgataaaaatacgccttctttacgcacatcaatggttagttttacatcaggatttttaacattgaccgttaaatcttccatattttgtaatacataagcaccgatttcttggttgagggcattagaatcaagcggaaactcgcggtggctacgtcttgctgcgactttaaatgttccgttctcctcatgcgcatcttgtactaaggcaagtgcagcggcttttacttcctctacatctaaattgacgcgtacagctggactaaaggattggattccgaaaatcggttttaaacgttcttctacgagctgataatctgccccatttaaaataatatacattcggtcacgttctccgtgaatacgaacttccggcaaatctgtcattgcacgtttgacgttttgcgccaactttgtcacaaattgttttctgttttttccttttgtagataactctccgtatctaattaacatacgatcaaattccaatttatttcaccactttatttagattttcaatgatttcttgcagtttttgaataaaaattttcgcttcagataaacgattttcatacgataagctaacacgtactgctcctgttgcttcttcgtccgtcacacccatcgcttttaacgtgctgcttgctagcttctgcttagaagaacacgcactagtggtggaaatgtaaatatcttctttttctaaagcatgtactaaaatttccccacgatgcccttttgccgaaaaacaaacgatatgcggagccgcgacactttgtttcgtatgaactgtcatatcagacatttgcgcaatttccgttagtaaataatcgcgaatctcgattaatgcttcttttaaaaaaatcattttcgagcgttagtcgtaatgcttttgccagcgcaacattcccagctaaattttctgttccactgcggtagcccatttcctgcccaccaccaagaatttctgaatgcaaatgcacattttttcgtttaaacagtattccggttccacgtagagcatgaaatttatgcccctttccagcggactgctggctctcgaaacatgcaganagagttactttcagggttttnnnaaaagttaa

SEQ ID NO: 1574 - DNA, 708 bp, Listeria monocytogenes-4B
  misc-feature (1)..(end): n can be any nucleotide a,g,c or t/u
gggtgtgcgcattacaattgataagcacattcctgtttctgcgggtcttgctggtggtagttcagatgcagctgcagcgctcaaaggattaaatgtcatttgggaacttggtctttcaatagaagaattagccgaaattagttcggaaattggttctgatatcgctttttgcgtatacggcggaacagcgctagcaactgggcgcggggaaaagatttctgcgttacctaatattcctggttgttggattgtgcttgctaaaccgagcattagcgtgtctaccccgactatctataaagaacttcaagtagataacgtagaacacccagacacacaaaaaatgattgaatccattaaaaatggcgatttagacgggatatttgcgtctacaggaaatgtattagagtctgtgacattagaaaaaaatccgcaagttaaacgaataaaagatcggatgttagcgtttggtgctgaggcggccctaatgagtggtagcggtccgacagtgtttgcgcttatcaaacagtcctccagagcaaaacgtgtctataacggcttgcgtggcttttgtgaggaagtctctctggttcgaccatggcgtgaaggcgagaacgatcctcctcttcctcattactgactgagaggggtccctgaantgaaacttatttttaatgcccatgattctggaattaccaccgaaacaaaaaa

SEQ ID NO: 1575 - DNA, 977 bp, Listeria monocytogenes-4B
gctatgtccatcagtgtgctggaaagtcttgttattgaaaatatctttagtattcctggtatccgtagccaattcgtttcttctattcaaacaaatgactatccagttattatgggaactacaattttatttgctgtcatgttggtatttgttatcttggtagtggatattctttacggattgattgatcctcgaatccgtgtgtctggaggtagaaaataatggcagaacataaaattgcaaaagaaagatttcagccagcacacattctggatgcagaagcagagaaaattaatcgtccaagtttaactttcttgcaagattcttggcttcgtattcgtaaaaataaagcggctttagtttctctaattgtattagcacttgttattatcatggcaattgttgggccttatttatcacaaaatctaggaccaaaacatgatattaaccgacaaatcactgaaaatgcgagtcttcctccaaaagttcaaggctttgaaaatatgcctttctggaatggtcatcaatctattggtggagaagatgttgatatttataaacaaaataatattaaagagggtacttactactggttaggtagtgatacgcttggacgtgaccaatttgctcgtatttgggctggtacacgtgtatctcttattattgctgttgtagcagcgctttgtgaccttataattggggttgcttacggtttgatttctggttatgttggaggccgtgtagataatttcatgcaacgtgttttagaagttattggtgcaattccaaacttagttgtggttattttaatgatgttaatactcgaaccaggtattgtatctattatcatagcaatcgcaatgacgagttggataacgatggcccgggtagtcaggggacaagttttaaaacttaaaaaccaagaatttgttatggcttccatgacttactttccaggcacactgattggaccgata

SEQ ID NO: 1576 - DNA, 1671 bp, Listeria monocytogenes-4B
  misc-feature (1)..(end): n can be any nucleotide a,g,c or t/u
acttttggcacactactgcatgcttgacggccgacgtgtgctggaaagtcggacttttctagcagatttagacgatccattccgcaaaatggacactttgatagaagaagcaaaaaaacggactaacattatttttgtggattttcatgcagaaactactagtgaaaaagaagcaatgggttggtatttagacggtcgtgttacggctgttgttggcacgcatacttttgtgcaaacttcggataaccgcattcttccagaaggaacagcctatctgacggatactggtatgactggtccatacgatgctatccttggtatggaaaaggaagctgttatccgtcgatttaaaacagctttaccaactaggttcgaagttcctaaaactggtcgagcagtcttgtcgggctgtttaatcacacttgacgaaaatactggaaaagcacaaaaaattgaccgaattctcatcaatgaagaccacccattttcctttgattaagaatggagatgaaattgtgacagtttcaaaagacgaaatcatgaaaaaagctaccgaacttcgtgatgcgcttcaacaaacggaagaagtatcgttttaccgtcttgccgaggaaagaatcaatgcgaactccaaagtagcagcgaaggtttctaaaataaaattacttcaaaaagaagcagtaaatttagagcattatcaaaaacttgaagcgatgaaacaaaccgaaaaccaaattgataacgttcgcgcagatattgattcacttccgattgtaacagaatttagacgtgaacaagaagacgccaatgatcttttacaatcaattacaacagaaatcacaacaaaagtaactacagagcttgaaaaagaaaattaaccacttaaaactgccaaaacatcggcagttttttccttttgcggtcgcagggaaatgaaactttatgctataatgagaggatgaaaaagaagtaagggatgatgagataatgacagaatatacaccaatgattaagcaggacttggaaatcaaagacaaatctgaagatgctgcccttattccttccgccgacggagatgccgatgaaatgtcnacaagaggatgcactggtcgctcttcacatccccacaaatgacatcaccctgggtcccgatggcgggacccatgagaaccatccccctggtccggcgcattcttttgttgtccggctagctgctgttttgtctgttgtgagcggtatacaggacatgcgcgcctgtggtgtttgcgcgtgtcggtggcgtttcgggcgtgtgctgcggttgcccccgctttttcctctctccccgcggcgcccctctcacgcgcccccgatcctccccacaattccccctcctcaaccctcccccccctacttctcctagccgggtcgtgggccccctagcggcccacccacccccaccccccctcccgtcttttcccgtcctgttgacctcccgtgtgccacccctcgccgagggcgatgtctcgctaccccgccctcccgcgtagtctgccttgcgccagcccgtaccctcctttcccgcccgtcgccacgattgcacgcttatttcgttccccccccgccgtttcttcccacctcccccgcgcgcgtccttccccccgttatggtgaatatagacgggacaccgcg

SEQ ID NO: 1577 - DNA, 1089 bp, Listeria monocytogenes-4B
tgtatgtatatatcctacgtatgtataccctgcaattgattcgggttgtttcgtttcttttgttccttttacgacggtttgagattcttgggtttttaagttactattctctgttgcttgaacaatcgacccaactaacaaactactaccgccaaggacaagaagaaatactaacagctgcttagcgtgtctttttttcaatgtaagaagcccaatgccacttcctaataaaataaaccctagaatgactaaataaatatttgggccaacatctccagcttttaatagtgttccattttgatctttattattgtcagaagtattatctgtatttgtagttggtcctgaagtatttttttgatacacaaaggaatagttttcataatcatttgtaagtgtctcgtttggcttccctttgataatactatttttttgtgtttccgttaatgtgctgatatcaatgtatttatacgtgacattgcttgtatccgtttcagcagcatcaacttgcgaatttccaaaaaggaaacccgtacaaaataacatcactgcgaataagcaaagaatgtattttttcttcatagtgcaatcccttccccatataattaaattctcattttaactgctcactcttcctatcaaaaagagagcaaaactagcgcttaattaagctaaacaattatatattaggcaaaaaacattatcaatgagttagaatgtgtctattttgtgaataaacaaattttcaaaccaattaaataatcttttactagaagtaatactattctattccattccacagtttcatatcgcttaaacaatagaactatatttaaaatctgtacataattgggctaaatattataaaagaactctaaactattagcaagtgtataaatatgtctatattgtgaacgattctattcttttaaaaaaagtgaatctaataatgacctatacttcattaattcttcctaaaaaaagaaactagataaaatgatttctcactttttctagtttcttttttactttatcggctagctatattcactgttgtaaacacgaatttatcataacggtggcgcgatt

SEQ ID NO: 1578 - DNA, 984 bp, Listeria monocytogenes-4B
  misc-feature (1)..(end): n can be any nucleotide a,g,c or t/u
tttaatcgagatcactaaattcatcctaaaagtaaaagacgaagaaactggcaaacctattgtcgatgttatccttgataaagcaggtcaaaaaggaactggtaaatggactagccaaagcgcactcgacttaggtgttccactttccttaattacagaatctgtatttgctcgttacatctctgcacttaaagatgaacgcgtttatgcaagtactgttttatctggcccatctaattatcgttttgaaggcgacaaaaaagcatttgttgaatctgttcgtcgtgcgctttatttcagcaaaatcgcatcttatgcacaaggttttgcacaaatgagagcagctagtgaagaaaacgattgggacttacaatacggcgaaattgcgaaaattttccgcgctggttgtattatccgtgctcgtttcttacaaaaaattactgatgcttataataaagataaaaatcttaaaaacttattattagatccatatttcaaagatattgcacataactaccaaggcgaccttcgtacagttgttgcagaagcagtaaaagctggaattccagttccaacattcactgcagcaattagctactacgatagctatcgttcagaagtattatctgcaaatctaatccaagcacaacgcgactactttggcgctcatacgtatgaaagagtcgacaaacctggcgtattccatacagaatggccacaagtagaagattgatggaagataaggcatccactttaacgagtgggtgccttttttatgagatttgaattagtaaatcatggtaaagtgctaaaaaatagtgaaaatatctatttatgcgctgttattagttgtttttgagctaaagttcgttacaatagtaataggaatatagtgtaatgaccgaaagagagggttaggccanatgaatagaatattaatcgtagaagatgaaaaaaacttagcacgctttatcgaactcgaat

SEQ ID NO: 1579 - DNA, 1171 bp, Listeria monocytogenes-4B
tgcgatttatgatcaattagttaaaatgcaaaactttgagttgcatgatgactttacgcttatttgtattaagcgaactaaataagaagaagtgaagacgtacctcattctttagagagcatttactggtgagtaaacgtatttaaagagtggagcgtttttatttttgaatgttttaattttattagttagggtaaaatcgacagtatacttaaaattagatggggtgaagtgatgaatattagtatagaaataaaagaacgtgatactgaccacatagacatatttgttgctggggagatcgatgcttatacagcgccaaaggtaaaagaagcacttgaagtatatcaagtaaaagagggtatagtacttcgaatcgatttaacagaagtaagttatatggatagtaccggattaggcgtatttgtaggagcgtttaaaagcttacgtcaacgccaaagtgaacttgtcttgtttggtttaagcgaccgacttttccgattgtttgaaatcacaggattgtcagatatcattgaaatcaaaaatgtagagggtgaaatgaatggcaacaatgcatgacaaaattacattacaacttcctgccaagcctgaatatgttagtttaggtagactttcattatcatgaattgcaagtcgcgcaggattttcttatgaagcaattgaagatttgaaaatagccgtaagtgaagccatcactaattctgtaaagcacgcatttaaaggagaagatgatggtgagattacagtagaatatcttatttatgaagacaaattagaagttcgtgtttctgataatggaacaagctttgacttagaaacccgtaaacaagaaattggcccatatgaggtaggggaagatgcggagatgatgcgtatcggaggtctaggtttattcttaattgaaacattaatggatgaccgcgaaactctattatgatgaaggggctacctgttctacgaccattactacccatcaacagctcgcggaggagatcgctccccgctctccctccgcccctcaggccacagactaaccactctcctgcccgccctttactctcgacttgtttctcccaccgatttcctcttcccacctcccctccctgcccactaccttcctcctcccctttgtactaaccccctcccctca

SEQ ID NO: 1580 - DNA, 998 bp, Listeria monocytogenes-4B
aataaacggctcaattttttcgggggctagcttgtttataatcagccgtttcatctaagtgtgcttttcgagtaaaaacaataacatttctcttgaaaagcgaacttaacgaatttttcaaggctttcttcggattctcttctaacaatttatacacatctttcgaaagttccgcagcggatacattcgggaataaatcaagacgcatcttcaccgtgctagcgcctgttttctttaattctcgaaggacgaacatactacaacgaagagccgctggtcctgacacaccaaaatgcgtgaaaatcatatccatttgatgcgtaataatcggcttcccttttgcatttaaaacagaaagggacacatcacgaagcgacgttccttgtaacactttttgtttaataaaaggctcactagacgtaattggcacttctgtcggataaagttctgtgatggtatgtcctgcttttttcgcccaagcatagccatctccggtcgaaccagtccgtggaacagatttaccgccaactgcaacaatgaccgcactcgctgaaatttcttggccgtctttcagcgtcacccctttcacatgtccatcctcataatccacttgtttcacggctgtttgcatgtaaatttttacgcctagtttttccatccgctgaatcattgcctcagcgacagaacgcgcgctattcgatacaggaaacattctaccgtggtcttcttcttttaacgccacgccaagtctttcaaaaaagcgaataatatcttcattatcaaaggcatgaaacgcactatataaaaagcgaccattaccaggaatatgtttaataatttcttctgctggtcgcctgttcgttacattacaacgtccgccaccagacataattaatttacgtcccaattttggtcctttttcattaatagtactcgcttatttttctctgctgcactgatagccgccatactttccagcacactggcggacgctcgag

SEQ ID NO: 1581 - DNA, 705 bp, Listeria monocytogenes-4B
aaagtgccaaagaagataattattagaaatgacttcagttggatggaaatgtcccgcatccaagcaaatcaatttatcccgcgtaattccgtaacccatataaaattcatgcgaaccgacagtataagcctctgcgcctaaaccaaacaacttactttctacagcttcttgggtatatttttcatctaatttttctgcaaaaacttcatctaaagcttccatcaaacgttttctcggggtgtagcgatcaatcgggcaatcttttataccatccggcacccagaaattattaatacttgtttgaccaagttctttcccaaagtactcagaaattttgcgcgagcgtttcccgtgctctatccaaaaatcgcgaacttctttatctggtgacgctaaagtgtaattgtctttaaacattggatgtgaaaagaaagttgggttgaaatccagacccaaaccctgctctttcgcccactctacccatggagtgaaatgcttaggttcaatttcatttaaatctactttttcatctgtatctacgtaaattgcatgtaagttaagtttatgttttccaggaataagtgaataagctttttccaaatcttggcgtaattgcttaggagtatgagccgcacccggataattcccggtcgccatgattccgcctgtaagttcgccatctggatttaagaaacctttaacatc

SEQ ID NO: 1582 - DNA, 1102 bp, Listeria monocytogenes-4B
  misc-feature (1)..(end): n can be any nucleotide a,g,c or t/u
ctatgtccacagtgcgctggaaagtatgacaatcgctttaattgttatattgtctttttctgattaagatggttgaaaagacgagaaaaattagagatgattatctttaaaacatgtttatatgtatatgcttgtggtgtaatcaagtatacaatttttccccttatgttaaatgctttcttgatagaagatacaaaaatatttgtaacagggcgttatatgaatttaattccttttaattcaataagtgaaatgtttattgcagaaagagaatccgctgcttttcaaatagttgcaaatattattatgtttgttccccttggaatgcttttaccattatgttatccaaaattaagatggaaaagtgtttttgctataagttttatagcaaccgtcgggattgaacttgctcaattattacaggatcttatttatcaatcgccctttaagtttgtcgatattgatgatgtaatactgaacttttctgggggtattattggatatatgatttttgttatgtttaggcctttgttaaggaaaatgggattatacccaaatgtataaaaaattaaagacatctaagtaaaattattagatgtcttttttattatagtattgttgtaaagtgcacatcacacaacttcagaactattgtcatatcaacgcgtttaaaaacttattatttgttccaagtgaaataaatctattaatgatttaaccccgtatttgctacaccttaaatagatattaacacaaaggaagtacaacatgaaaaaaatcatcaagattatttttattggatacattatggacgatgattcaaacaaaagaagggatggattcaccgctctggcttccattgctttactaagttaatataccgctcatgaatatttatgcgataaaaatataatattttatatattgagagagataattgtattaaatattcatgggtagttcctattaggtgaacatttagtgaagtatatgtcataaaatgaataaaaaactaataatcgctctaaaacgagtggaaataggcctttttaggcaactttccagcacacgtcggccgtcgagcagctgtagtgcccncatt

SEQ ID NO: 1583 - DNA, 829 bp, Listeria monocytogenes-4B
atgtccctctacatgctgctcgagcgggcgacagtgtgctggaaagtccttctattgaagcaatgtagttaacagagatggcatcgattaataatcgagtgtaccggacaatcggtagcccactagtttttccgaaacatcatgttgttagtttacaaccggttaatgacaaggactttcaaatttctgtagatcatttgagcattttgcaccgggatgtacaagaaattcggtatgaagtatctgcaaaaaaaattcactttgccagatttaaatcatttccattttggcgtcgtgtacacgattcgtttattgaagattaagctagcaggaggaagcatgtgtttttagaatggaaagtcgaaacggaagaagatggactcttacttcgcacgtttttgaagagtaaacatatttcgaaacaattattaactgccgtgaaatttggggcagaggggaaaattgaagtaaataacaaagaacaaaatgttttgtatcacgtaaaagtaggcgataaagtgaggcttacttttccaacagagcaacaaaatgaacgattgcttgcggaatataccaatttagatattatttttgaagatgattttttattaattatcaataaaccagctggtatggcttctattccatcacaatatcatccaaatggatccgttgcaaattttgtcaaagggcattatgaaacgcaaggactgacgaatgctattcatattgtaacaagactcgatcgtgagacgtctgggttaatgttaatcgccaaaaatagatttgctcatgctagattaagtacgtttttgcaaaaaggattact

SEQ ID NO: 1584 - DNA, 1179 bp, Listeria monocytogenes-4B
tccactttctattcataattacaattcgcgcaatgaaccatttacaaatgattatgcagaagactatgatgaagattactatgacgactacatagacgtaagttacggagaatctgttgagatagaaaataatagcacagttaccatttataaacctgagctgactttttgaaggaaggctatgatatttataaagtaaaagtgaaatacgcaaatacaagttctgatccaataagcttctattccgaagacattgcgctttatgataatgcagacgatgattatggccaacaaattacggaagaaggttttgctggagaaattcaaccaggggagacaaaagaattaacgctttactatgaagtgtataaccttggaccatatgatgtagaatatgataactatagctggactacaaataaagaataattaaaagcatctggcgcacaaacccaattgtgcgccagatgcttttttaatactcttcgcggtcgaaaccataatcttgcaaataatgctctttatcgcgccagtttttttgaacttttacccaaatttctaagaagactttggagccgagtaagcgttcaatttcttttctagcacgcataccaatttgttttagcatttgaccttgtttaccaataataattcctttttgcgtgcttctttctacaataattgtagcattgattgtaagtttttctgttttagggtttttttcaattccttcaataaccactgctaagaatgtggaacttcttctcgtgttaattgtaaaacctgttcacgaattaactccgagatgatgaaacgctcaggatggtccgtgatttgatcttttggataatacattggtccgatttctaagttagcattcgtttgttctagtaagttaggcacgttatttccttgaagtgctgaaataggaataatctcatcaaagtccatcaaatcgcggtactgttcaattaacttgaataaatcttctggagcaattaaatcaatcttattaatcaaaagaaaaacaggtgtttgtacgtttttaagtttttcaataataaattcatctccgcgtccaaatccggtagatgcgtcgattacgaaataaattaagtctacttcttggaacgtatttagcgcaatcttcaccatgaaatcgcctaatttatgctttga

SEQ ID NO: 1585 - DNA, 1091 bp, Listeria monocytogenes-4B
attaatcattttaccgttattcacgggcttccaacaacaagtacggacacgacttccggaagaagcaagccgtaaaattgctgttgaggtaacaacattagcgacaattattgctgtagctggtttattaggaattgtgatgccagtactgacattgttcgctttcatgttcgctgtaattggtcgattttggatttcttatcgccattatcgttccgaaaaattagcaccaaagaaatttggtcctcagccagatgggcttgtagttctgggtgctcgtgcggccactccgtctgcgcgactaaacttgaaagctggtgaaaaaattacagaagtaaacagtcgaccagtgcgtactcgcgaggaactttacgaagcgctaaacttaaatcgagcattttgtaagctgaaagtaattgataacgctggtgaaccacgttttgaacaaacagcactttatgagaatgaatcatttgaacttggtttgttattagtagagccaagataattttaggacaccagtgttgtttgaaagcagcattggtgttttaagtttttgtaaagataagattaatataaaggcatttctacccgaaaaaggttaattcatgctatattttagataaaagtgttacataaagaagggatgggaagtacgttggtaaaaattcttgtagttgatgatgaagcttctattgttacgttactgcaatttaacattgaaaaagctgggtttgatgtggtaacagcagaagacggcagaaccggatacgaactcgctttgtccgaaaaaccagatttaattgtgcttgatttaatgcttcctgagatggacggaatcgaagtaacaaaaaaacttcgcccagataaagtgaatgtgccaattttaatgttaacggcccaccatgaccaattagatcaaatcctcggactggacctcgcagcccacgactctctgaccaaaccgtttttctccccacaagtttcccccccacctcccgccgccccgcccccctcgttgccgctctccccccccctcccccccctgcgctcgtatgcccttcgcccctctcctctccttccctccgtcg

SEQ ID NO: 1586 - DNA, 980 bp, Listeria monocytogenes-4B
gaccaatcgtccaccagtgcgctggaaagcttcactggtaaaactactaactggaaagacgttggcggtaaagacgaaaaaattacaatcatcaaccgtgcggaaggaagcggaacacgtgctactttcgaaaaatggggacttgatggtaaaacaccagttaaagcacaagaacaagattcatccggtacagttcgtaaaatcgtttgtgaaactccaggagcaatcagctacctagcattctcttacattgacgcttccgtagttggactttcattagatggccgtgaaccaactgaagataaagttgcaactaacgactggaaaatctggtcttatgaacatatgtatacaaatggcgaaccaaaaggcttaacaaaaacgttcttaaaatacatgacttctgatgaagtacaaaataatatcgtaccacaacttggttaccaatcaatcaaatccatgaaagtggaacgtgatgcatctggtaaactaactgacgtaaaataaaaagaatgaaatgggcgtctatcctagtaataccgggatagacgtatacccatgttaggagtaaacatgggaggagaaaggagcttacgtgacttggaagcgataaaagaaaagaagcttacacaaacttctaaaaaggcgcatctagaaactagaggcaaaattattacattcatctgtatttcaatcatggttattgccgcagcgtctattttgttttttgttatatcgaaaggtttagcaacatttacagttaataaagtgtcttttgttgattttataactggaacagactggaatccttcgcaaaaagatgcaaacggaaatcctctagttggcgctttgccaatgattattggttcttttgcagtaacgctttttgccgcttgtattgcaggaccacttgcaatcggtgcagccatttttatggtggaaatctcacctaagtttgggaaaaagattttgcaaccagt

SEQ ID NO: 1587 - DNA, 776 bp, Listeria monocytogenes-4B
gtaccgcgaaaactagacaatatggctaatttgtctaaaaaccagacataagcgttcttttgcccagattaaaagcgaacgacaagcggtatactatctgtatcaagaaattggaggagatagtgatgaaaaataaaaaacgtacgctagtcgctctaactggggctgcaattggaacaggtattgccgcaaagaaaatttctgaacaaaaggccgctgaaaaagaacgggcagtggatgaagcaattaaggcgcgctattacggcgacaaacaagtgtatttcgtcggtggcgggattgctagtttggcgggggctgtttatttaattcgtgatgccaattttgatgggaaaaatattcatattattgaaggtatgcatattttaggcggaagtaatgatggagctggaagcgtggaacatggctttgtttgtcgcggtggtcggatgttgaatgaagaaacttatgaaaatttctgggatttatttagtagtattgcgtcgcttgatatgccgaactttagtgttactgaagagattttgaattttgaccatttacatgcaacccatgcgcaagcgagattcggtcgtgaagatcgcagtgtgctgggtgcgcttgtggtgggatctaatcatgatgaccggctgtcgatgacgaatctggtggctgctccggcggacaactgggggttccacggtgcgcgctcgccgcgcctgcgctgggctcgccgcgtcggcggctctccgttctgccttttacaacaaaaacaaaaaaaa

SEQ ID NO: 1588 - DNA, 991 bp, Listeria monocytogenes-4B
attagaaatctattagaattacgaggggaaaatgagaaaaatgaagagactaacttgggatgaaacaaagataactgcttttcaagaagcactcgtttcctggtatgaagcgaataagcgcgtcttaccgtggcgcgaaaataccgatccttacagaatttgggtctcagaaatcatgcttcaacaaacaaaagtcgacacagtaattccttattttaatcgctttatgactcaatttccgacgatggaagattttgtccaagcggatgaagcggatattttaaaagcgtgggaaggcttaggctattattctcgtgtcagaaacctccaaacagccatgaagcaagtgatggccgatttttctggagaagttcctaccgacttaaccactattttatcgcttaaaggtgtgggaccgtatacagccggagctatcttgagtattgcctacaaccaagctgaaccagcagtggatggcaatgttatgcgtgtcatcgcccgcgttttagaaattagtgaagacatcatgaaagtgtccacccggaaaatttttgaagaagtgttatatcaactaattgacaaagaaaatccagccgctttcaaccaaggtttaatggaaattggtgcgcttgtttgtacaccaacaaaaccaatgtgtatgctttgtccgctccaaccgttttgcgaagcgcataaaaatggcgttgaaacgaattatccagtaaaaataaaaaaagtgaaaacgaaaaccaaagaactattaagcatcattgttatttcagaggacggaaaaattgccatagagaaacgaccagaaaatggtttgcttgcaaatatgtggcaatttcctactattgaaatttcgaaaaaagaaaatgaggaagtagctaaactacaatttttacataattatggcttagacgttttactagaagacgaaccaattgcgcatatcaaacacactttccagcacactgctggacgatagccg

SEQ ID NO: 1589 - DNA, 710 bp, Listeria monocytogenes-4B
gaccaacaatcattcccacttgcactcttgcagcagccaaatccccgtccgccaaggtccgctgtattttccgagcctctttcgcaaggcaagtcatcgcaagcgtcgtatagcctaagtaaacaaaaacagctacgtaaagccagtaagcaattttggcactaagaaatagaatgaaccaggatacaactccagtcataccaaccgtgagaacaaatagcaatccaccggcaaaatacagtgatttaccatgaaagatttttcgtaaaataatagtcaaccacttaatcaagttgccgatcgctttaataggatgcggccagctatatggatcacctaataagcaatctaaaatgaatgatgacgtataaaataacaatatcatcgctctatcgctccaaacatatgcgttattatcaatagattttgatagaaatggatatgcaggtaactagcgaacgtattacctttttgataaccgccgtgccattctttgacaattttgccatcccgctttttcgttaatttcatacgtgttggttcggtcgtttcaaaaacagaatgatgaaattcatgaccgcgaatagctgtcccttttttaccaagtagtgtgtcttctaaaggttcggcgatacagtagccaaacttccgaagccgcgttgtcatcttactaactccatcaaaaacccctaccatttcataggattcag

SEQ ID NO: 1590 - DNA, 752 bp, Listeria monocytogenes-4B
aactgccgtcacttagcagcatgctcggcggccgacgtgtgctggaaagttggtaaaatacgtaacagccaatttcttgcagattggctgtttttgcgcacttcctctgataatagaaagggagattaatagtgaagaaagaaacacatggcgagattcgtcgtgacttaaaaacaaggcatttgtccatgattgccattggtggttcaatcgggacgggattatttttagcaagtggttatgcgattcatacagcaggaccaggtggcgctttagttgcttatatagcaatcgggattatggtgtactttttaatgacaagtttaggcgaaatggcaacttacatgcctgtatctggttcatttagtacctatgctagtcgatttgttgacccagctttcggttttgcgcttggttggaattattggtttaactgggccattacacttgcagttgatatttccactgctgcaattatcgttcaattttggctaccgaacacccccgcttggctatggagcgcgattttcttaattttgattttcggcttaaacgcgctttcggtaaaagcatacggagaatcacagtattggttttcaattattaaagtggccacggctattattccgcttatggaccgggtgctaactatagcccgcatcctcgcccgtgatcgccttggatccactaactccactgctggccatccccgcacccaggccgctccccccccatacccacatcaccaaaaa

SEQ ID NO: 1591 - DNA, 696 bp, Listeria monocytogenes-4B
  misc-feature (1)..(end): n can be any nucleotide a,g,c or t/u
gtgcgattttggcaacgagcctttattttctcggtttcttcgggatttcggatgagaagtctggttatacgctagcaattgcgctgattttatggtttacagtgttatttgcgaattttgcagaggcgattgcggaaggtcgcggtcgagcacaggcggatagtttgaaaatggctcgaaaagacgttttagctcgaaaattgaagaatattgatgataaaactgatgtgatcgaaattgcttcgaatgacttgaaaaaaggcgacattgtgtatgtccttgcaaatgaacaaatcccgatggatggcgaggttattgaaggtgcggcttcagttgatgaaagtgcaataactggggagtctgcccccgtaattcgagagtctggcggggatagaagtgccgtgacgggtggaactacgcttgtttctgactggcttgttgttcgtgtgacggcggtctctggagaaagtttcttagataaaatgattgcaatggtggaaggagcttcacggaaaaagacgccgaatgagattgcgctacaaattttgcttgtaacgctttcgattatttttttggcagtttcagcgacgcttttaccatttactgaatttgcgagtaagcaggcgggtgctggatcggncatttcgattacgaatgtgattgctttgcttgtttgtttggcgccactacgattgg

SEQ ID NO: 1592 - DNA, 1140 bp, Listeria monocytogenes-4B
gtcgttggtcactggcagcatgctggagcggccgacagtgtgctggaaaggcgtcatcgtaagttctacactagtaccttttgtgcgaggggaggcagcaggaacgagccaaacttcagtaagtcacgcaggaatgactttatcacaacaacaatttatacaatccatagcaaatgatgcacaagatctacaaaaagaagaaaaaatattgacgagtgtcactttagctcaagctattcggggatccaattggggtaaaagtggcttatcaacttcagctaacaacctgtttggaattaaaggaagctatgaaggaaattccgtttcaatgggaacgcaagaatttagcagcgggaaagcctaccgcacacaagctgatttcagaaagtatccagacaaaaaagcatctttagtcgatcatgcccaactttttgttaatggagtatctggtaatgcaaatctttactcagcggtcatcggagaaacaaactataaggaagcagcatacgcaattcaagatgcaggttatgcaactgacccagcatacgcagaaaaactcatttcaactattgaaaattacaatttggatcaatatgaccaaatttacgatacagtgacatcaacagaaaaccaattagcatatgcggaaattaaagattctagcaatgaaacaatttggacaaaaccatataatacagagggtgcagaaaaaacaggtagtgtcaaagattacaaaaataaaagccttcgaatttctcaaaaagctgtcacagaaaaaggaacatggtatcagcttctaaatcaaggcgaaactattggatgggtaaacagtaatgctgtagaagttttttataccccgaaaaatgaaacaaatgtgaaactagataaatatatcaccgattcggatcaaaaaatctatgcttacccagtagaagataattcaaaagtagtcacaaatcttaatgattatctagggaaagaattagatattgaccgtcgtgcagatgtgaaaaatgaatattggtaccgtattaagtcagacgatgggaaagtaattggctggtcaaaagcagacggttttgctggaaacaatgctaataaagcgttagaagtaaataataaagtagaaatacatatgca

SEQ ID NO: 1593 - DNA, 1093 bp, Listeria monocytogenes-4B
cggccgcagtgtgctggaaaagtgggctttatcactacagatacttttcggtcaggcgcagtggagcagttccaaggttatgcggacaaactcgatgcggagcttatcgttgcgacgagcccggctgaactagaagaagctgtgcagtatatgacgtatgttaactgcgtggatcatattttgattgatacggttgggagaaattacttagccgaggaatcagtgagtgaaatttctgcctataccgatgttgttcatccggacttaacgtgttttacattttcttctggaatgaaaagtgcggatgtgatgacgattttaccaaaactagcagaaattccaatcgatggttttatcattacaaaaatggatgaaacgacgcgtattggtgatttatacacggtgatgcaagaaacaaatttgccggtgttatacatgacagatggacaaaatattacggaaaatattttcagaccaaaaagtcgttggttagcggagcggtttgttgggacagatagaaggcgggtgctggaatgaaggggttatacattggcgcagcagggatgatgaactacatgcaacatattcaagttcattctaataacgtggctaacgcgcagacgccaggattcaaatttgatcagcttacgagtgaagtgatttcgcgaaacaaagtgaactatcaaaatgggcctgtcgctaggcaagttgggacaattgattacggtgttcgacctgctgcgacgcatattaatttgacagcgggatcaagctatattacgaaccgcgaccgagatttctttatgcaagacacggatcctacgcaaggaagtaattttttcatcactgctaaaaatggcgaaatttcactttcacgtggcgggcagtttcactccgatcagtttggttttctgcggacagcagatggcgccaatttactcagtgcgactggggaagcgattcaagtggggcaaaaaacgtcgattcgcgccgaagcaaatggtgatttatacaatgcggaaacaggtcaatacttgggccgccttggaaccaaatttgtttccgctaatcaagcagatagtttggtgaaaga

SEQ ID NO: 1594 - DNA, 1169 bp, Listeria monocytogenes-4B
gcctatcgtcacagctgtgtgctggaaagtgcgtaaagtgaaggtgctatattccagcaaaatggtgtattccattttggtagataagaggagctggatatgttcgactttccacttctctattctaaatagagaagttttttattgttttcatgaataaatctggataatcacacaacatactagggaggaaaaaagatgagaaaattaacaaaagggttaggaattttacttgcatcaagtcttgttttaggattagcagcatgtggaggaggcagtgacgacaaagccttaagcacagaaaaaattacaattggaacaacagcaggacctcaccaacaaatcgctgaagaagttcaaaaattagcgaaaaaagacggtcttgaaatcaaaatcaaaacatttgatgattataacacgccaaatacagctttaaatgatggtgatttggatgcgaataactaccaaacaattccatttttagagcaacaaaagaaagataaaggctacaaattagacgttgcttttaaaacagtagcattcccaatgggcatttactccaacgatattaaagacttgaaaaatcttaaaaaaggcgacaaaattgccgttccaaatgatccaagtaacgaataccgtggtttaaaactgtttgaagatgctggcgttattaaattaaaagatggtgtggaagaaaaagcaacgaaaaaagacattgctgaaaacccgcttgaccttgaaatcgttgaacttgaagcttctcaaatacctgcacaattagatgaagttgcagccgcagctatcaatactaactttggaatgggcgctggactttctattaataaagatgccatttaccacgaacctacaaaagacaatccatatccaaacgctttccctgcttgccgcgtcttctcacactatcaacgggctcaacccttcgagacctgtccccccttccatcaaccccctgcctgctttgccccacaatctcccggcgctgtctttccctccctccttcggcgcccttccctctctcttccctttccccccccttctccccctcccctttcgtccttgtcttcctctcccccctgccgttccctgtcctttccccggttctccccccctcctccctcccctccccccgataacaacaacaaaaaaaa

SEQ ID NO: 1595 - DNA, 1251 bp, Listeria monocytogenes-4B
aatccatgtcaaagtaccgcgcgaccttcttatggttccgatggatggcacgttaattgagcaagtccttattaatttaatggaaaatgcgctacgtcatggtggaactggtgcagaagtttgggtagacgtgacgaaaacgaagcaaagtgcgatttttagtgttcgtgataatggaaaagggattgcggaaaaacgcttgccagatttatttgatacttttgctgtggaagcgagagagcgttctgatatgtcacgcggattaggacttggtttatcgatttgtatgtcgattattcgagcgcatgacgggactttagaagcgaaaaataacaaacatggcggggcgacattctggttcactttgccactagacggaggagatggaaaatgaacagcaaacgacttgtgctaattgtggaagatgaagagggtatcagtaattttatttcagctgttttgactgcgagtgattactcggtgattaaagcagtgaatggaaaagaagcgctagagcagacagcaagccattcgccagatgttgtgctactcgacctaggtttgcccgatgtagaaggactagacgtgctccgtgatattcgtgtttggtcaaaagtgccgattattgttgtatccgcgcgcgatcacgaacgagagaaagtgacggcacttgaccttggtgcagatgattatattacgaaaccattcggcacatcggaactactggcgcggattcgaactgccctaagacacattcaaccaagcagcaaagaagcgccaaatgatcatattattcgcattcaagacctgtatattgatgacgaccgccgacttgtcaaaatgggagataaggaaattcattttacgccaattgaatataaaattttgcttctattagctcgccacgccggaaaagtccttacgcatgattttattattcgcgaaatttggggaccttatccaagtgaaaaccaagcacttcgggtcaatatgagtaatatccgacgtaaaattgaacaaaatccggcagaacctgcatacattttgacagaagttggggttggataccggatggcagaagaataataatatgttatgataaaaataaacgccaggaggaattaatatgcataaaacaatccgtagcgtagacgtttattatgaaaaatatggtgaaggaataccgataataatgattcatggttttggtcctgattcgcagctgatgattggttgcatggagccggtctt

SEQ ID NO: 1596 - DNA, 1165 bp, Listeria monocytogenes-4B
ccctcgttcgtcacctacagctgctcggcggccaacatgtgctggaaagcgactgttagttcagcgacttctaccgctcaagcgccgctggatatgatagcgtaacaatttcaatgactggcggcgcagcagttccagtaatggcagctaaagatatgcaaacagctacaccgaccaactttaacgatgaccaggggatgggcacatggacagatagctttggcctccaagcagtgtccgtaacagatacttccaaaccaaaattatccattccgaaaaacgtcgttgtcgctgatggaacttatcaaagtacattaacttggactttaagcgatacaccagcagtttaacatttttaagagaaaacttcatttttggatgttgttttctctttttacattgagcaattaggaggaaagagacacttgaaaaaaatatgcgctatcatctttgcttgtgtgctagctattctttgttttccaggacagcaggcgtacgcatcagaaaatagtagtttttccgtaaaagcaattctccctgacaatgaggcttctggtgtgacctatttcgatttacaaatgaaaccgaagcaaaaacaaagtttaaatgtagaagttacgaaccagagtcaagaagaaatcaccgttaattgcgttggcgatgcagccgctaccaatgagatgggctacgtggattattccataccaattacgaatccagatcaaacgttaaaatacccctttgcagatgtggagaaggaaagtgtctgtgaggttacacttacgccaaacgaaaccaaaatttggacaggggctattgatatgcccgctgaaaactacgacggtattattttaggaggatgacgttttcatgaaaagaaagaggaggatgaagataaagactccagcgacaacgatgtccatgttaaaaatgaatacgcctacgtcattggtgtcgaattaaccgaaaaaacgaccgccgccgagccagaattagaattaaatcaaattaaaccagcgaccagaatctccgaatgtagtgaatgaattgatatgcaatcacttattgtgactgcgtgtggattttatatgacgaagtactattatgaatagctggcatcattatattggtgaagaagccgagatctagtgatgggccggaaaca

SEQ ID NO: 1597 - DNA, 1037 bp, Listeria monocytogenes-4B
  misc-feature (1)..(end): n can be any nucleotide a,g,c or t/u
cgacagtgcgctggaaaggggctaaaagtagcgaaaattcatggtgatgtaaaccctcgtgaacgtaaacggacgatgaaacaaatcgaaaacttagattatcagtatgttgttgcgacagatttagctgctcgtggtattgatattcaaggaattagtcatgtcgtgaactatgagttgcccgatgacttatgttttctacattcaccgtactggtcgtactggtcgtgccggacattctggtattgcacttacattatttgaaccagctgatgaagaccgcttaaaccaattagaaaaaatgggaatcgaatttaagcacgttgactggaaaaataaagaatttgttacacttgaagaccgcaaccgccgtgccaaacgtgaagcgaaacgcgaaacagctgaccctcgtgaaatcggtatgcgtaaaaaagcaaaacaaaaaggtaaaccaaactataaaaagaaaattaactacaaaatgaacgaaatcaaacgtcgtgaaagacggaaaaaacgataagtgaggaatgaatttatgctaagattaggttctcatgtatcaatgagtggtaagaaaatgcttcttggcgcaagtgaagaggcagcttcttatggctcaaatacgtttatgatttatactggcgctccgcaaaacacgcgtagaaagccaattgaagaattaaatattgaagccggcttagaacacatgaaagcacatgatatggctgacatcgtcgctcacgcgccgcctttcatccatattggccctcccccgccgcccgacnnctttgccctccgcgccctgttcctcgcccctcgcgcctcgcccgccctctcgcccccgcggcccctctctttctctgtctttcctcctcctccccgcccccctcctcctcctcccttctcctctcccccccctcgcccccctgcctccgccccctccccttcctcgctccgtgcgccctcctccctccgcccactcgttccccccctccgcgcccctcccccctcacacaaaaacaaaaaaaaaaaaa

SEQ ID NO: 1598 - DNA, 956 bp, Listeria monocytogenes-4B
  misc-feature (1)..(end): n can be any nucleotide a,g,c or t/u
gaacgatggttgaaaaaattggtcaagtgatgttatatgtagaaaatcaagctgcagtgagagatttttgggtagaaaaattagattttgtcgtagtttcagaagaagtggtaaatggcgaaattcagtggattgagatagcgccaacaaaaggtgtagaaactacttttgttcttcaaaacaaaaagaaagtggcggaaatgaacccagaaatgaatcttgggacaccatctattttactatttggaaataatgtcgcagaactttatgaagaatataaagataaaggcattacggttggtgatttggtcgatttaccaatgggccgggtgttcaatttttcggataacgaaggaaattactttgcgatttgtgaaaaataataggagaaaaagccagatgacagtctatttgattgtcatctggctttttttagatagttggaactaattgtttctcagctaatgctgcttgagctgctgcaaggcgggcaatgggaacgcggtacggggaacaagaaacataggtaagtcctaattgatggaagaactggatagattccggatcgccaccatgttcgccgcaaacccccatttttaaatgttccgaagtcattcgtccacgtgtaactgccatttcaactagtgcgccgacaccatttttatcaatcgaaacaaatggatctttaggtaaaatatctttttcataataatcggctaggaacttggtcgcatcatcacgtgaaaaaccataagtgagctgtgttaaatcattggttccaaagctaaagaacgctgcttnctcggcgatttcgtctgcagttacacacgctcgcggaatttcaatcattgttccgatatcatagggaatcaccacttgttctctatcaaaaatagcttggactgcttgttgcaggttttttttattagctanttacgtttttctaacatgagtga

SEQ ID NO: 1599 - DNA, 756 bp, Listeria monocytogenes-4B
ggcataacgtcacttacagctgctcgagcgccgacatgtgctggaaagtgttctgcagttttgccagttttttccatgatgaaaggaataagcgcagggtcaatgttaccagaacgagttcccatagaaacaccagctagtggtgtgaatcccatggaagtatccattgattttccgccttcgattgcagcgatactagcaccattaccaaggtgacaagttagtacacgtaattcttctacaggacgtcctaaaagttctgcagcgcgttctgatacatatttgtgacttgtaccgtggaaaccgtatttacggataccatagtcttcatagtagctgtatggcagactgtatagataacttgctggaggcattgtttgatggaaagctgtatcgaaaacagccactgaaacaacatctggtaaaatcttgcggaatgctttaataccagtaacgttcgctgggttatgaagcggcgcacgtccccatagagcttcgatatcttcaattactcggccatcctataaacggcttcagggaatctttctccaccgcgaacaacgcggtgccttcccccctcctgcccccccgccccttttcccccccccctccccccccccccttgcccctcctctccttctcctccccccctccgcccctttttcccccctcgccgcctcccccctctcccctcccttcctccccccccccttccgcccttttctcctccgtccctaactaaaaaaaaaaaaaaaa

SEQ ID NO: 1600 - DNA, 702 bp, Listeria monocytogenes-4B
tacggctttatcccttaatccagtatgaaatgtgtagatcgtgagcgtatgtctattcaagatatgactacaattacaccgcaacaattgattaatattcgcccagtagttgcttctatcaaagaattctttggtagctcgcagttatctcagttcatggatcaaacaaatccacttggcgaacttacgcataaacgtcgtctttcagcgcttggacctggtggtttgacgcgtgaacgtgctggttatgaagtacgtgacgtgcattactctcactatggtcgtatgtgtccgattgaaacgccagagggaccaaacattggtttgatcaactccctttcttcctttgcgaaggtaaataaattcggctttatcgaaacgccttaccgccgcgtagatcctgaaacaaaccgtgttactgataagattgattatctaactgcggatgaagaggataattacgtagtagcgcaagctaactcgaaattagacgaacaaggtactttcacagaagaagaagttatggctcgtttccgttcagaaaacttagcggtagaaaaagaacgtattgactacatggatgtatcgcctaaacaggttgtatctgttgcgacagcatgtattccgttccttgaaaacgatgatagtaaccgtgcgctaatgggggcgaacatgcaacgtcaagcagttcctcttatgcac

SEQ ID NO: 1601 - DNA, 877 bp, Listeria monocytogenes-4B
gaatgtccaccgtgtgctggaaagtgtcatcgtcatattattattcgagaattgattacatccaatgagattgacacgcaagaagatttagtagaacttctgttagaacgcgatgttaaagtcacccaggcaactgtttcccgtgatattaaagaacttcatcttgtcaaagttccaacacaaacaggtggttacaaatacagtctacctgccgataatagttttaacccacatcaaaaattaaaacgtgctttgattgattgctttattggcattgataacgtgcaatttatgattattttaaaagtaatgccaggaaatggaaactcggttggtgcattaatcgataacttggactggccggaaaaagccggaactatttgtggagatgacacttgtttaattatttgtcgctcggaagaaaatgcgaaaacattaacagatcgttttatagatatgctttaaaatttgttggaggtgaaagattttgcttcaagaaatgacaattaaaaactttgctatcatcgaatcgctttctttaacttttcaagaagggatgacggtacttacgggggagaccggcgctggtaaatcaattattattgatgcgcttggtcttcttgttggcgcacgcgggtcagctgattttaaccgtcatggagaagaacgtttagaacttcaagggctttttgcgcaaacagaggataacatagctcgccgaaatgcgttaattgaaaatgggatagatgcttcggatgatatggttgtactagaacgcagcctgtttcgctcggggaacaatagttgccgaattaatggcaaacttgtaactaccgttctcttgcgccagaccggctggcaattaatagatatccat

SEQ ID NO: 1602 - DNA, 1167 bp, Listeria monocytogenes-4B
tatcaggaggtcgaggtggtataataataataagatggaatggcagggagtcagatgtacaaacaaatgaaattaaaagctacagatggactcgatttgcatttacatatttgggatgaagtgaaaaatccagttggtgtagttcaaattgttcatgggatggcagaacacggggcaagatacggcttgtttgcggaacgtttgaatcaggctggatatattgtcgtagccgatgatcaccgtggttttgggaaatcagccatagatgaggcatctttaggtcatttagatggagaaactggttttcaaaatatggtagaagatgaggcggtagtaagaacttatttaaaagaaagctatcctgaattaccttacttcatttttgcgcacagcatgggaagttttattatacgaacctttatggcaaaacaccaagttgatggagtaattctcagcggtagcggacttcaaccgatagctcttttaaaaatgggccaaatgattacaaaacaaagagtgaaaaaagatgatagaaaaagaagtggttttctaaataaattagcattttggggttataataaaccatttaatgaaaatcatcgttttagttggctttcgcgggatgttgcgatttatgaagcctatgaacaagatccattttgcggtccagtagttggaacaagtggttttttccataacctttttgaagccgtaaaggtaagtcaacaaaaagaaacattggaaagtgtgccaaaggatttgccagtgttgttgctttctggaagtgatgatccggtagggcatttcggaaaagacacacctaaaattgctttatccttagaaaaagctggggtagaggatgttacttataaaatttatgaaggtgctcgtcatgaactggtgaatgaattatgtaaagaaactgtttttcaagatgtaattgattggttggatgaaaaaagaaggtagcctaaaatcataggctaccttctttttaattacggatttgaccgtctccaaaaataatatatttagtcgatgtaagttctgttaagcccattggtccacgtgcatgaagtttttgtgtactaatgccaatttcagcgccaaatcccatgggcaaaccatcagtgaatcgagtagaagcattgatataaacggctgctg

SEQ ID NO: 1603 - DNA, 1265 bp, Listeria monocytogenes-4B
  misc-feature (1)..(end): n can be any nucleotide a,g,c or t/u
agaagtaaagcgttccaaaaacggccgatttatattagaacccgagcttacagcgctattttctgagaaagaaactcgagatccgagcgtagaatacttaccttctgaaaatgaacgtgccaatttaattttgctaatgcttttaacagccaaagaagaactatccctcgcccattttacaacgaagattcaagtaagcaaaaacaccattcttcgtgatttaaaagtagcgcaaaaattacttcctaaagaaacaactgtcacttatagtagagcatcgggttatcagttagcagggagtgaatgggaacttcgcaaggttctgacacaagttgtaagtagtgtgaaagagatgttccgaggagagcactatttcctatcgtattcaggaattgaaaaagtccaactaatggaaattcgccgcacactcgaagaagcagaagcgatgatgcaaataaaattcacctatgagcaaatcgaattattaccctatttgctatccgtgatgttcttaagaatcagagaccggcgcttaatcgacactgcttttcatattgacgagaaatcactttcagacacgcgagaataccacatcaccgatattttgctcgaaaaaactggcccagttccagaacaagagcgacttttcatcacattacaacttcttacaacaaacattttttccggcgaaattttaactgaaaaattaacagaagacttggaaaaagttgtcctcacatgcttagacttattcgagaaaaaagcacttgtttctcttaaaaacaaacatatcttaatcgaaaaattactcttacatttaaaaccagcctattaccggattaaataccaaatgaatttagaagatacgctttatgaaaaattcaaccaagaattcgaagcgttaaacttcattgtgaaagaagcatttgacccacttgcgaaatttattggtcgcgaaattccagccggcgaaattttcttcatttctttgtttattgggagcgacatgataccgcaaaacgatatttatcataaacaaaaacgtgcgattgtgctttgtccgagcggggttactttttcaaaaatcatggaaaatattttagtgaaactattcccggaaatccatttttatccaactatatctgttcgggaatatgccttttttaaagcagaagttgatattgttttttcatccattccctttccagcacagttcgnccgtcaggcatcgactagatgactgtatggnntccaaaaggtaagac

SEQ ID NO: 1604 - DNA, 807 bp, Listeria monocytogenes-4B
tcttagaaaaggcaggtttcaaaatggggaatttaggtgctataaaaaaatattttgctatcttgattgcggtctcgtttgttattgcacttattgtgccattacctccgtttgtattggatttagtgcttgtgacgatcttggcgttctctgtgttagtttacatgcgtgccacatcaattaaagattggaatgaattaaagtcatttccgtctttactacttttgatggggatatttcgggtttcgataaatatttcgacgacacgggcgatcttaactactggtgatccaggacaagtaattaaacaatttgggaattttgttattggtagtaattttgttgttgggattgttattttcattattttaatcgtctttcagtttattgtggcaaatggttcttcgcggacagcggaggtagcagcaagatttacgctggatgctttgcccggtaaacaaatggcgattgatgcggatttgaatcaacggttgattacagagccggaagcgaaagaaaaacgcgcatatttgaatatggaaaccgaattctacggagcgatggacggagctgggaaatttgtaaaaggggatgttctttttaccgttttgcttgcagttgtaaatattgtatgcagttcaattgagggcatggaacaaggtgggcttaacttcggggaagctgccgcgaaatgtgcggtgttgacaatgtggggatggaattgatagccaaataggaaaactctcaatggccatccatatcggggcatagacactgggggttcccccggcgtgcatgaccccggcg

SEQ ID NO: 1605 - DNA, 1685 bp, Listeria monocytogenes-4B
  misc-feature (1)..(end): n can be any nucleotide a,g,c or t/u
agttcgtccgccagtgggtgccaaggctcgtggcagtgtgcccatgcgcgaccatagccagtgatcatcatcggcatgttcatttgctagagccagatgcagctagtattaagattgatcaggttcgcgcgctgaagcaagaacttagtaaacgcggggtggaatcagatcaaaaagtagttatcatttacgatgcagaaaaaatgactgttcaatcagccaatagtctgctgaaatttatagaagaaccagaaggcggtttgttattattatttttaacaacaaaccccgggcaaattttgccaacgattcaatcaagactgcaacctgtcacattcaaatcactgacttttgatagtttactcgcatcactaacagcagcaggcatttccgaacaaaaagcgcggatttatgctagcattactgggagtgtggaagaagcgaaggcttttgaagagagtgagtggtttagtgaggcaagaaatgttgtcatcaagttatatgaaggaattcaaaaacaaggaaccagcccattaattatcattcaagaatcatggatgccactttttaaagagaaagataagatggcgcttgggctcgaattattgttactgctgtaccgcgaccggctacaccttacacttgacgagaactacgaacctatttgtactgcgcaaaaagaaatgctcggacaagatgcgctgcgtaaatcactgtccgaaaccacaggggaaatcgagaagattctcgctgcgaaatcaaaactggattccaatatgaacacgcaacttctaatggagcagttagttctggaaatccaagggaggtaatcgctatgcttaaaattgtaggcgtccgttttaaagacgttggtaaaatatattatttctcacctggcgaactggaaatcacagaaaaccaaggtgttattgttgaaaatgcacaaggaattgaatttggtaaaacagtcattgaaccgcgctacgtggacgaagaagatgtcgttttaccacttaagaaagtactgcgtatcgcaacagaagcggattataaatgcgttgctgagaatggcgactcgtgtcagaaagcctttttactttgtgatgaaaagatccgcgagcgcgaacttgaaatgagtttagttgatgttgattacacatttgaccgtaataaagtcattttttatttcaccgcagaaggtcgcgtcgatttccgggagctcgtgaaagatttagcatctgtttttcggactcgcatcgaacttcgccaaattggtgtacgtgatgaagcgaaattgctcggtgggattggcccatgcggtcgtatgctctgctgctccactttcttacgtgatttcggcccggcttggatcggcctggccagtgaccgtcccttgtcccttccccccccctcccttcctggcttctggcccctctccctgttctcttccctccctctcctcccccccgctcccccccccccgcccnccccctcctcccctccctcgccctcccccccccctccccccccggccccccccgtcccccgcccgctgcccttcctcccgttgcttccgctccccccctcccttcctcctctcctccccctcccctcgcccttcccttctttccgtcgtgtagtgtttccttcctctagctccctcccgactaacacacgtccatgca

SEQ ID NO: 1606 - DNA, 1283 bp, Listeria monocytogenes-4B
aatataattgtgtcttgttgtgcagcaggtcttaggggatcgagtaggaggcgcaagcaagggataaagtgaagtagcttacataataaatacctccatggcgatcggaattagttttagtatacatgaaataaaagcgaatgagcaacactgcgtacaattgtacgattttcgtacttgttcaaaaaaataatatggtataactaaagtaacctagggaaaagactgttaataaaggagctgatagcattgaaattaagcgatattacatcggagccactcatctttttagataaagattggcgcactaaagaagaagtatttgatggattaattgatgctttacacaatcaaggagttttgtcagataaaaatgaattcaaaaaagctgtcttagaacgcgaaaagatttctgaaactggtttagagaaaggttttgctattccacatggtaaatctaaagccgttaaaaaagctgcttttgcatttgctcgtatcaatcaaccaattaattcttggggcagcattgatccaacaaatgaagtaaaatatatctttttattagctattccagaaaacgaagccggatcaactcatttagaacttttggcagctttaagtaagcgtttactcgaccctgcttttattgagagcatttctaccgctccgacagtaaacgaatttataaccgtgctagattctgaacaacaagaagatgaaaaagtagattatacacgaaaaatcgttgctattacagcatgtgcagcgggtatcgcccatacgtatatggcagcggaagcccttgaactagctggtaaagaacttggtattgaagttatcgtcgaaaaacaaggtgcgaatggtattgaagaccgcattactcctgaaatccttaaaggcgcagaagcagtcattttcgcgacagatattaccgcaaaagataaagaacgtttcgccggaatgccctttatccaaagacgtgtcgctgagccacttcgtagtggtaaagaaatgattgaaactgtattaagcaaaccagatggctatgtcaaagctgatacagatggttcagaacaacaatttgataataataagagcagtggtttctcgcaaatttatcgtgggattttaactggtatttcttatatgttacctggtattggcgcaggtggtttaatgattggtattggccaacttggcgcaactggctttggtcttgaaaagttattggtaatccagagtatgcaacaaactctaaccagcttattggaatcttccattat

SEQ ID NO: 1607 - DNA, 1212 bp, Listeria monocytogenes-4B
  misc-feature (1)..(end): n can be any nucleotide a,g,c or t/u
attttgaatatttaattcctggatataggtttgttttacatcgtcgctccagtgcaattgtttagccatttcatccacaacagcgtctttccattcaagtaagtatggcatatcgaaaagcaagtagccagtgcgacgtaataagaaatcgattggcgttgtcaatgcttcgtgttgaatcgagtagcgtagttcagcatacaaactgtttggtaaagtggtttcgttttgttctttatgttcatgtgcataagtaaataattgatcgatattactaccgaaacgtttagccatctcacgaccttcttctaaagtccagccgaaacgattattaccttctttcgcttttttagataggaaagcttctaattgttctgagccaccaatgtcaccaccagaaattggtaaatgttttgtttgaactgttttgtactttttaccagtttctttcgctaatgtttttgaaacgtcatctaataatttttcggccatttttctgtaaccagtgagtttaccacctgccatcgtgattaagccactttcagaaaaccaaacttcatctttacgtgaaatttcagatggatcttttccttcttcatagataagtggacgaaccccagcccaacttgattcaatatctttttcggtaatatgcacatcagggaacatataattaatcgccttaatcacataattatgatcagattcaagtgcttttggattaattactgcttcgtcgtacactgtatccgtcgttccaacatacacttttttatcgcgcggaatagcaaagaccatccggccatcaggtgtatcaaagtatactgcttgttccatcgggaatttttgtttatcaactaccaaatgaattccttttgttaagcgtaaatgtttgttgtttgttgcataatctaattttcttactttatctacccaaggaccagcagcattaataacacgatgtcttattcgtgtgcgcacacgcgccacctgttgatccccnnnnnnnnnnnnnnnnnnnnnnnnnnnnnnnnnnnnnnnnnnnnnnnnnnnnnnnnnnnnnnnnnnnnnnnannnngcnnnngnnnnnnngntnnnnnnantancntnnnnntncnnagntnctaccggnttttttcattaacttttatttgtaaaccgcgcatcttccgtggcgggattcccacgtagtaacgangaacccttttaaca

SEQ ID NO: 1608 - DNA, 1289 bp, Listeria monocytogenes-4B
ataataggctgcaatcattgcggcttctgtaatcgatgtctcatctggatcattcgattgaatgaccacatgcgaaccaggcaaatcttttacatggaaccagtattcattattcctagctaatttattcgttaaataatcattttgtttattattttttccgactaaaatcgtttatgccggtcgaagaagtatatttttctggagcaggtaaagtcgctttttttcggctgccttttttctgtttgtagcgaagatagccttgttcagctagttcttggcggatttcttccacgtcttgtgggccagatgtttcaagttgtgattccacggactctaagtaagtaatttcttctttcgtgagcgcgatttgctctttcactacttcgaccgcgttacgtagtttttggtagcggctaaagtagctttgcgcattggcggagggtgtttttctagtatcaagtgcaatcgtcattttcttcatatcatcgtaaaagttttctacagtaatttcttccatcccgcgttccattaaatgcagattggcagttagaagttcaccttgaatacgataaacatctgctttttctgtttcgagcaaagtgttttcgagtttttcgattttcagcctgcttcgagccagttcgttggataagagtttttctaaatcatgtgcaaattgatggacacgatcacgacgcgctttaccaatataaaaatggtctaatagggtgcttaaattcgcgaattcggttgtttctgcatcgacatggcggagcgggaaaaaatagtaatcctctttattttggatgcgccattcgtttggcacggctgcatggcctaaatgctcgttcactagcccaattacttcgaaaaaggcggcaactagcgaatctgccgttaagttcccagcacgaaatactatttcccgagcaagcaaagggctgaatcctgcaaaattttgtacaagttgcttatccattcgacccgctgagaaatctagtctatccagaatctgctccgaagtaacctcaaatgggtggagtttatccgttgcaggaggtaaaacataagtcgcttccggaagcagtgtccggtaactattttgtgcaggggaaacgtgtttaatacaatcaacactgacattttgtcgtacggccgacaagagtgatattactatgccgtaccatatttgcttcctttattttactagatctatcgtaacccgtgtgatgtttcccgcgcctgctaactggtaaattcctatccttttgactttgcaatatcag

SEQ ID NO: 1609 - DNA, 753 bp, Listeria monocytogenes-4B
  misc-feature (1)..(end): n can be any nucleotide a,g,c or t/u
aacatcgctgaagataatagtagaattcctgccaaaaagtcattgtatggattggaatcgccagtttttggtaagacagacgtttcttcttttattacgttggtactagaatctattttaataatcgggtttttgattggtggatttactattactactggtttatttttacggtagatataatcgattgattgtgcttccgccgaaaacacaccattagaatttgtaggagtttttatcaacgtgtagccatctatttctttagctagtgtattataagcctctcccacacgaccatttagaactacagagtcagcaatttctttaccattttcatctaaatagttcactgtcactggtaaggcggaaatagcaatcggcgtatacatataagttactgtttgcgcatttgttgtaaaggttccttttgcatttggaggtattgttgtgagtgtgtaaccagcaattgttttcggttgagttgagtaagattctccgatattaccagttaaaacctcacttttcgcgattttttgacctgtagagtttctataattaacggtaataggttgggctgtctcagcgtttttcgcatagatataattaattatttgaggttctgtcgaaaaagtccccttggcattggcaggtgtagttgttaaagaatagccgtcaattgttttagcttgtgtcgtttagttttcactaatttttccggttaaggtttcagaaggagcaatngtttttccataa

SEQ ID NO: 1610 - DNA, 696 bp, Listeria monocytogenes-4B
tgttaatgaacgaaatcaatcacacatccgagcgagcaaacacagaaaagagaactgagaaacaaattattatgcaaaaaatacttaattggtttgtattttctttgctacttgcatctatcggtgctgcgattgggagtaaattaagtccagaactttatttgcctcttgtcgtcttagaagtcgcgttacttatcacagcgatggtagtgcgtcgaagtaaaactattaataaagtggtaggatacccagtagtactagcatttgcgtttgtcacaggcttaacgcttggaccaactttgacatattattttggtgcagggcaaggtgccgccgttctaatggcatttgttacagcaaccgttactttcacaacgctagcttttattggcgcaaaaatgaagaaagacttatctttcttaagcagtgctttattcgctgcgattattattctcgttatatttagctttgtaggagtctttttaccattaggttctatgctatcaacaattatttcagcaggcggaacgattattttctcactatatattttgtatgacttcaaccaaatcatgaagcgcgatgtggaattagcagatgtaccaatgcttgcgctgaatttataccttgatttccttaacttattcatgttcttactccggctatttacaggtcgtgattaagaaatacacaaca

SEQ ID NO: 1611 - DNA, 996 bp, Listeria monocytogenes-4B
aggaatttactacgctaaaggtgggattttggcagggaattggtttgtttcttttttccaaatcacctttaatgggtttagagatatggtacagtttcgctcgtccgatatttctatggactttattttaatcgtttttttaattgctttatggcttttgagttatattactacttatagtattctgcgcaaacagcgggttatgagtgttttagttttaactgttgcttatttagcggttattaatacttttacagattataacagtaattgggccatcgtccgaactgtattagaaggatttttattacttcatcttgcactggcaagtcggattgcagcaccaaatagaattagcgcggactccttaaaacgtaatggtttgttttatcatatttttgtgattttgttactggccgtatttgtttttagttcgttaatgcttccgaaaaaagcaccgattttccctgatccggtaccgacgataaaaaatgcgcttggaattaatacaacgcgcacggtgggttatagtgaagatgatacgacacttggtggtgctctcaaaaaggataatgctactgtattcacgggccgggcggaaaaagggcattactggcgtgtagaatcgaaaacgggctatactggcactggctgggcaaatgccaattgcccgcggtgtcatatctttttcttccggcgataatttgcctatcccccttacagaacaaacaactggggccacccacccggccgagatgagcctcggcccctctcatgattccctgccctattcctttgggacgccagcacgtgttgggccccgctatgctcccatgcccccttaagcatccgcccgcgcccgccgtcggtctcccaccgcaatttccgccgggcccctggatacccgcgctcgcttcctctggcccccctccggcccccgccctcggcctcccccgctagcgccgcggccggccgcgttccggccccccttcgcct

SEQ ID NO: 1612 - DNA, 762 bp, Listeria monocytogenes-4B
gaacttaagtaacttacagctgctcgagggccgacgtgtgctggaaagtggattatcattaaccaaattaatttaattcaattcgaaccatttaactctactgcgattccatatgatgccgtcgatgattatttatccgctacgtatcaagctgttcataaccaatttgttgcaagtgcgaaaatttacgaatacggaaaagcgctaaatcctgatttaatgattgttacaatgctcgctgattgcacggcctatccattctcctgctatccagatgatatcgtgctcgcaatgaaacgcaaccgcatggaatatttcttcgcagacgtgcagttccaaggcgaatatccacagtatgcgcttaattactttgacgaaaataatattcatatagaaatcacagaagacgacaaagccgttttacaaaaaaacaccatggattatttagcactttcctattattattcccaaatggtggactccaagaaaaatgatttggacccagcttcaattacaccaaacccgcatcttaaagctaatccgtggggctgggcagtcgatccgaaaggcttgtataacgcattgtcgcagtactgggacagatatcataaaccaattatcattgccgaaaatggttttggaatgtatgacaaattagaaaatggcgaaatccatgatgattaccggattgattatttatccgcgcatgtaaaagagatgaaacgcgccatgtatgacggcgtagaaattatcgcataatgc

SEQ ID NO: 1613 - DNA, 1077 bp, Listeria monocytogenes-4B
caacgatgcaagttttcagtacagaacctacaagtgtaacgattgacggggcagatgtagctaaagcggatacgctagatgcatttaacgaagcaacgacaggttactactatgatacagtacaaaacttaacatatgtaaaagcagtggcaaaagatgccaaacaagcaatcgtattaaacggtgtaaatcatgcaccatacgaagcggaatttgctcatctgacaaatgtaagtactgcaagtgatcacgcgggatatactggtactggttttgtagccggctttgatgcagaaaaagaagcggtagagtttgatgtagacgcagtagatggtgcttctgattatacaatggaagttcgctatagtgctggcgtagaagatgcaactagaaccgtatatatcaacggtaaaaaacaacaaattactttaccgaaaacggctgattgggatacttggagcacgatagaagttccagtaaccttgcaagctggtaataaccaagttgtatttgattttgaagcagatgatacagaggaaataaattttgaccatgtagtatttaagaaataaatccaataagccacccttttatggatagagagggtggctatgttgaaaggattgaactgaatgaaaaaaataattgggctagcatttatagctttttgttgcatatgtatttgcaccaactataaaagcacaagcggatacagttcccttaccagcgcctattattgaggctttttctgtggaagcgattgcggagggcatcgccggagaactcgatcgagatcctgcctgtgatggtatcggccgggcggatgggggtgcggtgcctcttttccttcgcgctctttgtgttctctggcgcagacttcgccccctccccggcgcgtcttctggctctcctccctcgtttcccgcgccctccctcttttttcccctctcgttttcctgtttgtgttgctcgtctttttctcttccgcgctcggcgctcgccttgttcctccgcgcccgcgcctctttccctctttccccctcccccttcgcggttctatatgacaaaaaacaaaaa

SEQ ID NO: 1614 - DNA, 791 bp, Listeria monocytogenes-4B
aagtaactacccccctctatgataggttttgccaaattctggactatttctcagagaacgaagcaataaatatctacgaattctacgtctgaatataatagctagtgcgagcagtgtcacaactagtccagcaggaatccaccaaacccaagacggaatttcgaaattagaggccgctgtttctgttttaggttcttcttttttcggtgtttcacctgtggagctgctaccgttatcttgttctggtgttttatcggctgtatttggtgtttctggcgtactcgtactatcattaggtgtttcaggtttatttgctgtttcagttgtgggttcttggaagttttcgggattggagaatgttgctgttggctcaaatggaacccatccagttcctgggaaaaacacttccggccaagaatgtgcattgttatttgtgattgtataagtcgttttagcatcattttcttttttctcaccctcaccaggtgtgtagcccttggcccatcttgctggaatcccaagcgatcgaagcatgactaccatggaagtagaaaaattgtcacaatacccaatttgcgtttcaaataaaaattgatcgacataatcggctcccctaggcgtttctttcgcatcctctgtactataagtaaaggtgccagaagcgcttaaatagcgttcgattgctttcgttttgtcataaattgaatcagcgtcttttgttactttattggcaagttttgtcacccggtctggtaagtcttttggtgtttgggtatattgggaaacaaaga

SEQ ID NO: 1615 - DNA, 812 bp, Listeria monocytogenes-4B
gccaaaagcgattaaacaagtattcgggcggacccggcaaaatcacaaaaagcgagcttcagcagtgggaggattattccttagacgaacccgaatttacttagggccgaggcaacagatgtggcaattagcccatttacactcgtatttgaaaaagctggtcttgcatttgcggcttccgtgatgaatgcggttatcctgacttctgttttatctgctggtaattcaggtctttatgcttccacaagaatgctttgggcaatggctcgtgataaaaaagcacctaaattcttgggtaaagtaaaccgtcgtggtattccgatggcagctttaattgttacgacgattgttggtgcaatgacattcattacaacgctaacagaaaacggcacagtgatttatacgtggttactttccgcctctggtttaaccggatttattgcttgggtcggcatcgctatcagtcattaccgtttccgaaaagcatttatcaaacaaggacatgacttaagtgaactaaaatataaagcaaaatttttcccattcggacctattttagcactaattttatgtattttagttattgtcggtcaagattacgcggcatttttgaaaccagaatttacgaatcctgcttggtggcaaaaaatcggtatttcttatatcggcctccctattttccttgttttctggctatcttttaaatttacaaataaaacaaaagttattccactggaagactgcaaatttgatcaaaaataaaaaaacatctcttgttcattcatttttacttgaatgatacaggagatgtt

SEQ ID NO: 1616 - DNA, 1221 bp, Listeria monocytogenes-4B
gggctgtgaaaacaggcgtaaataagactcgtgcatttgctcaaggctttaaacaaggctggtctggtaaataaaagcataggaaaagggagagcatgaattgttaaattacttatcgtcactaaatccggtactgttagcacttcttgccggtatttttacatgggcttgtaccgcagcaggagcttcactcgtatttttctttaaaaatctaaataaaaaatggggcaatgttatgctaggatttgctgcaggcgttatgctcgcagcaagcttctggtcgcttcttgcccctgcaatcgaaatgagtaaagatttagggaagttttccttcgtaccagctctagttggctttttgcttgggggaatatttttacgtgttattgaccgtattattccacatttacatttcgggtttccagagcaagcgaaggaaggaccaaaaacttctcttcgaaaaagtatcttactggttctttccattactattcataatattccagaaggggcagctgttggggtagctttcggagcagttataactggagacacggagacgcttattactgcaatagttttggcgcttggtattggtattcaaaactttccagagggagcggcagtatccattcctttgcgcggagaagggctctcgagagggaaaagtttctggtatggccaactttcagcggtagttgaaccaattctcgctgtaattggtgctgcattggttgtttatgctacacctattttgccgtttgcgctggcctttgcaccaggtgcaatgatttttgttattgtcgaggaattaattcctgaatctcaagtagaaggttcgaccgatttagcaactgctgcaacgatggcgggatttgcagtaatgatggtcctagatgttgcgtttggataaaataatacactggacaaaaaacgacatttaatatttgcggaatgcgtccttttacggtcaaattaatagtgaaatacttcacaatatgttagttttcaggggtgatcctgtaactataaattggacacggcaaaagctaccactgtatccgtgtcttttttttgacaatcgtaatacaattgacggccctcttctgctattgtcgaacaaacgctatcaagtggccattatcccctgtgttaaggacacgtaaaaaaagctgtggaagggcctcccaacgcacaggcccgtattgccgaaatcgcgttgat

SEQ ID NO: 1617 - DNA, 1128 bp, Listeria monocytogenes-4B
ctttggcacttagcagcatgctgagcgccgacgtgtgctggaaagaccttgttttttgcgcgctattcaggcacatatgctttatctataataacatctttcggactactacccaatccaaaaaagtcatgtgaaaaatacggaacaaacggtaatatttcaattgatttagaagtgaatgacgcgcggcaagcttttgttcggttcctttattcatttatttaccctactagaatatttttagttagcgtttgggttgtttttctagataattagtataagaattgatttatttaaatccatgtctaaaataacacaaattgtgtcaatatacataattttatacatatgggattacgttatacaaaaatagactggaagcaaagtaatttcttactttgtttccagtctgaagtcagcaatgcactactatttacttcttacttcccttaaaccaaatttcccacaactttcacgcgcaatctggttgcattacccggatgatacgctaatgggatttcttccacttccaccacttcaatcgagtcagtcactgcaccggctagagttgcttgttctctcgctttttgttcggcatcttggagcgcttcttcccgctcgatttgagaatagatgtagatttgttcgtattgtccgctgatttgggaaatggatgcgccgattgcgttggctactgggccgcttttgtcgcggaaaatttgtgcgacaccagagatttggtctggaataatcacgctaccaccggcaacaagtactagacttacactccccgaactggtttgcatctgatgaatgcggatcttccggccttggagcactcccgctatacgctctccgcgcgcaatcggctgggatgtgggcgactgatgtagggcccccatgactctcctacgctggaccaaccgccgtttatccacccgcgatcctccccgccccttacgcacccgtcccctccccggccgactttcccgcccgtctgctgacctgccgcccttcgtcgccggccgccgatctccccgtgtcacccgcgcccccacgcggattccctcccctccgcactccgcggcgcccccgcgcggacggaagttcgtcgaaccgcccgccgcc

SEQ ID NO: 1618 - DNA, 1358 bp, Listeria monocytogenes-4B
  misc-feature (1)..(end): n can be any nucleotide a,g,c or t/u
ctgataagtagtacgggccgccagtgtgttggaaaggatatctgcgctggcttgaacggcttcggggacttgttcagcagtttccgtttccacttcgatttttaccatatggccaagtttttcccgtacagtagatacagcacttgtaatacctccagagaaggcgatgtggttgtcttttagcataacaccattttatagaccattgcgatgagggggaccgccaccagtctgtaccgcgtatttatcgaaggcacgcagaccgggcgctgttttcctcgtgtcgcaaattcgaatagcggaatcatccagttgtttgacagcaaaattagtttggctagcgataccactcatccgttgcattaaatttaaaatgacccgctcaccggaaagtaacgtgcgaactggagccgtaacagccgcgataatatcgcctttttgaatccagtcaccatcttttttataagcttcaaattgtatatttccaccgagcagttcgtaaactttcggtgggatggaaatgccacaaagaatacctgtttcttttgctaggaaaacaccttcccccattgtgtcacgggggaaaacagtttctgcacttaagtcatgttgaccgatatcttctagtaaaaatgcttgaattgcttgattcataagtatggaattcattttattactccttttaatattcgatgtgcgccgagactttctgttcgtttgagcgcgctttcggcgattagttttgcggtgataagcatgtggctaatttccgctgtttctcgagtgtgatttgcgtaatcgaaatctgtaagccaatgaagaaattcggtgattttttctggttttcttgtgatgccaagcgtttcccagattttctcttgaagtaattgtttatctggtaaatggggcgtttgggtttggttcgaaagagggatttctggatggtctattaggtttgttttttgcgtgagaatgtattcagccactttttcaccaaagacgagcgtttcaaggagggaattgctggcgagacgattagcgccgtgcactcctgcatttgcaacctcaccaatggcatataaaccagggatgttcgtttttccttgaagatcagtacgaataccacccattaaaaaatgtgcgccaggatgaaccggaatccgctttgtttcacgaaacgggacgtgatatgcatccaagttagcagtaattcctggaaaacgttcttcaaaattaggaattggcgtgagaccaaggaaaacctcaaagccatcttgtatttctgcaaatttccgagcgcnngtacgnccactcaggcaggtgtaagttactgtcaggcnncnnaaaaaggttagcac

SEQ ID NO: 1619 - DNA, 762 bp, Listeria monocytogenes-4B
actttgggcactctagagcatgttcgagcggccgacagtgtgctggaaagttgtggatgcggttggcgttggtagaaccgtttttgacaatattaagaaatcaattgcttatctatttgcaggaaacctaggtgcgattattgcgattttattcgcgctagtgctggactggattaacccgttcactgcgttacaattactatttatcaacttagtcaatgactccttaccagcaatcgcactaggtatggaaaaagcagaacctgacgtaatgaaacgcaaaccgagagatattaacgaaggcatttttgctggtggaacgatgcgcgccgttatcagccgcggtgtattaatcggtatcgctgttatcatctcacaatatatcgggttgcaaatttcaccagagatgagtgttgcaatggcatttactacgcttatcctagcacgtacattacaaacatttgcagctcgctcgaatgtccaaaccgcatttggcgcaggattcttcagtaacaaatacgtaatcggtgcggtattactttgtttcgtcctatacggaattacagtattaccaggagctcgagaaattttctcaatcccagcatcatttggcctacatgaatggtcgatagcagcggggctagcacttgcagcagttgtgatgatggagattattaaattagttcagaataagtttttcaaataaattatataaacacagaaatcactcgttttgcggaggatttctgtgttttttctttc

SEQ ID NO: 1620 - DNA, 1302 bp, Listeria monocytogenes-4B
  misc-feature (1)..(end): n can be any nucleotide a,g,c or t/u
gcctgaagggaactctacatgctcttcgaggggccaccagtgtgctggaaaggcatgtggttttaaaaagggaattcgaggtcaaataatcaagaaaacaaaggctaaatgagtatggaactagacgcactcataaaagctgtcactgaggaagtcatgagacgattacaacttccagagaaaaaaatgattatcatgggacaagattcagaacacactctcagacagtgttatctaaaagaatatcaagtttcgctttatgatcgttcggaacgcgcttgtgacattttactactggaagaattggatatcgctgaattagctcgaatcagtttgtttgctccgatgaataaaaaagaacaatttattacagatcatcttttagcagggcggccaacttggataatgaagagtggtatcaaagcgcatgcttataaacgttccgctaaatatggtatcagacaactttttcaagaatatgaggagaaactgagccgatttggtgtcgaatttatcgaaagtccggtaaaagagaccaaagaaagtaaagtcatcaccgaacaggatgttgaaaaacttactaagaacaaaagcgaattcattttgcctaaaggaagtttcttaacaccacttgcaaaagattacttacaggaaaaacgaattagcattaaagaaagttaggaaggaagagcggcatgcaaattggaaaagttaccgggagtttatgggcaacaagaaaagacgaaaaactgaatggtttaaagctactactagtagagatttgtaccgatgaaacggaagatgtaagacattccatagtggcagctgataatgccggagcaggaaacggcgatcttgtgctcgttacaactggtagcgcagcacgagcatccactggggacaacacgatcccagtggacgcatgtatcgtcggcattatcgactcggtagaacgttatggctgaacagtccttaggtattcttgaactcaggagtataagtaaagggtacgaaatggccgatgttttctccaaagcaggcaatgtaactttatttacttttcgtccgacatgtcctggtaaatttttgattattttgcaaggtgcttccggtgaacttactagtgcgatgcaagatgcaaaagaagaagctggcaaatttcatgtttcttcttatattttgcatatggcgcacgaagaattacttgctttggtaaacaatctttccgggacacgtcggccgctcaagcaaggggccngggactttagttcnnnnnaaaaggaaagtcagtttaaccctcca

SEQ ID NO: 1621 - DNA, 761 bp, Listeria monocytogenes-4B
  misc-feature (1)..(end): n can be any nucleotide a,g,c or t/u
agtgaacctcctcgggggccaaaatgtgtgttcccgactcatcttcatagattggtaattgacttgtttcatcattagggtcgcgcaaataaagaccacgttccttcgatgtgtcatcttccagttcgacaatacgctcataattcgttactagtttacgtttttattggtgaatgcatgttggtccataaaccagaacttcaactgggatagtaaggctacttgcaatggctttgatttcgccttctgttagctcccgagcaagtaccggaccaatcgctccttgtttttcccaaaacgagatttgttctgcgctagttacaaatgtttgggcgtcataaataaacggaatcggttgagccatttcactcaaaagcataattgcccctggatcaccgcacgttactgcatccactttcatatctgcaagatgctctaaaaatcccggtaactcttccatatgttcgttatgcattaacgaatttactgctacagttactgacgatccttcttgatgtgctaaatgaactatttcacgtaattcttcgacagaaaatgaatgcggcaatcttaaaccaaattggctattacctacatatagtctgtctacccccgcgcgaagcaattgttcagcttgttagattaaatctcccgtcngcaatgatttccagtgtttttcactttccggncggnntcgacgnnccgancncagcgtnncagctgncaagtacagncagtggtntntcaaaaagntaaacaca

SEQ ID NO: 1622 - DNA, 918 bp, Listeria monocytogenes-4B
  misc-feature (1)..(end): n can be any nucleotide a,g,c or t/u
agtgcgaacgtcggtcaattgcaaagagacttaaaactagcctgtgccaaagcatttttacattataaaaccaaaacggctaattatatattaatcgaacaagatgacttgcctatccacgttcaaaaaggtttactccacttaaaagacgaaccagaaaaattaaatcgtttgattgacgtgaacaaagccatttttaaatttgttgatacgagtgatgaatttgttgaaacagaagatgttcatgatgtttaccatgccatccaagaaaaagcagatcaattaatgaaagaagggaaggaccaaagcgagttagaagaagcactttatgttgatgtagatcaatatttccacaactacatggtccagttaccaacccaccaaactgccaaagaaattattgcgcctgctgtttgggaattaacagaaaaagtatatgccatggcagaagaaaaactaaatcgcaaatacaacgaaaaaatgaaatttgctttttctttacatttacaaagtaccatcgaacgagtacgggaacaaaagcatatcattcatcctgatttaaataatattcgcaaaaaatatccaaaagagttccaagtagctattgatttatccgcactgattgaacaagaattaagcattgaaattccttttgacgaaattgggtttttaacgatgaaactgacagaggaagtagtagatacgtcactttctcaagaaaatcaagtcgaagttattgtgatgatgcatggccgttcaactgctacgagtatggtggagacggtacaggaattactgagcattgaaagcgggattgctcttgatatgccgctcactgttaagtaaaagcgatgctttccagcacactggtggccctcgcactgcttaganttactaatagcatgtccaaaaggcaag

SEQ ID NO: 1623 - DNA, 1104 bp, Listeria monocytogenes-4B
ttgaccgcgatgtggaagatgatgcgccaatgacacgtattccgaagaaaagttattattggtataaacaagtgattgaaactaatggagcagatttataaatgatggctgaccttcaagattggctagctagaatccaagcaaaaatcactgcgttaaaagaaaaagatcccgatttgaatttatttggttcagaaagccacgcctataaacttaatcaaccattgtctaatcaaacgcttaccgagtttgagaatgagcatcaaattaccttacctcaagattatcgcgcttttctagagcaaattggtaatggtggaatgggtccttattatggcttagaaacacttgcggacgggctttgcgcctcgcttgattacaaggatgaaaagtacggggtgcaaacattaagtgagccttttccacatacagatgattggaccgctcctggttataaagaaggaatgtccgatgaagattatgatgcttggcaagaactgtgcttccaagataaagaagtatttggacttctgcgtatcgctaattttggttgtggcgtttcgattaaccttgttgtaaacggtccttcttatggagaaatttgggtggatgacagaaataatgataatggcgtctatcctgatttttactttgggaatgaagaacgtttaggctttcttgaatggtatgagttatggttagataaatctatagaggaaattgaataaagaaaaaaccgctaaaaagaagcatactctttttagcggtttttttatgcaatgttcatatgtgatggctttttatttttaaataatttgcatgctatactccatttatattatagaaaaggagtaggatgacatgaaaaaatttattctagcaagccttgcatgtacgactttgattagttttagtcctttggtaggacaagtcgaagtaagcgctgctacaacaaacattgccactgccccagaaaaaaatttacaagaagctcctccagccacggttgatcaaattttcccagatgatgctctagcttttaaagtcgcacaggaactaagtgtttccgaggatacagtcgttacacaagaacaactagataca

SEQ ID NO: 1624 - DNA, 1011 bp, Listeria monocytogenes-4B
tgtaggactctcgcagcatgttcgacggccacagtgtgctggaaagctaccttttttgccagcttttacgggagtttgtaagacagaatagatttgtttattgttatctttaagcgtaatggcttgccctgtaagatcgctcacatcttttgttgtaaaagctgctcgctctgtagtgaaaatagagccgctagtaggtttggtcgataaatcaggatgagagatattatctgcttttaatcgttcttctagcgtttcatttccgagtgtatctgggtcatctgataactgcttgttgaaaaatattaccgctaaaaaaacattaagaatgaggagagtcacaataaaaatcatttgtgttttacgccaatccatttttattcacccgccttttctgcgtctggttggaagatgaaccatttgtcatgatacttatacaaccacgtcggctctaatgttacaagacgattcatgcccgaagattcgcttctagtcatatgatagccaggaacaatatcttcaatttcttctgctttgacgttaggattttgggcaagagcactatagacagaataagaggatggtaacgtaacttcttttttctctccgggaacatctgtatctaagcggaaaaatggtctcatgtatttataaacagcttcaagtccttctgtttcagaaatatccgccatgccattctcattgtatacttgtaaattatcaatgaataaactgaaattagtcgtcgcactttccgcggcataacctgtgaaatagtaagcgccgtcgccagtccagccagcatggtcgttcacaaagttaaaactatcttgaataagtccagctcgtttgacactactgagatcttctggattagtacgttcttgtgatggatttacatactctaatactttattatctgtatccatttcaatgacacttgaaccatctgtgtatgtgtttccttcacttttaacagtaccagaatcttggaatagtgcggacgtgaat

SEQ ID NO: 1625 - DNA, 787 bp, Listeria monocytogenes-4B
accgaatgaagctacaaaaaacatcgggttttccaaaagaggcgacggtctgtttcttcttttgcagaaatcaatttaaaatagaaaaaagagcaaacttgcctatgaagcgagtttgctctttttgttaaaaggttaatttggctagacggttaaatgcttcttctagcacgctaatgtcttgggttgcagctaggcgaacataattatcaccagattcaccaaaagctagcccaggaatgacgaggacttgtgtttcttttaagacatattctgtaaatgaaacagaatccatatttgttttagaaatattaataaaggcgtaaatcgaacctttaagtggatgtaaagaaagatatgggatttcttccacccgttttgcgatgtattctaggcgtttttggaaagtttctgttactaaaggaattagtgtctcagaatgatttaatgcgtaaatagcagctctttgggacggtgtaggagctgaataagtaattccttcattaataatctttgcagcttcgtttaaataagtaggagcaatcatatatgctaagcgccaaccgggcattgcgaagtttttagacatactaccaaatgtaatcgggtgatctggcgcgaattggggcattggtgcgaaggctggatgaaaactaagacgcatggtgtgctgggtggcacgagaatggaaaagggatgtgggggggctgcatgagcgatggggcggaaggtcggccggcgagaaaaccgcggcggggggatcatggcgcggaatggaaatggaagg

SEQ ID NO: 1626 - DNA, 1372 bp, Listeria monocytogenes-4B
ccgagagcttttttcagcatcgaaatatagttggtagcccgacatccaccacctgtttgcgtcatcaataccgctaaattatttacatcataatcgccgtgtttcagcgcatccatcatttgtccaatcgttaaaattgctggataacaagcatcgttattgacgtaacgtaagccctcatccactgcgcgtggtgtaactgctggtaatacttccaagttataaccgcccactttacaagctgcttctaacatttcaaaatgggtcggagctagctgtggcgctaaaatagtatacgttttcttcatttcctttgtaaataatggacgttcttttggtttcggcataatccctggtttcacgttgtttttctcacgttcttccattgctgcttttaacgaacgaacgcggatacgtgcggcaccaaggttattgatttcatcgattttaagtagtgtatatactttattatgaccttcaatgatttcttggcacatatccgtcgtaattgcatcaagcccacaaccaaatgacgtcaattgcacaaattccaaatcttcacttttagcagtaaagctggctgcacgatacagtcttgcgtgatatttccactgattttcaacccgaagtttatggtcgatttctccaagatgagaaatcgaatcttcggtaagaaccgccatgccgttcattgtaatgagttctggaattccgtggtttacttctggatcaatatggtatggatgccctgcaagaacaatccctttgattttatttttcttaatgtaagtaagtgccgcttctccttctgcttgaatgtctttgcggcaaagttctgcttcctctagccctgcttggactgctttttccatatccgcggctgggacttccgggaaagcgagactcatttgttcgattaatgctttttcattatctaaagttaaaaacggactgatcattggaatatttttctcttccaaagcatccacattgacacgaataacttctgggtaaccagccacaacaggacagttaaagttattcgttgcttcaccgaattccggtttttcgtaaacgacagatgggtagaaaatgcgatccgcttttttcttgattaaatccataatatgaccgtgtgttaatttggctgggaaacaaactgcttcggaggcaatcgtttcgatacctttgtcgtataggtttttggatgatttcgatgataaaaccactcggaaacctaagttcgttaaaatcgtatgccatagtggataattttcaaaaacgttcaatgcgcgtggaataccaatggtccctctagttgcttctgattttttcagcgatttgtaatcaaaggtacgtttcagtttataca

SEQ ID NO: 1627 - DNA, 1240 bp, Listeria monocytogenes-4B
  misc-feature (1)..(end): n can be any nucleotide a,g,c or t/u
tatccgatagtctaagttcgcctagttcactagtttctttagttaaattaaatctcgcatccacagtagctttatccggattgactttactcggcatcgcttctagcattacctgtgtggctttgtctacttcaggaataatctctaactggtaaactgtattaccacccgctgtattaaacaccgctacctgactagttttttctgtctcagagaaactttttaaagcagtactaagctcaatatcataattaccttcttgcacaccatctttaaaaaaagtaatggttaattcacgtgtgcttgcattcaaatcccatttcgcttcagttgaaggtaagaaatctcctgttaaattagtcgttccaaagttgaatgaatctggtaaaaccgttttaaatgtatctccagctttgtagtttttccctgagaaagtaaaattcattttcagaactactgctccgccattttttatacggttagtcgcaccaagttcatttccagttccattttccacctttactgcagtaaaaatattatctgttataactgctttcagattcccttttttagagggttgttctgtaacagatggagttttttctgcctctttttttgttgaactagaagttatagcctcttctttatcagctaaagtgacgttataagtttgttcgtctaaagtatatcctggagcagccttctttgggttaacaatatattctccttctgaaagtgaattttctataattgtcccgtgttcagttatagaaacttcttttgtttctccagtttttttgtttttaatttcaaaagaagaaccattgattttttcttttgtatctttatcttctttgattattttaagcgttatcattgttgttttttcatcaacaatggttgctaatacaggcgacacgttttgaaaaacgagtaaaccaataattgcaacgataaaaaaacctctccatttcaccatatatttcattaagctgttttcctcctatgcaagttgtgtctgttgtataagacctatgacttgttgaattataacaatgggcgagaagtcgaanatgttcttaaagaacaacanagcggatttattgtgtctttctagtgaacaaaaaagtatgttttttgctaaaaatatactttttcaatacaaaaccctcttttcctgcattattatatggaattttttctatatataatagataaaaaagtcgctatcctgttaaga

SEQ ID NO: 1628 - DNA, 921 bp, Listeria monocytogenes-4B
tgtcgtcgttgtaaagtttggctttacttttaccaaagctcattactttaccaccgccgccaccttgagactggctcattaggaagaagaagaggatgaagataattacaaaaggtacaatagaagttaggaatgtaacccaaccgctgttttgtttggcaggtactattgttgttttcacgtcttctttatcaagcgttttttgcaaatcgcctagtgaagtatcgctgtttaaagcgtatgttgtgaaagcagtgctgcttgttttgctttgtccaagacccgtttttttatcgtcggaacttttatcgctagatttaaattccccattgattgtataaacactacggtctggctgtatttctacggatttaactttaccatcttctaacttactcacaaattctgaatagctaatatctttggctgcctctttgtttgagttaaatgaagcaacaatcccgataataacaaggaatattatgacataaaatatcgcatttctaaaaaacctgttcattccttacctcctcccacgcaagagcttggattcttactttttctggactttacccctttaaaagttgtttttggctaatagcagatttagaaacaattttttcttcccctgattattaaaaaacacatccgtttcgcttttctcttacgaagttattctattattaatatagattttttaatatttattgatactattttcaccttcgaaaactaagactaatgatagcataccgaatctcgattgcccactattttgcatgtttgacatcaattttttgttttcgttttctgaaaagctatctattacattttaacaaaatattgttctgtttgttaattaatttcactcgctgtatatttctggttttaaaataccaatatatggtaaattgcggtaac

SEQ ID NO: 1629 - DNA, 843 bp, Listeria monocytogenes-4B
tcgattggaactgtcacagcatgtacgagcgcgaacagtgtgctggaaagataaatggaagtacctgaaattgttttagttccttcgtaaattggatttacagttggtttttcaactaggaaatctctccagtcaatgtctacgtcggcatcggcatccgcatcggcatcggcgtcagcatccgcatcggcgtcggcgtcggcgtcagcatcggcgtcagcatctttatccgcatcagcgtccgcatccgcatcggcatccgcatccgcatcggcgtcagcgtcagcatccgcatccgcatcggcgtcggcgtcggcgtcagcatccgcatcggcgtcagcatcggcgtcagcatccgcatcagcgtcagcgtcggcatccgcatccgcatcagcgtcagcatccgcatcggcatcagcatccgcatcggcatcagcatccgcatcggcatcagcatccgcatcggcgtcagcatccgcatcggcatcagcatccgcatcggcgtcagcatccgcatcggcgtcggcgtcggcgtcagcatcggcatcggcatcggcatcggcatcggcgtcagcatccgcatcggcatcagcatcggcatccgcatcagcatcggcatcagcatcggcatccgcatagacgacggcatcggcatcggcatcagcgtcggcatcagcgtcggcatcagaatctgctaatggtaggacagttctggctacatcttcactcgttttaacttcattaccatatttagctgttacttgaagatgaataacatctccagctttcgcattataattaggaatattaatagtaacctttccagcgcacggatgaacgttt

SEQ ID NO: 1630 - DNA, 1069 bp, Listeria monocytogenes-4B
gctggaaagtcggacgtaataaccagtagttttaagagtaataatagtgtagtacccatggctaatcccgtcattggaagcttttcaggatatgcgatggaggaaacagaagtaagtaaaattcaaattggaaaccctcaaggagacaaaaaagctggagcatatcaaacaacgttaacttttacagttgcttttaaataagaaattacgaaaggagttgtgcatttcttgaaaaggaaattagttctggcaatggtactaatcagcttttgtgggatgttcctcttatcgcctgaacgagttcaagctagtcaaacagtggttgaggtgttcatttcagaggatgatttggatgtcagtgaagaaaacatacaggaaatccctaaaaaagaactggcagcctcttccgataaggataacaaacaacccatattacctaaagcaggtgatacagtaactaactataccttgttgggtttagtgctcgtccttatttggttgataatgcaaagaaggagtaagaagaaagaataacccctatgacagcatcgtaatgtagcaagtaaaaaaggaaagaaaatttctgtattagataggaagtgataggtatggctcgaatcgaatatgaagaaaaaattcaaaaaagcctactggttttatactttagggggtctaccatacagtctatctgcagggagtatggtattcctcgttacgaatttcacaaatggatgaagttacatgatgccgataaactggaaaccaaagaggtgaagactttcctacagataagagaattaaaacaacaaaaaaacaaattagaagaagaaattttgtttttaaatgaagcaatcaatctgttggaaagtccttgagagggatgattttaagtattgattgataggtagtatgagagagagggtgataatttcatcttctcttttttgcttttatattttggtacagctgattcatgtaaaaaaagggtatacccaaaatatacacaaaaccatcagtgtaaatacatttttttcaatgtatagttagggtggatattaaatgggtggga

SEQ ID NO: 1631 - DNA, 1035 bp, Listeria monocytogenes-4B
cgtttaaggcactctagcatgcatgtgcgagcggccgacagtgtgctggaaagtaacttgaggccatctataatcgcatcaatttcttcttttgtattataaatataaaagcttgcgcgagctgtggaagaaacgtcaagccacttcatcaacggttgcgcacagtggtgaccagctcgaatcgcaattccgtcttcgtccaaaatagtcgcaatatcgtgtgggtgttctccttctaaattgaaagtcactaagccacatcgtttactcgcgtcttttggtccataaatggtaatgccttcgattttgctcatttcttctatcgcgtagctggctaatgcttgttcatgtgcgtgaatatttgcgagtccgacttctgccaagtaatcaatcgccgcacctagcgcaatcgctccgccaataatcggtgttccggcttcaaatttccacggcagttctttccaagtcgaatcgtataattcaacataatcaatcatttctccgccaaattcggtaggttccatcgcatcaagcaattcacgtttgccatacaaggcgccaatgccagtaggagccatcattttgtgccctgaaaaagcataaaagtcagcatctaaatcaactacatcaacttccatgtgaggcaccgcttgcgcaccgtcaacgagaatgactgctccaaattgatgagcaattgctgcgatttctttcattggcgtgatagtcccgagtacattagaaacatgagctaatgcaacgattttcgttttttcaccaatcgtttttttcgcttgttccacagaaatcgtgccatcttcttctagttcgatatatttcaaaaccgcgcccttgcgtttagctagttgttgccacggaatcaaattggaatgatgctctagataagaaataacaatctcatcgccagcttcaatatttgcttccgcgtaactatctacaactaaattaatcgctgaagtagtacctcttgtgaaaataatttctgctacttcacgcgcatgaataaacttggctact

SEQ ID NO: 1632 - DNA, 708 bp, Listeria monocytogenes-4B
atggtaaactaggcgttaaagtctggatctaccgcggtgaagtccttcctacgaagaaaaacaatgtggaaggaggaaaataataatgttagttcctaaacgtgtaaaataccgtcgtgaattccgcggaaacatgcgtggacgcgcgaaaggcggaactgaagttgcatttggtgaatacggtcttcaagcagttgaagcttcttggattacaaaccgtcaaatcgaagcagctcgtatcgcaatgactcgttacatgaaacgtggcggtaaagtttggattaaaattttccctcataaatcttacacttctaaaccaatcggggttcggatgggtaaaggtaaaggtgctccggaaggttgggtaagcccagtcaaacgtggcaaaattatgtttgaaatcgcaggtgttcctgaagatgtagcgcgtgaagcattacgtctagcagcacacaaactgccggtcaaaactaagatcgttaaacgtgaagaaattggtggtgaagcaaatgaaagctaatgatatccgtgatttatccactaccgaaatccaagatcaagaaaaagctttgaaagaagagctcttcaacctgcgctttcaattagctactggtcaattagaaaacaccgcacgtattcgtgaggttcgtaaagcaattgcccgtatgaaaacaatcgttcgagaaagagaacttgcttaaaaagaaa

SEQ ID NO: 1633 - DNA, 1204 bp, Listeria monocytogenes-4B
aacttaaagggaaggctatatactgaaaccaaacaatacaaacgaggtgctggaatatggcagagaaaacaatagtagaaaaattacaactgactaaatataaagaagcagttatcctaaatcaaccaaatggagcggattatttccaaaatctagcaaattacgaagaaaaactagcagacaaacaatacgatttaattttcgattttgtggaaacgctagaagaattaattacgttcgtgcaaaaagttattgctgaaaataaacttgctgcgaatggttatttatttttcgcctaccctaaaaaaggcaataaaaagttcgctacatatgtacaccgcgatgaactcatgccagcgcttaaaaccgatgaagaaggttacgtcgacggtagcacactcaaattcacacgaatggtcgcgctcgatgaaacgtacacggtagttggtctaaaagaagcggcaaaactaaaagcgaagggcgttaagaaaaataacccttccgcagatgaatacgccgaccatgtacctctagtcgccgaatttctagcagacaaaggcgatttacaagccttctacaacaatctagcgacaggataccagcgggtttgggcgcgctatatttactctgccaaacaaccagcgacacaagaaaaaagacgtttagagatggttgatattttgagccaaggttataaaacgaaagatctttaccgacaagggaaaaagtaaccaaataattttatttggttatttttgcgtttgaaactgcttctttatgtaaaaatgtctaggcgtgatagaatagaagaggaataagacgaaggaaaatcttgttgcactggaaaaggggacatgcaggatggcgaattatattaacaaagaaaggcgccaaattgattttgatccatttgatttacggataattgccgtaccagaagtagtagcggtgcagtttaagccgcgctcagagcatactttacttattcgtattgcggatgtcggcgcaacctatcagccactcaaaaacgaatcactttttgaagctattttgcccgttcactttaatgatattaacgaagaagatgattactgggggcttagtgacaaagagcaagcggagatgaaactatttaacgaggtacatcgcgatttgatttataattttgtggatgagcacccagattttacgcagattgttgtca

SEQ ID NO: 1634 - DNA, 1410 bp, Listeria monocytogenes-4B
agcgtgtcatgatgcgggttttctgtatacatacgcggatcttcttgtgtaaaaaaaggatatccgccaatttgactacattctttacccagttgatataatgcttcagatttatcttcatcctccgcgaaaatttggtcagccagctcataaaaattacttccaaattcattttcaaaatcaaagctatcttgtaatagaatctgatctgaaacttgcccagctattttaaactcaccattaacaacggggtaaaagtccgactttgctacatcttcaaaaaatgcatcttgttcttcagcagttaagctctcacttcccaagtcatcaaagaaaaacactcgaaaaccttcttggctcgttggattttcaaaattaagtccgtacaaatcatcttgataatccacataaaaagcgagtaagccaaattccggataattttccatttgtggcatttctgaaaaattaatttgtgttaataaagacagcggtttaccttcttcggtcactggatagccatgctctctcggcaagtaaccacgcccaccagctttactttgcaacaatgaaagcttaccaacatccttaaaatgcagttctatacgctctttctctgtttctaaaaatcgttctgcccattcactaggaagtatatcaaaaagttgttccatgacttaccttctttcttttcttctaattataacatgaaaaaagcgccatatctgacaaaagcagatacagcgcttcttgagtttttatttatagaatttgaatttccctttacttgccaagacgcctgaaccaccaattagtaatagcgcgcggtcatcaatgacttttttcataacggaagctggatagcctttcaagtttttaccgaaaacgacaccaattgcatcgttatcgcctagagagcaaactgttcctttttcatgataaacaaagtcttgtagatctgtttcgcctttaactaatttagctaagttcactgcagccacatcggcttgttgcattgcgatttgggacgttggtgggaatggacggtcgtttgctgggttgatgattagtgagcagtcaccaacaattaaaatttcctcgttaccaggaacagttaaattgttgtttactttcacacgaccacgaccagcttcaaagccagatgcttcaattacgctattgccacgaacacctgcagcccaaataatggttgctgctttgatttcacgaacttcattttcactttccgcatattttacgccatcagcgggagcttctttgactggtttacccgcctggaattctacgctcgggatcttccagttcaccaaccccataatgaacccagttcggatgagattggggggaatacctttggagctggttccatacaataaatgcccccttcttcca

SEQ ID NO: 1635 - DNA, 975 bp, Listeria monocytogenes-4B
gtgctggaaagtgttactaatatgtcaagtttatataatcacaagtgggctcctgaaagatttctttattaaatcatttgcccatcaatttaaatttaattcttcataatttgcttccaatccgccacattactcaaagcaatcattgattcttcgttatcagtattgattttaagcaattttttatttaatttccactttagtataactatactattaaatcattgacacctaaatttacaaaattaaattctttatactagctatttcccattgtctatttagggtataccctttttttacatgaatcggctgtcccaaaatataaaagcaaaaaagagaagatgaaattatcatcctctctcccatactacctatcacttgattcttgaaaccatccctatcaaggactttccaacagattgattgcttcatttaaaaacaaaatctcttcttctaatttgtttttttgctgttttaattctcttatctgcagaaaagtcttcacctctttggtttccagtttatcggcatcatgtaacttcatccatttgtgaaattcgtaacgagggataccatactccttgcagatagactgtatggtagaccccctagagtataaaaccagtaggcttttttgaatttcttctccatattcgattcgagccatacctgtcacttcctatctaacacagaaatttttatatcctttttacttactacattatgatgatgtcacagggggttattccttcttcttcctttttctttgcattatcaaccaaataaggacgagcactaagcccaacaaggtatagttagttactgtatcacctgctttaggtaatatgggttgtttgttatccttatctgaagaggctgccagttcttttttagggatttcctgtatgttttcttcactgacatccaaatcatcctctgaaatgaacacctcaaccactgtttgactagctt

SEQ ID NO: 1636 - DNA, 765 bp, Listeria monocytogenes-4B
  misc-feature (1)..(end): n can be any nucleotide a,g,c or t/u
gtcgatggcaccgagatgcatgctcgagcgccgacgtgtgctggaaataaaggtcgcacaattatcgaaaaataagaggatttgttccagtgattggaacaaattctttttttttgtgatactataatggaaagagctaaatacacaaaaaggagtctgattttgacatgacagaagaatttgtgaacaaagaagatgcgctgaaaaattataatgcaaaagagtttcgtacaccagatggctatacgagcgatatgattttaactacagttaaagagttgaacgggaaaccaacattacatattttattaattaaacgaagccttacaaacgcagaaggaaaaccaaatatggaaggcggaaaatgggcggttccgggcggatttgtcgatgaaaatgaatctgcggaccaagctgccgcgcgtgaactagaagaagaaacaagtttgactggtattccgttgattccttttggggtatttgttttaccgggtcgtgatccgcgcggttggattatttcgcgggcattttgtgcgattgtgccaccctttgcctttgcggcaaccacgcggctggggatgacccccccgcatatagcccttccctccctgtccccnccttcggcaaccgcccctggctccctgcccctcccctcctccccccccctcccccttctgccccccgcttctccctgcctgtgttctcctttccctgcccctctccttctcctcttcgtctctcttcaagataaaaacaaaaaaaaaa

SEQ ID NO: 1637 - DNA, 931 bp, Listeria monocytogenes-4B
tatggggcctggtgcacttattgcggtcggctatgtcgatccagggaactgggcaacttctattgccggcgggtcagaatttggttacacattgttatccgttattttaatttctaatattctagccgttttattacaatcacttgcatcaaaattaggcattgtctcttgtcgcgatttagcccaagcttcaagtgatcacttttctaaaccatttggattcgttctttggattttagctgaattagcgattatagcaacagatatcgcagaagtcatcggtagtgcgattgcgcttaatttactatttgggattccattaatttggggagtttgtattactgcattagatatttttctcgtattatttttacaacataaaggtttccgctacatagaagttattgttattactttaatggttacgattcttgtatgttttggtgcggaaatggtgatgtctcatcctgatatgcaagcaatagcaaaaggttttattccacaatcagaaattgttactaatccagctatgctttatattgcacttggtattcttggggcaacagtgatgccacataatttatatttgcattcatctattgttcaaaccagacaatacgctcgaacaaaagaagggaagaaagaagcgattcgtttttcctttatcgattccactttttctttaacgattgcattattaatcaatgcatcgattttaattttagcggctgccgctttttatacgaccggtcagacataatgtcgctggtattgaggatgcttacaaattactcaatccaacacttggaagcagtatcgccagcactgtttttgcagtagcattactcgcatcagggcaaaattctactttaacaggaacattagctggtcaaatcgtcatggaaggtttccttaatatccgtttaaaacc

SEQ ID NO: 1638 - DNA, 1724 bp, Listeria monocytogenes-4B
  misc-feature (1)..(end): n can be any nucleotide a,g,c or t/u
cggccacagtgtgctggaaagggttgcgcttatttttcaattggttccgtggtctaatatcttcgccggagcagaagaaaatcaaacaaaaacaacccaacaaatagcacaatcagatgaacaaaaaggagcagatgaaaacaaaacaaccgtaacatctgacaatagagagacaactaaaaatctagttaatggatattttatattactaaaaggctctgttgactggaattttacaaataaagtaactgacgcaaacgggaatacaaaacaaacttatgcaccgggagactcactcaagttttcaataagtttggcaatcccatcctattcagaatcagtattggatgaaacttatacattttggatacaaaaagacttctttcaaggagacaaagtaacatttgttaatccagcaattgatggattaacaccgagacaaaatgtttttacagacgactccatgaaaaactcgattggaacaaaaacaataaatggtgtcgagtatattggttacacgctcaaatttaaccaaagcccagaagccttggcaaaatatgaagatgagccgcttactaacgctaaatttgatatgtttgcaacaataaatacgactattacaacgaaagatgactataaagctattgtaattgaagatgataaagacgtagatattagtaatattgaagtccccgtgacaccaccaactcccgatacagataatggtgtactcaccgcgtctaaagcaatcgattctgcttggcggttagataaagacactggaaaatatcttaaagtcgctacatcatctacaaactatacacctgaaaaagatgatctagttttctattatgtgtatgctacgaacaattcagcggaaaatgccgttttagaaaaaatggtagatgaattaccagctggtttttccattattacggaaggctcaccagaatggcaggcgttatcaactgcatctggctcttcgcttcaacgcggctgggtagcttcagcagaccaaacanaccttgccccctggcgcaactaggtacgaattaccattttccccagctcagacaatctccaaaaatggtggcggtatttataaaacgatcgcagcaaaagtaacagatccaacgaaagatttgactaatgttactaaaagccccactaaaggcggcgaaggtaaatctggttctgtaacaccaagtgggaaagatgtttatgacatggcaattacgacaaaaattagttccacttacgataaaaacaataaatatattggtgctgttagtagcacaactacgcccgtttctatatcagaaggaagcacagttggcgtaacatatacagcgattaatcaagggaattatacaaaagatgttgtcgtttatgcctatgtaccagcaggttatgaactaaataatgatacatctgatttcaaaactacgaatgataaatggaaatacgaaacaaccgtacctagtggtggcggtgtgtggagtgatatcaaagtttactccattacactttctggaggcatggcatcaggtgcaactgcaaatgcgaccatgtacatgaaagctatcggcatgccagatgatgggacttatagcgcagtagacttttacatggctggagaaatcggttcattttctaactttaatggtgattctactttagacggagcaattaccgatgtagattcgacgccagatatgaatcca

SEQ ID NO: 1639 - DNA, 765 bp, Listeria monocytogenes-4B
gcgcaaattggctttcactcgagcaattaactcgcgattactaaatggtttcgttacgtagtcatctgcaccaagttctagtccgataactttgtcaatctctgaatctttcgctgttaccataattattggcatatcatattttttacgtacttcacgacatacctcaataccatcacgacctggaagcataatatccagtaaaattaaatctggctgaacttcttctacaagttctaacgcttcatcgccatcataggcgcaatatacatcaaagccttctttatttagattaaacttaactatatccgcaatcggtttttcgtcatctactacaagaattttcttttctgccatttttttacagtcctctcattcctggatttcgccggctttaaccgggacagatactttttatttaatgcgtaaaaatctcactaaacattttaaattctggcctgccttcataaaacaacatgctaagaatagacttactaaccaattataacacatcccattaattatctgaattattacaagcgattttctcttaaaattggataaattggctactgctgtgtaactttatcgaacaaatgcaatttggaaactcgcgttactgcttcttccaagcgctcttcatccattaaaagacctacgcggacgtaaccttcaccaaactccccaaagccactaccatccgcaacggcaacactcacctcttctagcagataatcagcaaattcgctacttgtaaaattttcc

SEQ ID NO: 1640 - DNA, 1296 bp, Listeria monocytogenes-4B
aaccgcgatagccatttcttcattaacacaagctaaaccgaaaccactaaaagcaacagtatcgccatcttttaataattttgctgcttcactagcttttattacttttgacaaattcctcactcctcattgttcaattattcacatatatttgtaatgacatgctgttctttataaagcaacttccgtgccaacatcaaaaatagctctataaagcactttataaattcaaatattatttattgtcgcaaaaaagagacgtcaaaatgatggtttttacaaacagaagtcgcgaaaacgcaacaaaaaaggcctaatcgcaaaatccgattaggccttctatttaatgaagtgtttttagttttcgatataaaacagaacgatgaattccaagtgtactagcagcttttgtcacgtttccattactttcttcgagcactcgcaatataaaatgtttttccacgtcttgcaaataatctttcaaataaagtgagtctttttttgtttgttctttaaaatgtaagtctagtgcgaaatcatctatttctgcaacagtcacttctttatttccagacataacaactaatcgctcaatctggtttctaagttcacgaacatttcctggccaattatgagaaagtaattctttcgttttatcgccacttaactgaaaatctttttggtatttttgattgaatttttgtatgaactgacgtgcaagaccaataatatcttgcggtcgctctctgagtgctggaatgtgaaccggcacaacattaatacgataatataaatcacgcctaaatgttcctttttcaaccatttccccaaggtttcgattggtcgctgaaatcagtctaaagcggcgtttcgtttcggttgttgaaccaagccttcttacctctccagtttcaagcactcggagcattttcgcttgtagctctagtggcatttcagaaatttcatctaaaaataatgtgccaccatcagctagttcaagcatcccgggtttttcaatatccgcaccggtgaatgaacctttttcatgtccaaaaagctcagattcaaataatgcttttgggattgccgcacagttaatcgagataaaaggttcagccgcttgttcactcttttcatgaatatagcgcgaccagacttctttaccagcaccggactgccccgctgataagactttactgggcaacggagcgatctggttgccacacgaactatctgctgcatcgggacgctctctgctccttcgccggggcctgtttcgttataaaccaaaaagaa

SEQ ID NO: 1641 - DNA, 926 bp, Listeria monocytogenes-4B
aatcgccgcatcttctggtcccatggtaaaattatccccaatcggcaagaaagcaacgtctagcggatttaattcaccaattaatttcatatcagaaaacaaaccagtgtcccctgcaaaataaatatttttatcttctatcgtaaatacaatcccagttgggaaaccaaggttaacaatgcgaccatctcgaaccgtctgcgatccgtgaaaagcttgcgtcaacttcacttggccaaaactaaactgtcttttcccgccaatatgcattggagcgatattttcaagcccatcctctactgctaaaaaagaagccaaatccgcattacagataacggttgctccagaattcttagcaatttcaactgtatcaccgacatgatcatcatgtccatgcgacagaacgataaagtcaggcatctgctcttccgcttttaaatcacatttctcattaccagaaataaatggatccacgagaatagttgtatccccagtaattattttaatacaagactgaccatgaaatgaaatcttcatgttaaaaaacttccttcctgattcattattctatgtgtattattgtaccactatttattataaactactatataacacctcgtaaactaagaggtgtttattagcaaaataattccttcgcatgttatcatgaaatagaaatcaattggaaagaaggtacaattatggaaaaaaatatcgatgtcttacaaaattggctaaaagaccaaggtgctgaggtggcatttttaacagatccagagaacatcgcttatttctcgggttatcatagtgagcctcatgagcgcgtgcttggcttagcagttttcccagatagtgaaccgtttttatttacgcccgctcttgaagtagaagatgtgcgcggcggtgactggacacaccctgcatac

SEQ ID NO: 1642 - DNA, 1040 bp, Listeria monocytogenes-4B
  misc-feature (1)..(end): n can be any nucleotide a,g,c or t/u
ttgtctagttttcgcggtacatgctgtttgccaaaaattccgtatccttcgcaagtcgaaatagctggttcgcaatcgtttccggtgcctctttaaaaccgcgcgtaatccatttaatcagtacacccgagcatccgtaagaaaagaattccgcataaaatacccggtccgcctcgttcacggctccattcgtatcaattttctcaaataaatccataaacagcgaattcgttaatttagaaaagcaaaaagaaaggatactcgcatccgccgaaaccgtgtttttatagaaatcagcattttctttaatcgattccagcattttcagtacatgcttatcccaattttcaagcgtaatcccatccgccaaacaatggaaaaaatcattttcatacgtccaagtaagcaaatcgtatttatctgtaaaatgatagtaaaaagtttgccgattaagaccacaaatattcgtaatatccgcaatactaatcttttcaaaccgcttatgctgacaaagctccatcagcccaccagcaatcgcttttttagtaatgagtgattccgccatggcatccgccccgtttcgtttgtttgggttaattgtatctcaggtggggttggaattgctagggaaagcatgggagaggttggtgctttattatctccttgaatgaaaatgatagattttagttgaactaatccaaagctttttggcttcccggctagctcgcgtgcattaaggtgtctcaagttatttagtaaattcactttgggaccttagccggcttgattattcgatcggcgtgatactttttatgtggagcttatataaaagtaatacaaaaaagtaagcagtagtagcactgcttacttaaaatgcttgggtttctgctttaatccttttgctcttgtagtggtggatgcttcacttggtcatcttcttgactcgagccatctttaaaaacaagtagattaatatggtaatttccagcgacacgttcgngccgatcgacgcatgcgatggtagatagtacattcagtcg

SEQ ID NO: 1643 - DNA, 1131 bp, Listeria monocytogenes-4B
cgtaagcaacctacagcatgcctgagcggccgacgtgtgctggaaagatggtttctttttggagtatgataatgaacgttctggagattttgcgccactaaaaaatgtcacccgtccagacttgaaaatcgttctaggcttaattacatccaaaacaggtgaattagaggacgaggcagccattaaagcacggattgaagaagcgagtgaaattgtgcctctttccagttgcgcttaagcccgcaatgcggtttcgcctcgacagaagaaggcaatattttgacggaagaagagcagtgggataaattgcgatatgttgtccggcttgcgaaagatatctggggcgaataataaatgaggagaactagccgaagagtttgtgctagttctttttgtgtctttacaaaaaggatgactagggatagaatagatgttctagaaggagggggagccctttggacgataaattacaaaagaaattgaccttattacctgaatcaccaggttgttatatttatagagatgaaaataatgaaattctttatattggtaaatctaaatgtttgaaaaaccgtgtaaagtcttattttcatagcaaacaaattgggaaaactgcaagacttgttaggcaaattcgagatttagaattaattattacaacctccgaaaaagaagctttactactcgaaatgatcttaattcaaaaataccagccaccttttaatatccagctaaaagaaggaacgagctacccatatatcaaaattaccaacgaaaaaaatccgcatatccaacttgcgtctgaagtcaagcgagacggcgcgcattatttgggcccttatcgcggctccctttccccctgacatacgggggactctgatccgaaaattgtttgctttctgcccctgtgaccgtgacccccgaccacccctgtgtgttcttcctccctcggctcctcccccccgtccctgcccttcccccttcggccccgcggcgcctgcggtgtgttctctccccccttccccccgttcccccgtcccccccctttctccccccgcccccctcttggccgtgctagccttcgctttccttctctccctcctgcgctaacgaatcctactaacaacatag

SEQ ID NO: 1644 - DNA, 1068 bp, Listeria monocytogenes-4B
  misc-feature (1)..(end): n can be any nucleotide a,g,c or t/u
cagtatccactgcacctaagccattttcaacgatgaaaagaggtttttgataacggtcgtaaattgtattcatagtaatacgtagacctagtggatcaatttgccaaccccattcgcttgcttttaggtatgggttttttagtgttgcgaaaacgttgccttctgtttctttgtttttctctggatctgcgcttgttagacgagaagaatagtagctgaatgccacgtaatcaactgtgtgatcgcgtaatgcgtctaagtcgccatcttccattttgatgttgatgttgtgttctttgaagaaacgcttagtgtagcttgggtagtatccgcgtgcttgaacatcaatgaagaagtagccttcacggtccgcctcgatagacttccagacatcttttggattacaagtcattggatatgtgttacccgctgcaagcatacaaccgatttgattttcaggattgatttcatgaccaagtttagttgcaagtgctgatgcaactaattgatgatgagcagcttgatatttaacttcctctggattgtcctctttagtaacgtctaaacctccaccaatgtatggaagatgaagaatcatgttaatttcattaaatgtcatccaatattttactttatctttataacgcgtgaaaattgcttcacagaaattcaagtaaaagtcgatgcatttacgatttttccaaccaccatattttttgaaaacttctagcggagtatcaaaatggttgattgtaacaactggttcaataccatatttgtgacattcatcaaaaactgcatcataaaatgctaaacctttttcatttggtgtcgtttcatcaccattcgggaaaatacgtggccaactgatggacatacggaaacatttgaatcccatttctgccattaatttaatgtcttctttataacgatgataaaaatcaattgattcgtgacttgggtaaaaaccataatctgtagcaagcgctttcgctggattgaataaagcttnccaacgaccgtcctctctctactgttgggatgatatcaacaagtgaaagtcctcta

SEQ ID NO: 1645 - DNA, 949 bp, Listeria monocytogenes-4B
ccctggtggccactagcggcatgcctgagcggccgccagctgtgctggaaagcaaaactaacatagaatggtattatataaaagttgttaaaacactaagaactacttactatgcgggtgtagtttagtggtaaaactacagccttccaagctgttgtcgtgggttcgattcccatcacccgctttatatttttttataaatcctgttatcaacgcagtgtttcgacctttttaagcgaagcattgcgtttattttattgcctgaaaataaggagagaggggatgatgatagtgaagtcgacatcagattacgccgcattgaaagaagaactcattgcttatgcgcatgaaataggtattcaaaaaattggtttcacaacagcagacccttttttatttttaaaagaacgattactagaagcggaagcgctggacctttttacaggatttgaacatccggtaattgatgaacgggtttatccagagcttattttcaaggaaccgcagtcgattatcgccattgcacttgcttatccgtctaaattaaaagaagcacctataagtaaaaaaggagctagacgaggtgtatttgccagagcttcttggggaattgattatcataccgttttacgagaaaaattagcgctactcgaaacttttttaagtgaacgtttgccagatgtacgaatgaaatcaatggtggatactggggaatcatcagatgtagctgtagcagaacgagcgggcattggctggcgcgggaaaaacacgctgctcatcaacgtccgaataccgctcgtgggcctatccaggccacatgctcccccatgtcccatccgcaccacattcccccgctccccactcgcgcggcctttgcccccttgccgccaagcccgtctttcggcccctttctggctgagggcacatgactccccaaacataaaaaaac

SEQ ID NO: 1646 - DNA, 1164 bp, Listeria monocytogenes-4B
  misc-feature (1)..(end): n can be any nucleotide a,g,c or t/u
atttttttattgtgtgttaggtgaagaggggggggagagagggcgcaggcgggggcggggagaaggaagaggggggggggagaaggcggagaacgggcggaggggacggaggggagaggggagaggggggagagggagggagaggggggaggggagggggcagcgcagggagggggagggcgaggaggggggcgggagggggggacgaggacaggggcagagggggcgccaaggtggtggggaggtggaccagggggggaggggagtcgttctgcatcgggaagtggagaggtgcgccggctaggggggctggggggggtgagtctagctgtgttagttccgcgaggcctgtgttaagcgtattttcttgtgtcgcggtaattgcttaattattttcaccaatagtaaattcaactggtgttgtatcaagtttgtagcctgtcggggcttttgtttctattaattggtaggtgtcaaatttcagatcagcaatgctaagttgtccgctcgcatttgttgtaatgttttcttgtagcacagtgccttttgaatccaccaacttgaattccgcaccttcgagggttgcttttgttttcgcatcttctttcgtgagtgttactgaaccggttgtcccgccgccttcaccgcctccgcctgatgcaggtgtccaagtggacgtttgcttgggtacaaaatcagttccggctagtttagcggtattatcgtactgggtagacttcccgccatctgttgcggctgacgcctcccacctctcctccctttccttctctttttttatagtttctcttatcctttcccttcccgcccttctcctcctctctctccccccccccnccctctccctcctctcctttcccttcctttccctctcctccccccccccacatctcttccctcccctccccttcccccccctccttcctttcccctccctctccctttctccctcctcccccccccctcccccccccccccccttccctccctcccctttctctccccttccttccccctcccctccccgtcctcccctccccccctccttccctttcccccccctcctctcttctcctcctctcctccccttccactcttattttcccctcttcttccctttcccccacaacaacaccacaaaaaaaa

SEQ ID NO: 1647 - DNA, 1178 bp, Listeria monocytogenes-4B
gttaaaaaatggtttttcgagccaaaagcatttttcagaagtatttaagtttcattttgagctaacgccaagtgaataccgagcggaacatcatgtggaaacgaatttgttaatagacaataagacatctgagctgggcgctagtatagaacaaattgtgccatctccggaaattttagtgaaattgtcacgactttatcatgatgtggagccgggtaaggaattaaataaagcaccatttgagaaaaagaaaattgatatcacggaaaagaccgaacgttgtttaagtgagaatatgaatattttgacgattggtgagcttaaagaagtgcttaaagataatgtccaaaagcagattattacgacgcgtgatgagattgggattaattatattggtattcgtcatttgtttagaggttcgacgttcttgcctgaaacggaaacggacgaattagtgccaacttcttctccatatgcgaatgcggatttagcgctcacttttttaaaacagcaaaatttacaattgtttattcgcttggagtatcaagatattgtaggcgatgaggcggctgtttttgaacgattggatcactttttaaagcattgtatgcaggtttttgggcgggaatttgtttcaaaatggcattttatgttttttgaaccgaaaaatacatatgctgataaggaagaactgaaaaaactttatttgaaaatatatcacactataaaatcgcgttttccagctatccaagtcggaaattttgtcccattttcattgtctaaaaatgcagtgcctgaacgacatacgtggtttttagaagaagcggataaaatggactttgtcgcctataatgcgaatcaaaatgaagcggccgatttttccaaagaggatatgcaagccgccctccattccacaggatcatcgcccgccaaaaaccctccctcacaggcttctcttgcaacatcctcctatcctcccgcccctcctgccccgtgactggagccctccttcggtgattctactcctcccccgcacctcctctcacgccctcgccccccccctccccctcttcccctccctccccctctgcttccgcccccttcttcctgcccgctgccccgccccgtcttccctcttcccccctctcccccccccacccagtattccccccaaccac

SEQ ID NO: 1648 - DNA, 1407 bp, Listeria monocytogenes-4B
atctttggggacactagctcgctgctcgagcggccgacctgtgctggaaagtaggaggtaaatgaaatgacactttctttctcggatacatacagactgaacaatggaattgaaatgcctagacatggttttggggtctacaagctaacggatgaagcgcgtatgcgtactgcgctggaaaccgcggtggatgtcgggtatcgcttgtttgatacggcttcattttaccataatgaaaaagagcttggagacttttttgcgtcaagtggcttgaaaagagatgaatttttcgtaacaacaaagatgtggaatacagagcaaggttacgatgaaacgcttcgggcttttgaaaaatcgcagaaaaaactacaattggacaaaattgatttatatttagtccattggccaaaacaagatactttttttgacacttggcgcgctgtggaaaaattatatgacgagggacttgttcgcgcaattggtgtaagtaactttgaagcgcatcatctggaccgcctgcgtacaagtgccaatgtgcttccagtagtagatcaactcgaaacgcatccgcactttccgaatcatcttttacaccgctatttagaagagctacatatcgttcaccaagcttggagcccacttggccgaggtggcgttttacaagagcaaatccttattgacctagcgaaaaaacacggaaaatcacctgctcaaatcgtccttcgttggcatttacaaaataatatctccattattccaaaatcagaaacaccttcaagaattagagaaaatgcagctatttatgattttgaattgtcagaagcagatatgcgccaagtcgagcgtttaaatactggtgaacgtgtgagccacgcaccagacgtaatgtatgtaagatcagaaatttagcctaaaataaaaatctactaaaccaatttggcttagtagatttttttatttgttttttaattgtcttgtacgtgcttctttgaaaaggtaaaaatagcgagcttctgctttcttttcctcatattctaaattaggatcatattcaaaacttttacgcattagaactttttgtttgtgccacttttcttgcgtgacttcaatcaattccatcagataagcatcataggatttgtgtagtttaccaatcttcttgtttttcttccgaccaaacttattgcttctggattccattttatcacaaatgattatacttctcttcgtccttccattgcttttgagagcgtcacttcatccgcatattccaagtctccgccaactggaaggccatgcgctattctagttacttttatgcctgaaggttttaataagcgcgaaatacacatcgccgtggcttctccttcaacattagggttggttctttccagcgcacggatgcag

SEQ ID NO: 1649 - DNA, 1135 bp, Listeria monocytogenes-4B
atctaattcatgtcgcatcagtggataccacggtcgctccccgcattatagacccgaaatgtattttctttaaaaatataaaataaatcatcacggctcgataaattcattcccatttgccataaatccacttcaaaagtcatagggtcaaggctcgtgccacgtgactccgcatagcctttaaatacatcaaattctatagtgagtaaaccaacacgatccgattctcgactaaaatcaactggtttaggatgcacctcataccgaattcctggcatttgatcgctccaaatataataactatcgcgctggaataaaaattcataaatttctctgactgccaaatgataatctggaatatcaagtgcttgcaaattacattttgctgaaaagataaacggtttaaattgggtcattcccgggataaccccatcagtcccagcgatttcagcagtttccatgcttaactggggactttgtctggaaacttcttgtacagaaagacctggaaatgtctcactaagcgaatgcacttttccatttaattctaaaaacaagtcgctcatgaataagctgcacctcccattgtgtaattgtactgatcaaatgagttagcttggttacggctaactacctcggctaccactttgtcatccattttgattacaggatttttttgtactaagcgctccagaagattttcaactctagccaaatcacggccttgactcgtgtcaagcattgattgatttggcgcgcgcactttccccttgcgtatgagatagcccggatccccgcggaatcactcggcaaccccgccgccaaaccatgattggcggtccgggcgccttcgttgatggccacggcaccctccccgccaacccgccggccccccacatcccacccccgcctcaccacccgtctccgcaccacccctcccctcggtcggccggctggccgcctcggccccctgccgcgggcacgcccgtccgcccccgtcccctctcctccccccctccccttcccccctcgtttcccccccccccgccccccccactttaccccgtgccccgtccccccgcctgctctcgtcgtaggccgtaatccctgccgcgcccgccggcggagcccaagt

SEQ ID NO: 1650 - DNA, 1286 bp, Listeria monocytogenes-4B
tatgttggagatgaaattgtacttaaaggcaaatttgaaatgtatcacgcaacgcaaaaatgaaaataaaggactgacgtataatgaaaattgctgtagatgcgatgggtggagatcatgcaccaaaagaaattgttttaggtgtgatgaaagctgtggcccaatataaagatgttgaaattcttctttttggagacgaaacaaaaataaatgaatatttaactgataaaacccgcgtaaaaattatacataccgatgaaaaaattgaaagtgatgacgaaccagttcgcgctgtaaaacggaagaaaaaagcttctatggtacttgctgcccaagcggtaaaagacggagaagcagatgcttgtatttcagctggaaacacaggggctttaatgtctactggattgtttgttattggtcgtatcaaaggaatcgaccgtccagcactagcacctacactaccaaccgtgacaggaaaaggctttgttatgcttgatttaggagcaaatgcggaagcaaaaccagaacatttattacaatttggtttaatgggctcggtttacgcagaaaaagtgcgtaaaattgatcgtcctcgcgtagcgcttttaaacattggaacagaagaaacaaaaggaaatgatttaacaaaaaaatcattcgaacttatgaaaaatcaagacgcttacgaatttatcggcaacatcgaagcgcgtgatttattaatggatgtagcagatgttgttgtaaccgacggatttactggtaatatggtacttaagtccatcgaaggaacaggcgccgctttcctaagtatgctaaaaatgagtttgcttaatggctttaaaaataaagtcgcagcaagcttcttgaaaaaagatttaatggctttaaaagcaaaaatggattatagcgaatatggcggtgcttgtttgttcggtgttcaagctccagttgtaaaagcccacggttcatccaatgcgaatggtattttcaccacaatccgtcaagtacgtgaaatggttgaaaaacaagtggtcgaaacaattaaagcagaagtagacaaagtaaaagtaggaggaacagaatctaatgactaaaattgcatttgtatttcccggtcaaggagcacaaaaaattggcatgggacaagatgtagcagcagaatatcctgaagcaaaaaaaatctatgatgatgctgacgaaagactcgggttttcaatcacagaaattattacagaaggtccaattgaattattaacgaaatccgaaaacgcacaaccagctta

SEQ ID NO: 1651 - DNA, 1184 bp, Listeria monocytogenes-4B
  misc-feature (1)..(end): n can be any nucleotide a,g,c or t/u
gtgaaacaatcaataaaatttatagtaagcaagatgaatggggtagcctaacgcttcctgaagtagctacttatatggaatccgagttaggcttaacagagcaagacaataaagctgcatcagaaaaaattgttgctgaggcaaacgcggcaaatgttgtttttgtaccgactgttattgtgggtgaacatatttttgatgagcacattagtcctgaagaattacgttcgttactagacggcgaattagctaaataaaaaaagcgaatgtattggcctaaaattttaggtaatacattcgctttttgtttatttttaaaagaatttcctccgccagaatacaatcgcaagcgctccggcaatcccgaatgcaaaaccgagcgtcagcatccaagccattggtgtattcataaacggtaatttcacgttcattccgtaaaaactaaacaccatcgttggaatcgtcaagatgatggtaaaagaagtaaggaatttcatcacgatattcatattgttcgagataattgaagcataggcatccatcatcccgctcaaaatattcgagtggacttccgccatttcaataccttggcgattttcaataataacatcttctaataagtcttgatcttcttcgtacattttaacaatattttgacgcatcattttatcaagtacgactttattcgatttaagggcggttacaaagtaaactaaacttttttcaatccccattaaatcataaagttgtttatttttcatagattcatgtagttctttttcgatttcgtctgtttgacggttcaagcgttttaagtgacgcaagaaagtagtggaaatcatgtataagatttgcaatgcaaaccgtgttttcatatgtgtataaaagcccttaatacggtttctaataaatgactgtacaatagaagaatcaatcgtacaaattgtaataaaataatcctttgtaataattatccccattggaatggtttcgaatgaagcgtaatgaatatcatcttcatcaactaccggaaagtcacagacgattaaaacggatccgagtcgtatcggtcatcggccttattttatgctaactggatgttgattattatgcatcagtcatnnnnnnnnnnnnnnnnnnnnnnnnnnnnnnnnnnnnnnnnnnnnnncnnnnnnnnnnnaaaa

SEQ ID NO: 1652 - DNA, 1371 bp, Listeria monocytogenes-4B
agcatgcttgagcggcgacatgtgctggaacgttccattacattataaatcgtttctaaaaaacgatcaaagtaactaataaaggcataaattgtaccaatcgctaccggtcctattaatgactctgcaccaaagaaactaagaataatcactacagccaacgcgtaaatcaaatcaatcgccggtccaagtaatagcgcattaaatttgatatttttcattccgacgtcatagtaatctttattgattttctcaaattcttttactaaacgacgctcttgattaaattgttgaactatcgacattcctgaaatcgactcagcaatttttgcatttaattgacttaatttttctcgtctcgcccggtaaaactgcgaactgtatttccggtaaacaaaaataataaagacaataagtgggaataacagcaaactatataacgctaattgaacattgagcgcaaacatcgccgcataaatccctacaagcataaacaaactttggatcgctgttgaaagcacattaataaacatatctttcaccgcttcggtatcatttgtcacgcgcgacacaatgcttcctgcaggcgttttgtcaaaataacgcatacctagcgaatgaagttttgtaaaaatatcaatccgcatttgttgcacaatttcaagcgcgattttttggaagaacagcagttggaaataccaaacaactgatttcccaatcgtaagtcccaaatatcccgcaccaagaattagcaaagcctgcatttccaaattcatcggtgttaaataatcatccaaaaatatcttaatcaagattggtgcgaagacatccgcgagcgttacgagaagaacaagcacacctgtccaaatgaaactcggaatatgatattgggcgtaactaagcgttctttggaaaacctggcgatggtctttaccggacatggctgaggtgggatgtgggggattggtgggtcccgtctgcctgtccccctcctgctcggcgctctttgtgtgcgctcgcttttgcggtctcgtgtggtgccgtgccttgtttgtctgtctcccctcctcggttgcccggcgcgtcccctttccctttgtcgctcctcggccgcgggcggcctttcctcgctttcccgccctctcgcgccttcgcgtctgtctctttgtctccctctcggcgtcgctgttctcgttggtgcgtttcctccgctttcgtggccggtggtcgcttgttgcccgtacttggtcccgtggttgtggtttgcgtcgttggcgcgcgtgcctgcccggtccccctcccttcttccctcctgcttctgtgcgcggtttcctttcgggcgcctttaccacattagtaaaaataaaaaag

SEQ ID NO: 1653 - DNA, 2179 bp, Listeria monocytogenes-4B
ctatgggccaccagtgtgctggaaagagatttacgctcaatccattaagttcgtaacctcattgaatcagctaacaaagcacaaaaagaacttgctgcaatgagccaacaacaaattgatacaattgtaaaagcaatagctgatgccggttatggtgctcgcgaaaaacttgcgaaaatggcccatgaagaaactggtttctttatttggcaagacaaagtaatcaaaaacgtctttgcgtcgaaacatgtttacaattacatcaaagatatgaaaaccattggtatgttaaaagaagataacgaagagaaagtaatggaggttgcagttccacttggcgtagtagcaggattaattccttctacaaaccctacatccactgttatttacaaaacacttatttcgattaaagccggaaatagtatcgtattttctccacatccaaacgcattaaaagcaattcttgaaacagtaagaatcattagtgaagcagcagaaaaagctggttgtccaaaaggcgctatcagctgtatgactgttccaaccatccaaggaacagatcaactgatgaaacacaaagatacagcagttatccttgcaacaggtggatctgcaatggtaaaagcggcttattcatctggtactccagcaattggagttggtccaggtaatggcccagcatttatcgaacgcagtgctaacattcctcgcgcagtgaaacatattcttgattccaaaacattcgataacggaacaatttgcgcatctgagcaatctgtcgttgtggaacgtgtgaataaagaagctgtcattgctgaatttagaaaacaaggagcacacttcttatccgatgcagaagctgttcaacttggtaaattcatcttacgtccaaatggttcgatgaatccagcaatcgtaggtaaaagcgtgcaacatatcgctaaccttgctggtctaactgttccagctgacgcaagagtacttatcgctgaagaaacaaaagttggcgctaaaatcccttattcaagagaaaaattagctccaatcttggcgttctatacagccgaaacttggcaagaagcttgtgaacttagcatggatattctttatcatgaaggagctggacatactttaatcatccactctgaagataaagaaatcattcgcgaattcgcactgaaaaaaccagtttcccgtctcttagttaatacaccaggagcacttggtggaattggcgcaacaacaaatcttgtacctgctttaacacttggttgtggggcagttggaggaagttcatcatctgataatatcggacctgaaaatcttttcaacattcgtcgcatcgctactggcgttttagagttagaagatattcgtaaagaagaaaaccaagcaacatctgaacttccggttgatgcagacgcactcatccaaagtttagtcgaaaaagttttagcagaattaaaataaaaaataaaacactaattggaggaattttaaaatggcaaacgcaaacgcattaggtatgatcgaaactaaaggtttagtaggagcagtagaggcagcagacgcaatggtgaaagcagctaacgtaacacttatgggtaaagaacaagttggtggcggtctagtaacagttatggttcgcggcgatgttggcgcagttaaagcagcaacagatgcaggcgcagcagcagcagaacgcgttggtgaattactatctgtacacgtaatcccacgtccacacagcgaagtagacgcaattctaccaaaaagcgctgaataagactaacttttaacataaatcaggaaaaagcgtgagcgtaaggcaaaagggttccatcagactcggaaattgcccgaaactttcgctttttaccagatttaagcaatacaaagcttcccaacattactaacaccaattgtaaatgggacaaaaggatgtggttctttggctattttgacagaagatgagttacgaaaagcctatttacacaccgatttaaaaacaaccaaaaaacttgatataaaaaaaggcacaattatcacaccttcagctaagagtttcttgtctgaaaagaaaattgaccttcattatattgatgaaattgcagaaacaaaagtagtagtggagccagtgaaaaaagaaactactagagcaaaattccaaacgatttat

SEQ ID NO: 1654 - DNA, 1246 bp, Listeria monocytogenes-4B
attccttatgttcaaaaaagtaatcggtttcattagaatgtaattgtaagcaaggcattgaaaaaatacggggtgacgaaatgatagtatcggaagaacaattatttttaaatcagcatctacgcacaaaagaagaagtgctagcttttattgcagacaaggcagaagaaatcggtatcacaacaaattcagctcaggtggaaagtgacttatgggctcgcgaaaaagaatacgcaacagcagtacaacaattaatcgctattccacatgcgaaaacagaggcaatatcagaagcaaaactgcttttcattcgcctcactgaaccgattgattgggagtcaaaagaaggttttaaggcacaagccatttttgccatattagttccagctagtgaggccagccagcaacatctgaaaattttatctagcgtggctgggaatttactagaagaagcatttcaagaacaaattttaacgattaaaacggaacacgaattgatggattacttgaaagataatttggaaggagaattaatatgaaagttgtaggagttacatcatgtatcgcaggacttgcgcacacaccaatggcagccaaagcactagaaaaagcaggagtaaaattaggacacgatgtcaaaattgagcaacaaggagcgatggggacaattgatgaaatcacgccagctgaagtgagcgcggcagatgtagttatcatcgcggcggataaagtaatcgacggggaagagcgtttcaaaggaaaaccagtcgttcgtgtgaaaattggtcaatgtgttgcgaacggggaagcggtgttaagtaaagtagttgcagcaattgaagcacgtaaacaaaaggaggctaactaagtcatgaaagggaaattaaacgaagcaaaagaccacttaatgtcgggtatatcctatgcgctaccagtcattatcgcaggttcacttgttgtagctgttgcaaaattgattgggattattggcggggttacaaatctggatgcttatgctgatgcaagcggattttatcattatgtttatctatttcaaaatgtaggttgggcggcaattggcttacttaacttagtacttgcgggatatatcgcttattcaatcgctggaaaacctgctcttgctgctggttttgttggtggggtccttgctactagtacaaatgctggtttcttaggtgccgttgtcgctggtttcttcgcaggttggttaacaaactgggtgaaa

SEQ ID NO: 1655 - DNA, 1614 bp, Listeria monocytogenes-4B
  misc-feature (1)..(end): n can be any nucleotide a,g,c or t/u
acggccgcaagtgtgctggaaagtcttttggtagcttatttccaaaaggaaaacctatgatttctgtatcatttttactaatttctgttgaaatttcataataatgtaactcatattttaacccactatttacacaaattagaaaaggagtaatcaacaattctaaaactgtttgattttcttttgaaaataaaaccaaattttttatgttttcttgtgatatataaatactgtcattttcactaaaattatttggtaagctttctatttttccaattatctcttgttcttccatcttattatttccctcattaattatagcgctaaaattttttcagctatttcatcttcgttatttttaaatattaaattttctccaaacgaatctatgaaaatttttcttatacctttagctaatacattcatatcaatgttatgattttcttgaacaatactaattattttgttgatttcttgactatattcatcttttggagctaagggaaacagctctattggatcccaatcatttattattttttctactttttcatacataatgacaccctactttccatacaatttttctattattttttccattccttcatcaaaatcttttttaccccaagcagtaactaatttgccatctttgctgacaattgcaacaccattttcagttataaaagcaaatttttctcccccattctgggataaagcttttccacgctccacaaaatcgtcaacttgactcttagaaagaccacgttgtttcaatctagacattccatgttcggagtgttcagaccaatttattttaatattaggatgattaactaatttacctattttcccaaagtccgttccaacttcaacgccattattaataaatcttctgtgtaaccaatctttagaaaccttgaacttcttccctttataacctccagcagtataacggaaaacaagaccacttataatactaaacccttgcgctttacttatctcttgcccagtaactgggtctcttccttttttcaccgattgaataactgcctgcaacaactcggcttcttcttgcgcttctttgctttcatgtggtaattccccgttaagcacagcggcattatacgcgttcgttgcttctacgtctactataccatttttcattaacacccacatttgaccacggtacgttttttgatattcgtcaaaattgaatgttgcttcgttattttttagcgcttttcctaaggcattttgcatccgggttacggtggtgaaattcaatttgctcatatcataggtgcccgttttactgttaaactgaatattcgactggagttcgcgaatggtttgctgaattccttggactaaatcggttaaattatcaaaaaaacccccatgactttgttcaaaagccaagcatttttctaagatattttccttgcttgtngggcattcctccccttgggaaccgtaactctgcatttgcccttctgttccagcttcttccctggcctagtgcttcttttttcgcttcgatgcgctcatccttccccccngtccccctttccccccccttccattccccctcagaaaaaccacacatagaga

SEQ ID NO: 1656 - DNA, 1370 bp, Listeria monocytogenes-4B
  misc-feature (1)..(end): n can be any nucleotide a,g,c or t/u
caagtggacgcgagcttcaacttccaaaaactagtcgaaaatcgagaagcgtacattgaacggattcgaggttcttacaaaaatgggctggataataataaagtagaatggattaaaggttatgccgaatttgtcgatgaaaaaacattgcgcgtaaacggcgaactagtgacagcggatcatattttaattgcaacaggcggcgaaccagcgcttccttccattccgggcgcagaatttggcatcacctcagatggcttttttgcattaaaagaactacctaaaaaagtggcggttgttggcgcgggatacattgcggttgaactagctggtgtactacaacaacttggctcagaaacgcatttatttgtacggaaacatgcaccactccgaaattttgatccacttttaacagatacactaaccgaaattattgagcaatcggatatgatgttgcataaacacgctgttcctcaaaaagttgaaaaaaatccagatggcagtttgacgttgagcttagaggatggccgcacagaaaccgttgatacgcttatttgggcgatcggacgtaaaccagtcatccaaggtcttcaaatcgaaaaagcgggcgtaaaacttctagaaagcggacatatcgccgtagataaattccaaaacaccaatgtagcggggatttatgcagttggcgatgtaacgggtcattatgaattaactccagtcgcaattgcagcagggcgccgtttatcagaacgccttttcaataacaaaaaagatgcacatttaaactatgaaaatatcccaaccgttgtatttagccatccagctatcggaacggttggtttaacagaaccagaagcaatcgaaaaatacggcaaagaaaatatcaaagtgtacacttctagctttacctcaatgtatacagccatcacagaccaccgcgaaccttgccgaatgaaattaatttgcgaagggaagacagagcgcgtcattggcttgcacgggattggttacggtgtggacgagatgattcaaggattcgctgttgcgattaatatgggcgcaacaaaagccgatttggacaatgcgggtgcgattcacccaacaggatccaacccatttgttacaatgaaatagaaaacaacgatggaggaggaagtacgtaatgggaaaaaaattatcactttattttgtaagacatggtcaaacctacttaaataaaaacttgagcatgcaaggatgggctgatacgccactaacaccagacggaattgaaatagtcaaaaaaagtggtcgcggacttctttccagggggctcgttnccgcacnaaggngcaggngcattnacatcagttcnncnaaaagntcagccc

SEQ ID NO: 1657 - DNA, 1456 bp, Listeria monocytogenes-4B
aaatgaagcaactattctagcttctatacctaaacataatgttgattacaatgctagagtaatgcaatctgtttctgttgactacgagcgagatatgatttactggacgcaacagtacagcggaaaaaaaatgactgatgctggagctggggagtcatataacattacgaggactgatttgaaaggaaattacattgatcaaatgtggtgtttaaacggtgggcatggaacaaatattgcacttgattataatttagaaagtaaaaaaatgcatatttggtcggcatataaaattaacaataaatgggaagtggtttgttacccttatgaaagtaataaaatcctaaagggaaccgagtccagtattttcatttcaaaagtagagagtggcagctataaccgaatttcaggagatttgaaaaacgatatgttggtttttcattcaggtggagatcctaaaacgtttaatattagaatcgtgcgtgcttcctctgtaagagagggaaagcttgaagtactttataaagtaaaggcaactgaagcaaatgatgcatatgtttaccaagggtgtgcgttagattttccatatttatatacagcttctggtactggtggcgttgaagaaccaaaacaattaacttgcgtggatatagtaactggaaaacgtgtgtatcaaacaacatttaagttcaatacaaaagcaatgcaaaccacagaaagcaattttgcagaaccagaaaatgtttgtgtatattataaaaataaccaaaagcatattgtagtaggatatgctttgggaggagcagggaatcgtatgaatagagcatttgatcttgtagaaaataatagtgaaaacatagaaacagaaattgaaagtttaagaaaccttattataagtagaaaacgtacagaagttatttttgatcaaagtactaaaggggatatgacaacaaattttaaattacgtgaaacgttaaataattttgatattatccaagttgtccttgaatctggtggggggtatacaactgcatctcgactcgtatcgccaaaactattcgaggcatctaaatcatttatttttgcttcgagtaatattggtgatgctagtggaaataatgtagatatgtacgaatacgctgctaattttaatgatgacttaacatcttttaagaatgatcgtgcagtcaaaatcgaagtttcaaataacggaacagtacggggtaatattacgaatatgggtattaaaaaaatctatggtattgttttgtaataaattaaaattaaagagcgctgaatgatttctttaacaaatctttccaatttttggcgggacgattgctttttccacctgcactcttatgctataataaagaatgtgaaccatgtgatcataaatggttttcaagaggcacggaggtgaagtgatggatttttccaatatgtcgatattgca

SEQ ID NO: 1658 - DNA, 1520 bp, Listeria monocytogenes-4B
  misc-feature (1)..(end): n can be any nucleotide a,g,c or t/u
ccttcaagcttaggggaagtagtaacaagtatgactttcccagtaagtatgcactggggtagtaatgatttacgttatattcgtccaatcaaatggcttatcgcaatgtttggcgaagaaattattccatttgaaatcactggtgtctcaactagtaatacatcccgtggacatcgtttcttaggaaaaacagctacaatcaaccaaccgagcgactatccaaatgcattattagaacaatttgtcgttgttaatgctagtgaacgcaaacaggctattgtagaacaattacgtgaactagaaacgatggaaaattggcaaatcagagaagatgacgacttattagaagaagtaactaatcttgtcgaatatccaactgtactagcaggtaattttgaaaaagaatatctggaactacccgaagaagttttaattacgacgatgaaagaacaccaacgttacttcccagttttcagccaagaaggagaattgttgcctcattttgtaaccgttcgtaatggtaaccatgaaaatctagatacagtggcacgaggaaacgaaaaagtactacgcgctcgtttgtcagatgctgatttcttctatcaagaagatttaaaaataaccattgatgaagcagttgctaaattacaaaatatcgttttccatgaaaaattaggcactttgacagaaaaaatgaaacgagtgcaaaatgtggcattaatgcttgctgattatttaaattggcaagaagaagataaacaagacattatccgcttaacaaatatttataaatttgatttagtaaccaatatcgttggtgaattccctgaactacaaggtttaatgggcgaaaaatatgcattgttgcaaggcgaaaaaccagcaatcgcaacagctattcgtgaacattatttaccaagctcagcacaaggcgatttaccacaaacagacttaggttcacttatcgctattgcagataaattatattcttaatcggcttcttctgtgtaaatattgcaccaacaggctctgctgatccatgtggcttacgtaccagtgctccntgagcagtgcgtattatccatgcaaatgggtgggacatatcaatgctagaagtggtttctcgggttggggatatagagcgtgcagaaggcgctactagactacaaagtgcagatggtataaaagaactgcagacttttcctacaaaatcgctgcgtggtattttatcaggccatcatactcgcgtgataatattgacgctggtattgagcggcaatactaaattgaatccttaattggatnggccgggcccaaatattgaattaacatggccgacccgaattggtctcgcccatggttgaagcctttaaacgagttgggtaatttccaaaaaatacccaaatagggtgtaaaagggtccccgggcctttgagaaatgaatccgacaaccccctattgtataatccgaaacctaaattgtgatttccggggttgaaaatggttgacagactaaagct

SEQ ID NO: 1659 - DNA, 1056 bp, Listeria monocytogenes-4B
aaaatggcatcaccagcgtcatgggcgtatgtatcgttaatatttttaaagtaatcaatatcgattaacattaatgtcacttgcctacttccatcgtccattacatggttgattttttcatcaaattgccttacatttgataaccgcgtcagataatcgagcgtagagtcttgttcgtatttttgaaacaattgctttgatttaatcatattcttcattaaacctgcggaaacagcgccaattacaagcgcgatcgatacaaatataaacatatttatccagaagtctggctcttttgctaaaatcaaatgtaagttaacgactacaaaaccacacgcaataatattcaaaataaaaacgccccaaatattatatttttctaagcgtttgctgaaaagagctgttataatgccaatcagcatcatgattacaccagccatcatcgctgcagaattcactgaaattaaaaatcgtgaagctgtaataatgaccgccgaaacaattgccggaatgggcccgccataaaaacccaccataataatagggatatgacgcaaatcaacaattacattatttgaaatcggtatcccaaaaatcattagcgcaaatcctagtagccctgcccatacgcctatcaccatttttctatttatcgataattctttcgtaattggttctttatagactaaagaaataatataaaatcctgcgagtaatatcgctgcattacttaccaactgttgaaccaaaaagcatgcccgactttcactttgctgtttaataccgcattgtgctgacaactattgattgctctctgcgcagagaaacaccgcgctaaacgccaagccgggcaagaatgtgcctggtcctctcttggctgatgaaaaatggggggccggaaagtgggtcccctcgtgccgggtcgcgcatctctcccgccatctgcccaacccccgcctgctcgtttgtccgctccccgctccctttccctcgtgtgtggcggtcgcccttccccctcctccttgcccccccccaatttccagctaaaaaaagaaa

SEQ ID NO: 1660 - DNA, 1250 bp, Listeria monocytogenes-4B
  misc-feature (1)..(end): n can be any nucleotide a,g,c or t/u
gcctccagtgtgctggaaagcccccgcacattactacataaatttgcggtattgacactttagaaaatattcatcgttataagggttctggggcaaattacctttctttaggctccttaacgcattccgttcgtgcatttgacatcagtttcaatagcaaaggaggaataaaggcatgaatttactagaaacggtcgaacaagatacaatgccaactcattataagcaaatgacgcaggccgaaatgattgctcgtgtgacggaaattaaagcccagcttggcgagaatctctttattccctgtcaccattatcaaaaagatgaggtcgttccatttgccgatgcgattggcgattccttacaattagcgcaaattgctgcacaaaataaaaaagccaaacatatcgttttttgcggtgttcattttatggcagaaacagcggatatgcttacgacaagcgagcagattgttactttgccggatatgcgcgctggttgttcgatggcagatatggcggacattcatcagctaacaaatgcttggccaaaactgcaaacccttttcggcgatacgattttacctgtcacttacattaattccactgccgcaattaaatccttcgtcggtgaacatggtgggactacggtgacatctagtaacgcaacaaaaattgtctcatgggcgctcgaacaaaaagagcggattttctttcttccggatcaacatctaggtcggaacactgcgttcgaactaggcattcccctcgaacatatggcaatttggaacccgataaaaaatgaactggaatatgagggcaatttggatgattgtaaagtcattctttggaaaggctactgctctgttcaccaacatttcaccgtcaaaaatatcgaaaacattcgtaaaaacaatcctaaaatgcggattattgttcatcccgaatgcacccatgaagtcgtttctttagcagatgattccggttcaacgaaaaaaattgtaactgaaataaacaatgccgcacctggcacagaatgggcagtcggtaccgaagccaatttagttggtcgcattatccaagaaaacccagataaaaaaatcgtctcgctaaatccgtttatgtgcccatgtatgaccatgaatcgaattgatttaccacatttactctggacactagaagctatccaaaacggcgaacaacgaaaccaaatcaaagtcgataaacagacaaccaaatttgccttanaagcca

SEQ ID NO: 1661 - DNA, 1470 bp, Listeria monocytogenes-4B
gatccaccttgcggcggtatcctaccgccacccttggcttggataagggggaaaagggagatggagggagagaaagcgaggggggagtggcgggcgggggggaaaaggggggggggggcagaggggaggagagggagggggaaaaaaagggaaatgcgagggatgagggtggacgtgagcgaagggcggggcgaggcctggggagggcaagaaggcaaaagataaggggagacgggggcgaggtgggagtggtacggagtggagagggggggatcgagggcgggtgggtggggggaaaggccaggcttctcacgccactgtctaaattcaaatggaacccactcatgttaccgtccgaaatgtcgctcaatggtcacacccagcataatttctccatgaggcatcgtcatcacatcacaggaattcgtaatattcacaaggcatccctttgaacccccatcgcgatgatttttggtacaatctcagccactgaccgacttgtttcaacgagctcttccatacgatcctcgcgcagtaacgtttctggaccaacagccatgacaatgacatcggcatcacctagtgcgctccagtcattcgaagttattgtagtatacgaattcgtcatcgaagccatatcgcgcagttctaacgcttcactttctgctttagtttcgattttatctattaacacaatttcatcacaaatcccttgagttacgagggaaaaagccacgtcgctcccaacatgaccagtaccaattattccaaccttccgtttcaaaaaatcccctccacaattaattacttgaatttaatgcgattaattcatatttaatgatagttttattattttcccacacgagttttcgagggattgcttctccaagtgtttcgccttcttttgttttacgtactgcgattggcacatcaattggataaatccgataacctaatttttctagttcaaagaaattatcagaaattcgcttttcttttccttttgttacaatcattgtgtttacctctagtggcatacccaattttcccacctccagtttctttaatcatagcagagattgcccctatttgactagtttttatcatttaagattcgctcagcttgttgcacaatttggaccattcccgcatctcgcataaaaaagctaaaagccggttgtaaaatgaatcgacttaactccccttgaatgatgacagggccttttgtttcaaggtaatcatctagtgattcaatggaaataacatccgccgcataaactcgtttagtaaacgttcgttcctctgattcgaccaaataatcggctacaaaatgaagttcatcactaattgcgcccgtctcttccatgagctcgcgtttcgctgcgtctaaatttgtttctcctggttcaccttttccaccagggaattcaagcccacgaattttgtgttcggtaaaaagacaaccgtcct

SEQ ID NO: 1662 - DNA, 959 bp, Listeria monocytogenes-4B
cacagtgtgctgaaagttataatgaataatgttacatcgtgagtaatgttacttgccggatgggtgaagcatatccgagactgacgcggccagttacaaaagggcttccgagtttggcttgaaaaaaaggaggacatcatcttgaaaaaatggttattagtagttttaactttagcactaggattgtcgctttcggcttgttccggttctaacagttctgacaaaaaagaagacacaaaaaaagaaacaacaagtgataaagacaaagtactaaattattacatggacttagtagacgttgttaatgaaaacaatggcgattacaacgcttatgtaggagcagttggcgcagatcctaaaccatctgaagcagaccttgcagctcttgcgaaaccagctagtgaatcagcacttaaagtatctgaagcacttgctagtgaaaaaacaccagaccttggtaaatccacagatgatttcaaagcagctgtgaaacaattaagtgatgcttacaaattagaagcagacgcacttaaagctagtggtcgtgatacaacaaaagcagacgaagcgatggcaaaagcggacgaagcaattgctggcgtattaaaagatgctggacttaatccttcaagcattacaactgatacagcttcctgataataaaaaagacagtttcctaatggaagctgtcttttttattatttattttttgtttgattaatttcattttgaagttgttcaaaagtcgccattaattcttgagatttaacttctagtagctctttttggtcaagttcggtatcattgaataataccggatcgccaaaacgaataatgatttttttgcgttttaaaatttctccaaatgtttttggcccatcataaacggcaggtagcattggaacttttgctttatgagcgatagttactgcaccgcgttttaaatgaaggttggtcgt

SEQ ID NO: 1663 - DNA, 627 bp, Listeria monocytogenes-4B
tcctgattcaacaaagcaagcagcgaactggataattcggtcctctcgtgaagcttgatttcctgttgtttctaaatcgacgactatatagcgtttctgtttcatctgctccacctctttccttcactgcttttattcaaaaataacgatgcaaacaaacgagtagcttgagcagaaatccactcaagctccccgaactgattataaagtcgtatgcgctttttcttctggaagaatcatttcaatatgatttttttcatctaaaacaactattttgggttcatgtgttttcgcttcttcggtagtaaacattccgtaactcataataattactacgtcgccaacttggacgtgtctagctgcagctccgtttagacaaatcacaccacttcctggctcacctgggataatataggtttcaattctagcaccgttattgttatttacaatttgaactttttcgtttggaagcatatccactgcttctaaaatagcagaatcaatcgtaatacttccaacataatttagattggcttctgttacagtcgctcggtgaattttgcctttccagcacatgtcgcccgtcgagcagctgtaattacttatttcccgtcaaaaaggtaagac

SEQ ID NO: 1664 - DNA, 1071 bp, Listeria monocytogenes-4B
  misc-feature (1)..(end): n can be any nucleotide a,g,c or t/u
gggggcgggaataaagccgcaagcgggatgaggggtgagaacgccgatttagaggcccaaggttacttttcctatgattcgaaaaaatcgggcgggctaactgtttcgcatgtgcgctttggtgaaaaacgaattcgctcagcctatctaatccaacaagcggattttgtctcatgctctacctcggcctatttacgttcctatgatttattaaaaggtttaaaaccaggcggaacattcttgctcaataccatttgggaaggcgaacagttagaacgccatttgccagccgcaatgcgcgaatatattgcgaaaaataatattcaattttatacattaaatgcaatgagaattgcaggagaagcgggacttggtagaagaattaataccgttatgcaaacggcctttttccgagtgaccgacattttaccgtttgaaaaagcacttgctgatttaaaagaatcggctatcgctacttatgggaaaaaagatatggcggttgcggagaaaaatattctcgcgatggaccaaactgttgctaatttgcataaagtagaagttcctgcaaggctgggcaaatccagttgtaacagcagaaacaaatgcaacgactgaaaaaccagcttacgtacaaaatatccttgagccagtgaatcgcttagaaggcgacaacttgactgttggtgatttaatttcgaatggtatggtcagtggggcttatcctccggggactgcagcttacgaaaaacgcggaattgcactcgaagttcctgaatggatttctgaaaactgtacgatgtgtaatgaatgcgcctttgtttgtccgcatgctgccattcgtccaattttaacagatgaagaagaaatggaatctgctccagaaggctttatgacaagagaaatgcgcggcanagatggccttcgttaccgtatccaagtttccccaatggactgcactggttgtaacttatgtgcggaaacgtgtccggcgaagataagcgcttggatggaacctttgagagtcgcggataagaaattcaataggaacctgattgtcgttaccgataaatg

SEQ ID NO: 1665 - DNA, 1984 bp, Listeria monocytogenes-4B
acgcggcgggggcggctggggccgcacagccgcggctcggtgcgggcgggcaaccaattaattgaggggcggggggggcggcttgaaggtcggtgttggcgggcaagagagagcggccgcgcaacggagagaggcgagggacgacaaacggtcgggcgaaggcgggcgagggcggggaccggacgccctacgcagcggtgcggggtgggggcgatacggtaacgggggggggggacgtagggggaaggggggatggccacccctgcggccagggggtgacgataggcaggggaggaggataggaccggcagaggggtgggcgggcagcgaggagagtgggaggggaaggtggcgaggggagaacgcggggggggcggggggtacatcatccagaagggcctgcacgggccacagcgcggcgggggggggggggggggcgcccagctggtgtggaaagagaggccggcgggtataggggagtgggagtagttgggttgtgagtggatcgacgccgagtgggggggcttgtttttcgagtgctgctttgacatattcatagttcccataaatatattctttcaactcttttagccaaggcacgccgtggcgatacgctgcttctgtaccaacaatcccaaagacattgagcccattagttgtggcggtacttttgctccgcagcgaatttggcctgataatctttattcgtaataatatagtaggaagctttaatcgccgccaagttaaatgttttcgtagccgccattaaagtaataatttgatcttgataaaacggtgctgcgaccatcattggcacatgtttatgatttttcatcactaagtcagcatgaatttcatccgaaacaatcggaatttggtatttttcacatagtttcgctaattccaccagttcttccttggtgaaacaacgaccaccaggattttgcggattacatagaaggaataattttaccttttcttctttcatccgtttttccaaatcgttaaaatccattcgatattgacggttctcatatataagtggcgacataaccacttttctctcagtggctttcgttacattgaaaaatggtgggtaaatcggcgaaaccattagaactgcatcgccttcatttgtgagagagcgaatcgctaacgaaattgtcggaacaaccgctccattaaaaaataacgtgctcggatcgatttcaaactgatgctgctctttgttccaatcgataatagcttcgacaagtgccgctgacttggtcgaataaccaaaaatcccatgatcgatttgacgctgaaatgcatcaagtactggctgcggcgcacggaaatccatatccgctacccacatcggaataatattttttctgccaaataattcttctgccccatcccacttctctgaattagttccaatacgcggaatgacttcatcaaattgactcaaatatgtcacgctccttctctttcattcgcctcaattatagcataaatttcacctttaaagctcgccatagaaggatttagaataattgttaaagtttcgcctaagtgttataatttataaaatattgtaaggttgaaagtaggtggaatgaggatgagtacattcaaagtaggagacgtagtttctgggaaaatcgcaggaattcaaagctacggagcatttgtagcactagataattcgacacaaggcttagttcatatttcagaaatcacgcatggttttgtcaaagatatccatgattttttagaagttggccaagaagtcaaagtcaaaattctagatattgacgaagaaaaaaataaaatcagtctttctattagagcgacagaggaagcaccaaaagaacaaccaactaaaaagaaacaagtttcatctagcgaaaacgacgaaggttttaacactttacgcgataaactagaagaatggattaaaaaagcagacaaataaaagtcccaatcagcttggtat

SEQ ID NO: 1666 - DNA, 1287 bp, Listeria monocytogenes-4B
ttaagattgcacaaaacgcttgtgttaaaacaatcgctaacatccaacgttttattgatgcgttggatgtacaagattatgacaagtgcatagcgattattgatcaagtcattgatgcccatgttttagtcgcttatcgttaaaaaagcattgtccttactacttaaggtattatgctttttatttattttattttcactaaatatctaccagtcacgccaccgttcattacttggtgaagagcttcaggtaactcagaaaagcccacttctgttactaagctttctaaattagttaatttgaaatctgtcgcaagtctattccaaattcgttctcgttttggcatcggacataaaactgaatcaataccgaataattgaataccacgcaaaataaatggaaagacagttgtatctaattttccaccagcagacataccgcatgtagtaactgccccgccatattgaacagctgttaggaggtatgaaagaggttttccaccaacacagtcaatggccccggcgtatagttgtttgtctaatgcgcgcactttttcaggttgaaaagcttctcttgaaactatttcagatacaccgaatttttctaggaattcctttgcatcgctttttccagaagaagctacaacagagaagcctcgtttggaaagtatggctgagcttaaactacctacaccgcctgttgcaccacttacagcgatttttccagcatcgggtgttacgccactaaattcaagcgcatcgaccgagagtgctgctgtaatgcccgctgtgccaagtatcatcgcttcttttaatgatagaccatctggcaaaggaacaacccaagcagctggaacgcgaataaactcactatatccaccaaaatagctcactccaaaatcataactagtgacaataacctcatcgcctacttgaaattggtcagatttagaatggacgaccacaccacttgcatcaataccaggaataaaaggatactcgctcacaattttcccgtctggaagtacagccagtccatctttgtagttaataccagaataatgtacctcaatcgttacttcattttctggcaagttatctatagtagtttctctaaaatgaagggaagtattatctgcttctttttcaatgaaaagtgcttgaaatgatttcattttttaaattcctccacaactcaattttgtgttccccttcactttacgacttttttcgctttccagcacactgtcggccgctcgagacatgcatctagtggtgcccaaagaat

SEQ ID NO: 1667 - DNA, 782 bp, Listeria monocytogenes-4B
attgaccatcttatcacatgtaacataaaagaactagtgaaaatcgagcgtgtaacatatctgtaacaataaggcgctttcattctgaaaaaagaggaaaactagacttcaacgcctagttttccactgtgttttacacgataaaatcttctggtcgaccagtttcttcaaagtgactcttgattgctgctaaaattcgattagctgcgaatccgtcgccatatggatttaccgcgtgtgccattttatcatgattttctttattatccagcaaattcagtgcttctttaattagattctctttatttgttccaattagtttcaacgtcccggcttcgattccttctggacgctccgtcgtatcacgtaaaactaaaactggcacgcccatgcctggagcttcttcttgtacgccgcctgaatcggtaaaaacaagataagacttgcgcaagaaattatgaaaatcaattgcgtcgagtggctcgattaaatgaatgcgttcatgtccacctaagattttcgtcgctttttctctaacggctggattcaaatgcatcggataaacgagttcaacatcctcacgactttccacgatttctcgaaccgcctcaaacatcccttgcatcggttcgcctaaattttccctgcggtgagccgtcataagtattaaacgattgtcgccaagattttccaagattggatggtggtaatctttttgcacagttgttctaagggcatcaatcgccgtatttccagtcacaaaaatagtaccccggatcttt

SEQ ID NO: 1668 - DNA, 1682 bp, Listeria monocytogenes-4B
tacctcaaatgagtagcagcttttccgagtgtacaacacgaaccattcgcaacaacatttctaaaataaatgaagcgacaccgaatttaattcgttctgcaaaacaaggctatcaaatcaaccagcgtattccatttgaacttcagacagaaagtgatgttcataacgaaagtcaaaactcttactcgaattaattaaaaactctactaaaggcgttgacctgtttgaacttgcggatattttatatatttcagaagtaaccttaaaaaaagacatccaacaattaaaaaacgaactaaaagaagccgatgtccaaatcgtcaccagtaaagaccgaatcaaattaatcggaaaagaacgtgccaaacgaaaatatatgatttccttgctatatgaagaaggcggataccgtgaaagtatcaaaagtcgcattcaagaaatgattgaatttgtttctatcgataaactgcaaaacatcgtaaaagaagttttaacggaagaatccattacaaccaatcaatattcgatgatgaacattgtcttacattacgccattagcatcgtccgaattcaacaaggaaatacactcattgaaacccaaaaaacactcatccgaaaacactccaaagaatacgaaatatcgaaaaaaattgctaaaattctctcggaagaataccaaatccatttttcagaggcagagacaaaacaactcggacttttatatgttggcttgcaaaatgaacaatctgctaatgccaatcatggcgaactggaccaatttgtcgataaaaaaatcatcaaagcacttaaaagcgtgctcgccaatgtggaagaaacctatctcatcgatctccaaaatgagcaactttttatcaagctagcgattcacgtccaaagcctatactatcgctcacgttacaaagcgtacaccagaaatttaagcttacttgatattaaaacgtcttacccagtaacttttgatattgctgtttacatttcttctttgctacaagaaaaactagcgattgactttaacgaagatgaaatttcttttatcgcgctgcatatcggctcttttctagaaagtgaaaaccgagattatattcgcttagaaataggcctacttattgaggattatcacgatttaagaacaaatatgctgaaaaaactgcgcgcacgatttgaaaatgaagctaccatcaaactgatagaaaacgaggactctgaagaaaattttgatatcattttaacaacaaaccgagatattgctcttgaaaaagcgggttccatttttattcatcccttactaacgacgaaggatatcaagaaaatcagcaatcgaatccaaacaaagaaaaaaatcttggaaaatcacttgcgaggtcaacaaattgatcgctacatcgttcgttccctctacgccaaccaaattgacccctcagaactgacacccgcaaaaatcagagagcaaatgatttctaaaatggaaaaacaaaccttcgtcacgccggaatttaaagaaaaagtcgaaaaaagggaacgaatggcgccaacaagcttcccatccggcattgctataccacattctatcaagaatgatgcccttcaaagtggtgtatctataatgacgctacaagagccgatttattggaatgacgtcaaaataaaaataattgctctcg

SEQ ID NO: 1669 - DNA, 635 bp, Listeria monocytogenes-4B
tttgttacgttgaacgcgagtctttggagttgatgagagaagtctggcaaggcgatcaagctcgcaatttcggctactatttagaagacctccaagcagacgagaaaaataaatggtgccaaacctttcaagctgaggaagaaaaacgccaagaaaaaataaatacataccaaaaaaacatctaccaattggaaagtaaacaacaagatatacaaaaggagttgttccagtgagccgaatcgacatcggagaaatacaagattttgcattccaactacgcgcagccaaccaaacaggaagaaaaatcatccaaggcgtcaaaaccaccgtgacaaactacgtagaagatggtagtttaaaagggaaggccgtggaagcgtccaaaaattactttcaaatgacatacattccactctgcgacacgataatcgaggcaatgaatgagagtgaggaaaggttgaagcggtatatccaagactttcacgaccaagtagacctttctcctaatgctaaaattgatgcagatggtttatatgaactcggccaaatgattgaccgcattgaaagcaaaaaagaagcactgtaccaacgaatgaacagcagtacagaaggccaaatgcaaacctatcgttccc

SEQ ID NO: 1670 - DNA, 1152 bp, Listeria monocytogenes-4B
atgctgcttgagcggccgacagtgtgctggaaagatccgttggcgcaagagccgttgctaaggcaaaagctgctgctagtggaatcgtcggaatcatccagtggacaaaatatccaatcacgacaaccgttgcaaatacaagtccgagcgctaatactaaaatcggcattcgcataccccaaagagctgctttgtccgtctgtcttccgtcattaaatagcaatggcgcaataaacatcactagaaaaagttctggatttaattgcaaatcaaacgtaatcggcataatggcaattaatacaccaaggccaatttggattagtggtaccgaaacaaagggaacaaaccggttgagtaaattagaaataaagatggccacaagtaatgctaaaacatataaaaatatctccaatatgtatcgtcccctttcgttttttctcctatattattatgaagcaaaataacctaactcgcaaatataaaacagctttatttctatgcatccatcccgcttgcaaagaaataaagctccctattagattatttttctttttcttttttatattgatcaatttgatcgtttaagtttttcattttttcatctaaatgggtgataatgcgggcggcgtcttgtaattctttcactaactcaattggtgcttcttgttgactttcatcatgaattttatgctcccaactcgcccaaaactccgtggcatctgtccgaatttggacttccacggccctttcctcggtgcgattccgccggaatacatgctcttgcgcgctgttttgtgaactgctatcgccgttttgttctgggtttgttccctgggcctttactccgcgggtgcggctttctctttgccctgctcccctcctcggccttctcgccctctctccccctgtgcccttcccccccgcccgcccgtcctctcctcccccgttctcctctggtttgtgcggccgccccttccccccctctcctctcccctcctccctccgtccctctctcttcggcgcccccccccctccccgctccgtcctcgccccgctgctgctcccccccctgcccgcccttctcccccccttcccccccccctcccccctttctcttccccccggcccgcgaaccccccccgatgacacaat

SEQ ID NO: 1671 - DNA, 1474 bp, Listeria monocytogenes-4B
aaccgaacagcaacgtctgtttctgagagcaacaagctaactttggccaatacagcagacacaacaatccaatgtttggcaccactaagttgggacggttccgaaaacaatccaaaaaatgccattttaaccctagcaccaggttcggaaataacagaaggcgaggcagtcctggctattgaagcaccagagaatatccaggcaggaacgtatacagggaatctggtattttcgattaattatgaataactttgctaagcaagccatagaattttaagaagttaaaattttatggccggaaaagcttttcgactcctctataattaagttgcagctagaaagttcggcatctagaaattaactacgaaagaaggaggggagctgatgaagaagttttccatgcgagtggtccttattatttctgtgctttttattgcttttgggagcgctaatgtttctatcgcacaagagatggatacaacgaataagcttccagaagaggagctgggttctctttatacctctaatctcattacagaagaagtcgcgcaagacaaaccagcagaggtggagcaactagaagaaattccaactacggatgagttgatgcaaaatccagatgttctggaacagcctgttgctgattcagatgatccggatttaacagtggtaagctcaggtgcttactggacgatttatcgcaatactgtgaacggtgaatatagcttgcatatgtttggcaacgtgccaagcagtagaccaaccgcttggaatagctatttgaaaagcattaaacatatagagattgaagaagctactttgacaggaaattttgcatcgtattttgacaatagcgcttttccagcactggaaagcgtgaggattgaacagtgtaatttgtctggagtgacgtcttttgcttctgcattttatagttcaggaattgaaaaagttattattagggataatgattatccgacagcaccatctttactcactacgcaatctatgtttggttatgctaacaaacttacggagcttgatgtgagtggtcttgatacgagtgctgtaactaatatgcagaacatgtttcagtactgtagagcacttgaggaactggatgtaagtcattttgatactagttccgttactactatgaggggcatgtttcagtactgtgaattacttgataaattggatgtaagcaactgggatactagttccgttactactatgatgagtgcgtttgctgaatgtaactcactagagatcttggatgtaagtaattttgataccagttcagtaactgatatgactgccatgtttcaaaactgttatgcactggagaaattgatattagtaattttgataccagttcagtaactataatgtatgccatgttttcagggctatttgaagtcggaaatttagatgcaagtaattttgatactaggctggttactactatgaatag

SEQ ID NO: 1672 - DNA, 1783 bp, Listeria monocytogenes-4B
  misc-feature (1)..(end): n can be any nucleotide a,g,c or t/u
tttttgttgttcatcccggagggcagcgcgcggacgcggccgggcgcgagggcccgcgaagacgcaagtagcgcacggatatggtctccgaatagatcaattaatgaaacttgcaagggactagctacaaaacttttcagttcagctaaaacttgctcagtgtcgcgaatttcttcggttttgacaagccacatccatttaatagaagaaacatccacatttaaaatcttaccaagtcgccgcattttgacactttcatcatttaaaatggctttcatcagttcagctgtactgatttcgacatagtttctgccccataaattcataaatacttggactacttcggtaatttgcatgactacatcggctgttaatacgcctttttctttcatcataaataagtgcatcgcttgcataccgtcttgaaaaatcggttttctggccgtataaaaatcgcgttcatccaaggtaagctgtacaagctcatgttcaccgatttgtttagatgcctcaattatccgttcaaaatcccagtggagcgttcgtggccaagtgatagaattaattacttggaaagaattatccgttaagacgagcgaagtatgcgttctatcagacaaaattttcagtgtggtatctatatttcgttgtggcggtcgcacactcgaaatctgttctaatgactcggttacaaagttggtatctgtcatttcttgcttcacaatcgcttcgactacttcataaatcacttcgctatatctaagtgacatctcgttttccggcatcacgataatggtaaaatcaagttcatttgcaaaatcaatcagtttttgatccattttcggcacaaaaattcccacgtagtaaagaattaaagcaacttcgccaaccttatgtaatcgctcaattgtccgacactgtgcctcaacatcgtcacgaatattcacaaaagccgatacaactatttcactgccataaaattcatcattatcaaataaatcatcttctaaaagagctacctctgtatattctaaaacagaaatagacgaaacaagcttagataatccagattttccagagactactttcgcttcttttaaagatggtaatttcattaaatctgccaattttacgctcaaagttcgccacctccagttattctaagtgtaaacaatctcctagaaaaagtccatgccacgttaaatcttttacattcaaggcctattatagtagcattgaaccatgaataaacatattctgattaaaaacataagaaaagaaacggaggcaaattatgtctatagagccatccattaaaatagaagaaattattaatgaagttgaaaaagtaatcgtcggtaaacgacatgttgttaaattaagcttaactgccctacttgcgggtggtcacgtattattagaagatgttcccggtgttggtaaaacgatgatggtccgcaccctttctaaaacaattggtgtttcctttaaacgaattcaatttacaccagatttacttcccgcagatgtgacgggggtttcgattttcaatcctgaaacacgtgattttgaattccgtccaggtcctgtcatgggaaatattgttcttgcggatgaaattaatcgtactgcgcctcgaactcaagccgctttacttgaaggtatggctgagaatagtgtgacagtggatggtattacgcgcanaacttgccaacccatttttcgttatggcgacgcaaaatccgattgaatacgaaggaacgtatgcccttccagaagcaca

SEQ ID NO: 1673 - DNA, 1590 bp, Listeria monocytogenes-4B
gggcacttacagctgttgagcgccgacatgtgctggaaagacaatcgaggttaattccaattgttcgaccaattcccgtacgatttcttctttaaatggcatacgttcttttgttgttacaaggacaatcattaactgtccagttgtatgcgcaaatcttgtcataatatggcggatatcgccttttcctgtttgttcatcataaggctctgttccgtttttagctaggatttcacgtgttttttgaacagcaaaatcaccttgctcattatgaattaaacaagtggacatgtcgataatggcatggcttcttttttggtaaaaacctgctgttaacttaccattaacaaatcctactggtacttgtgatttattccggtagcgccacgggttttccatgcctagtgtttcaggaacttctacgtttagtttgccaatacgtttcatcgtttcttccacttgatttcgtttgaattcaagctggccatcgtagcttaagtgttgcaagctacaaccgccacatttggaataaaccgcacaaggaggctctacacgatcagcactaacagtttcaatattctccatccgagcaaagccataatttttatttaattttattattttggctgtcactttttcgccaggtaacgtatttggaatgaaaagtgggtatccgtcaattttgccaaccccactgccgtcatgcgttaaatcttcaatagtaagttcaatggattggttcttttttaaaagggatgcttccaaagtcccttgcccctctctttgctttacttaataatatattcgatgccgattggctctttaattactgcttcttcttgctctttaaaaacaagcatggtgtttttttgtagcgtaaagtcataaacaaatgtttttggatagatagtgacatttttattcgtagtcaacgcttttgtgttatctgtaatagtcgtttcttctggaatctggctattaaaaataccagctgcgacttcagcatcatcacttgaataacttgtctttagagatactttaatattattgtttgttgtgtcttctatttttacaggtgttttttctgtttgtacagaacgttcaccacttgtaatttcatagtttgcgaattttttctggatagttgttgttgggtaacgatattttgtattagtaatatactcagaaactttcttcgcttcaatacgaagtcgatatgctttgatacctttataacgattatcagtagaagctaattcttttaaaatatcttcgttagttgtttctaaaatcaaatccccatttgttgctatcgttgtatttgtattggttgcggggatagataaaataatattatcttgtattggaatttgcatttggttgtttatccatactttattactttcaattagctctgttttacttacttttggagcctgttcttctgcatccacttgccaaaagaaaaaaacagccgctgcgatagcaatgataagaacgattattatcatcgtgaaccttttaaattgatgtccacttgtcatatcgcattcacctcatttcttgtcagaatacctattatacttgtta

SEQ ID NO: 1674 - DNA, 1361 bp, Listeria monocytogenes-4B
  misc-feature (1)..(end): n can be any nucleotide a,g,c or t/u
acaaattgtgtcaatatacataattttatacattgaaaaataaaataagccatttaaaccttctaataaataacctatttcatatagaaccataatcccacgtgtataaaccgtatttttatacacgtgggattactttataaaaaatgattggaatgttccactatttacttcccttaaaccaaattccccacaactttcatgcgcaacctgggcgcattagccagatgatgcaccaatgggatttcttccactacttcaaccgagtcagtcactgtaccggccaaggttacttattctctcgcttttgctcgccattttgcagcgcttcatcccgcttgatttgggaaatagattcgccgattgcgttggcaactaggtcgattttatcgcggaaaatttgtgcaacaacagaggtttcgtctggaataattacactaccgaactgtttttcattttatcaatcgcatcttcggtcatttcagtaattttttataagctttctcagcaaaattggaattgctagggaaaacatggaaaacgtttgttcgctaatatataattaaaaaaagaggtgaatatgatgaaaataacagacccgctctacggaacatttgaaatagaacctgttttggctgaactaatccagagcccattggtttcacggctagcatacgtgcatcaaggtggctcgagttatttagtaaatccgctttgggaccttagccggcttgatcattcgattggtgtgatgctttttattaggaagttcggtggctctttggaggagcaaattgctggcttactgcacgacgtatcgcacactgctttttcgcatgtggtggattatgcgcttgattttgaagaggaagattatcatgagcagatttttgaggactttgtaaaaacttcgacgattcctgccattttagagaagtatggttattcttttgaagggatttttgatgatatttcgaagtggaaaattttggagcaagaagccccggagctttgtgctgaccggattgattatacgttgcaagatttgtatcgacatgggaaaattagtttggctgaggtggaagaatttttgcaggctttagtaatggttgatgggcggctttatttggcaaatatcgctcttgcagaatggtttgttgcgcaatattattcggaagtgattgattatttttatgatccgctgaatgtttatagttatgagattttggctgaagcaatgcgcattgcgtttcagcaggagacgattacaaccgcggatcttcggttgactaatttccagcacncgtcggncgatcgagcntggggnnaggttacttgagtcnnnnnaaagaggttagcct

SEQ ID NO: 1675 - DNA, 1447 bp, Listeria monocytogenes-4B
aaaatgtacttctcttattgcctcccaaatgaatatggagattctgggactatcagctttgttggtggcgaaatagcaattaatttaattcctgattattaaagaagaaccagaggagtccgtactgcgtaataagacagaaattcattgttgggtacttgatcctgattttgtggaacgtgttttggatgaatcgggtcaaaaagcgaaatatctatcatctaacttactttatacaagaaaagtttattttaaagctagtaagcgtaattttatgaagaaagaacttcgtattagagcatgcttaaaagagcttggtctgtacatgggcagagtaacaaaggataaggaattcattttgcctgatgaaatcaataattctattttagcccaatatgcgaatactactcgagaatatacgaatattattgtactaaaactacgaaaagaaggaattctcgatgatagtcacaaaccgtgggtcataaaaaaaatagacatactttaaagaacaaaacttaatatatattgatttttacgttaaaaaaggtggaaaagttaaaatattacctaaaaaaagcatagaaaaaatgtcacaaaaagtacttatttagacatattatgcccaaaaaaagttgattttaatgaacaaatagtgaaaaagttctttttttatgatagtaacgttattttatttagcttattccttctctagggtgttttcattgtgtgatattatactttagaggaggaatttgcaatgaacacattagaaaaacgacaacatgaaattttgaccaatccacttcatttttgtaagaagtctggagattttgctaagcatagtatgagtattaaactttctaaaaatgaactgtttgatgttgattttgttacaggtatctactttgttgaaaagggtattgttatgaaaggaacacaaatagatgactatattgggtacgatcaattgctaaaacctggagatgtctgtaatttttcatcttttatgtcttctgatttaaaacgcaatattggtgctcaattactctcgccaagttctagcgtcatcacggcagtagatagagattttttcatttttatggtagaaaagcatgttagtgtagaagaatttatgctttatcaagcgaaaaaagaaattatgatactgcaacgtcgctgtttgcttaatacgcttaaagtgaaagatcgcgttaaacacttgattgctgcaattggttatgaatatggcatttccaatggagataacattcaaatcccgcaagaattatctactacatttttatctaaattcatgggtctttcatgagagtctcttagcttaactcttagtgcactaaaacaagaagattacctcttcaatccctcaataccctgttgttttaactgtagaaaaacttttgtaatgaaaatccctatgactcat

SEQ ID NO: 1676 - DNA, 2107 bp, Listeria monocytogenes-4B
  misc-feature (1)..(end): n can be any nucleotide a,g,c or t/u
cgcgcccatgccaacgcgccatggttgcccagcttctgcatgttcacatgaaccccgcgcccggcaggcacatcaatcatattcagtcccatcacaacaggtgcaccaaactcaagtagctgaatggttaaatttagatttcgctcaatttgcgaggaatcaacaatatttaacatacaatcgaatttctcttccagtaaaaatctagtgacaactgtttcatcacgagaaatcggatttaagtcataaataccgggtaaatcaattaattttccagtttttgagcgcaacgtaccgactttcttttcgacggtgactccgctccagtttcctacatattcataagagcctgttaatgcattaaataaggaagttttcccggtatttgggtttccgagtaagcaatatgtattttgactcatctgcgttccaccataatggcgcaagcatcacattgtctaatgctgatatattgcccttttgtttcaaaagtacagggaccaccaaatagtcctttttgtttgatacaaatatcacaaccttcatcgcaaccaagtgcaagtaagcgacgtttaagcatggcgttctcaatttttaattctgagatgcgaactttttcaccgacagcagtttcatttaattgcataagctagcaggcctccttttatgttatttaatgaacatgataatcattatcaactatgttcattttatcacgaacagaccttaatatgaagtgtttttttgaaattgctgctagaatagcaaaatagtagggtataacagcaaaaaaatttcttaagagcatagccgtcttttaactaagaagcatgcctttttacctctgtattgatacacggaaataagtgctggagctgtttttaatcactttttttctgtcaagttgttcttttttatagtaaaatggtaactataatatgtatattaatggaggcaattaacacatgagtgatttatttactacaatcaaaggacaagttactgggaaaaacgtgcgcatcgtactacctgaaggaacagatgaacgtattgttggagcagctgcacgtctgcaaaaagaaaatatcgtaaaaccaattttgcttggtaacaaagctgaaattgaagcaaaagcaaaagaaattggcgtttctgttgaaggaatcgctattcacgaacctgcgaccgatccactttttgatgaattagtggctgcatttgtagaacgtcgtaaagggaaagcaacagaagaagctgcacgtaaaatgctcgttgatccaaactattttggaacaatgcttgtatacactggaaaagcagaaggtcttgtaagtggcgcggctcactctactggtgacactgttcgcccagcactacaaattattaaaacaaaaccaggcgtaagtaaagttgccggcgcaatgattatggttcgcggtgaagaacgctatttattcagtgatgtagctatcaacattgcaccagttgcagcagacttagcggaaaatgcgattgtaagtgcggaaacagcagaaatcttcggcattgacccgcgtgttgcaatgttaagtttctctacaaaaggttctgcaaaatccgatgaaacggaaaaagtcgtagaagcaactgctcttgcaaaagaaaaagcacctgaattaacgcttgatggtgaattccaatttgacgcagcatttgttccaacggttgctgagaaaaaagcgccaggatccgttattaaaggggacgcaaatgtatttatcttcccaagcctagaagcaggaaacattggttacaaaatagcgcaacgtttaggtaactttgaagcagttggcccaattttacaaggcttaaatgcaccagttaatgatttatctcgtggttgtaatacagatgacgtttataacttaacgttaattacagcagcgcaagcagggaataaataatgtgcanaagcaggggactaaatggggtactgcttttggtatgccatggcggggaggaagggatggattcagcgattgggggtcgtcgttgtacgatggaatgctggggctgggtgtgtgggggtggggcggcgcgataggttttcaaactgagaaaacccaaa

SEQ ID NO: 1677 - DNA, 1377 bp, Listeria monocytogenes-4B
aacagcagttggaaaaccaagcgccgcgccagaacgcgtaatatagccatttttttccaagtagctaaaaatagttcctgcttcaattcctaaatctattaaaacaaagttgccattcgctggatacagttttacttgctcaaaacgtttcgcaaacgcttcgtattgtttaattccatttgcattagaagttcggcatgcttcaataaaagcttgatcctttattgcttctattgctaatttttgaccgatgctcgttgtattaaacggcggacgaacgatatttagttgctcaatgattgctttatccgcaataccataaccaacacgagcgcttgccaaaccataaattttactaaaagtccgggtaataattaaatttttataagtgcgaattagtttttcatgtttttcaggctgtggcgtcacatattcaatatatgcttcatctaaaacaacaagtacatcacttggtactttatctaaaaacgcttgaatatctgctaaatcaatgtaattcccagttgggttattcggattgcaaacccaaacaatcgtcgtattgtcatcaatcgcattcaacataccatctaaatcatgcgcaccatccacaagtagcggaatttctcttacttcggcgccttcgattaacgcattttgacgatactgcacaaatgtcggtgtcgccatcactgtattttttgtcgtatccagtaaaacccgcgtcaacagttcaatcagttcatccacaccagctgtaaaaatcagttcctcttcttccagttggtagaaatcagcgaccactgtacgcaagctagaagcccagccatctggataaatttctgtttccacactagaatcggcttgaagctccgccacttttggagaagttcccagtgggttttcgttagatgatagtttggtgattttcgttaaaccaagttctgccatcacttcttcttcgcgttttccaggtttataagaagatagacctgtaagtgattttttccatttcattacgcatcctcctcttttactaaatctgggcgcagtacttttgctcctcgtaagtagacatggttgatggcttcgagtggtttatgtagatctgtgaataccatgaaacgaatgcacattggaagcgaatttggcaccggaatttcttgcatccccatgacaggaacatattcaaagccaggtgtttcacgcaccgccttagctggaaaagcggcaaaaatatcttctgtcactgtaatgatgacggatgttagttgctcactatctgttatttcattttgcgttaaaatttcttcaaataattctttcgtcgctgcataaattgcttccggtgagttagtttctattgtcgttgcccct

SEQ ID NO: 1678 - DNA, 1285 bp, Listeria monocytogenes-4B
  misc-feature (1)..(end): n can be any nucleotide a,g,c or t/u
ggggagggaggggggggggggaggggggggggggagggggggagaaaagggggggagggagagaggcggggcgggggagggggcgaaagggggcggagggcgggaggggggggtagggagcggggaagaggagggcggtatgacccctggtcatatgtcgcggggaatgtgcttgtgaatcggcggcggtagtagggcatcatggtgtgaaaagctatgtttgtgatgcgcttcgaccaacaccggaactttcctttgcagtacgtcatttaaatgcgtttggtgggattgttattacaaatagccataacccaccagaatacaatggctacaagatttatggtgaagatggcggacaaatgcctccaacaggggcaagtgctgtaattgaatacataaacgcggtagaggatattttttctgtagaagtagcgaaccaagagctattaattgaaaatggtttacttgaggtaatcagtgaaaaagtagaccgtccatatttggaaaaattaaaagaggttattgtcaataaagagcttgttcaagaacgaggggaggatttgaaaattgttttcacgccccttcatggtactggcggaattcttggcgttcctgcgcttgaaagtgttggctttacgaatattgttaaggttgacgagcaatttgtgaatgatcccgattttggaacggtaaaatcgcctaacccggaaaaccgcgaagcctttttacttgcgattgaatatggtaagaagtttggtggcgacattttagtcggaacagatccggatgctgaccgtttaggtgtggcagttcgtaatcttgacggcgaatatgaagtgttatctggaaaccagattggcgcgattattttacattatttattaaaacaaaagaaagcgcaaaatgaattgccagctaatgcagcggtattaaaatctattgtaacaagtaatcttggaacagaaatcgcgaaacattacggtgcggaaatgattgaagtattaactggtttcaaatttattgcagaacaaattaagcactttgaagaaactggcaagcatacgtttgaatttggttatgaagaaagtaatggttatatggttaagccgtttacgcgtgataaagatgcgattcaagcggtgcttgcgattgcggaagtggcgctcngttagcaagtagaaggtggaagtttactagaagatttagagcaaatttatgctgagtttggctattacaaagaagatctagtttccttaactttaagcggtaaggatggttctcggcg

SEQ ID NO: 1679 - DNA, 892 bp, Listeria monocytogenes-4B
cccggtacattctttcatcggttttttcacgaaatcacccacgcggtctggatataatccgtaaccccagaaaatcgtagtgtttgcatcttgcgctttaaaatgaggttgtgcggcaacaacggtactcattaaccaattagaatctttgaaagtcatgagcgcaccacttcctggaatgttccctgtgaagcgttcaatgcgttttaataatttatcgccatgacaagtgacggtaaaactttgccagtttgtttcttcttcatgaccaaaaaatggctctggattgcctaaatttggtttcttttgagcgactttgtaccaaagctcaccagaaattggtttttcttcaggttttggtgccggtgtattcatatcaccaagagtcgcgctatctgtcatacaagcattcgtcataatcacatcatcatctgggccaagtttgatagtggatccatccgataaatgaagtgctgtcgctgtaattccaggcgcatctttgaaatcaatatcttccaccgtttgattaattgtaaaatcaacatggtgtttatctaaaaatgtttttaaaggtaaaatcaagctttcgtattggtttagaggggttcttgttacaccttccagcgtatcaatccgactaaattctaacatcatccgattcatataacgtctaaattcaaacaagctgctccatttttggaaagcaaaagtggtttgccacataaaccaaaaattcgtttcaaaaaagtgttcgtcaaaccaatcacgtatcgttaaattatccagtttttcttccggagtagcgagcagtttcgtcatcaacatccggtcattattattaaatcccatcgaatgcgcatcgaggatattgcgatctttatcaactaatctc

SEQ ID NO: 1680 - DNA, 1295 bp, Listeria monocytogenes-4B
  misc-feature (1)..(end): n can be any nucleotide a,g,c or t/u
tacaaacgatggctcggcaatcacctctaattttgcaacggtagtagatttaaatacaccgggggattacgatgtcacacttaactcgacagatgcaggtggcaataaatctgacccaatcaccgtaacagttaccgtacgtgatacaacaccaccagttattacagcagatacaactatcacttacgaaaaaggaaccacgaaaactgcagctgcctttttaacggatgtaaatgcaacaacgaatgacggctcagcagtaacttctaacttcaacccaaatagtttgaagcaagtagggacttatcaagtgacgttaagcgctattgatgaaaatgggaactatgctttgccagtcaaggtaactgttattgtgcaagatacgcaaaaacctgtaatatcatctagtgccacaagcattacgtatgaacgcggcgaaaagaaacaagaaacaggattcttcctagatttagctattaaaacggatgacggcacaccagttacaagtgattttgatacagcggtaaatctggatacagcgggaagttatactgtgacgctaaacgcagaagacgaaaatggcaataaagcagatccagtcactattaccgtcattgtcgctgatacagaaaaaccaattatcacagcagatacaacgataacctacgcaaaaggaacaaccaaaactgctgctcaatttttaacagatatccacgcaacgacgaatgatggatcaaccatcacgagcaattttgacccaactgtccttacgcaagaaggaacttacaaagtcgtattaaatgcaaaagatgatagcaacaacgaagcagatccagtaactgttactatcaccgtggtagatacaaaaggaccgattatcaatgcattaaatacaatcacctatgaaagaactatcaataaaaacgaagcggattttttagcagatattgaagcaactacagatgatggctctacaataacaacggattttaatagtaaagatcttgatacggttggtacctacacagtcacattaaatgcagaggatgcaagtggcaataaagcaacgcccgtaaaagtgacaatgaaagtagaagataacattcctcccatcatcacagctgaccaatcaatcacttacgaaagaggcattacaaaaacagagcaagcattctacaccgatattaatgccgcaacaagtgacaacagcgncatcagctctgatttttcgaanatcgatttaacananacaggaaattatgaagtcttactccaagcaacggatcaaagtggaa

SEQ ID NO: 1681 - DNA, 1576 bp, Listeria monocytogenes-4B
actaattcttgaatccctatcgtttttccagaagcctgtgtgaacatctcttccatattatttcctaaaaaaatcgcatacagcccaataataattaaaacaggtagtaatgacataaatacaggtgttctatcacgaaaataaatttttaaattacgactaatcattggagtcctccttaatcatggaaataaaagcgtgatctaagttccctttaatcacctcaaaagagtcgtaaaatcctatagcctgatttaaaatagccaatatttcgacattttcatctatgacatctacacgcatcggtctgttagtcactttaaatgggaaattcatttttttcattattttttgaagttctggaacttttgcatcgtaaaagaaaattttggctacagaaaaacgacttctaatgtgtgctggtgtcccttgcgcgatgattttccccttatggattacagccaactgatccgcatctttggcttcttctaaataatgtggcggtaaaaacaccggcattcctaattcttctcgcaaataatcaataattttccatacactcactctagtttttgggtccagtccggtcgttggctcatctagcagcaaaatttctgggtcatgcataattgccctagcaatttccgcgcgacgtttttgaccaccagacaatttttcaaaacgccgatttaaaatatcctcaatgcccataatagaagaaactagcgctaatcgttccgtaatttctgcttttgttttcccatataaactagcacgattatataaattttcgcgcaccgtgagtaagtcatccaacacattttcttggaaaacaacgcctagtttttgtctaaataatttacggtttttaaatgtcaatttttcatcatcaatgaaaatttctcccgaagttggttcgctttctgtgcaaatcatgctaagcgtagttgatttacccgcaccattttcgcctagaaaagcaaataacgagcctttttcaacttctaaattaatacctttgacagcctcgattttgccaaattttttaactacattgatcaattttatcattttgtctccctttctcgcatttctgctagtttttgattaatttcattactgaatttcacatcacggaagctgaagaaaatatgcattacaaggaaagtcacacaaataaagcccaaaataatcataaacccagctatgttatgataccaatccagcaaccaaccaagccctaaaattgctgcgccaataaagaggaagaaagcaatcaaacgactgtaaaaagcacgtttcgttttcactgagttattaaataataattgctgtatgaatgttgtcacaatactaaaacctaacataataaaaatatcccggattgcgaccgtttctgattctccagatgcgatgtaagagcagatcatcgtgataatagaggcagaaaaaataaggcatgctgattgtataaattgaattagtttagtactcatttccgcttacctcccatgtttaatttttgctttaaaaccttcgcgtactgccgagaaataattactttttctcgatttaa

SEQ ID NO: 1682 - DNA, 1067 bp, Listeria monocytogenes-4B
aactgtgtgctggaaagttatcgcactgacgaatgcggatatgaatattatctatgcacttggtggaacggtggtaggtcgccaaacaacagacgcgagtggtgttccagatggtgcgaagaaagctacagaagtgggcaatacccatgatttgaatttagaaaaaattgcctctcttggtgctgatgctattttttcaagttcagaacaaaacttaaaagatgttcctgcgatttttttgtcggaccgaaagtcgtgttgaccggagccaactcaattgacgaaattaaaaaacaaacagccgtgcttggcgagcttttaggcaaagagacaaaagccaaagagttagaagcgaatattgaccaaaaagtggcggaagtgaagaagaagcaacaaggtaaaaaagtgcgctcattacttgttctaggggctcctggcagtaattacgcggcgctaccatcctcattaagtggaaatgttttagaaattgctggtggagaaaatgtagcgaaagattttaaaggcgttgaaaacttcccacaatacgcttcgatgaatgtagaaaagattgttgctgctgacccggaagtgattttcttaatgattcacggtggggacgaaaaagaaacagaagcagcattcaagaaagaaatgaaacaaaatgaagcttggaattcaacaagcgccgttaaaaatgatcatattgtcgtacttcctgcagagctattcggaacaaatcctggaattaagattgatcaagcattggattatatgacagatgagataaataaggtggataactaatgacaactgtgaaggcgcatgatccgcggcgaaaacgtagacggataacttttattgtagtaatcattttacttattttagcttttttctacggactgacaacggggtccgtgaaaattacatatagtgatgcttggcagacgctaactggcgggggaagtgacctagcgaaccaattgatttggaacttgcgcttgccgcggttattaattgctttcttagtaggagcagcgctggcgattgctggatgcttgctgcaaggg

SEQ ID NO: 1683 - DNA, 1111 bp, Listeria monocytogenes-4B
aatgctttattggctatttatctcgatgtgtaccgttatagcaataatttcagcggtctttataatactaaatagtccttacttaggttgggattatagtgaccctgaaactagcgttatcggagtagcttttcatacatttgaatggttgtttgtcagattagcaccgattatccttataggaggagtcgttggaatttttttaacgcggaagaacgtatgaaatcgtactatttttgatgcttttggggatgagtcaggcttcaaaattactgtttgtaaaaaggaacggaatcaaagcaccaaacccatattgtcaaacaaccgaacggggctagacaattgattctacgtaccgaattgattatttggcctcacatattgcgcgtatgcaagaagccattgaagaaggttgtgacataaacgtttatctaatttagtgaataatagctctttattcaacacgtgaaggtttcgagaaaagatatggctttgttgatgttgataaagataatagctataaacgtttgaagaagaaaagtttctattggtataaaaaagtaattgaaactaatggaaatgatttaagttattaaattaatatcaatctcatatatccaaagagtccttatcaatccggtaagggctttttttgttgaccaaaaattcttcttctacaagttcggttagtaaattggatatgtttggctgcgttgtgcggcaatatcttgcaagaactgactgattgataaagtttggtaatacaatttcatttctttcttcatcttcagtgcccatctctaccgcaagattttctaaagccatgtaaatccgctctttcggcgcttctgacccatcccaccaagcgcatagcgacgagcccacaccgccaccgtacttgtcaacacaaaattatctacctcacgtccaccccatcataccctcacgcccccgcccccctccctctcatcccacttcccctgttcccccctgaccgcgcttctcccctcctctctccccccccaccccttcccctcccctccgtgcgttcccctccgttcccttccctcgctccccccctcttgctatcaccccatacacactaaccccg

SEQ ID NO: 1684 - DNA, 1040 bp, Listeria monocytogenes-4B
  misc-feature (1)..(end): n can be any nucleotide a,g,c or t/u
gaaagcgatgacaaaagcagaagtgcgagcggcaagcattgatttacttaacttagatgatacgtcaaagaaattactagatgttggagcggggactgggagcgttggtcttcaagttgcttgtaatttcccgaaaatccaagttactgcgattgaacgaaacccagatgcagtggatttaattaaacaaaatcaagcgaaatttggattagaaaatgtaacagttatcgaagcatacgcgccaattgaattgcctgaaaaggaaacatttgatgctatttttattggtggaagtggtggcaatttaaccgatattatcgactggtcgttggcacatttgaacccgggaggcggtttggtacttaattttattttgcttgaaaatgcgttaactgcaatgaaccatttggaaaaattaacagtgagtgaattaacgatgaaacaaatccaagtttcgagttggcataaacttggagcaggtcattattttgaaccacaaaatccaaccgtaattatcggctgtaaaaaactagaggagtgaagaaaatggcagaagtacatttcgtcggagcaggaccaggagataaagagttaattaccttaaaaggatatcaattattaaaagaggcggatgtcgttatttatgcagggtcgctcgtaaacccggagttgctagaatattgtaaaccagactgcgaaatccataatagtgcaagcatgaatttaatcgaaatcatcgactgcatggaagcgggcgtgactgctggtaaagaagtggttcgtttgcaaaccggagacttttctatttatggttcgattcgtgaacaggtcgaggaaatgaaaaagcgttcgattcccttcacatgtacaccgggtgtgagttcattccttggcgcggncagcagttntggggtggagtatacagttccagaagtaagtcagagtgtaattattacccgaatggctggcagaactccagtaccatcgcgtgaatccctccgtcatacgcngcgcaccaaacttcatggtanatttcttgt

SEQ ID NO: 1685 - DNA, 747 bp, Listeria monocytogenes-4B
cgtttggtcactgtagcagcatgttcgagcggccgacagtgtgctggaaagcggtgtaaataatttccgtttcttccagttctgcataagctcgctggatggttgtcggatttacttctaactttgttgctaactctcttacagatagtagcttgtcaccagcattgtaaattcctgtaacaatttctgtatgaatataatgaacgatttgtttataaatgggtttactatcatcaaacttcataatttcctcctttcgcctgtctgtccgtatcaccgtaccacctgggtcacactggctatgaatgtactatatcaaaggaaaatcgcttcatttatacattacatatatctaaaatgcgttttttattgcttaaaaaatttttttaattaaaaatgtatacaataagccaatctagataacgtcacaaactgttcataatatttcttttaaagaaatagcgtataataaagtggtcattattcaaatctaagggggaactctcatgccctacaaactcgattcccgcctcggctctccaaaacaatccgcccactgctattcgtctgtgcccgcggaacacccatcccccccctgatcccctctccccgcccaccacccttcgaccgtctccccctcatcccccctcgccccctccctgcgtttcccgcgttcgctccgactccgcccttcagcccttgcccttcccccccccttgtcacgacgcagaacagcaccgaacaaac

SEQ ID NO: 1686 - DNA, 1284 bp, Listeria monocytogenes-4B
cgcctcccccagtgtgctgtaaagagtgttaggcagcttaattaatcaaggtgttacgcatgtattcgggattccaggagcaaaaattgataaagttttcgatgtgatggaagaacgtggaccagaattaattgtcagtcgtcatgagcaaaatgcggcgtttatggctgccgctatcggtcgtctaaccggaaaacatggtgttgtacttgtaactagtggacccggcgcatcgaaccttgccactggacttgtaacagcaactgctgaaggagatccagtcgttgcgatagctggaaatgtaaccaggcaagaccgccttaaaaaaacccatcaatcaatggataatgcagcacttttccgtccaattacaaaatatagcgaagaagtagttcacgctgaaagtatcccggaagcaatcactaacgcttttcgctcggcggcagaaccaaaccaaggcgctgcttttgtcagtttgccacaagatatcgtgaatgaaccaaacgtaccagtaaaagcgattcggccacttgctaaaccagaaaatggtccagcttccaaagaacaagttgcgaaactcgttactcgtttgaaaaaagcgaaattaccagtattgctattaggtatgcgagcatctagcccggaagtaactggtgcgattcgtcggctactccaaaaaacaagcatcccagttgtagaaaccttccaagcagctggtgtcatctcacgtgatttagaagataatttctttgggcgtgtaggtctcttccgcaaccaaccaggggatattttgctaaataaagctgatttagttattacagtaggttacgatccaattgaatatgatccaaaagcttggaatgcttcgggtgatagaacgattgtacatttagatgacatccgagcagatattgaccactactatcaacctgtgacagaattagtcggaaacatcgcgcttactttagaccgagtgaatgcgaaattcagaggtttagaattagcggaaaaagaacttgaaaccttaaatgtatatttgatgctcgactagaagagcgagatgttccaccagaaagtgatgaaactaaccgagtacatccgttggcggccattcaaacgctgcgttcggcaattgatgacaacgtaactgtgacagtcgacgttggttcacattatatttggatggcacgtcatttccggtcctatgaaccacgccgtctgcttttcagtaacggtatgcaaacgcttggtgtcgcgcttccttgggggattgctgcaacactc

SEQ ID NO: 1687 - DNA, 1441 bp, Listeria monocytogenes-4B
gttactaggtggatggggtggcgattatcaagatccgctcacatacctcaacctattcttaacaaacagcccggggaaccacacaggcttctcggatgctaaatacgatgaattagtcctaggagccaagggtaaactttcggcagacccagaaaaaagatggcaagcactactagaagcagaacaaattttacttaaagataacgccgtgcttatcccgctataccaaggtggccgcgcgtacttgcaaaaaagcaacctgaaaaactacaccacgtatccaatcggttcagaaaactacaaatggattgaaaaaaattaatttaaaagagtctagttaaccaaactaggctctatttttatacccgaaagaaaataagacttaggatgtaccaattttcagcctagagccgttcgttcctttttttgatctcctctataataaacctatcaacaaaaaaggacggtaaaaacaatgaaaaagggacttttcggtttactggctgcaatttttgtattaacaatggttgtaattgaattttcagcaccaattggatcggcagcaaatacatattacgttacaatcaaaaacgatggaaaagaagttaccaagtcaaaatttaaagggtactcattccgggaatcgtgtttagataatcaaggaaacagtcacaaagttaacttcatgtcaacaacacaacttaaaaagaataaacagtacaaaatcgtcgttcaagacaatgaattactcgtccaagccaaggaaataaacagtgttccacttgcaagtagtaaataaaattagaaaagaggaaaaaatcatgaatagtttttggaaaatattttttacagttattttaggatttatcgcacttaatatcgtacttgatatgggtggaatcacgctggacttgttattgccagtacttatactaggcggcattgcatgtctggtccatcccctcgctccgcttgccctcccccccccctccgtgcgacggcccgtacgcctcttccccccgttgcgtccgctcccgcacgcgcggttgtccccgttccccgcctctccccactaccgctcatctttccgcccccccccgcgccgccccgccgcccgccctttttgggggttctttttcgcctggcgcgctgtcgaccctcgtcggccccccctccggcctccgcccttctctccctcacccctttttccctttccttcttcgggctcatctccccatctctggtgttcttttccctccgtctcctttttatgcctctctgtggatttccttttttactctctctctccctccccccctcctccccccctatctttatcgccttctacctccatgctaccccgtcctccttcctacccgtcactttttgcgacactccctatccctcacatttggcgcgcccgctcttccgtcacccccgt

SEQ ID NO: 1688 - DNA, 1040 bp, Listeria monocytogenes-4B
taagctagtaatgatgtatttttcaccttcactcatatgttgatggatttttctaatatcggttttatcattgaaacgtctcttaccgatactttcaaagtcgcgttccttcacaccagttattacatcaataatcatcccacatgatgcggtactcagcgcacgaatggaggcttcctcttccccgctactaagtcttaatttaaattcatctgtttcactataataattttcataaaacatattcactaactctgaacgacgactaatcaaaaattccttaatttgcataaacttctcctttttcaccgatattatcttgcaaaaattaagatgttatctgcatgtaaattttcaatcattttatccacttgttccgctgttaaatcaaagtcttctaataatctttttaccgatttatcgtctgtttttgagaaccatttagcaaagggaccggcagcatacaaagcaccgtatttgggattgtaagcttgtggaataacaatggctccacttagagattggaggattccagaaataataccgaaagcctcttcatttacaggacgttcgatttcgatattttctttttctgctaaagtttctaagtttttgttatgttttgatttagctagaacagaaatatcttctttttcatatccctcgcttactagtttgttgataatttcctctgctgcctcgacattttgaactgcgaatacttcccactttttcattatttgtcatcccttccattatccaattgtaagatttgttttatttcttctgtgcttaattttcctagcatttgttcgcccggttgaattagttcgtctactagcgcttgttttttcttttgtaaatcaaaaattcgttcttctatcgttcctttagtgatcatccggaacacttggacaacgcgtttttgcccgattcgatgtgcacgtccggtagcttgttcttctacagccggattccaccataaatcgtataaaatcacggtatccgcgccaacaagattgagcccggttccaccagct

SEQ ID NO: 1689 - DNA, 607 bp, Listeria monocytogenes-4B
ctccgcacaaccagttgtcttagaagataatgttgttgtaggcgccaatgtggttgttttagaaggtgtgcgtattggagaaggcgcagtcgtagcagctggcgcaatcgttacaaaagacgtagctcctggaacagttgtggctgggattcctgcacgtgaacttaaaaaattagacgcaaaaacagcttctaaaactgaaatcatgcaagaacttcgtcaactttaaaaattaaagggaactgtttcgtctgttggcgaagcagtccttttttagaaggagagaatcgctgtgttaaatgaatttattgccattcgacgagagttacaccaaattcctgaaacaggttataaagagcttaaaacccaagcctatttattagactatattagcaaattaccgagtgaacatttagaagtgaaaaaatggcgtacggggattttggttttagtaaaaggaactaatccagaaaaaacaattggttatcgtaccgatattgatgcgttgccaattacagaagaaactgggctgccttttgcatcaaaacatcctggcaatatgcatgcttgtgggcacgatttacatatgagtatcgcgcttggtgta

SEQ ID NO: 1690 - DNA, 1451 bp, Listeria monocytogenes-4B
gaaagtagcgttaagtaatttgcgaaaggaggacgaaaatgacttcggtaatgtggtttcggagagatcttcgagtaaacgataataaagctctctatcatgcttgtaaagaggacgatttgcttttgttatttcaagtaaatccagcacagttcatcacaggaagtcctagccaccaagctttttttgcaagtgtggctcattttaagcaagaaatcgataaaactgcgcatttacaaatcatgtttggtgaaccgatagaatgcttccaacaacttaaagattcgctaccaagctgggataaagtttatttcaaccgtgatgaaacaggatacggagcaaagcgggatgaggcggcgcaagcgttctttgacgaacaaaaaatcgaggttcaagccttccacgatagctatcttcattcagcggaagaagtaaagaaatctccaacagaatactataaaatttttaccccttattataaaaaatggcgcgaagaaataaaagaaacgccgttcaaagtgactttaaagcatgagaatatccggaaagaaagcttgtttctgaaatatgaagaacaatttgcggaaatgactagcgatttaccgatattagatattggtgaacgagcagcgaacacgagacttgcgaattttattaaacacgatgttgctgactatgacaaagcgagagatttcccggaactggataaaacaagccatttatcacgttatttacgaacgggggaaatctcgattcggacgatttggcagacacttcaagaaacagaagcaacagaaggacgagctacatttgaaaaagaactgtgtaggcgcgacttttataatatgatttacgtttcttttcctaaccaaaaaaacgagccgatccaagaaaattatcgttttattgaatgggaaaataaccgcgaatatttcaaagcgtggcaagatgggaagactggtttcccgctcgttgatgcggtgatgcgccagttgcaagaaactgggtggatgcatcatggactagaactgtttacggtgacctttttaacaaaggattagttgattgagtggcggattgtcgagaagctttttcttcaactgctgatggattctgatcctgcgagtcatatcgggggctggcaatgggcggcttcaactggcacggatgcggggccatactttatgatcttcaaccggacgtcgctgccactgcaattcccttcccctgggaaattcattaccaaatactgccatgagttggcgaatctgcctggtgcttatctccatgccctccatacactgcccgacactgaccgcaaagagcttggttcggctgtcagaacagactctccctccgccgtcgctcgcctttaacgaccatggcaattcccccatcgatctctcccacttcccccgcacatcattccacgggaactatgcgcgtatgca

SEQ ID NO: 1691 - DNA, 1514 bp, Listeria monocytogenes-4B
  misc-feature (1)..(end): n can be any nucleotide a,g,c or t/u
actgtaggtactttgagcatgctcgagcgccgacgtgtgctggaaagtttgttcaaataagtagcgatttaattggtcacgaatgtcttgttttaatttcgcccattcaaagccggtttcttgaagatttttttcaacaatttttgtaacaactttggaagattcttcaatcaaatgttctgattctctcacataaataaagccacgtgaaatgatttctggtcctgaagtaatggtttttgatttacgattaagtgttactacaacaatgaaaatcccgtcttctgagagcaatttacggtcgcgtagcacgatgttaccaacatcaccaacacctaaaccatcaattaaagtattaccagagtatacgcgattaccagcagtcattttatcatttttatattctaaaatttcacctttacctacgataaatacttctgattttgccataccaacttcatgagctaatttagcgtgactgattaacatgcgatattctccgtgaactggaacaaaatatcttggttttaataagttaatcattaattttaaatcttcttggcttgcatggccagagatgaatagattgttactcatagtgagcactttcgcgcctgctttatagagcatatccattgttttagccatcattgtttcaagagatggtgatggcgtcgtcgtaatgtaaacagtatcaccaggtttgatgttgaattgtggatgatttcctttagtcattaattgtaatgattgaattggttctcctagattacctgtttcaataatagtaatttcgtcatcgctatattttttaagttcttttaacggaacaattaagtcttcttcaatgacgattttacctaaactgccagcaatttcgaaaacgcgctctaattctttaccaacaatagcgactttacgtttggttgcaacggatgcatcgagtacttgttgtaagcgaattaaattagaagttacacaagcgacgataattctgccgtctgccattcggaacgcatgtctaatttcttcttcaattaaactatcgctagacgttgttccagggtgctcagcctctgaactatctgaaagtaaagctagtacccctttttcgccaaattctgcaatgtggcttaaatcagaagcatagccgtccttcgctgattgatcgaatttgaaatcccctgtataaacaatagatccttcgcttgtttcaagaacaatcccaacagaatcaggaatagtgtgcgttgtacggaaaaaggaaacatcaatttttgaaaaggataaagttgtttcttcgttaacgacatggaaattcttgaagcgtagtttacggtgttctttaagtgctgattttgccagtgctatcgttaattctgtaccataaactggtgctntgattttttgaagcaagtatggcaatgctccaattgcatcttcgtgaccgtgtgttaggaaaacagcttttacacgatctttattttcttctaatatttgaaatctggaataca

SEQ ID NO: 1692 - DNA, 1275 bp, Listeria monocytogenes-4B
tgttttcgttcgatagatagcacttcttcccctccttttgtttaactatatggtactccaatggaagaaaatcgcaaacaaacaaaaaacctggagcaattggccccaaggtttggaagtgaaaattaatcgtttaagcgtttttctaattctgcttttttgtcttcgaagcctggtttgccaagtaattcggaccatgttggctttgtatgcttctacgcctggttggtcaaatggatttacgccatttaggtaaccgctgatagctactgctttttcaaagaagtatactaggtaaccgaaagtgtatgcatctagttctggaacttctacaacaaagtttggaacttcgccgtctgtatgtgctagaagtgttccttcgaatgcttttgtgttaacgaaatcaactgtttcgccagcaagataatttaagccatctagatctacctcttctttattgatagttaagttgtggcgtggtttatccactttgataactgtttcaaaaaggttacgacggccgtcttggatatattgaccgatagagtgcaagtcagtggagaagtttgcgctggatgggtaaataccttttttgtctttaccttcactttcgccgaataattgtttccaccactcgttaaagtattgtaagcctggttcatagctgattagaagttctgttactttgcctttacggtaaagaacgttacgagctgctgcgtattggtatgcaatgttattttttagttcaggtttgtcgaaatctttgcttgctgctgctgctccattcataagagcatcgatatcaacaccactaactgcgattggaagtaaacctactgcagttaaaacagagaaacgtccgccaacgtcatctggaacaacaaatgtttcgtagccttcattgtcagctaatgtttttagagcgccttttgctttatcagttgtagcgtaaatgcgttttttcgcgccttcttcgccatattttttgattaaaagttctttgaaaacacggaaagcgattgctggctctgttgttgttccggatttagaaataacgttaacagagaagtcacggtcgccaactacttcaattaagtcatgaaaataagaggaactaatgctatttcctgcaaagaatacttgaggtgttttacgagcacctttttcaagtacattatagaaggaatgatttaaagtttcgattgcagcacgtgccccaagataagaaccaccgataccgataacgattaatacgtcagaatctctgtggat

SEQ ID NO: 1693 - DNA, 1544 bp, Listeria monocytogenes-4B
ttgaaacaagtctgccagaatggttagcaaaaaggtggacagatcaatatggtatcgaaaaactgcgtgaaatcggtttagcattccttgtcgcgccacaccaaagtatccgcgtcaaccaaacagaaattcctactgaacaattaatcaaagaactaaatgaccaaggaatcaccgtgacacgtaatgaatttatcgaggaagcgttacttgttgaaaaaggatctgtagcagaaacaaaagcatacaaagacggtaaatgtagcattcaagacgaaagctcaatgctcgcagcctatgcgcttcaactagaagacaatttgacggtattagatgcttgtgcggcaccaggcgggaaaacaacccatatcgcggaaaaaatgcacggcacgggaatggttcatgcactcgatatccacgaaaagaaaaccaagctaattgatcaagccgccaaacgattgcaactacttaatattcgtacggcgcatttagacgcaagaaccgcaagtaccatgtttgaaccagaaacatttgaccgtattttagtggatgctccgtgctccggctttggcgttcttcgcagaaaaccagacatcaaatatgcgaaaacagaaaaagatatccacaaattagcagaaattcaattagcgattttagatgatgttagccaattagtaaaagaaaatggtatattagtttatagtacttgtaccattgacaaggaagaaaatgaaacggttcttcgcgctttcttagaaaaacatccagaattcacactagaacctgtagtactccctgaaaaattggcgccaatcatgaaggacgattctattcaacttttaccaacagatattggaagtgatggggttctttatgcgagccttccaaaagtaaagtcctgaaaaatagtgaggtgcttttaaaatgcatgcagaatttagaacagatagaggcagaataagacatcataatgaagacaacggcggggtttttgaaaataaagataaccagccgattgtcattgttgcagacggcatgggtggtcaccgggcaggagacgtggcaagcgaaatggctgtgcgtctactaagcgatgcatggaaagaaacgaccgcacttttgaccgcagaagaaattgaaacttggctacaaaaaacaattcaagaagtcaataaagaaattgttctttattcggaaagtgaaatggatttaaatggtatgggaacaacacttgttgcagcaattatggcgcggtcacaagtcgttattgccaacgtcggagatcgcagaggttatttacttcaaaatcatgtcttacgtccactgaccgaggatcattgcctcgtgcatgaactcccttccaccggctatctgttggtttcagatgccctgactccccccgccgtctcatttcctttgccgcgcattcccgtggctccccgttcccgcgctttctcccctttttttggcctgtgcccgcccgcgcgtcgtttcttttctcgttcccccccttcctgctccgctttcccacaccaccaaaaaca

SEQ ID NO: 1694 - DNA, 728 bp, Listeria monocytogenes-4B
tgatggaaaattagattttgctgctagaactggtgatgggcttttggatgttgatctgttgaatagtaatgcggctcgtgggtttattactacggatgttggggatgccgacgccgatgctgacgctgatgcggatgccgacgccgatgctgacgctgatgcggatgccgacgctgatgccgacgccgatgcggatgcggatgctgacgctgacgctgatgctgacgccgatgcggatgcggatgctgacgctgatgcggacgctgatgccgacgccgacgccgacgctgatgcggatgcggatgcggatgcggacgctgatgcggatgcggatgcggatgcggacgctgatgcggatgcggatgccgacgccgacgctgatgccgatgcggatgcggacgctgatgcggacgctgatgcggacgctgatgccgacgccgacgccgacgctgatgcggatgcggacgctgatgcggatgcggatgcggatgcggacgctgatgcggatgcggatgccgacgccgacgccgacgctgatgctgacgctgatgcggatgccgacgctgatgctgacgccgatgccgatgctgacgccgatgcggatgccgacgctgatgcggatgctgacgctgatgccgacgccgatgctgacgctgatgctgacgccgatgctgacgccgatgccgatgccgatgctgacgccgacgccgatgcggatgctgacgacg

SEQ ID NO: 1695 - DNA, 1849 bp, Listeria monocytogenes-4B
aatacgttttgattatttagtgtatctgaaaattgtggtgtctatatcaaaaaaacgtaataaatttatctttttttatagatcgcgtaaaaaaaccacgcaaatgtcatttaagcgtggttttttacaggtctgttttaagcacaagttgcctgataaggtcgagtcaataaccaaggtgttccttttatatttaagtcaccttcattgactagttcgtttacaactgacgacatagtagacactgagcatttggcaaatcttgctagtacatttattcttaaccatcttggaaattctggtttgttctctgaatttatttgataacgctcgataattttcgccaaaatcatttccgcacgttctgcaggatcaacagaaattagcgttctttgccagtctagacctttctcaaagtcttccgctatttctaagaaaaatgttggtaataaatgttggtcttctaattttccaattaattcttctgctcgaatgatgctataagaggtatcttctaacgccgttaaggtaatgtctccttttgttgtaaaaataattcgttgatcgataaaaacacgatacaaatcatctttaccttcctcgtttacttgtactagtaaacctttctccatgactattacttgttcacggttcatcgttatttcgccacccgccattaatttttgacgcgtaaggtgaaaattttttataatccatgaataaatcaacaaatcttctttgaccaattgatggaattctaaaaaagtcatttgaatttacttcctttcgttcattttcttatggctaatcaacagcttatttaaagtatagtacaagtatgttagaaatatgttagaaaaattctttttttatattcatttataaaaaaggatgccacgtagacatcctcacttttcttggttatgctttattcacattcttagtcattttagtagtttcacatagatgcgctgccaaacaattaatgccccacacgccacaaaaaaactacaaatagttagataggttcttattccgaactgaataactcccggaaaatctgctacttgtataatagaaaaatgcactgacttcattgcaaaaaaaccaacaaaataaagcactgtgatcaaaagaaatcctgctaattgtttcctttcgttcttcatttttttaggtactcttatcttcttccaaaaagaaagtaagtggaatagccaactactccaaaatattagcaccgtatactgaaaaggaattgcggtaatttgtaatgtaataaggcttactgaaagtgatgctccaataacaattaaaaaagaagtaacctctgcatttaactgatagcgattatgccataattgatagcgctggattcgttttaagggttcctcagcgctacataaaaagcgccgaatccccactaaaatcaataatatcgccagaaaaaaaccaagtaataaaccaataatcaacagaagtgtactaaaaaattcgcttgtcatcggaccgcctactctctgtttgttttcgcttgtttagtctttcaaaaatccgctccgcttgcttagcatccgtagaagcaaactgtgccatgatatttgcttcattttgtactaaatgtaaatatccaagtgccacaaagattgggtcccaagcaactgcatctaaaatactgttttcactatagtcaaaaaagcttaaacaatcaatatgctcttctaacacggtttgttgtccttcttttgtattaataacaaagccctctacttctccttcaaaaaactgccccataggcgagacgattttaagtttcatttccttctcctcctatttcaagtctttgtaa

SEQ ID NO: 1696 - DNA, 1603 bp, Listeria monocytogenes-4B
gagtttgttgcaatgatggaacaatacaatttaaaatctaacagcatcacaatacctgaacataccattctaaatgatctagttactgaaaatcgggattgtgtgtatttacttaaatctggtatattggccggatatattgatttcgacaatgataaaatttattctattttctctatctaattttttcatgggatattatacgattttcgataatgcatcccttgttttaacgtatcaaacactaactgagtgcgaattgattatctacaagaagaaagatatcgaatactcgctctctctcttccctgaaaactttagcttccaatacacaattatgagaactatcgccaaacatggttactacaaatcacttttacaatatcgcgataaaaaagatcaattggcttttgtatttgaaatgcttgtcaaaatcctcgatatcccagtggaagacggcgtcgcagtactaccaaaatctattagtgcgacagtcattaaaaactactgtaccctgtcgaaagccttcttctattctcaacttaaagaattaaaagaagccgggattatttcaaaagtaaaactgcaatggcgtattaacatggaagctctttcagaaaaaaacaatagcataaactaagaaaaaggatgcagttttatgagctgcatcctttttttatttaatcgctaaagtgaaaatactaacttcttgttcttttccgccataattagcttgtttggtttcttctttcgtgtagccaaggtattcaaagaatccacaccctttttcattctcagctaaaactcctaaggctaatgaatctgccccgccgtcattcgcccactctttgatcgtttgatgaagtacttttccaaggccgttatgacgagcatctggcgttaaaagaagtaatccgataaaccagcgcccttttcgcggatagtcagaaacaatatctactaagccgattggtttttcattttcatccaatacagctagtacaaacttatcgaatcttgttttcccgtttggaatttctgtgataatttttaatgcatcacttttcgatgcaggcttatcttgttccattaaataataatcttcggatgccgcgcaaacagcttctgcaagttctacatctttttcatttaaaaatttcacatgataattacgtttcattatttcactcttttctttatcaagtttccaagtcaatcatgccataaattccctgttgtttcaatagatagccagaaatccatctgaatttatgctatactagaatgagtttatgatggaaaaggagctagtatattgtataaattaatcgcgattgatattgatggaacactactgacagatgatcataaggttacggacgaagtaaaagaagccattcgccaagcaaaactaaaaggcgtaaaagtggttctttgtactggacgtccgcttgttggtgtagaaaattatctaactgaccttgaattacgtgaggaaggcgattacgttattagttttaacggcgcattcgttcaagatacgtttacaaaagaagttatttctcacttaacgcttggcattgacgatttaaaagaaatttat

SEQ ID NO: 1697 - DNA, 757 bp, Listeria monocytogenes-4B
gcctcggccacttagcagcatgctcgagcgccgccactgtgctggaaagggtccattatttttatttgtccaattttaaggagaaaagggagggattgttgtttgaaaatttataaagcattgggttggttttttaaagaaaattggaaatcttatgcatttggagtaaccattttgtttacgattgcgcttttacagttagttccgccgcaaattattggctatacggttgatgccgtaacgaacgactcactgacaaaagacaaattgattaaatggatgattattctagttgtagcagcgattcttgcatacggtggtcgctatgtttggcggatgttaatttttggttctgataataaattacaacgcactttacgtttacgattatttgaacattttaccaagatgtcgccatttttctttcaacgttatcgtactggggatttaatggcccatgcgacgaatgatattacagctattcaacaagtagcggggattggcgttttgaccctatcagattctgttctaacagggggaacggttattgcgacaatggcaataacgattgattggcgcctaaccttgattgcattacttccaatgccgtttatggtactcggaagttcgattttaggtaaaaagttacacgatcgtttccacggggcacaagctgctttttcaatgttgaatgataaaacgcaagagagtatttctggcattaaagtaacacggacatttggacaagagaaaaaaa

SEQ ID NO: 1698 - DNA, 1098 bp, Listeria monocytogenes-4B
  misc-feature (1)..(end): n can be any nucleotide a,g,c or t/u
tagtatgtcctccgggtactggtccaaccttgctagctcgtgcggttgccggtgaagcaggcgtgccattcttctctatctcaggttcagactttgtagaaatgtttgtcggtgtcggtgcaagccgtgtccgtgatttattcgaaaatgcgaagaaaaatgcaccatgtatcattttcattgatgaaattgatgcagtaggtcgtcaacgtggagcaggaatgggcggcggtcacgatgaacgtgaacaaaccctaaaccaattactagttgaaatggatggtttcggtggcaatgaaggtatcatcattattgcagcaactaaccgtgcagacgtacttgacccagcacttcttcgtccaggccgttttgaccgccaaatcatggttgatcgtccagacgtaaaaggccgtgaagcagtacttcgcgttcatgctcgtaacaaaccacttgctaaaagtgttgatttaaaagcaatcgctcaacgtacaccgggattctctggtgccgatttagaaaacttactgaatgaagcagcactcgttgccgcacgttccgataagaaagaaatagatatgagtgacctcgatgaagctagtgaccgcgtaattgccggaccagctaagaaaaatcgagttatctctgaaaaagaacgccgcacagtcgcatatcatgaaggtggtcacgttatcgtcggaatggtacttgatgaagcggaagttgtgcataaagttaccattgttcctcgtggacaagctggtggttatgccgtaatgttaccaaaagaagatcgcttcctaatgacgaaagctgagttaatggaccgtatcactggtttactcggtggacgcgtagccgaagaagttacttttggtgaagtaacaactggtgcaagttatgactttgaacgtgcaaccgaacttgctcgccgcatggtcactgactggggtctgagcgacaagattggtccacttcacttcacttctggtcacggttcagtgtttatgggccgcgatttccgccgcgcctcgggtgttccggtnaaatcccctacttatttgctccgcagctcatagctaatccgatatagaaaaaaca

SEQ ID NO: 1699 - DNA, 1640 bp, Listeria monocytogenes-4B
acgtttatctgtttatattatctgaattacttagaaagcagacttgcgccagttatttcgatgcatggtgttctagtggatatatatggtttaggtgtgttgattacggggagcagtggtgttggtaaaagtgaaacagcactggagcttgtaaaacgcgggcatagactcgtagcagatgataacgtagaaattcgccaagaggatgaaatgacgttaatcggttcttctccagcgattattgaacatttactcgagattcgcgggttggggattattaatgtaatgactttatttggagcaggcgctgttcgttctagtaaaaaaattactatcgttgtgcaccttgaaaattgggatcctgataagcattatgatcgtgtcggattagaccaagaaaagacaaaaatctttgatatggatattccgaaaattacggtgcctgttcgaccgggacgaaatttatctgttattattgaggtagcggcaatgaatttccgattaaagaatatggggtacaacgcggcagagcaatttacacaagacctgaataatttaataggtcataacagcagtatgaatgattaaataaatagtgaaagcatctccgcagccaaactttacaaaaatgcttgtttggttgcggagttgtctttttgaaagtaggggaattatgggtaatggtgttcagccacttgatccggtggcgattcaaattggtagtatatctgtgaaatggtacggagttattattgcttcggctgttgtcatcgggtgtacttcttgctttaagtgaagcaaacaagcgcaaaatggataaagaaattattgtggatttgctgatatgggcaattccgatttcaattattagtgctcgaatttactatgttatttttgagtgggatttctataagaataatttaggcgaaatagtgaaaatctggcacggaggtattgctatttatggcgcgctaattggtgcagttttaacggcaattattttctcgcggattaagaaaatttcgttctggcaacttgcggatgtcgttgcgccaagtttgattattgcgcaggcaatcgggcgttggggaaacttcatgaaccaagaagctcatggtgcagaaacaacgcgttcttttctggaaagccttcatttaccagattttattatcaaccagatgtacatagatggtgcttattatcaaccgactttcttatatgagagtttatggaatgtgcttggatttattgttctattaattattcgtcgcacaaaaattcgtcgtggggagttgttcctcggctatgtaatttggtattcatttggaagattctttattgaaggaatgcggacagatagcttaatgtggggggactttagagtttcgcaagtgctatctttacttcttattgttttgtctattggtattattatttatcgtcgtatgaaaatgaatccaccatattatatggaagataaatctggtaaagtagctaaaaagaaataaaaaagttggagattttcgagtttgattaagaaaggaagaaattatgactgggaaaattactacattgctgtttgactctgatggtacgcttataaatacgaatgaattgattatcaaaacatttcaagtgac

SEQ ID NO: 1700 - DNA, 735 bp, Listeria monocytogenes-4B
tgtgctggaaagtctatccattgtatccaaatggtcagttttattttgggcgcggtgtcgaagcgtttcgtgatcaaagaattaaagaagcaatcaggtatttagtgcgggcatccgaactggagccaggagaagctgttattctttgtcagctggcgatatgttatacagaaattggtcaattccataaatcgaatggggttcttagagaagttttagaacagcgtaatgggaacatggaatactgttattattttattgctaataattttgcgtatatgaaagattatcggagagcgttacaatatgctaatcgttatttggatagttcaactgatggtgaatataccgaggaagctaaagatttaattgaagttttattagaagaaacgccttttggtgagacaattgaaaatggcttttctaaattagaacaagaattctattcttataaaaaagaaattaatcgttatttagcagaagaagatagtgcagctgcttgcgatattttaagaaaagtcattgatgaaaaaccgaatttttggcctgcttataatcaactcgcttcgctttattttgagcaattgaaagaagaagagggcgtcagagttttaagtgatttattatcgagaaatccgggtaatctcttgggtatttgtgatttatttatttatcacttttataaggggaaccgtaaagaggcggatgagctttatctggaacttcgggatgtcc

SEQ ID NO: 1701 - DNA, 981 bp, Listeria monocytogenes-4B
gctcggaaagatcaaccagaaaaaatgtcagaaactgagcagaaagagcatggcttgctgttaggaaaagactatccatttccgatagttgaccataaagaacgacggaaattagccattgcacgctacgagtttagcaaagagcattctaggggaaatatatagataatgagtcaatcatttaattaaatgattgatttttttgtggcagtattcacaaagaataagtcttgagcaaccttctaggagtaagaacctgggtatgttaaaattcatttatcaagtgataagggggaatcacaatggcgcaatttttaaagctatttctaacgagtgcagtagttttcttgatttttgatcttttttggttactcgtagcttctaaaaaaatgtatcaacaatttattggggatttaatgggggatgtaaaacttgctccagcagttattttttactttatttatgtcgttggtgttaccttcttcgttttacttcctgggacagaaaaaggaagtttaggttacaccattttagcaggcgcgttgtttggtctagtttgttatgcgacgtatgatttgacgaacttggcgacacttaaagattggccgattacgatgaccgttattgatctcgtttggggaacggctgtgacaactgtgacttcagtgactgtttcatgtattaatctgcatgtctcgtcgggagtaggttcctaatgatgtagtcagacagcacccgtctattacaaagtatgctacacggggcggctgaagtacttagtagaaaagaggtccttcatagaatcagtgtttttcatgtagcggatgccgactcgggtagtaatttagcttctttaatgccagcgatctttgatcatgtttccccgagagaatgttcagcgaaggaattggtagaggaagtagctagcacggcgctcatcggtgctcggtggcaattcagggatgagttttgcgctatact

SEQ ID NO: 1702 - DNA, 962 bp, Listeria monocytogenes-4B
tgaaatgtctttccgttcgcggtatttaaccaacataatcgtaaacaatacaagaatcgtcaaaacaataaccagcataaatataatcgaataaataattaagtccgactgaccttttgcaactggcccttttggattaagtaccgtcaagtcaccacaaccacttataaggccggtaaccccaagtagtgccgtaagcagcaaagatttaagtacctttgacacccgaatcccctcttttccttttgatgttttctaatgtgtatttttgcgcaaaaataccattaccggagtgctgaaagaagcttgttagaactcctatgtaactgaaaaaatgcttttactatttagttcttttaaaaaaactcacaaacttttttaaaaattaatcagcatttttagaatcactatgttcatactctaactcattatatctgatttgatatcttagttcaaaaacctgatatattaaatatttcacaaacttttattctgttcactattccctagtttgtgaaatttaaaacaaaaaagcaaatgatattcaagaatatcaaaattctaaccttttatattattttttaaatttaaaaaataatattgtattacattaatatttcatgctatattaattttgtaatataatacatataaatgaaagagggaacaaaatcatgttaaagagaaatgtacaaaaagggatgattagtttaattgcaattatgatgtttttatcaatgttcagttttacaaatttaaattctattaaaactgtagaggctgcaacaactgcgtacaatacaattgagtacaataaatcagttaatttagatgctaatattgcatatccagaaacaaatgcattttggtctgcaccatattattcagaaggatcaacatttatatcaagtgcaactgcaccttcttatgcaaaaaaagatgttaaattaataagagaggca

SEQ ID NO: 1703 - DNA, 1140 bp, Listeria monocytogenes-4B
cctatcgtccaccagtgtgctggaaagcaaactaactttcttaccttatatggtgaaagctcttgttgcaacgcttcgtgacttcccagtgcttaacacaactttagatgatgcgacagaagaacttgtttacaaacattacttcaacgttggtatcgcagcagatacagaccacggtttatatgtaccagtaattaaaaatgcttgataaaaaatccgtattccaaatttctgatgaaatcaacgaactagctggaaaagcacgtgatggtaaattaactgctgacgaaatgcgccacggttccgcaactatttctaatatcggttctgccggtggacaatggttcactccagtaattaattacccagaagttgctatcctaggtgttggtcgtattgctcaaaaacctatcgtaaaagatggcgaaattgtagcagcaccagtacttgctctttccttgagctttgaccaccgtgtaattgacggcgcaactgctcaaaaagcaatgaacaatattaaacgtttattaaacgatccagaattattactaatggaggtgtaacaaaatggtagtaggcgattttccagaagaaagagacaccatagtcatcggtgcaggcccaggtgggtatgtagccgcaatccgagctgcacaactcggacaaaaagttaccattattgaaaaagaatattacggcggtgtgtgcttaaacgtgggatgtattccttccaaagcacttatcacaatcggtcaccgttttaaagaagctggacactctgataacatgggtattacagcagacaacgtgaacttagatttcacaaaagcacaagaatggaaaggcggcgtagttaacaagcttacatcaggtgttaaaggccttcttaagaaaaataaagttgaaatgttagaaggagaagcgttcttcgtggatgatcattccttacgtgtgatccaccctgactccgctcaaacttatacattcaacaacgtaatcattgcaacaggatctcgtccaatcgaaatcccaggtttcaaatatggtaaacgtgtattaagctcaactggtgcacttgcactaacagaagttccgaaaaaactagtcgtaattggtggcggatatatcggaacagaacta

SEQ ID NO: 1704 - DNA, 1400 bp, Listeria monocytogenes-4B
  misc-feature (1)..(end): n can be any nucleotide a,g,c or t/u
agaattgccgaagaagcgagtattgagggattgaaagaggggacgctagcctacggtaattcgttgctagaccggcaaagaacaaacagatgaatcaaagagccccattattcaaaatgtgctttcctatatcacggaacattttgcagaaggaatgtctttaaaaacactcggtaacgactttcatattaatgctgtttatctcggtcaactttttcaaaaagaaatgggcgaacactttacggattatctaaatcgctaccgggtgaactatgcaaaagaagaattactgcaaacaaaagataacttaaccattatcgctgggaaatctggttataccgatatggcttatttttatcgccagttcaaaaagcacacaggcgaaacaccaaatcgctaccgaaaaatccatcaataaaattatttctaatatttgtctataaatctaaacatccgcaactatttaaccccacgtaaaaacgataaactaaagatgttgaaagcacttacaaaaaagaggggtgaatggattgaaaaaagttttatcacaaattcgagctaatcggatttggcttttaatggtacttccaggcgtcctttggttcctggttttctcatacttaccaatgtttggtacagtgattgcattcaaagattacaaaattgatgggaaaggatttttatccagtattatgagtagcgactgggtgggacttgaaaattttaaattcctattccaaacaaacgacgcttttattattacccgaaacaccgttctttataatttagtatttattattgttgggctgtttcttggtgtagcacttgctattattttcaacagcttactaaataagcgaggagcaaaaatttatcaaacgggaatgcttttcccccattttttatcatgggtagttgtcagctatttcttgttcagttttttgagcgaagacagtgggctgatgaataatattttacttgcattcggacaggacccgatttcctggtataacgatccgaaatactggccgtttatccttatcatgatgaatgtttggaaaggcttgggttatggaagtattgtctacctggcagcaattgccggaattgaccggacctactacgaggcggcaatgattgatggcgctggcaaatggcaacaaattaggcatgtaacaattccggcactaacgccactgatggttattttaacgattttgaatgtcgggaagatttttaactctgattttggtttgttttatcaactaccgcgaaattcaggaccctttatcctggacgatgtattgtcattgtccggtacgcctgcattggtgaccgngcgtcttccctccggtttcttgtctccgcgccggcctngccttgacccgtaaaaaaaaaaa

SEQ ID NO: 1705 - DNA, 747 bp, Listeria monocytogenes-4B
  misc-feature (1)..(end): n can be any nucleotide a,g,c or t/u
gaaaacactatagcacatctcaaaatagccggcaatactttttacgaaagtcttgttttgcaggggaattctcgtttttaaagacttattttagattttctctaacaagcggcatcgtcatacatcttggccccccgcggcctctagaaagctccgaactaatcacttcatgaaccttaatacccgcacttcttaacagatcgtttgatacttgatttcgatcatatgtaattacttctccaggagcaattgctaacgtatttgccccatcattccactgctctcgcgccgaaacaattacatcttctccgccacaaggaataaaatcaatttctggctcatccaaaacctccgcaatcacgcgctgaaaatctcttcgcggagtaatttctaatccattctcacttttttctaaaatgtatatattaagttctccttgttgattttgaattgctggatgaatcgtgaactgtgcaaaattaaccatggtgaaaaccgtatccaaatgcataaatgaccttgtttcaggaatttcaacagctaaaactcgtttaatttttggagaacgactaaataaactttctgcaagccgttcgactgctcgtgcatccgttcgctcagatacaccgacaagaacagtctcttcatttagaactaactcatctccaccttctaaagaaaacggcctttccagcacacgtcggcgctcgagcagctgtaagttacgaaagtgnnttttaaagcgaa

SEQ ID NO: 1706 - DNA, 642 bp, Listeria monocytogenes-4B
aaccctatgggcactctacagcatgtgcgagcggccgaccagtgtgctggaaagaaattataccacgcatattggcaactacttgaattatcttcaaacagccaaccaagtagtttcaaataatatcgccaatgccaatacgcccaattttaaagcaagtgaagcgagttttgaggaatcatttggctcaagtttgcgcgcatctggtcagaatagcaccgagtcggccggcaacctaacgaaaacaaacacaaaacatttagctggaaccgatatagacgaaacaaatgcaaaagtaacgaccaagagcggctccatcaacgaagacggcaacaatgtcaacgtcacttctgaaatgattagcttaacaaaaaataaccaaatgtacgcgctcgctatcagtgcactcaactataattcatccatcaacacagcagcccgtggaaagtaaggtgataaaccatgtttgaaggaataaacacaagtggctccgcgttaaatgctgcgaaacaatggatggaagtaagctccaataatatcgcgaacgccgattcaagcgccgcacctggcgagacacctttccttagaaaacgcgtcgtattatccgaaatcacaccatttgaaacagctctaactggaaca

SEQ ID NO: 1707 - DNA, 1212 bp, Listeria monocytogenes-4B
atggaattaacgcgatcttgccgcaagcggttgggatggttttaagtgcgctaattatgacgcatagcggtggtacggaaaaacgtttcaataaacgaacactcttacttactattccagggataatctgggcggctgggaacgttgcgatggttcacgctaaccaacttgttggcgttgcgactggtttttcactttcgcaactcggagttgttatctcaactattggcggaatcgtacttttaaaagaaaagaaaacacaaaaagaaatgttttttgttattgtgggcgtagttttagtcgttctcggcgggattttaatcggcgttgcaaaaggtgcttaattaattatttcgtttagcgcgaaaaatgatataatgatactaattgttttatttttaaggagggaattgtgttgcctgaagagaaaaatacgttttatattaccacaccaatctattatccaagcggaaaagcgcatatcggccatgcttatacgactgttgcgggggacgcgatggctcgttataaacgcttaaaaggatatgatgtgttttacttaactggaacagatgagcacggtcaaaaaatccaagcaaaagcgaaagaacgcggaatttctgaacaagaatacgtggatgaaatcgcagaaggtttccaagaactttggaaaaaactagaaatttctaatacggattttattcgtacaacacaagaccgtcataaaacatcggttgaaaaaatctttgaacaacttttagaacaaggcgacatttacttaggtgaatacgaaggttggtactctgtttctgatgaagaatactttacagaaacacagttagaagaagtatataaagatgaaaatggcaaagtaatcggcggaaaagccccaagtggcaatgaagttcaactagtgaaagaagaatgctactggttccgtgtcagcaaatatgcggcctcgtttactggaatatcgtccttgcccatggagaatgcatgcctcgctgctccgcctaccgcgaggtgccccatttcccgctttccgtttttttccaacgatcgcgccccattccattcatctccccccgcctcccctcgctttcccccattcggcccctcctctttttcctgctctcgtttgttcgtcgctgccattcttcgcgctcgtttccgttctcccctcccccgcctctcttgtcgcgtccatattat

SEQ ID NO: 1708 - DNA, 1221 bp, Listeria monocytogenes-4B
  misc-feature (1)..(end): n can be any nucleotide a,g,c or t/u
tgtcgcctaccgtgtgctggaaagatcactataactagcgcttttccccttcttattagtatttatctctttgaccagtagtatttaaaatgtgtaatttatgtcttacaacttcttttactttttcatttgctgatgggtacacttgatttggttcatacatcgcaggattgtccactaaaacgcggcgaacttcttcaaaaaacacacttttcagatctgaactaaggtttactttcctaacaccgtactgtacagattcactgacttctttatctggatttcccgaaccaccatgaagtacaaacggaatatccaagcgtttatttaattcttttaaaagaggcatattcagttctggttttttatctttagggtataacccatgcgccgttccaatagctacggctagcgtatcaatgccagttctctgtacgaaatcttctgcttggtcagggtcagtatatatgatggtatccgccccgccttctgctgaaccattgttcccgattgttccaagttccgcttcaacagaaacaccgactttatgcgcaagttcaaccacttgcttagtcaacgccacgttctcttcataactggctcttgaagcatcaatcatgacagaagtatagccatttctaattgcccgcatcacatctttgattgttccaccgtggtccatatgaataacgaccggcaccttacttttatgtgcgtattctctgactgttgcaacaaagttatcaccgagatactctatttcatccggatgaatttctaaaattacaggagcattatttgcctccacttcctccattatcgcctttaacatatcaaaactacagatattaaatgctggtaccgcaaattgatgctcttttcctactgctaaaagatctttcattgtatataacattatatcatctcctctttattttttcgcttgtttaatggggtttttaatagtccgacagaaattgctgtcacgactgtgcctgctgcaattgctagtaagtagataaataaatggttaattacatttggaatgaacatcacccaaatcccaccgtgaggcgccatcgaagttacaccagctcccatcgaaattgcagcagctgttgcagaacctaacatcaaacttgggataacccggagcggatcagcaactgcgaaaggaattgctccttcagtaatataagatgcacctaacacccnacaaga

SEQ ID NO: 1709 - DNA, 1356 bp, Listeria monocytogenes-4B
  misc-feature (1)..(end): n can be any nucleotide a,g,c or t/u
tttttttttgttttttttctgtggaggaagggagggggggaggggggcgggagaagagaaggagggggggcggaaggaagggggggggggggcgggggagcgggcagaggggggcggaacgagaagagcccggggggcgccgcaggaggcgcggacggcaaaaggaggcacaacacgggggatgcgccaacgcagccacaataacgaacaagggcgcttcatccgtcgcgccagcatcagcgaatgagatcgtctaactccgcatattgataagccgccacttgagctgcaacaccctgatgcgctccactcactactttttcaattttttgtttgggtacaaattgaacttggattttccgttctttcgctaatgttaagacttgttttaatacgcctttttgtgaaccttcttgtacatatattttatggatatctctatcagatcgtaatacttcaagaacaggatttctcccgccaatccactcttgctcattttcttgttccattagttggtttccactcctttttctactatttcaagcgccttttccatccattcttgtaaacgatccaactcaccagctaagtaaagataacctagcactgcttcaaaagatgtggacatactgtaagttccagggtcagtatttttaggcactgtatacgacttggcattacgcccacgctttgcaattctatcttcttcttccgtcaaaaaaccttccgcaatcatagcttttagcgccacagcttgcccttttgcagaaacgaattttgtcgccgttttgtgtaactgattcggttttgtctttccagcagcaagtaaatattcgcgaataaatttttcataaactgcgtcacccatgtaagcaagcgcgaggccattaagttgtttgtattctttcacttctgccatgatttacccccgtctaaaccgcgtgccttgcgcagtgtcttccaaaataatatttttttcttttaaaatgtctcgaatttcatcagcacgtgcaaaattacgttcgtttcgcgcttgcagacgttcttcaattaacgcttctacttcgctatcatccagcgaatcagtttgcgtattttctaatttcaagcctaatacttccgcaaacaaacgcatcatgcttaagaattcgcgcagaacattgatagaaacagtttctttagccaaataaatattggcacgctttgcaagttcgtgaaaagtagtaattgcatttgccgtattgaaatcatcatccatatcatcttcaaaagcttgttttaattccgttagctctttccagcacatgtcggccgctncagcaggatgtcnttgactncaggcnnnnaaaaaggtta

SEQ ID NO: 1710 - DNA, 777 bp, Listeria monocytogenes-4B
tagcagtagttgtctttgtttatccatacatgctccctatttgtttggctaattcttggtcggtttttagctggctttttattgcttcgttgattcgttctagcaatttatcatactcttgttctattttggttgcttcgactaaggatttttcgcagtcttgcactgtgtctatcacaatttccggctcagtcgccccgccccaagcaagtgcggcgagtatttctgactcatatagattggagccgatatcccttgcatctgaaagcgtatcgcgccacaactcttcagcattctcgatttctttatcaaaaacatcttttaaagctctaatttcgccttgaatcgtttgtttcatcccttgcgtaattgctagtgcttccgctgcatccaagaatatttcttcggatgaggataggccaccaccgctttttgtaaaactggttcgcatgatgttgatagctgctaattgttgagctgttgcgtatttggcaagttgaaggcttccatctttatttgttagaatgtttccttctttgtcaaactgataaccaccccacatatgctgctcaaccaaaccagcttttttcgactcaacctctattaaatgaccaattgtcgggtctccaataccataaccaattgccacataatccttcctatcaatacaattaaataatctatctacagcgtttactgctttaacggtatcttgttgttttggcgttaggttggagtagatattcgggccttggtagaagaaaccaccactcatgc

SEQ ID NO: 1711 - DNA, 1138 bp, Listeria monocytogenes-4B
aatgcgtataaaaaaggagtttttatcatgaaagttgaaggattacttggctttttaggggcggcactgggtattggatttagtttgatggttctagttattcctgatatttcacaggcattagaagaggagtcatttttcttctatatgttaacgattggttcacttgtgctttctggagtgggacttgcgggatcgtttattgtttcgcataagccgcgtcttggtggggcaatgatggtggcagctgcaattggctgtacaatgtcaatttcgattatgttcttactgccaatcgtactacttgctgttggcggattaattgcattaattaactatgaagaagctgcttccgtagaagaataaatgaaaaaaagctgtccgcgtgggcagctttttttattaacgattaagatattttttcaaaaagtagtaaattccatcggcatcatttgcagtagtaacaaaatcagcactttttttcactagttcacttgcattttccatcgcaacccctgcgccagcaacttcaagcatcccaatatcattttcaccatcaccaaaagtaattacattttctggcttgatatttaaatgtgcagcgagatttttcacggcgtattttttatccatatcttttggtaagatctcgatattattggcatgggaagaaaggatagaaacatcggatagtttttctagctcacttcgaagggctgcgagtttgtcgaaatcttcttcctcgattacaatcccattaatgaactggtccgcatgctcaaggaagctttcttttgttttgataggaacgagttttgtagcatttacgcggcctttatcttcttcatccgtaaaataatatgggggatttttagtgtagtaaacagtatctgttgaaaagaaaaacacaggtaaatcatgattttggcacaataaaaatgtctcgagtaacgcagattgtttcattttttcttgtaggataatttcgcctgatactgcaactacaccgccgtttgaagcaatgacatctgcttttggatgaacgaggttggcgaagtctgttgcggaattatacattcgaccggtagaaacggcaaaatgatgaccttcttctattaattgttgcaataaatttaac

SEQ ID NO: 1712 - DNA, 972 bp, Listeria monocytogenes-4B
gttagttgtgtggcaatctattatgcgcagcagacaaatcagtacaatacgaattttttaggaatgcaattggtgtttttagcaattgggacgcttacgtgttttggtgtttctaggcttccggtggagtttttgcgacatcatgcgatttggttgtatgtgattatggtcattacgctcctaggtatactcattcctaatcctttagtacaaaatataaatggagcgacacgttggtatcgttttgcagggctatcttttcaaccttctgaagtagtaaaatccatatttatctttgtgttggcgcattttgcagtgaaatatcaagcacaaaaatggaaacaattagggattctgacggtgcttacggggatagtattactattaattatgaaacaaccagaccttggtacgacgattgtttacggggttacggcgctagcgattattttactggcaattaaatcaaccaaactgatggtcggaattattacgttaatcttaacagctgcaacagttggtatgtatgttgtcgtgtatcacattagcttattagagaaaattgggtttcacgcgtaccagttttcacggattcagacgtggcttgatccaacaactgacccagacgccgtgtaccaacttaacttgtcgataaaggcggttggttcggggatgatgactggtagttcggggacaaatgcgtatatccctgaaagccatactgatatgatttttagtacgattggtcatcagtttgggtttgttggtgtaagtttgttgttaattttatttatgctacttatccatcaattaattatggcagcgctatttgatgaagaataccttttcttcgcttgcttcaccgggctttgcagtgagttttgcctttaatatttttgaaaatattggcatgactgtcgggcttattgccgtgtcaggtattccactaattaaataatccgttgagggggt

SEQ ID NO: 1713 - DNA, 1289 bp, Listeria monocytogenes-4B
  misc-feature (1)..(end): n can be any nucleotide a,g,c or t/u
gtaaaagtcttcgaataaaacgattatcatcatcggtatccacatatactttaatatccatcaaatccctaaggcgtttatcttctaaaattaaaattccttctaaaataataacttctctaggttcttggatttctacttctttttttcgcgtatatttggcataatcataaatcggcttttctatggtttcatagcgacgcagtgcggcaatatgtgaaatgagtaagtccgtatcaaaagctagtggatgatcataatttacttttaatctatcttcaaaactaatattggcttgatcgtgataatagacatcttgagcaatcatcaaaatcgagtgtccgctaaaatgatcacaaatggctttcgttacactagttttaccagaacctgaaccgccagttacgccgactacgattggtttttttgtcatgatacgcctccagttttctttcttttggaaatagataggccgtcccctagtggaatggtcgttgtttcaaaatcaggatgcgtcactaaaaaatcgttaaaatggcgcattttcctagcaacacgtaatttgcgttgtttttctggtgtcatatctagcgctaaccctttaaaaagaacattatcactataaataacgccattttcagctaaagaatcggtataaatatggaaaaatttctcatattgcgctttggctgcatcaataaatattgcgtcaaatggaccgtgagccaaaatttcttcagctccttcaatagcatctgttaataaaactttcactctgtcattagccccgtagcgctgaatattttttattgcttgctcatatcgttcttcgtcgcgctcaaccgtgataatctctgcatcaggaagtttatctgccatttttaaagcggagtacccaatggccgtcccaagctccaatatgcgctttggtttttggatatctaaaatctgtaataagcagtacaaagaatctggttccataatcggtacttcattttccttcgcatacgcctctaattcttcaaaaaaaggactgctcttaggaatgttttttaataaataatcatgaataatatcattcactgctaggatcccctatcttaacaaacaaagcacctgccaaaaacatgctaaacatgcttctgacaagtggatgtggtaatatttatcgaatatgctctctttagtgattggccttagtaaagactcgtgtcaagtgactcggnnnnanagaagnntactnaccagtnntgatngctaaaagatggatatntcgagggctagctcgg

SEQ ID NO: 1714 - DNA, 1494 bp, Listeria monocytogenes-4B
attagatttggaggatatggaatttagtatgccggaattaagggcggctcaaggtattataaaagaaatagatctttcagaaggaattcgtttcccggaaagtgagactgcctatctgctgctacaccttagttcgaaaaacagaaaaagtgactttaataattaccgaggttatatcatcgtggataagatgttagaaaagattaaagagctgtacggttatgattttaagcaagaccagaaaatgatttccaatatcgctttgcatttaaagccagctattaacagaattaaatttaatatgaatatacaaaacccgtatttaaaaaatctaaaagctaattatccactagcttttgaattagggttggttgctaaagaagtccttgagcaggagttaaaaacaaatgtagacgaagcggaagtaggatatttggctattcactttttgtatggcttagataaggaaatagggtctgagaagcaaaaagtattgattgtttgtgcttctggtttagggacgtcgcaacttttggaatctaaagtacgaaaagagtttgagaatacgcttgaaatagtcggcgtgtactcatttaaagaatatgagcagagtggaacggcatgtgactttgttatctctacagtaccactgcgaatgaagttacatccatttattcaagtatcgccatttttgacaaaggcggatattcgtaatatcactgcgttaatgaagcaagatgagacgaagaaccaatttgaagtggacaaggtttttaaggaatcgttattcttaattagtgataaaaaggacaaagagcaagttctggtagatttagcgagtcttttgctggaaaataatattgttggcgaggactatttaccatcactttttgagcgcgaagaaattgtgccgacttatttaggtaatggacttgcggcaccacacccaattgaagcaaacgtccaagaaacagctattggagtatgtatttttactggcggtggggtaaagtggaatgaggaagatcaggcacaagtgattttcatgttagcggtaaaaaacaagcaacaacagcagcttgcgacggtgtatgagcttattagcaatttagtagaaagtccaaaagcaatgggagagctaaaacgtgtgacaagttttgaagaatttatgcgtgtgttacaaacgatataaccaaaaggttcgttagactttcttagagagaaaagttaacgggcctttttttatttccgcatgttaaatacagatgcggaaaaagactagatttatttaacaaaaagaaagcgctacacttattgtcatatcaaaggaggtataaaaaatcgaaaaagttcatccggaaattaagttggttatcgcacaggccggaaatcaaatgcattaaagtctatgcctgatgcatttgctactttgtcaccttgtgtcgtggtggccggttgctgggcgctatttatcacgcaataataaaacaagat

SEQ ID NO: 1715 - DNA, 1460 bp, Listeria monocytogenes-4B
  misc-feature (1)..(end): n can be any nucleotide a,g,c or t/u
gtagatggtcgggaaactggactttcagaagggcactttgttggtccaacaattttggaagatgttacgacggatatgacgatttggaaagatgagattttcgcaccagttttatccgtgattcgtgtgaaaaatctccaagaagctgttcgggttgcgaatcaatctgaatttgcaaatggcgcttgtattttcacaaataatgccaaagcaattcgctactttagagaaaaaatcgacgctggaatgcttggtgtgaatttgggcgtacctgctccaatggcgtttttcccgttttctggttggaaatcgtccttttatggaacgcttcatgctaacggcaaagacagcgtggatttttacacgcataatattagttgtcactgcgagatattcattaaaaggttacgaagaataggagggcgcaaaaatgggcaaactgttacgaaaaccgttaaatgaaagaatagcgcctggcattacgtttgtgcaggatattaaccaagctaattctccgctaagttatgttggttttcgcttaattgaaatggaaaaaggtgctatttatcaggaggagcttactgatttagagtgttgtattgttgcgcttactgggaaaattacagtgagtgagggtgacaatatttttgcggagattgggacaagagcgaatgtctttgaaaaaattccgacagatagcgtgtttatttctggcggacggacgtttcaagtgaaggcggacacagaaaaagctcgtgtagcgctttgctactcccaggcgaatcgagacttgccaacgacacttattaaggctagtgataattcgattgagcagcgcggaaaatatcaaaataaacgactggtacataacattntgccagatgtaagtgaggttgcgagcagtttgttggttgtggaagtgtatacggatggcggaaatttttcgagttatccgccgcataaacatgaccgcgataatctgccagcggagtcgctttcggaagaaagttatcatcatgaaattaatcccggagaccggttctattttggaacgggtgtatcccgatgaccgggactcttctgcaaccatggttggctgacgcttcctactcccagccgtcgtgcccgcacggttttgccgcgctcccctctgtccggcccgtcccgagcctgtcgccgccagcccagttcgccggtctcccccctcccccgcatccgttttcgcccccccccgccccttcgatttctttactcccctctatccgctcctgtgtggcgcgggttcccccccgccccggccgctgccgcccttccccccctcgtgcacccgccccctggcgccgctcgccctcatgccgtcggcgcggattcgccgccgcgcgcccgccgcattgtattctatctcacccgccagtccgccccgcgcggccggcgtcgcgcgctccgcatgtcgccccgtt

SEQ ID NO: 1716 - DNA, 1861 bp, Listeria monocytogenes-4B
cctaaggtacttacagcatgctcgacgggcaacatgtgctggaaagtcattgttttgggtcaaaaaaagttctataataaggttttagtgaaaaaattatggtatcatgaagtattaaagtttgtactattttgatggagaaaggattggcgtacattggctacaggcattgggacagctaaaatgatattatgcggagaacatgcagttgtatacggagaaccggcaatttcagtcccatttacacaagcagttgtaacgacaaatgtagaaaattctacaaaaaccaaattttcttcggcatttttttcaggtgatttagatgatatgcctgatttcttagcaggaatcaaagcattagttgtagatgttttaaatgagattggaaaaggcgaatgcgtttctatccatgtagtttcaggtgttccaattggacgaggtttaggttcaagtgccgctgtagcaacaagtattgcgcgtggtttatataaatattttaatcaagaattagactcgaaaaaattattagccattgtgaatgctgcagaaaaaattgctcatggcaatgctagtggtgttgatgctatcacggttgtgagtgaaaaaccagtatggtatgagcgagatcgaaaactagaaattatgcatttttcaaaaaaaatcacgttcgtagtagcagatactggagttccaagtgaaaccagagacgcggtgaaggatgttcaagctttatataaagaaaatcaaacagaaattggtaaaataattcatcaactcggcgatatttcccgggaaataaagactcatttagaaggcgatgcagatactgtgaaaataggtgctgcaatgaataaggcacaatcttatttagaaactttgacagtaagtgatagtagtttagagaaattaatagaagtagctagaagtagtggtgcagacggggcaaaacttacaggtggcggtagaggtggatgtattatcgctgtagcaaaaaatcaagaaatcgctgaacaaataacgaaggagcttcataatgctggagctgcacaagaatggatttttacgattggagaaggtagttatgaaagcgacagccatcgcacacacgaatgtggcgctaattaaatactggggaaaacgcgatgaacacttgattctacctgcaaacagtagtttatccttcacggtagataaattttatacaaaaacaacggtagaatgggacggaaatttagcccaagatacatttattctaaataatgaacacaaaacggatgcaaaagtagctcgttttatagataaaatgcgtgaagaattcggtatttcagcaaaagcaaaaatcacttccgaaaatcacgttccaactgcggccgggcttgcttcatcggcttctgcatttgcagctcttgcacttgctggatctagcgctgctggcagaaaagacacaaaagaatatatttccagactggctcgtttcgggtctggttctgcttctcgttccgttttcggagattttgtcatttgggaaaaaggcgaactcgcggacggtagtgattcatttgcagtacctttcaccaacaaattatgtgataaaatgtctcttgtagtcgcagtcgtttcggataaagaaaagaaagtttctagtcgggatggaatgcgcctaactgttgaaacatcaccgtttttcgaaaaatgggtttctgctgctgaaacagacttggaagaaatgaaacaagctattttggatgaagatttcatcaaagtgggcgaaatcacagaacgaaacggaatgaaaatgcatgcgacaacgcttggtgccgagcctccatttacttattttcaaccgaagtcccttgaataa

SEQ ID NO: 1717 - DNA, 1754 bp, Listeria monocytogenes-4B
  misc-feature (1)..(end): n can be any nucleotide a,g,c or t/u
ggcgtatgtgggggtccagagagcgtaccggtgggggagaccgaggggggaagcggcagacgcgggccttccacggggtacaccatccggcaggcgggcgggcagcgtggagcgcgggggcaggagcaagaggggaacactccgacccggggcgagggagggcagaggagggggagggggagcggcgggaggggcggaagggatggggggggcgaggaacgggggggacacaacgtggggcggaacgcggacggtcgagcaggggggcgaacatgacgaccaaaatgagcgggggggggggcgccaggcataaatcctgttccatgacgtaatggtaacaaagcgattttaccacttggacgcttattcgcaagccatgctccaatagttacttcttttccgacaaattcggatgcttcattgattgtagttttcacttgtctacactccctatttcataaaacttttgattcgatttatagcttcttggaataagtctggatttgttgcataagaaaggcgtatataatcaggcattccgaatcctgagcctggaatgactgcgactttcgcttcttctaaaagagctgctacaaaagcatctacatcctgaaaaccttttttatgtgccgcttcttttacttcaataaagaaataaaaagcgccatctggttttttcggtttaaaacctggaatgctacttagttctggataaaaacgttccattcgttcttcaaaagctttgtacattttttctggaacttcttgactaccaacatacgcttcaagtgcagcatactgggcattagcagttggattacttgttaaatgatccgctaacttactcattccagcaatgatttctttatttgcagctgcgtaaccaattcgccagcccgtcattgaatatgctttagatacaccattaataacaatagttaaatcatacaaacggtcactcaaactcgcgatagagactaaatcagctttgttaccatagtataatttttcgtatatttcatcagataaaatgtaaatctgatgtttttcagcaacttcaccaatagcaataagctcctctttcgtatagcacataccagaagggttattgggtgaatttaaaacgattgcttttgtttttttcgtgatagctttttcaaaatttgctgctgaaattttgaaatccgcgtcaaaaccagtttctacaaaaacaggaataccacctgctaatttgacttgttcgggataagttacccaatatggaactggaataatgacttcatcgcctggatctaaaatcgtttgaaacgcagagtagagtacatgtttagcaccagtacctacgaaaatctggttcgtttcgtagtttaagaactgatctttttggagcttatcaacaatcgcttgttttagctcgatgattccactagaaggagtatatttggtgaatcctttgttcatggactcaattgctgcatcgataatattctgcggggtattgaaatctggttccccagcacctaagccgataacatcaattccttcttgtttcatttgttttgctttagccgtaatcgcaagtgttggcgacggggccactcctttgacacgttttgataacggtaagtccattttattccctcctncaatttagttacaagttttcaatctctctgtaccattcacctgtttcaaagttatgtcaaagtagtttagcttgtcattcttatctaagtaggcaacttcccaaatag

SEQ ID NO: 1718 - DNA, 1628 bp, Listeria monocytogenes-4B
tcatcgtcatttgcttggaattcgtcctggtgaatatgatagtggccgagttggcggcggatgtgtgccgattaaaacagaagaaggttggttaattttatatcacggagcaactgaagagaatcgttacgtgatgggcgcggcgcttcttgatttaaacgacccaacgattgtactgaaaagaacgaaaacgcctattttagagccagttgccgattatgagaaaaatggctttttcggtgatgttgttttcgcatgtggggccattcaagaaggtgatacgctgcatatgtattacggcgtggcggatacttctatggcgggctgtgacatgaaaatcagcgaaattctacatcagttagaagtggaaaacaaatgacttggcaacaacatttgaacgcttggaaaaatgccgatttatcagatgagtggcgccgtgaattacaacgagtggaacaggagcaggaacgatttgatggttatttaacctttgggactggcgggatgcgcggtaaaatgggcgttggaacgaagcgcatcaatctttttaccattagacgagtagcgaaaggtttgggagattatgttgtcgcgaatggaggagccgaaatgggtgttgcgattgcgtatgactcgagacatcattcgggtgcttttgcgcaggaaacggcaaaggtcctggcggcgcagggagtcaaagtttatttatccgatacgattcgcccaacaccagcgctatctttttgcgttcgagaaaagggggcatttgcgggcgttgtgattacagcaagccacaatccttctatctataatggtttcaaagtatatgataaaaatggctgtcaaatcacattgggtgtagcgcaggaaattgctggctatttagaaaacacaacggatatctttaccataccagtgcgcgaattacccaatccactcgttatgacgctaggaaaagaaatggacgatgcttatttaaaagctttaacagcagtcgtttctcgccctgatttgcttgctgactacggtaataaactacagatttgctacacaccgcttcatggagctggaaaagaacttgttatgcgtgggcttttggaaaatggattttcggaaacgaccatgattgctgagcaaagtgagcctgacggggattttccgacagtggtttcgcctaatccacaagaagaaaacagttttgaactagccaaaaagcaggccaaagaaatacaagccgatattattctggcgacagatccggatgctgataggctgggggtagctgctttaaacaagcaagctacctatcaaattttaacagggaatcagctacgcgcattgctcttacagcctattccacaagccaaaaaccgccccctaacgcccgtcccaccatcaatccctttgccactcccgactcccgcgcccaatccgggctcactccggaatcatccgtctcccgcacctcaccgccccacgtttactgcgcccccccccccttctcttggtccgcccgcggtcgcccccccccctctcctgcccgccgccgccagtgtgctccgattccacccgttgctctagcaaacgccgcagcggccgagccaaccccgaaccccccccctaccccg

SEQ ID NO: 1719 - DNA, 963 bp, Listeria monocytogenes-4B
ttatgtccaccatatccgatgatttactcgaagcagcaagacttgatggcgctagtgaattttatattttctggcggatagttatccctatttcccgccctgtgcttgcggtacaaggtattcttactttcatcgctggttggaactcgttcttatggccgttaatcattgccaacgacgaaaaattctacaccctatcagttggccttcaattattaaaaggtcaatatggcagcaactacgccttacaaatggccggagcaaccttcatggttattccaattatcttgattttcatgacattccaaaagtacattttaaaaggcttcaacgtttctggaatgaaataattagtcaaaaaagagcttacccatttaggataagctcttttttattatggtaaaaatgtttcacccatcaagtaaaagtctacttcacgagctgcttctcgtccttctgcaatcgcggttacaactaaactttgaccgtgacgcgcatctccgcaagcgaatacgccctcttcgcttgtgcggtaaaatcctttagcagcatctatcgtatggcgctctgtttttcctacaccaaagtttgtaaaaatatcttcggttgttcctgcaaaaccaatcgcaattagaaccatatctacttcaaagtatttttcgctaccttctacaggtgtatattttctttctgccttattttcttctacttctacagtatgcagtccaataagatttcctgcttcatctttttcaaaagaagttgtattaataaggtactcacgtggatctcttccatacactgcttccgcttcttcgtgcgcataatccattttgaaaacacgtggatattgcggccaagggttttcgccatcacgcaattcgggtagtttatccttgaataccgaattgataaatacttttttgccccttgtctgaccgcagttgcccacagtcagcacct

SEQ ID NO: 1720 - DNA, 983 bp, Listeria monocytogenes-4B
acacagtgcgctggaaagactaagttgttagagagctatcaaggaagaagtcactcttattttcttcatataattgttaagatggaaaataaacaaaaaatcgatacgaatgattggttacaaatgcttcaagaagaagtagaaatcacagataacacatttgtatgggtacacaaattaacaacggagatttcttctcaaagtaatttacaaacatggtacgaatcacatttagcatgattaagaaatcaagcattcgtttgagacactacaagatgaatctgctttttatcaagcagtagaggctctgtatcttgaaagtggagtgagtagatacttggatgatttgtctgaaattgatcgtgagaggctactacatgatgctttaatggaattagggaggacgcttgcagaagtggaaggtgatgataaatgagaataacatctattgatatcattggttacggaaaatggtccgatgctcattttaataatattgccaatttccaagtattctatggtgaaaatgaagccggaaaatcaactattatggcttttatacatagtattttgttcggtttcccaacgaaacaacaatcgataccgcgcatggagccaaaaaacggtggaccatatggtggaagattaacactagaagacacacctttaggaaaagtcatcattgaacgcttgaaaggaaaagcaacgggagatgttcggatatattacggggatggccaaaccgctggagaagaaaaattaccagaaattatcggtgaaattgatcgaaacacttatgaggctattttttcatttgatatacacggactacaaaatattcatcaatggaaaaagaaagaatttgaacgctatttgttagcaactggaacaacaggatcggacgctcttctaaaggcagccgaagcattacaaaaaaaattagatagtctatataaaccaagtgggcgaaatccactaattaa

SEQ ID NO: 1721 - DNA, 840 bp, Listeria monocytogenes-4B
tgaagaaaaacaaattgttggcttaattgggctaaacggggcagggaaaagtacgaccattaagcatataactggtctaatgcatcctaaacaaggaacgattaaaatcaataatcaccaattagtggaagatacagaaacatatagaaagcaattctcttatatccctgaaacacctgtattatatgaagaattaaccttaaaagaacatttagaattaacaggtatggcttatggtatatcagaagaagaactgcaagcaagaatgaagcctcttttaaaggagtttcgtttagagaaaaaacttaattggtttccagcccatttttctaaagggatgaaacaaaaagtaatgattatgtcggctttcctaattgaacctaaattatatatcattgatgagccttttgttggtttagatccgcttggtattcagtcattacttaactggatggacgaaatgcgtagtaaaggtgcaagcattttaatgtcaacgcatatacttgcaacggctgagaaatattgcgatacgttcattattattcatcaaggcgagattcgcgcagagggaacgctgaaagacttgcaaccaaacttcgaaatgccgggagcttcacttgatgaaatttacattcagttgacaaaggaaccgccagctgatgaagatgatatttgacagcaaagcgctttggaaagaacgttttagtgcttatacgaccgaagtcatgcgctatcttcgttatatgtttaatgatcatttgctttttgtgcttgtgattggacttggagcggggattttttcccacgctggttgggtaaagacacttgaacccacatttc

SEQ ID NO: 1722 - DNA, 1261 bp, Listeria monocytogenes-4B
agatggtaaaatcgtgatggatggccttcaatctgggaaatataaactagttgagacagaagcgccaacaggttacacaattagtgatgaatataaagacggtaaagaaatcacggttaccgccgatgcagttacaaacgttacaattgaaaacacagagcaaactggtagcgcggttcttttaaaagaagatagtgtaacgaaagacgctatcgcaggagcagaattcgaattacaaaatgcagacggtacaaaagtcgctgaaaacttagtatctaatgcagatggtaaaatcgaagtaactgacttagcgccaggcgattaccaatttgtagaaacaaaagcgccaactggctatgtattagatgcaacgccaagcgaattcacgattgaatttaaccaagaagccgctgtaattgttacaaaagaaaacacagcgaaaactggtagtgtggttctaacgaaagaagatagtgtaacgaaagctacgatagccggagcggaattcgatttacaaaaagcagacggaacaaaagtatccgaaaacttagtaacagacgcagacggtaaaatcgaagcaaacgatttagcaccaggagactaccaatttgtagaaacgaaagctgcggctggctatgtattagatgcaacgccaagcgaattcacgattgaatttaaccaagacaaagcagctgtcgtaacaaaagaaaacacagcaaaatctggcagcgtagttctaacaaaacaagatagtgcaacaaaagctgcgttatctgatgcggaatttgaactacaaactgccactggaactaaagtaaaagataatttaacaacgaatgcaagtggtgagatagaagtagctgatttagcaccaggcgattacaagttcattgaaaccaaagcaccaacaggctacgaattagatgccacaccggttacttttaccatcgaatttaaccaatcgactgcagtcaaagtaacaaaagaaaatgttgcgaaaactggtagtgtggtcttaactaagctagatagtaaatcaagaagtaatttagctggtgcagagttcgaattacaaacaaaacttggtgtcagtttgaaagataaagtagtgacagaagcaaacggtcaactgcaaattgataacttagcaccaggcgactaccaattagtagaaacgaaagctccaacaggttatgagcttgatgcaacaccagttgaattcaccattgaatttaaccaaaaagatgcagttcaagtgact

SEQ ID NO: 1723 - DNA, 1420 bp, Listeria monocytogenes-4B
atcacatctaaacaagcttcaagcaacaatttctccataaaaggatcgccaacctgtacagcagagcgttgttgttcgccttcttcactaaactctacagaagcaaaagtagcaccatgaatcccgtcacgaccagttttagcgccaacatacatcaccggattaccaattccttttgcttgccctttttgaatatctttcgcctcgattaaaccaacacacattgcattaactagcggattttttgtataacaaggatcaaattggatttcgccaccaaccgttggaatcccaatggagttaccgtatcctgcgattcccgcaacgacttcactaactaagtatttcgcatggggtgtatctaactcaccaaaacgaagcgagttaagcattgcaatcggtctagctcccatcgagaacacatcacggataatcccgccgaccccagtcgcagccccttgatacggctccacgtaggatggatgattatgactctccactttaaaagcaacacctaaaccatcgccaatatcgacaatcccagcgccttcaccaggtccttgtaatacttgtttgccttctgtaggaaatttccgaagtactggtttagaatttttatagctacaatgttccgaccacataacagagaaaagcccagtttctgtataattaggctcgcgtccaagaatcgaacaaacaagctcatattcactatcagttaagcccatttcttgataaatcttttgttctttaatttcctttgtcgttggctccatgttaggcatttacttgttcctccttccaagcttttacaacggactcgaaaagtcttaaaccatctgtaccgccaataatttcttctaccgcgcgttctgggtgtggcatcattccaagcacattaccgcgctcatttacgatccccgcaatatccgcacggctaccattcggattcacgctatcatatgtaaacacaatttggttattatcttttaattttaaaagtgtttcatcgtcacagtaataattaccttccccgtgagcaactggaacttggataatttcgccttctttataaagcccggtaaacatcgtacttgcattcgccacacgaagcggcaccgtcttacaaataaaatgcaaattattgtttctaattaaagcacctggcagtaaaccaatttcagttaaaatttagaatccgttacacacaccaagcactggttttcccatttcagcaaagcgcaaaacttctggcataatacttgaaaattttgcaatcgcaccagttcgcaagtaatctccgtaagaaaatccacctggaagtaaaaccgcatcaaaacctgcaagacttgtttccgcatgccatacctttccagcacactggtggccgctcgcacatgctgctagagtgcctaaaagt

SEQ ID NO: 1724 - DNA, 1191 bp, Listeria monocytogenes-4B
ttccctttgacagaactgcagttactgcccgagcgctgatcgctagaaccagtgccgccagtgtgctcggaaagtataaaatgaagtagaaaaggtggcgctttaaatgaaaaatttgttgtcaatggaagcattaaccgtccatgaaatcgagcatttattagagcaggcggcacagtttaaacgcgggaaaaaagcgacttttaatgaacagactttcgcggtcaatatgttttttggcccaagtacgagaacacatacgagttttgaagtagcagagaaaaagttaggtgtggaggttgtttcttttgatgcagcgagctctagcatgacaaaaggagaaacgctctacgatacactgctcacaatgcaagccgtcggggtcaatgtcgcagtgattagacactcagaagaaaattactatgcgggactcgaaaaattagacattgctattgtgaacggcggtgatggatgcggtgaacatccgagtcaatcactacttgacttatttacaataaaagaacaatttggtacttttcagggtttgaaagtagcgattgctggtgatattcgtcacagtcgagttgccaattccaatatgaaagtgttaaaaagacttggtgcggaactgtttttctccggaccgagagaatggttcgacgaaagttacttagcatatggcacttacttatcggttgatgaaattgtggaaaaagtggatgtgttgatgcttttgcgtgtacaacatgagcgccatagtggaacagatgagtttacgaaagaaagctaccacgaaaaatttggattgacggaaaatcgggcaaagcagttaaaagaagatgcaatcattatgcacccaagccctgtgaaccgagatgtggaaattgctgatagtttagtagaaagcgaaaaatcacgcattgttacgcaaatgacgaatggcgtttttataagaatggccattttggaagctattttaaaagaacaggaaatgagggcgaaattatgtacgtattaaaaaatgggcaagtattaaacgcgtcaggtgaactggaaaacaaagatgtacttattcaaaacggtaaagtcaatttgattgcggattccattgaagtaacaagcggcgaggaatttgatgcgacagggaaattaattgccccaggttttatcgacgtccatgtacatcttcgt

SEQ ID NO: 1725 - DNA, 1768 bp, Listeria monocytogenes-4B
  misc-feature (1)..(end): n can be any nucleotide a,g,c or t/u
ttattcaggcgtagaaacatcaggccacaatcgctctattaatcgaaaaaaatacgacttggcggaaattacagcagagttggaacaaagaggctccttacgaaaagcaacttatgatgcgttaacgaaattaattagcacacgaaaagcggaatcacttttgcatccagaaatactctttggaagttttagaatctacggcggaattgtttgttgttaaacgttcatccgacgtggaatcgattatattgattcataatttatgagaaaaagaagtgagttattcactagacagcggtgtttatacaaatctttatacgggctccacagtaactgggagcgattccataaagcttagtggctatgaattctgctggctaaaaaccaaaaattacagggaggaacaaaaatgaagaaaaagagtcttgtattacttgttgttgtgttggttctaagtgcggttctagctgcatgtggagggaaagagtctagtagtaaggaagtaacgattgaatttatgcattcatccgttgaaaaagagcgtttagatgttattaataaattaattgctgattttgaaaaagaaaatccaacaatcaaaatcaaacaaattccagttgaagaagatgcgtttaatacaaaagttgtcacacttgctcgctctggtaaacttccagcagttatggaagtaagccaagattttgccaaagtaatggataaagatgagttgattgaccaagatgcagtgaaagaagttatcgactcggttggagaagacaaatactacgaaggtgcaacaaacttagtacgttctgaagatggtaaaagctatatcgcagcaccattaagcggttgggttcaaggtatttggtacaacaaaaaagctttagccgatgctggttttgaagaacctaaaaactgggcggatattgaaaaagtagcgaanaaattcacaaataaagcagataaaaaatacggtattgcaattccaacagcagaaagcacgatgagtgagcaagctttctcccaatttgcactttctaataaagccaatgttttagatgcaaaatgtaatgtaacgattgatacaccagaaatgaaagaagcacttcaatattataaagatttgtcagcatacacgatgcctggttcaaatgatgtaactgaaattaaagatgcatttatgaatggaacagttccgatggcaatgtactctacgtatatcctttatctgtttatgaagaaggcgatccaaaaaatatcggtttcgcaattccagaagaaaaagaaaaagcagtttatggtacagtttctggtttaactatttcagcaggacttgatgatgagcaaaagaaagcaacgaagaaatttgttgaatacttgtctcaaccagaaaatatggcaacttgggtattaatgtctccaggtggagcgccccctccgcctccacaacgtcccgaacgctccgcctccgcgcaccgtgaaccgctctcctccccctggtgaactgtcgcgtgacctctgcgccgtcgctctctgccctcccccttcatcacttactctcccccccctccttcctccttnggccccgtcgcctcctgccgccccccctccgcgcgccgctctcttccccccctcctcctctcctccctcctctctcttctctcctcccctccgcccccccctcctcccccccccgccgccccccccctccccgtcctctcctcccctccccccccttcgccctcgcccaaaaaaccaaacaaaa

SEQ ID NO: 1726 - DNA, 1112 bp, Listeria monocytogenes-4B
ttaaaaagccaatagtgcgtatttacgtcagtatttgtcggattatccgcggaccaactaagtttatgcggtaatttgctgtcaatatcatgcggagctgcggggggctttagatattcatcacaacaggcacttgcttttatcgttacaggaaagactagaacacttgcggtcaagcacatacctagaaccacttttttgaacttcacatcactcacctcactttttctttcattctgcgtcttcaactattttttcttaattgaatgattttgataaccgctcctaaagagaacacgccaatagctaacatggcaagaattaacgtcgtatggttcactggttcttcttttgctttttcgtcttctgcacttttagcaattaattttccttcttcaatgccagcagaacgtttttttccgttcacattattagctggttcgctttctcctaccactttttcctcggtttgcggtttcatttcctctttatttctttctgtaacttctttttggattactggtaggctcggcatatcaattggccgattgtttgtctctgcttgtttttctataaatggtgctttattttccccaagctcagtttcttgcgctttcgtgataggaagtgctgctagctttggcgcggtattcacaggggttattttttttggtgctgttttcgttgtagtttttttgttaaacacatttaatggctgtggcggatttttaaatggtgcttttttagttacgtcagttatcagagccggcgcgcttattttcgatacctttggacttaacgaaggaaccgggctgctagtaaacggatttaatggtaaaaaacccgcatttcttgagtgttttcctgttcctctatctcttaaatcagctaggcgatcaatttcttcttctgttgtctcgctgttttcgtcatctgtaaaatcgccactattcagcgaactaaattcttcagatgttggtataccacctctcccgttcaactcttcttctgttggcattggtggaaaatcagagaaattttggctatggcgattaatagcacttctcaaactagctaaatccccgcttgtaaaactagaatctagcgaaggt

SEQ ID NO: 1727 - DNA, 828 bp, Listeria monocytogenes-4B
  misc-feature (1)..(end): n can be any nucleotide a,g,c or t/u
gctggaaagttatcgcacagatggttaatttcgtaactgttggcggtggcgatgtatcagcggacttaaaagctgcacacaaaaaagctgaagaaggtaaataatcaaatagcggggagttgagtctccccgtcttttttaacagtttagtacgtcgctttttgatttaaggaggcattatgaaaacgaaagtatataaaaggtccgactttaagttagcaatgattttacttgcgccaagttttgttttactggcagcacttgttttatatccgatgatttcaaatatccagattagttttttagatatgccactaaatccgaatattaaatcagtctttatcggtttacaaaactatatagatattttgaaggatccagagttttataaatcactaggtcttactgtggcttatacagtacttgtagtggttggaagtactgggatgggactacttgtggcgattttctttaaccgcgaatttcgttttagaagaacggctcggtcgcttattattttgtcatatgtaacaccatctatttctcttatttttgcatggaaatatatgtttaataatggttatggcgtaattaattttatgactgtggatgtactccatctgttcaaagaagcgccactttggtttgataatccagtttctagtttctttttagtaaccttttttggcattatggcgttacttcccgtatgcatttatttcgtttttagcgattttgcaaacggtcgataagtcgctttatgaggcggctgatatggacggagcgaacatttgggataaattcanaattgttactttgccagcgata

SEQ ID NO: 1728 - DNA, 1559 bp, Listeria monocytogenes-4B
ttggatggatgagtttacattccaagtagtggtgcataaaaaatatctatctaaggaattaattgaattctttaaccaaaagccaattgtgttaaaaccttgggatccaatgggttagctcgcactttaaaatgccaattccgaaatgatttttattccattcatttgaaaaagagctgctgctacgccggtaccatcttttatttttcctgagaagggacggtcgtaaatagcacagctaccacaagatggacttttttcgttcatgattatttgcgtaataccgagttcttgcattttaattagagtaagtctcgctccgttcttatattcttctgtcacatctgttcctttgttatcaatgacttttgcatgtcctaaccagacatctttgccatcaccacctattatttctgctggatttcttggtgtaggcagtccgccggtaacttctggacaaaaaggaatcgcttctcctctttctaccatttgttttattttggttatttctttatctttcccgtcatatctacaggcaattccggctaggcaagcacttactgcaatcattttattttcctcctttatattcacatttattttaacataaaaaagctgcccccaacttataggcgacagctctgagattattagatattttggtatgctacggcgatttgcgtaccgattaaagcattgtgttttacaagctcgatatttgcttcgaggctcttaccatctgttagttcttttactttaccaagtaggaatggtgtaacgtctttcccgtgaatgtgattttcttcagcttctttaagcgctgtttggattacatcgttaattactttttcgtccatagcgaattcttctgggattgggttagtaattactgcgccaccttcgatttgaagatcccatttcgctttaagcgattctgcgataacttctggagcatctgcacgcaatgttaattctacatcgcttgaacgcgtgtaaaatgctggtaatacgtcggtttggtaaccaataactggaaccccttttgtttctaagtattccattgttaagtgtaggcctaggattgatttacctgctgcgcagacgacaggctcatggcgtggtgtgctgctccttctgagttagttgcaacgcccattgttgtcgcggtgccgccgtgaacggctgcggtctcttgggcggcgatgattgttgtgttgtgccggtgcgccttcgctcttcgtggtcgttccttcgcttcccgccccgtcgtttccctgttctcgtcgtcccccttcgccgttttccgtcccgctcgcgggcccgcgctctcgcgcccttctgcccgctgtttttgctcgtctcccgtccgcgctgcgctggtgctcttgtgtcgtgcggtcgttttccgtcctcgtgcttcgcgtttcgggcctcggtacgcttggccgctccatccgccgttgcgttttgtgcggctcgccgtcccggcgtggcccgcgcggtttccccgccctttccccgcgcgctctcaacctttttcactaataaaaaacaacaat

SEQ ID NO: 1729 - DNA, 1301 bp, Listeria monocytogenes-4B
  misc-feature (1)..(end): n can be any nucleotide a,g,c or t/u
gggagaaaactgcaatcttgattgtgttcgatattaagaacatcgctgttagtaacaacccaatgcttagtataataccagcatatcgtccccatttcaaggtatcaaacaatttatcgactgttttctcaccatattctacattatctacgtactgtaatttttctacttttttagcagtagtctttgtttgtgtgggctctttagcctctacaacaaacacatcgtatagtggattatcttgtttaaacaattcgaagtttttgccgtacgcaccaactaatttcttcaattcgtcatccttagaagaaaagctgacactatcaactccatcaatcttctcaatgtttttctcaagttcttgctgctgtttcttgtctgcgcttagagaaatatgtacgttaatttgtacattgttttctacatccgttgcaagcttgttcatgttgatcaatattgcaaaaaacacgctgactaagataagtgttactgttactgcactcgctgctgcaaaggtcatccaaccattccggtaaaggctcttaaaactttctcttatatgtcttcctacagtcctaaatttcatagccatattctccttgctgctcatctcgaacaattcttccattctcgatagcgactacccggtgtttcaatgtgttaacaatttctttgttgtgggttgccatcacgatggttgttccgcgattgcttatttcttcaaggatattcatgatttcccatgaagtatcaggatctaggttaccggtcggttcatctgctattaatactttaggcatatttgcaatggagcgggcaatggatatccgctgttgctcaccaccagaaagttcatccggcaacattcttactttatgcttaaggttgactaaatctagtacttccataacacgttctttaattacggatggctctgtttcaaccacttccatcgcataagcaatgttttcataaactgttttgctttgaagtaatttgtaatcttggaataccacgcctacgttacgacgaagatatgggatttcacgatttttcatattaatcaaatcaaatttgtctacgatgattttgccttttgtcgctcgttcttctctgtaaatcattttgatgaaggtagatttaccagcaccactcgggcctactacataaacaaattccccttcgccaatgttaatgttgagtccattggcagctgttatgccgttagggtatttcttataaacatcttccattaatatcattntatcaccttactatgcctttctactgagttacatttt

SEQ ID NO: 1730 - DNA, 1143 bp, Listeria monocytogenes-4B
  misc-feature (1)..(end): n can be any nucleotide a,g,c or t/u
ccattcgcgtcctaatgccccagttgatttatacacgggggcgccattaatatcatcttccgcacgaacaagagcggtgtttggattgtacggtttcatgtttacagaaagtaactgtcgagacatcctatcgtcatcctacatcagcccagtcgactcttactttcacatctttggctgtatatccactcgccgggtcaagtgatgcagtcacataataaacacctggcgcattccaatcaaccgggttttcagggtcttctgttagtttaacgtatttaggatcgatggacacgttatccatggtttctgcataaatatgaaaatgcccttcacttcgaacatctgttaaggatgtatacttcccagctgctagagccacactcgtcacatcgattactgcagtttcatcagctgtcgaagtcataagtgtaatttccttactaattacagctgttttcgttccttctgttcgcttaattgaagcatctacagttattttctcatcatctactgcggtaactacataagtcacattgttagcactatctaaaccattaaatgcatgaatagcatttgcaggaactacttcaccaactttaaaagctccatggctatctgcgtagcttttctctagttttggggtctcaagtgggtgaagcaattggatatttcgtgtaccagtggttttatttccactacctggcaaatattcaatttgataaagttgctgttgtacgcctacagtatataaatcaaacgtatttttagtgatagattttgttatatctgatgaatcaattccagagtatgctttcaccccttccagttcatcaaaatctgcacgacgttccccttgataaaatgctaaaattggattacctgtatcaagcactggagctggttgcaaattaaattctgcaaaaatcatcgctccattcgggttcacatcataggtgttcgggtactctacattttggatatatccatcattatttaatccgtcatagctaaagaaaccatctactttattgccgacgccattaataatagtggtcaatgaattatgttgattcgttcttaaatctggctatccgttncgttcaaatcatttgcaagcgctaaataatatacgaaataaaa

SEQ ID NO: 1731 - DNA, 1057 bp, Listeria monocytogenes-4B
gattgtagaacgtaaaaaattagcaaaagttggcgttcttcgtttaggctatcctgcaacagcatccgttttaccatatacagcttggccggaagacatggttggctttttatctggaaaatataaattaactggtggcggctatgagtatgatggtcaggtgctatcagaaatcaacgaagcagaaatccgtgaaaccttagctagttggaaaggtgaagtggaatccgtcgcagttgttggcgtcttttcttccttgaaaaacgatcaggaattagctgttcaaaaaattattgaagaagaactaggcgcagatattccggtttcgatttcctcttccgtaggttctgttggactgattgaacgcgaaaatgcgacgattttaaacgcagcccttttcaaagttattgcggcaacgagtgatggttttgaaaaagcactagaacaagaaggaattgcgcatgctgaaatctatctttgccaaaacgacgggactttaatgtcactaaactatgcaagacaattcccgattttgacaattgcttgtggaccaacgaacagtatccgcggcgcatcctacttggcgggacttaaagacgcgatggttctcgatgttggtggcacgacttctgatattggagtgctgacggatggtttccctagagagtcctcgcttgcggttgatgttggcggagtgcgtaccaactttagaatgccagatattatttccatcggacttggtggaggaagtatcgttcgcgaaaaagatggcgacataacaatcggaccagatagcgttggctaccgtatttccgaagaagcactagttaaaaaaggtaaaacgatgaccactaccgacatcgcggttcgtctaggtagggcagaaatcggtaaccctgaattagtcgcacatatcccaaccgattttgccgaaaaagcctataaaaaaattgctgaaatgaccgaagatgcgattgataaaatgaaaaccagttcggggagtgtaactttccagcacacatgtcggccgctcgagcagcgtgcaagttacgaaaag

SEQ ID NO: 1732 - DNA, 810 bp, Listeria monocytogenes-4B
agctgtgcgggggccacagtgtgctggaaagcattatcaaaaccgaccaactacctgaggaacaaaaaaaatacgtcaatcgttctactgagttaaaagcggatccagccgatgattaccgtattccgttcttcttacattatcctggcatggaaaaccctggtgaaattaaaaatgttggtggcgaaattgatattatgccaactgtcatgaatttacttggtattaaaactggtgaccaaattatgtttggaaccgatatcctcaattcatcaaataattacgtacctgaacgctacacaatgccagaaggaagttatttcaccaattcttacatgtaccaaccagatgaaagtttcgaaactggcgcagcaacgaattatgatggaacaaacaaagaactttcgagtgatgtaaagaaacgctttgacgctagccgaaaactcttacagtattctgatagctatgtaaacaatttaccattacgagacgaagataaataaacaaaagaagtatccagcaaatctggatacttcttttttcgcttattttggtaaagcggcttgatgttcattaaatttttcaatactttcaagcgctagaggtttgttcatcatttgtaaaaataaatcatagccgaaaataaccgtatcagctccactagctagtgcttgcataatttgacgactatttttaaagcttgcacccataattttcacatcttcaagtccttgtaaatctaacacgtatcgcagttcttctattgttttcgctgcgtctagtccgcttacttccatgcgattataatat

SEQ ID NO: 1733 - DNA, 2413 bp, Listeria monocytogenes-4B
ctgtggcacttactcctgctcgacggccgacttgtgctggaaagtaaattcttctgggtcgttaccagtatcaattgcatattgctctgcaggaagaccaaaagcatcccaaccgattggatgaaggacgttcttcccttgcattcgtttcatacgagacaaaatatctgttgctgtataaccttctggatgtcctacgtgaagacctgctccagatgggtatttggaacatatctagtgcatagaagttatctttatttttatcttctgttgttttgaaagtgttatgttcactccaatattgttgccattttggttccatttttttgtgattaaatgtcactttactcatcctcttttccttaaaatatcgaattttggctacaaaaaaatccctacatcccaacggcttatcgccatgggacgagagatgcttctcccgcggtaccacccacattagtgtttgaccactcaacttatcaattccttaacgcggaaaacggggatacacccaagctccatggtaagttcatccggattttgtgactgacttgcaccaaccgtcagctctcttcacatcaaaatatgcagattactactccaattcatcgctttttcgcaaaattcattagtcttattgtagctgaatttcatttttttagcaagcgctctgaagatttatctaactttcctaacaaaatgtgctaaaatgaatggagaatttcatttgaaggagtctaaaactagtgaaacaaacgaatccatttgtatatagcaatgataataaaagataccatacatggaactactgcttaagagaagaatttgggcaaaagacatacaaagtggcgcttgatggcggctttgattgtccgaatcgtgacggtacggtagcgcatggtggttgtacattttgtagcgcggctggttctggggactttgctggcaaccgagcgcttgatttaaaagtacaattccagcaagtgcgcgacaagatgcaaacgaaatggaaagacgggaaatgtatcgcttatttccaagctttcacgaatacacatgcaccggttgccgagttacgtgagaaatttgaaactgttttgaatgagccgggtgtagttgggctttcgattgcgacaagaccggactgtttgccagatgatgtggtggaatatttagctgagttgaatgaacgtacttatttatggttggagcttggattgcagtctgctcatgatgagactgacagcttaatcaaccgggcgcatgattatgattgttatctagaaggagtgcacaaactgcaaaagcacaatatccggatttgtacccacattattaacggtcttccaaaagaaacaccagaaatgatgatggaaacaacgcggaaagtagtcgaaagtggcgtggatggtatcaaaatccatttgctccatttattaaaaggaacgccaatggtagaagattataaaaaaggtgacttagaatttttaactcgggatggctatgtaaacttagtcgctgatcaactagagatcttaccgcctgagatggttattcaccggattactggtgatggtggcgtagatgatttaattggccctgtttggagtttaaataagtttgaagtgttgaatgcgattgatgcagaacttgttcgaagagatagctggcaagggaaacactatcaacctgtggaagtgatttctgaatgaatttaagaggcattctccccttcgctcatgatacgctacgaaaagtagttcgtcctggtgattatgtgattgacaccacttgtggtaatggacacgatacgcttttattagcggaacttgttggtattaatgggcatgtacttggatttgatattcaacaaatggttgttgatgcgacgaaggctcgtttagaaaatgcgggtgtttcttcgcaagtggaactcgtttgcgctagccatgcacgtatccctgcgtacacatccagacctgttcgcgccgctatttttaatcttggatatttaccaggtggcgacaaagaaattacaacaaccgctgattcgacgctagaaagcattggtcatttaatgcagctgctcgaagttggtggcgtcattattctcgttatatatcacggccaccctgctggaaaaatcgaaaaagatgctgttgtgactttttgtgaagcaatcccacaacaagatttccacgttctatcttatcaatttattaatcaaaaaaatgatgccccattcgcgattatcatcgaaaaaagaaaacctagacaggctaattaatagctctgcctaggtttcctttattccccaaatcgcatctatctgctccgtttcatcaggtccaatttctttccctctgcctccccttgccttgctccggcctcagatcatgataacgtcagctat

SEQ ID NO: 1734 - DNA, 1262 bp, Listeria monocytogenes-4B
acaaagcaagccaattagcagaacagctaaaaatttcgcttccacttgcaaaactactttggaaaagaaaaattacaacgcaaggacaattcgataaatttttccacccagaaaaatatgaaagctatgacccatttttatttgctgaaatggatcttgcggttgctagaattaagcgagcgatagaactaaatgagcagattttagtttacggagattatgatgcagatggagttactagtattgccgttttaatgaaaacactgcggcatttaggagcaaatgctgaattttatattcctaatcgttttacggaaggttatggtccaaatatcgctgcttttgatatggctaaaaaccaaggaacggatttaattattacggttgataatggtattgcggcgcttgaagtaatgacgcatgccaaagagattggtttagatgttattgtgacggatcatcatgaaccacgggaagttatgccggaagctgttgcagtaattcatccgaagcatcctaagtcagcttatccgtttgatgaattagcgggtgtgggtgttgcttataagttatcgcatgcattacttggagaagaacccaaagaattgcttgatttagttgcagttggaacggtggcagatttagtttctttaacagatgaaatcgcttacttgtccaacttggattgcgccaattgcgcgaatccgcgaaccttggactttcagtgttagctaaaaaagctagtttgaagttagaagaggctacggaagaaactattggctttggtttagctccacgactgaatgctgttggtcgtttaggcccagcagatccagcggtggatttacttttaacagaggatccagaagaagcacttttcttagcagaagaaattgatgatgcgaataaagaacgtaaacaaatagttgttgatacaacgaagctcgcgatggaggcaattgaggcaaaagaaacattaggaaatgtgctcgttgtttacggagagggttggaatacagggattttagggatagttgcttctaaattagttggaacatattctcgtccggcgattgtactaggaattgatccagttactggaattgccaaaggatctggtcgaagcgtcgatgcatttcatttgtatcaagcgcttgataaacatcgtgatttaatgactgcatttggtgggcatccaatggctgcgggtcttacattgcccgctgaaaatctaacagaattagaagctaaattacaagaag

SEQ ID NO: 1735 - DNA, 1078 bp, Listeria monocytogenes-4B
acttgtggaacttcctcctgttcgggggccgacgtgtgctggaaagtgtttcgacaggaatagcaagagatttcatcatttttgtaatataatgcccaccaccatgaacgagtacaatttttttattggcagcttgccattgtattatttgttggaaaaaatcttctgttaaattgtcacttgcgacaccgcctagttttacgactatcgtattctccatcctgattcctccttacgtccggtagcatgcgttaattttgacgtattcataactcaagtcgcaaccccatgctgttcctgactcaagtccgatatgaagatcaacgtcgataatgatatgctcttcttctaaataggcatctaacgcctgttgattaaaaatggtttggctgctatgattcagaatttcaatcccgccaattttaatcgtaatattatctggcgcaaaccggccacctgaatagccaatcgcgcaaataatacgtccccagttcccatctccaccaaaagctgccgtcttcacgagactagaggaaacaatttttttagcaatcattcttgcatcttctgtttttgtagcgccattaacttgtacctcgattagttttgtcgctccctcgccgtctcgcgcgatgcttttagcaaggtgctccgttaccgcttgaaacatatccgcaaatttcgcaaaatccgctgtcccttcctgaagcatcgggttttctgcacagccattcgccatgactaccaccatatcgttggtagaagtatcgccatctaccgttatttgattgaaagttttgtctacttttatttttagtaatttttgcaataattcagccgggattgcggcatctgttgtaataaaagcaagcattgtcgccatatttggatgaatcattcctgatcccttcgctacacctgacatcgttacctttctaccaccaatttctgtttgaaaactgatttgtttttgaaacgtatctgttgttaaaatcgcttcttcaaaatcggccgcatttccagtttgcttttctagcatttctattcccgcgttgattttgtccatcggtagcatatc

SEQ ID NO: 1736 - DNA, 1179 bp, Listeria monocytogenes-4B
tgtgctggaaagagcaaagtacaaattaatatagatactaattttttcaaatgactcacattcgcccctcctttgtttactcaagattaattatttcataggaggaagcagctaaatgttctcaaggtacaaaaaataggacagtttgttacgaaaatgtgaactattttacgtttatagccgcaaaaatgccattattaacaaaaaacaaccaaaattgttgaagaattcaacgattttggttgttttatttatcttattcgaatcgattcgctttcaactaatctagcaccctttacttcctcaccagattttagtatctctgcaattcgctttttatcaattttaggttcttgtagtaaaaagaacgattttagcaaagcttcttccactatttccacacttggtggattcttttgtatttgaattgtaaaaagtgtactgtttatttttctaatttccattcgttccatctctgtttgtaaatagttttttaaattttgaacattattttctagtgcttgttttcgttttaaaagtcgtttcgcttctattcccgccatttcagcatcagcagctaaagacttaataagtttaacaatattctctgatttatcatgaaaactatcagtaagcgcatctaacgtatctttcacagcatcagtattattttcttccaaaaattcttgtacttttaaaataattatcggttagttcatatagtttcatcgttcgcaccctttccaaaaaaggaaaaagcgccaaaagttattatattttggtgctttctcattttgttactaattttccttgaataaccatccgtcctttttcataatctttttctgtatcgcaagttgaaagtgttataattcggtcctttccactaacttttacatttaatttatacatagattgttgtttcactttttgtaaataatcctcaaaatcagttgtttccggaaattctgtttcaatgtaataaaaatcagtcgtcgtttcatacacaaaaaagatttccacttcataattcgccaagctcgattcataggaaaacgttggatgagccgccaaaaaatctttgtccaagtatttacgtaaatccgcaagacatggatccgtctttcatattatgcccataaatgatcgtatttttatccaaaaactcattcgtattcc

SEQ ID NO: 1737 - DNA, 1129 bp, Listeria monocytogenes-4B
agggattttttacagatattttactgatttaatggaagaaaccgcaaataaaacttatcggaattttgtatttaatagctgccaagtgctagttgataatgcaaaattagatggatatttgttaatgggaatgaattggaaagaaaatccctctgggaaaattccttattcagcagaattaagtggaatgatcgcacttgaaatggcggcaaaactagaacgataaaaaagcacctcctacttggaggtgctttttagcattttgaccgaatctccttctataagcattggaggtagagtttctttgtttatagtatctggttttagcacttgatttaaaagcatgtcaactgctttcacgcctatttcgtattgggcttgtttaatatgtgtaaactggaaggcagagttatcaaaaaaattatctggatgatcaaaacaaacaacggataaatcaccaggaatggatttccctaacttgttgcatgcttgttttatcaaaagagcaatattgtattcagttgctacaagtgccgtgatttcagaatgtgtattcaaaaaatgtgcaattttatcaatatctgtttggatggaaacggttgaatttggcattactgattcaatttcgcgaaaaacataatcagagtgaaaagctgtgtgaaaagatgcatgccctcgaataaatccgtttactcgactatcaagcgtagagactggactagtagatgttatcattccaatatgcttatgcccaagttcaaataatttttctgtaataattcgaccagcttctgtattatctgaactaatagaagatattggtaagccttctaatgtacgatctatgacaactaaaggaaatttttgagaagcaagttctagtaaggtcggtgaaacaaacttcgaactagcaggtaaaatcagtatccctgcaacattcatttcaataaactcttgcaaaatttcttcttctcgctctgtatcgccaagtgatttttttacaataatatgagctttagagtcactgtgctctaacatcccagataataaagtagtaccaaaagtatcgtcaaaatttgtcataatacaaccaaaaaggggtttatcaaacattctagtttctatttgt

SEQ ID NO: 1738 - DNA, 1035 bp, Listeria monocytogenes-4B
actgcggcacttagagcatgctgagcgccgacgtgtgctggaaagacgcatcatctttatagtaaaattctactatcgcatttggaattagctcgccttcttcttttccaagccgtttcgcaagactcccagccatcacattgcgaacaaccacttcaagtggaataattgatacttctttcaccaattgctccgtttccgaaatcgctcgaataaaatgactctctattcccgctcctgctaaatgagaaaaaataagcgatgtaatttggttattaagctcacccttcccagcaaaagattcctttcgcaccccgtttagcgctgtcgcatcatccttataggcaacacgcaagacacctgcttcttctgttttaaaaagtcgttttgcctttccttcataaaccagttcattagtcacgataatttatctccttataaattacttaacctctttgaaaaaataaatatcaaagaggttaggttgtattctgcccgtaattataatcctaaacgatcaaaaattaagtcgacattcttcaggtgatagttgtaatcaaagcaatctgcaatttcttccgcagatagattttcagtaatggttgcatcttgttctactaattcacggaaaggtacttgtttttcccaagcttccattgctcttggttgtacgacatcatacgccgcctcacgagctaaacctttatcaataagtgccagtaatacacgctgtgaataaataagtcccagtgttctgtccatattgcgtttcatattttctgggaacaccgtcaagtttttcacaatatttccaaaacgattcaaaatataatcaagtaaaatagtggaatctggcagaataattcgttccgctgagctatgagaaatatcacgttcatgccaaagtggcacattttcataagcagtcaccatatgaccgcgaatcacgcgcgctaatccagttacattttcagaaccgactggattacgtttatgcggcatcgcagatgaacctttttgtcgttgagcagagag

SEQ ID NO: 1739 - DNA, 760 bp, Listeria monocytogenes-4B
actgatggtactctagagcatgctgcgggggccacagtgtgctggaaagttaatcgtttggccacatcacgggatttatggtgcgggaaaatcaatggatgaaacatttggattaattgaaaccgcggagaaagcagcagaagtttatactattgtgatgtcacaaggcggtattaaacaagcgattacagatgaacaattgaaagcactgggtgaaagatttgtttttgaagcaaaggcaggttatttaaataattaggaggtaacaataatggaacgagtggcatctattatgtatttatatcctggtaatcaagaagaatataaaaaaagacacgacgcactttggccagaaatgaaagaggctttaaaagcacatggagcagctaactattcgatatttctagatgaaaagacggatacattgtttgcttatgtggaagtcgaggataaagccatttatgacaaaatagcagaaacagaaatttgtcaaaagtggtggaaatatatggctccaattatgaaatcaaatcctaataacagcccggttgcattagatttaaaagaagttttctatttagcataagaaaagagacatgactttaacgcaaagtcatgtctcttttttaaatatttttcggtaaccggaatacaagtaggaaacaaacaacgagcagcacaacattgtcgacgtacatactcatttgcaaactgtcagaaaaggcgcttgcttttgaagtagcggcagtatttccaagtg

SEQ ID NO: 1740 - DNA, 691 bp, Listeria monocytogenes-4B
aaatttggatgattttctttgtctaacaatcggaactgggattggcggcggaattttttccaatggcgcattagttcgtggtggtcgtttccgggctggcgagtttggttatatgtttagcgaacgtccaggggctttccgtcctggcaaatatacgctaaatgagactacgacaatgcttgttcttcgcagacaatacgcggaacttactgggcgccctttggaagagattactggcgaagaaatttttgctaagtatgatggacacgacgccgtctcagaacgtcttattactgagttttatactggaatttgtacggggctttataatttaatttacttgttcgatccaacgcatatctttattggtggtggaattacaagtcgccctacttttatcacggagctaaagcatcatgtggagagctttgggctgcgtgacacaattatcgaaacagcaacacataaaaaccaagctggcctactcggcgcagtgtatcactttttacaggaggaaaatagacatgaatgaaatggaaacagtaatttttggcatgattagccaagttggttctgccagaagcagttacttagaagggcttcgtgcggctcgtgaaggcaatttcgaggaagcagaagcaaaactacaagaaggtagcgaaactcttgcaaatgggcaccacgagcatca

SEQ ID NO: 1741 - DNA, 953 bp, Listeria monocytogenes-4B
tggtgtatccatcttccaatagaatggcaactagtcagacatctgtttagacaccaaaatcattatttgttttcattcatctcattggccgtgtagttcatgtctatgcctcatcccgttatgcatagacgcccgaacatgatggcaacgctggaaatgtttatttcgagcgtctttttttgtcttcttttataggcggaataatttaataacaatctagttattgttatactgtagaagaggataggaggagatttatatgactttaaaaggtaaaaaagttattgcacttgtcagtgaagactttgaggatttagagctttggtatccagtgcttagattgcgcgaggcaggagcttcggtgcatctagtggctgaggaagcaaagaaagtttatcacggtaagtacggagttcctgttacttctgactatgattttgattctgttcgcgcagaagattatgatgggattttagttccaggtggctggtccccagacaaattacgccgttttgatagcgtactaaatttggttcgtgcgtttgataaggcgaaaaaaccaattggacaaatttgccatgctggatgggtacttgtttcggctggtattttagaaggcgtgaatgtaacaagtacaccgggaattaaagatgatatgacgaatgcgggagctatttggcataacgagcctgttgtaacagacggccatattatttcgagtcgtcgcccaccagaccttccagaatatttaccagcatttatttccgctttagaagattaaaaaaagaagcatttccatattttgggaatgcttctttttagtttaaaagtaaaaagttacgataaagccgataaaactaggaattgcagcaactaaaagcaggatactccagcgtaattggctttttcaacttgggtttccactacaatttccagaacactgatggacgatg

SEQ ID NO: 1742 - DNA, 1104 bp, Listeria monocytogenes-4B
ggctctatattgaccgcgtgaaagcatacggggctggatttcagtttttggaagatgaaggttataaaaaagtggcttttacagcggggagagcatcgcgtgaaagtacgagtacatatggaaaaatcaatgcttatgagcaagtttttggttcagtgggtgataatcggtttctaagtgaatgttatacgcttgaagatggtttgaaggctggggagcatttttttgcagaggggaaagactggcctgatgcgatttatgcgaatggtgacgaggttgcggcaggggttatgtatcacgtgaaaaaactcggcttgcgtgttccggaagatgtcgctattttagggcaagaaaatctcccaattggtaaggttttagaaatcacaacgcttgatcataacctaaaaaaattgggagaaaatgcttttactatttttgaacaaggtaaattgcaaagaattaaagtggagcatgaattgattagaaggaaaacagtttaaaaaattatttgccaattaaagttagtttggcaatgttttccgccgtgcgttcgaggttctttgttgtattttcgaaaagagtgggtaaatctgttatttctgggatgtttgggaaaaacgcatcgataccgtgttgttgggcgatattgttttcgagtgcaaggctaccgacgattgctaggacgaaacaaccttgttttttagcttcttgagcaatttgaacagggattttccccatcatcgattgcttgtccattcgtccttcaccaacaataacgatatccgcatctttcattttatccttcatattagaaagttccataactagagctgaaccgcttaacacgtctgcatttaggaaagtcattagtccggcagcgataccaccagcggctccggctcctttttttgtagtgattttttgagatgaaaattgatcgagttttgctccgtagttctgcatggcgcgctctagttgaacgagcatttcgggagttgcgcctttttgagcaccgaaaacgaaggtagcgccgttttctccaagaagtggattcgtgacgtcgcaggctatttggaattgaatgtttttcagctttggattaag

SEQ ID NO: 1743 - DNA, 716 bp, Listeria monocytogenes-4B
atttaggaataagttatgaaaaagaggtataaagcatgaaagtagaagatttcgattttgatttaccagaagaattaatcgcacaaaccccactattagaccggacttcaagccggctaatggtgcttgataaaaagtcaggtgacataaaagaccaacatttcactgatattatcagctatttaaacgaaggggatgcactagtattaaatgacacacgtgttctcccagcaaggctgcatggtattaaagatgaaactggcgcgcacattgaagtgctccttttgaaacaaaaagaaggcaatgcatgggaaactttagtaaaacctgccaaaagaattcgaaaaggtgctaccattacttttggtgatggtgctttaaaagcgatttgcttggaagagctcgagcatggtggtcggattttagaattttcttatgaaggcattttttatgaagttttagaacaacttggcgagatgccacttccaccatacattaaagaacaacttgctgatcaggatcgttatcaaaccgtctatgcgaaagagaatggttcagcagcagcgccgacagcgggccttcattttacagaagatttactggcgaaaattagcgcaaaaggtgtagaaatcattttcgtgacgcttcatgtagggctcggaacattacgcccagtggacgtaggagatactgacaatcatctttgcagccactgg

SEQ ID NO: 1744 - DNA, 1696 bp, Listeria monocytogenes-4B
  misc-feature (1)..(end): n can be any nucleotide a,g,c or t/u
actcgccccccccactaggaaactattcccgactttaatccaactactaacgccgttttttatgaaaacttacgtgaagttgacaaatatatgctaattaaattaaatgatttagtgaaaaatgtgaaggataactatgaagctttcgaattctctactatttaccaccaaatcaataatttctgtacagtagaattaagccaattttatatggactttgccaaagatgttgtttacatcgaagcggctgatagtcatgatcgtcgtgctatgcaaactgtcttttatgaagcggttgttacgttaaccaaattacttgctccaattttaccgcatacaacagaagaagtttggaatagcttgattggtgaaggcgtggaaagtattcacttgcaagacttaccagaggttaaagtattagcggatagcgaagaaattacagcgaaatgggacgcattcatgcaaatccgtgataacgtccaaaaagcgttagaattcgctcgtaacgaaaaattaatcggtaaatcaatgcttgctaaagtaactttatatgtagacggcgaagcgaaaacactatttgattctttacaaggcgattttgcacaactgtttatcgtttctgactttgaacttgtggaaggtttagaaaatgcaccagaatctgcattccaatcaaatcaagtagctgttcanattaccgtagcagaaggcgtaacttgtgaacgtggcggtgtagtgaaaaaagatgtaggcgtaaatccaaaacatccaacactgtgtggccgctgtgcggatattgtggtaaaacactacgaagcttaatgctcgcttggggaaaatcctactcatttcaaaaggagggtccccaagcttttttaagggaggatgtggtattatagacgtaattccaaatagaggagggtgcttgacgtaatggaaacaattcactttacaaaagtacatggttcgcaaaacgattttttcttagttgatgaagaggaaaatcacatcacagaatggtcggatgaaaaacgtgctaattttgcgataaagctttgcgatagaaagcactcgcttggcggggcagacggaattttatatgtcacaaaaagcagtgaagttggaccaattggccaaatgcgtgtcgttaattcagatggctcaattgcttcgatgtgcgggaatggcttaagaacggtagctcgctatttacttgagaaacatgctttgacagatgcaaaagtagaaactatgaaagcgatacttgatgtcaaaaaagcaacttcgcttggttttgatattccaacctatcaagtggaaatttctcctgttaaatttgcagcagaaacattaccgatgcatgtaggcgtggaaaaattatttaatcaagttatcccagaacttgatgcanaactcgctttttctgctgtttctgttcctaatccgcatttgattacatttggggaccatgctgtgctggcttgcgtgggccggacacatgggcccgtcctttgtctggcgggtgtgccggttggcacgtggcggtgttgtgcgctcggggcccgnggcccccttctctcttttttgtcccccctccccgccggctgcccgcgctccgcggcggccggcgcctgtgtccgctgtgcggggccccgtggggcggtgcgccctccctctccgccctccaaaaaaaaaa

SEQ ID NO: 1745 - DNA, 1174 bp, Listeria monocytogenes-4B
ctctaaaaggaagaacaaatatagctgccgaaaataatgcagatgtgtttattagtattcactttgatagcttagaagacgcgagcaaaggggtaagcgggcaaacaacttattattatgataatagtgataaatcgcttgctgaaagtattaatactacgctcgggaaagacctccctactactaatcgtggtgcaagagtcggcgattattatgtagtcagagaaaattctcaaccagcagtccttctagaacttggttatctaagttctgcaaaagatgaaagtaatatcaactcagcatcatacagaagccaaatcgctgaatcagtaacagatggcctatctaattacttctctaattaaaaaaacaatcattcaggagactgaatgattgtttttttatttacgcatttcatctgaatcgagcattattgttactggaccgtgattgacaattttcacatccatcattgcgccaaatactccagtttcaacaataaaacccgcttctgtaagtttttgattaaataagtcatacagtgtttctgctttttctgctggggcggattttgtaaagcttggacgttttcctctacttacatcagcgtataaagtgaactgggaaacgctaagaatcgcgccggctcgttctgctaaagaaatattcatcttctcggattcatcttcaaaaattcgtaatccaacgattttttttgccatatagtccacggtttctggggtatctttatgggtgaatccaactaataaacaaagacctccagctatttcgctaatgacttcctcctacacactcacggaagcttcataacaccgttgcagtagtacacgcatcgcttctccactcctttagttcattaatcttctcactgtataaacatctggaatttgttttattttatccactacacgttgtaaatgattaatattatgaatctgtagcgtgaccactaatgttgccatcctgttgttatcaaccttagcattgacgccgttaatattggaagttagactgttaatcacttgtagaatatcatttagcaaaccgttacgattatagccataaatttcgatgtctacattatagtcatttttcgcttgtgaatcagcatcttcccagtccacttcgatccaccgctctggttcaatagctt

SEQ ID NO: 1746 - DNA, 2046 bp, Listeria monocytogenes-4B
  misc-feature (1)..(end): n can be any nucleotide a,g,c or t/u
tgtcatatggcgttgggccatcaggggttgcagcactttcaattgcattcccagttcaaatgatactaatggcaatggcagctatgtttggtattggtggcgcgtcgattatttcccgctcgctcggtgctggggaacaaaaacaagcggataaagtattccatcaagttatttggttagtacttatttccagcatttttattgcaattgtaacctttatttttttagatccgcttattacgcttttcggagcaccggcagatattcatgatattgccagtgatttcttatcgcttattttgttaggcgcagtgttccaaaccttcgcgatggcgatgaataatatcgttcgctcagaaggtaatgcgaaaacagcgatgttaaccatgattatttccgctattttaaatatgattttaaacccaattttcattatgggctttggtatgggcgttcgtggttctgcccttgcaactgttattgcgcaggctgttggcgcgatttggctcttgatttattttttatcaggaaaaagtactttatctttaaaagggttctcattccgaatggatttcccgctgattcgccggattatggcaatcgggttcccgtcatttattatgatgtccgcaggtagtatcgtaacggttgcggtaaactggatgcttaatatttatggtggaacgatggcgattgcagtatacggaattgcgaaccggattgcgtcgttcgtcatcatgccaatcaatggtgtcacacaagggatgcaaccaatcgtcggcttcaactacggttccagacaattcgaacgcgtaatgaaagctgttaaagtatcaatgatagctgcaactgtcatgtcactaattgcttggggattggtagaaattttcccaggaatgctcgtacgaattttctctaacgacccagaactgattgcacaaggaacaaatgctgttagatttatgctactagctgcgccaacaattggtttccaaattgtctgcggtgggctatatcaagcacttggtcgagcaagaatttcattcatcatttccctaatgtgccaaatcatctgtttagtaccacttttacttattttgccgcagttcttcggtttagatggtatttggtacgccttcccattagcagatttaggcgcgttcaccgtctgtctagtgattatgagcaaaacatggcgccgaatttttaaaaatcccgagatagtttaaggaaaacgaattgggtattttctaactnagtgtcttcaaaaacaaagacatttttatnnggcaaaaatgtacccgtatttggcttttgaaaatgcaaagaggctntaggatattatgaagaagtgttcggagcaacgaatatttcaaggcttccagtaagtgaggaacaaagcgaaatgtttggcttagcaaaagaaaacctagagaacacaactgttcacggtggctttaccgtccttggcgcaaacttattttgttcagattcatttggcaaagaagtaaaaccatccaatcaaatttcgattatgcttgattctaacagtgaagacccagcggcagtagccgacgccgatgctttctttgaaaaagtgagcagctcagaaagagtaacagtaacgttacctttcgaagagcaattttggggcggaaaaatgggacaattcgtcgatgagtacggaatttcttggatgattcatacgcaaccttattctaaattatgaaaaacaagtggaccagatgttagttatctgggcccacttttttatttggattcacttttttgattgggtggtgtgcggcggtgccaggattgacccactatgcgtcgactttgcggccctcttttttttttttttcctcggtgtgtcctttggccctttctccttcntctcgtgtttcttgggctgtcctttttttttttttcgccgtcccttttctttttttcccgccctttttcgttcgtgtgtcttttggtgtgttgtggtgcgtttgcgctctttcgtgttttttgcgtcttgtcggccccaaaaaaaaaaaa

SEQ ID NO: 1747 - DNA, 703 bp, Listeria monocytogenes-4B
  misc-feature (1)..(end): n can be any nucleotide a,g,c or t/u
agcagccattgttgctgccatgattgcgctaccgcctgttgctacactagctgcgagtgtaccacgttgcaaatatataagcagctttattaattggtccacctaaatccgctgccatcattgcacctaacagtaatcctaaaataactgcgttcgttccacttaaactattcaagaagtcattcaaccaagtgttcaatgcgctcattggtacatttaatagcaacattaaaagtccgacaattaacaccgataaaactggatagaataaaactactttgataccgtctaatgtttttggtaactttttaagtgctagtttaattaactctactgcataacctgcaaggaaaccaccaacaagtgctccaaggaagcctgcaccaccaacagatgctactccacctgcaacaaaacctgctacaagtcctggtctatccgatatactgtaggcaatatatccagcgaatactggaagcatgaagccgaatgcaacatcaccgatttgttttaatagtgctgggatttcgttatatgaaccaagttttgcgagttgatcttgaggaacacctaacatttgatcaagcataaacgcgatggcgatagcgatacctccaccaattacaaacggcaacatgtactttccagcacatgtcggccgccgagcagctgctaagtgactttagtacnnccnaaagggaag

SEQ ID NO: 1748 - DNA, 1186 bp, Listeria monocytogenes-4B
  misc-feature (1)..(end): n can be any nucleotide a,g,c or t/u
ggtacagcatagcgacgttctgatgttgcaacgagcatcgattggatgatcgataatgtcagcggaatctcaattcggaacgtcgaaccagcgttttcacttgattctacgctgatttttccgccgattttgagaatcgtattacggacaacatctagtcccacgcctcggccagaaagatcggatacttgatccgcggtactgaaaccggaatcaaataataaatcaaaaatttccgcgtccgtcattttggttgattctgctcttgtaacgacatttttcgcaatcgctttttctaacactttgcgtttattgattcccgcaccgtcatccgcaatttcaatcacgacattgttcccactatggaaagcttttagattaattgtggcggtttcatttttcccatttttacgtcttacttcgactgtttccgcaccgtggtctactgaattacggattaagtgaacaagtgggtcgccaatttcatcaatgacgattttgtcgacttccgtatccgcgccttcaatcactaagtcgattttcttacctaattctttggctagtgtgcgcaccatttttggaaagcgattgaacacactatccactggcaccatacgcatatttagtaagccgttttgaatttctttggagatggaactgaatcgtcctaagtgttccatcaattctttgttattcgttttttctgcgatttcatcaattctcgcccgttcaatgacgctttcttcaaaaacgttcattagcttttcgattttttcaagttgtacacgaatggttttattttctaatcgtttggttgtttgttttgcggcttttttgattggttcaataacctgaacttcttccacttcttctgtcacagtcactttttcgatttcagaaatatctagaacaaccgcttcgatttcttcttttgtttgcgccgactctaggactacttcgaatgactgctcaaactcttctagctcaatcgcttctctgtctggcgttgtttctgaaataatccccatttctgcaagtcgctctaaacacattaccgaccgtactgctttccaaatacctgcttcttccatttgaatctgaatgccatacgttctttctaccgctccacctgccccttgctctggatgccacaccgcccctcagccccncccggctttgctcatat

SEQ ID NO: 1749 - DNA, 1090 bp, Listeria monocytogenes-4B
taggaggatcgattttaacgaagcgatatacggtgaacggcgcaaaagcatacaatgacgctttaacttataatgcggatattgcttttgtttcatgccgggggatcgactatgacaaaggtgcaacggaaacacatgaaggtgaagcactcatcaaacaagctttcaggcgccagtcaagttcgctcgttttacttgtcaccgaagaaaaagtaggacacaagtttatgcaccaaagcttagcatgtcatgatattgactatttaattacggacttcaaactggacccagatgtagaggaacagttcaaaacccatcaaattacttgtttgtattagattttatacttaaataggcaaaaataatcgtaagtactaaaaataaaacaggtattaccaattttttccgaaaaagtgaatgtcattaaattcttcgctatctaatagtgataataatatgacatttttttgaatgacatttaaaacttgtaagcccataaaacatagcatactaagtattaatgaaacgaaactaaaaattttgtacatgttgtacctcccttttatagcgttgaatctaatataacatggtacattgaattttcaaataaatgtacagataatttgaaaagctcgaaatcaatttgatttcgagcttttagtattaacaattcattttagacagttttcatttccttatccattcgccgcacagtaaaaccagacacaacaatgctaatttcatacagccctatgagcggaatggtaaccatcaaatgtgataagatttctggtggagcgatgaatgcagcgataatcaataagcagaagtaagcatatttccgtgcgcgccgcattccgtttggtgttatcagtgacaatctcgttgacagcataatcaccatcggaagttcacatactgcaccgattgacagcccacttcgccgcgaaactctgaaatcagctgcgaggccactccgtagcttcccgcccgcttcgccgcgcttcggaaccttccccctcttttcctcgcgaagaccctccctctggggaaagcggccacccctgacagaggcaccaacaaataaaaa

SEQ ID NO: 1750 - DNA, 1161 bp, Listeria monocytogenes-4B
ttctaaaacggtttctgagagcattttatgtggcattctttcacaaaaatcaaagaaatctcggaaaggtgctttttttcgttcgttaataatttctaaaatgaatttcgttggcactttacgaataacacggaaactatagcggatagatgattcattctccacttggaagtagtaattactatggttgatgcttggcgctaacatgctaattccgtagttttttgcttcggtaatgtactgggaaattttgtcgtcattgccaaaaacagagctaagaagcgacgacataaatgcagctggaaaatgtgcttttaaataagctaattgaaaagcgatttttgaatatgctgcagcgtgacttcggttgaaaccgtaattcgcgaattgaacaatcatatcatacacttggttagcgctagcatctgaataacctctactcttagcaccttccacaaagtgaattcgctcttcgtttaggacatctgcttttttcttgctgaccgctcgtcttaataaatctgcttctccaagcgaaaatccagccatttggttcgctacttgaataatttgctcttgataaacgataacgccgtatgtcacttccaaaataggcgctaaatctggatgaggatattgaattttttcttttccgtgttttctagcgataaatgtatcaatttgttccattggacccggacgataaagcgcatctaccgccacgacatcttcaaaagaagttggttttaattttcggagcacgcgtcgaatcccgtccgattcaaattggaatacccctgtcgtgtcacctgtttggaatagtttcaatgtttttttatcttctaaggaaatatctgctaatgttaacggagtttctctagtataattgactgatttcaaaacacgatcaagtaaactaagatttctaagtcctaaaaagtccattttaagtaagccgattttctctaattctcccatagcaaactgggtcaaacgtgcatctccgctacctaattgtagcgcgacttgttctacgagtggcttgtcactaataactattccggctgcgtgcgttgaaatatgacgtggcaagccttccagttgacaagcaacttcccaaatcatttcattttctttagagcttttaatatggatttacta

SEQ ID NO: 1751 - DNA, 1336 bp, Listeria monocytogenes-4B
ggaagaagagagccaaactgcctggaaagaaaaataccgttttgcaatccatcattatacaaatgaaacggacttagcgggagtcgaaatgatagatacgcttatccaaacagggttcactttgcctgaaggatacaaattaatcgctgttcgacattacggaaaacaaaatttagtcaaagaaaatacgttaattcacgcaaaaaccagttttgaagtaagtatttgtcgtgaattaaaagtaaaaatttagggggaaatattaatggcatttgaagagaatttatattgtgattatacaccgggagctgctaaagcggtcgcggggaaagatgtaattttagcagtttttaacgcagcgggggataagctattagcggttgcggggcaacaaggtctaactgtaaaccgttctaaagatagcattgaaattacatctaaagatacagttggcggatggaaatccaaaattggcggtatgaaagaatggtcaattgaaaatgacggattatatgtcgctgatgcagagtctcacaaagaattggcgaaatatttcgaaagtgatagcccggtttgcgtgaaaatcattaatcaagcatctaaaaaaggtcttttcggtggtttggcaattgtagctgactatagttttgaagcaccttttgatgaagcgatgacttactctgtaaaactagacggaatgggtgcgcttgttgatttaacgattactgagggcggagatcaaatgcccggcgaaacacctgtagcaccagcagaataaaatagagagccactgaaataagtggctttcccttaggaggaaaataaatgtttgaagtgaatgatacaacttatattttacgatttaataaacaaaaagttaaaacggtggaattaacatcagggattagtttagttgcagctttgactgcgaataaagggattttgagctaccaagtgattgaaacgctatttgtttcaggacttgtggaagaaaaaggcttagtacctgtaaaacaaaaagaagctttggagattttcgacaaattagtagaagaacaaggcttaatttcgcttaatgtagctgttattgagaaattgcaagaggatatgggttttttgttccgttcaaacagattgaatttgagtattctggtgctgaggacgaagaagtggatagtgaaatgaaccatgattccgatttgcaaaaacaatcccctctttttgcggctcattgtgcgatgtggcagcctgattctgcagaacttactgcagtggccacaacttcgctcctcaaacactggcaaaccaaggcactctctgaatctactataacaca

SEQ ID NO: 1752 - DNA, 1457 bp, Listeria monocytogenes-4B
tcttcatgagtagacataccttggataccacgaccaccacgacgttggctacgataagttgataatggtaaacgtttaatatagccacgtttagttagtgtaatcgccacttcttcttcagggattaagtcttcatcttcaaggcttactaaatcaccagccaagatttctgtacgacgtttatccgcgtatttaactttgatttcttctaattcttcacgaataatttcaagaatacgctcatcatcagctaaaatggcttttaaatcattaattaatgccactaagttttggtattcttcttcaattttttcgcgttccaaacctgttaaacgttgcaaacgcatgtctaaaatggcttgcgcttgtttgtccgaaaggttgaattgtgtcatcaagccttctttagcaacatcggaagtttttgatccacgaattaatttaataatcgcgtcaatattatctagtgcaattcgtaaaccttctaaaatgtgagctctgcgcttctgctttacgaagctcaaattccgtacggcgacgaataactactttttgatgctctaaataatgataaagaatttcttttaaattaagtacttttggatgattgtcgacaagtgcgagcatattaataccaaaagtagtttgaagtgctgtcattttgaataaattattcacgataacacttgcactaatatcacgacgaacttcaataacaatgcgcattccagaacggtcagattcatcgtttagggaagtgataccgtcgattttcttctcacgagctagttcggcaatacgctcaactaggcgcgctttatttacttggtaaggaatttcggtaataacgattgtttctttaccatttttcttttcttcaatatcgacacgaccacgaacagtaatcgaaccacggccactttcgtaagcgcgacggattccgctacgccccataatcatcccagcagtagggaagtcagggccagggatatattccattaaatcacgaatagtaatatccggatcatgactaagcgctaaaacgccgtcgataacttcaccaagatggtgggtaggaatgtttgttgccataccaactgcgatacctgacgaaccattgacaagtaagttagggaaacgcgctggtaaaatgactggctcacgttcagaaccatcgtagttatcagcataatcaattgtatctttattaatatcgcgaagaagttccatcgaaatttttgacatacgtgcttctgtataacgcatcgctgccgccatatcgccatcaaccgaaccaaagttaccatgtccatcaactagcatattacggtaactaaaatcttgcgccatccgaaccattgtaaaataaaccgctgtatcgccgtgggggtgatacttaccgattacttcaccaacgatacgagctgattttttataggccttatcagaagtcatac

SEQ ID NO: 1753 - DNA, 780 bp, Listeria monocytogenes-4B
taaagtgattattccttttttcatattttggccggaattttcgtctttatgttgttgataacttgttaagaaaatcccgataataattaatgctaatgcggaaaatcctaatactaatttggaagttgtaccccattcatgaaaagcaaatacaccaaaaagcgatgtacctactaactgcattcctgtcgaaagtggcattgtttttgatacgcctacttgtgtaaatgcccggaactgattcatttgacctaagctccaaaatgcccctgaaataaaactagcaataataatggttgctgtatattctggatttgtaaaaataaaaactccgattgcgaaagctagtgcgccgaatgttgtaccaatgatttgctgcctcggtttaccgccaatttttgaaacaactaatggcataatcccccacatcactgccggaattaatgcgataactatgttcatttttattccccctaattcttctgcttatggtctatacccttttcctcatgaaatcattcctattcccgtaattatctgttaaaatgaattaaaattatcaagaaggtgagaaaatgaaatcaactggaatggtaagaaaaatcgacgaacttggtcgtgtggttataccgattgaaataagaagaacgatgaacctaaatgtaaaagaccctttagaaatatttacagatgaagatgcgattgtattgaaaaagtattccgctggcttggcttgtgacgttaccggagaattttctgttgataacaagaaatttgtgg

SEQ ID NO: 1754 - DNA, 868 bp, Listeria monocytogenes-4B
catatttattggacttttccgtactcttaaaccgaatcatatgcctatatcgggattagctactaaaaatttaataggaaatcaattgaaaaatattccaagtggagactattatttattagcttgtgcgataagccagtctaataacattctatcttattttaacttaagtaatagtttgagagggaaagaagatgaaaagctatcttttcctaaatgttctggcaagcattacgcgattaagctgagagaaccaataccagaagatccgccaatattagctaatgtgggaaaaattttaatctcctgtttgaagaacacaatctagaacaatattgtttgactatgaaatgttaaaataattgcaggctaatgaaaaggagagataagatatggctttaaatgcaaagagtatcactataggactaccagtaagtgatttggagaaatctgctagttggtatgaaaaactattttttgttgatgaaaaattaacaccagttgaaggcgttgttgaatatctattattggttcagtttggattcaactttttgaagaaaaaataaatgtttcagaaaacgttttacgcataggggtagaagatttagatgtggaatttgaacgtttaaaaaaacttggagtaataactgacgaggtaatagaagatgcacctggtattattcgatattttgtcttctctgatccagatggtaataagttgtcattctattggttgtatgatcaggaatagatttgaacaagattataggatggatgtaacgcttaaacgacggatgtatgattcgtcgttttttgatgttagaaataatgcttaagtggggtcagatataacattatggattttaat

SEQ ID NO: 1755 - DNA, 1075 bp, Listeria monocytogenes-4B
gaaatcaccaaattatctccgtaccaggaaataaaaggtgacgcgacatctattttatgcagttgattcaacgtatagtcccaattttctatttgaaaattccattctggactatatgagacaaacatgattttttcaggtgactcatcattccaataaaatgtcgtcgttagaggctttgttgaacgtgaagcaacagttgaaccatcattcaaagcgattattcgcatcgtggctttttcagctgattcagcagaataaagtaagatatttcgatagtctggactaatttgcacttcagaaatagattccttcgtattaaagattggtcttttcttttcattatatatattcaattcttcaaaatacgtaactccagattttttggtttgcagcaaaacagaatcttttgacaaccaaccaactactcgctggaattctttggttttgatttgaacaccttgtacttcttttgcagtcttttttggcgtttctttttcctccgagcaaccaaaagagataaaaaccaatccgactaataaggtaatcagcaaaaaaacatttgattttttcatctctggcctccaatctctctatgctaaaattttacccttttcaaaggaagctaaaacaatgcgttatagaaagattagctttataaaacaagctacaataatggagtgttattgtagcttatacaaattaatattaatattaatcttcacttggtagcgctaaccatgcagctccaattatccctgcgtcattcccttttgtcgcaatagataatttagtggattctttaacagctgggaaaaccattgtctcaaaataagttttaaccggtgttaataattgatcgcctgctgctgaaacgccaccaccaataataatcttctctggatttaacatgtttccaatatgactgagcgctaaagccaaatagaaagaaattttatcaattgtttcatttgctaaagcatcatcttctgctcctagttcaaaaatcaatttagaagtaattgtttcatcgttatttattgcatctttaagtgcggatttaccagtatactct

SEQ ID NO: 1756 - DNA, 1670 bp, Listeria monocytogenes-4B
aggtgtgctgctgtttacagtccgtcggatgctaagctcgatcgtgatgctgagcccatggccgttttaagcgatttccttgaactttctgtaggggctgggcctcaatgcttatggagcacagaagatcgaggagcttatgcatgtgatattacgtatagcacaaataatgaattagcatttgactatttacgtgataatatggttgtttacaaagaagaaatggtacaacgtccgctagcttttgctgttatcgatgaagtcgattccattttggtcgatgaagcgagaacaccattaattatttctggtgaagcagaaaaatcgactattctatatgtgcgtgcaaatacttttgtccgtactcttacagaagaggaagattatacagttgatattaaaacaaaatctgttcaattaaccgaagatggtatgacaaaaggagaaaactactttgatgtagagaacctttttgatttggaaaataccgtaattttacatcatattgctcaagcgttaaaagctaactatacaatgagcctagatgtcgattatgttgttcaagatgatgaagtattaatcgttgaccaattcactggtcgtattatgaaaggtcgtcgtttcagtgaaggtttacaccaagcgcttgaagcaaaagaaggcgtaactattcaaaacgaatccaaaacaatggcgacaattacattccaaaactatttccgtatgtataaaaaacttgcagggatgacgggtactgcaaaaacggaagaagaagagttccgcgatatttataatatgcgcgttattgaaattccaactaataaagtaattattcgtgatgaccgtgctgatttaatttacacaacgattgaagcgaaatttaatgcagtggtagaagatatcgccgaacgtcatgcaaaaggacaacccgtattagtctgtacagctgcgattgaaacatccgaacttatttctagcaaattaaaacgcaaaggaattaagcatgatgtactaaacgcgaagcaacatgaacgtgaagctgatatcattaaacatgcaggtgaacgtggcgcggtagtaatcgcaaccaacatggctggtcgtggtacggatatcaaacttggtgagggtacgattgaagctggaggtttagcagttatgggtgacagaacgtcatgaatcacgtcgtatagataaccaattacgtggtcgttctggacgtcaaggagaccctggtgtgactcaattttatctttctatggaagatgaattgatgcgtcgtttcggttcagacaatatgaaatcaatgatggactgctttggtatggcagaagatgctatccaaagtaaaatggttagtcgtgcagttgaatgctcacaaagacgtgtggaaggaaataactgtgattgccggaaacaagtgggacaatatggatgatgtgctggggcaacaacggggaagggtgtatgaacaggggtgtgaagggtggatgcggaaaacagggggggggaaatggtgggagcgaaggatgtaggggctggggagtcgatgggggcgtccggtcgtctcccgccctgaacgtggcgaatgtcgggatctggggggaatgtggggcggcgcgttttgcacccccctgttggatcggagtgtgggtgttgcggaggacggg

SEQ ID NO: 1757 - DNA, 1675 bp, Listeria monocytogenes-4B
  misc-feature (1)..(end): n can be any nucleotide a,g,c or t/u
aaaaaaaagtggacgaacaactcaaaaaggggagcacaaattattaaatacagccaatcccctagaactccaatacaaggcgtaacgaagtggagcgttgtttccataaaaaaaagtggacgaacaactcaaaaaggggagcacaaattattaaatacagccaatcccctagaactccaatacaaggcgtaacaaagtggagcgttgtttccataaaaaaagtggacgaacaactcaaaaagggaagtataaattattaaatacagccaatcccctagaactccaacaaaaataacatccaacccagatcaaccaaacctccaaaaagaaccaaggagcgatatttactatgaaaataacaccaccacaaccattcctattcgaaaaaggcaaaagagcagtgttactcttacacggtttcacaggtagctcagcggatgtaagaatattaggtaggtttttacaagaaaacgattatacttgctatgcgcctcaatacagaggccacggtgtatctcctgacctactgttaaaaacgggaccaaacgattggtgggaagatgttcttgaagcctatgatcacctaaaatcactcggttacacggaaatcgctgtagcgggactttcgctaggtggacttttttcactaaaattaggtttttctaggccttttttgggaattatagccatgagtactccaacaagaatggacagttcatcaccaataattcaaggctttttagattatgtgcgtaattataaaaaattagaaggtaaaacacctgaacaaatcgatgctgaaatggttgcctataaagacgccccaatgaacacaatcgctaaactaaaggacgagataaatggcgtcgtggctgaaatagatatgatttatgcgccaataatggtcgtccaaggtgaaaaagacgatatggttgatgtgagcggagcacagctaatttatgatacagtagagtcaacgaagaaagaattgcactggtttaaagaatctgggcacgtcatcacattagacaaagaacgaaaagaagtaaatcaagccattttaacatttttagatagtttagattggcaagaatagacaatttttaaaacagagagaggagggacagaagtggaacaaaaacaaatggaagaaaaaattatgaatctattaacttcagcgcctgataaaacatttgcgcttgaagatttggaaatagaaatagctttaaacaatgcggatgactttaaattaatggtgaaagctttagtgaaactggaagattccggaactattgtccgctcaaggaagaatcggtatgcattaccagaaaaaatggacttagtaaaaggaacatttcgtgcacatgaacgaggttttggctttgttctcccagaagagaaagaaatggacgatatttttatcccgccaaatgaagttaaagatgcaatgaacggtgatttagtttttgcaacaatcacgaaacgtaaaggcgataatttggcagaaggtacgattaagaaaattgtcgaacggaagacaacacaaatcgtcggaacttatatggaagacttagctggtactccaattgtgatgccagatgacaagcgactntttggtgaagtggaaattgatttagaagacggcttanaaccagttgatgggcataaagttatt

SEQ ID NO: 1758 - DNA, 1854 bp, Listeria monocytogenes-4B
tctcagaagtcttatcctcaacctcaacagttcctttactcacttgtttcgaataagagatcgctgctactggagagttaacgataccgactatttcatacaactcatcttcaaattctaatttattacctatagctgattcttcactaatatcatcatggaaaaattttttcagttgagcaaaagataacgcgatttctttagcatcgtcttttggaaaacgtcctttggttaagtgcattttagtaacaggaaaagcatttacatagttaggcgagtctgtaattatttccggaagagccaaaacttcaaacttggaattatccaaaacaaattcatttatatagctttcatctacaacataaatttgtttgatatagtctttgtcttgtaattcaatcaactcatttgtagtgagatgattaggttcctgaaattcagcttcaatttcactttccgtcatttcaatattaaaatatctagaataattctccgcaatatccatcaactcaaagttataatcactagttaaattctcttctattggaactgagcgtaaaataatagtggaggtaatattggttaataagatcgttagtactataataaacgcaaacatcaagaagttaaattttgaactaagtaaatattttaaaattcttccatttgaaacaactcttttactattaacttgaatctcgttctgctctatttcaacattagacgatacttctatcctatctttatctacaaaaatagttttatcaaaaaaatgctccaatcgagtatcatgactaactaagtaaataattttcgtttttgctaattcacttaaaatattagcaagtatctccgaggacttgttatctagattatttgtaggttcatctagaataattatagaagagtccaaagctaatgttctcactaattctactttgacaaattctccgccgcttaataattggatatctttttctaagtagtagttatctacagaaaacaactcgcaatacttttgaactaagctcggattagtttttgggaagtgtaaatatttctctacattagttttatatttccaatttttttgcgcaaagtaagctacatcttttactttatttgtgttattttttaattcattttcaataaaggttgtttttccgcttccgttactacctgtaattgtgtaaatacctggtttagtgatagaaaaaatgctaaatttatttattttattcatataatcgcctttctaatgttgtttttaattattaatggtatgacgatgtaggcaaaaaagaaaaatatcattactacacctattatggcggtaataagtaccgaatgaacaatactccacataattaaaagaaaaataacagtactaataaccgaaaagattttaaagtttgtaataagatacgttttttttctgaattgaagtagctctttttcattatagccataataagtcaatgtactataactatttttataactaacctcatacataattagtaaaattaataatactaagagtagtaagcatataagaagtgctactttttttatcagcataactgcattactgtattgattaacctcagcatttaataactctggttcatatcctttaataaatatttttttagcatatagtttattttctgctaagaaatcataaaatgattcttgagcttttaattgcacgtatgcttctgtaattaaacatcttgttgatttactttttaaaatttgccatcacgctggattaaatctattctcctgtttatgcaagattcttatgagtcaatcacttattcttatgagatagcgatgtattttatttat

SEQ ID NO: 1759 - DNA, 1493 bp, Listeria monocytogenes-4B
  misc-feature (1)..(end): n can be any nucleotide a,g,c or t/u
tttatcactcacatctagtttaccttctgttaaagtaccagttttgtcaaaaacgatagtatccactttggaagtgcgttctaaatgttcgccacctttaaataatatcccactttcggcgcctttaccagttccagccatgatagcggttggcgttgcaagaccaagcgcacaggaacaggcgataactaataccgcaatcgcagcttcaagtgaaccatccaccgttccagtaacaagataccaaataataaaggttacagcagcaatcccaagtacaattggtacaaatatgccggaaattctatctgccaaacgttgaattggcgctttaataccttgcgcttcttccaccaaacgaataatggattctaaaacggtttcttccattcagtttcgtaatttttgcttggaaagccccgtcaaagttaatgcgttgcgccaataacagaatcgcctggattcttctctactggtacaggttccccagtaatcatcgcttcatcaatactcgtttcaccagaaataatgtcggcatccatcggaactttttcacccggacgaacaaggataatgtcgccaattttcaatgaatctactggcactaaccattctttttcttctcgaataacggtcgcttcttttgctgtaaatcaagtaanccagcaatagatcgggtgttctcgatgtgcgtatgattcaagtatttaccctacaaagattagggtgattacacagcacttgttcaaagtagtaatgcggcatcacgctcggatcaatcatgtgacgaatgtattccactacactatagaaataagcagcagaagtcccaagtgcgactaatacatccatatttgcacttttacctcgaagcgctttataagccccatcataaaaccgccaaccaatataaaactgaacaatcgttgcgagtactaattggatggttggattaatccagtaacacaatcgtttccgcaaacaccatttcatgaatgtacggaatatgtgtcaccatggtaagaagtaatggtaaggaaagaaccgccgaaagaataaaacgtctcacttcttttttgaaattcttttctaacacagcatctttttcttctttagacattttttccgccgcgtcataacccgcatgtttaacaactttaatcaaatcttctgtcgatgtaacttccgggtcataatatacggctgcattttccgttactaagttgacattcgctttttctacaccatctgctttatttaacgatttttcaattctcgtggaacaggccgcacaagtcattccaaaaatgtttaaatcttgtcttacatatttatcactcatcgcgtataccccccttaggttttcgaacattgacgcattgctttaagcaagccctccgtcacgtcgtgttcccgattgtttgctggctgtccncgcggcgtgctgcgtgatgtcccagatctagcggcccccattacaaaacaaaaaaaaa

SEQ ID NO: 1760 - DNA, 1154 bp, Listeria monocytogenes-4B
ccagcctgtagaagcgttttccaagcaaaagctagcggtggatgattttctccaagtacttctagtgcccaaggaagatcactcgccatgaattgtggctgtatatcaaatagcacaggtaacccggccgcttcttctattagcgcttctgtaagccaaggtgtgtggattagtctgtcgtattgcccttctctaggcggattggcacgtaacgttcgaataacattagcaaaggcttgatcccctaaaatatgaatagcaacaggtaatcctgcttttcgcgccgcattaaccaaatcttcaaacgcttgatcagaatgaatttgcaatcctttttcatcaaggttgtccgcatatcccgcactcatcaacgccgttcgcgagccaactgttccatcatagaaaattttcatcgcccctaattctaaaaaggcatccccacttacgaaactttcattagaagccgaaaaagcagctagttctgcgtggtgaaccagcaaatgcgcacgaaacggcattttattagcaccaatagtatttcgaaaagcagctaaagtcgaagtgaatcccgtgaaataatgtaaatcttccgagtgtgcacccgttatgcctttcgaccacagatcagttatcgcgattttaagccatgcgcttagttcagaaggcgttgctgcagggaaagaatctatcgccatagtcgttgcattatctcttaaaattcccgtaaaatttccctctttatcacgaacaatttcgccgccaccatcaaaaccattttccgaaaaatcggcaatatgcgcttgtaatgcagaattaatagaaacactatgataatcaatgcgccgaactaaaatcggatttgtctggcttacttcatctaaatcggccaaagaaatcaacgtttgctcatctgaccatttattttcatcataaccttccacaaacaaccattcatcactagcaagttgctttgttctttcagcaatcagggctagtgcctcttttttagtagtggtttggtttaaattaagacgttctaaagcttgtccataccaaagtaagtgaatatgcgcatcaacgaacccaggaaataccactttctcctttccagcacacgtcgcccgctcgagcatgcatgctatggtgcccagagg

SEQ ID NO: 1761 - DNA, 1449 bp, Listeria monocytogenes-4B
  misc-feature (1)..(end): n can be any nucleotide a,g,c or t/u
agaagcggcattagctgaaacaaaactacttattagcgtagaagaacatagtatttatggtggcttaggtgcagcagtgagtgaagtggtaagtagttcgccaacaagtattcgtcatttgatcttaggaattccagatgaacctgctatcgctggaacgagccaagaaatctttgattattatggcttatctgctactggtattgttgctacagttatgaaaaaccttggagacgaaagaagatgaagaaacactatcaaatcgctattgatcaaagcacatctggaacgaaagtattattgtttaaagcaggtgaacttgtagatcgtttagataaaaagcatcgacagttgtatccgaagaaaggctgggtagagcataatccaatcgaaatttgtcaaaatgtccgtacattaattgtggacatattggcaaaacatgatttaattccagcggatatcgagcgacttgctttgacgaatcaacgggaaacaattgtagcttgggataaacaaacgggcaagccactttataatgcgattgtatggcaatgtaatcgaacaaaagaactttgcgaaacattaaaaaaagctggttatgaaaaaagaattaaacagcttaccggattgaaaattgattcttatttttctgcttctaaaatgaagtggttattggaaaatagttctgcggtgcgggatgcagcaagtcgtaatcaattggcatttggtacaatggatgcttggttgttattttcgcttacggatgatagtaattatttcacagaccgaacaaacgccagccgcacactcctttatgatattgaaaaaaatgattggtcagatgagttactcgaactttttggagttaaacgtgcttatttaccagaagtgaagcaatctgctggaagttttggaagttatcaggagataccgattcatagtgtgatggctgattcagaagcggcactttatggacaaggctgtgatgcatttggggcagtgaaggcgacgcttgggacaggatgctctgttatgatgcanattggtgagaacagattacctgaaaacgatgctattttgacaactcttgcctgggatgttgcaggcgtgaaccagtttgcgttagaaggaattattcgttcttgtggagacacattggtttttttatccgcacgattaggcgtatttaatgattgggatgcagcttgtaagcgagcatttcgattaccatgcaatgagggtgttgtgctaattcctggacaattaggtttaggttcgccttattggaatacagatatgcgagcagagattcttggtctcacacgagaacatacaaaatggcatattattcgtgccggttttacaagtattgcatttcaaattaaggctgttattgaccaaatggagttaatgacaggtcaaaatattaagcgcttacaagtagacggt

SEQ ID NO: 1762 - DNA, 1322 bp, Listeria monocytogenes-4B
aatggatcttgtggcgctaaaacagtcgtattttcaaccaattgatatttgtccgtctctattttttcaaaaaagcgtactgccgaaaactcgctatcacgcgactccactcgacctgcaatatattctttcccaagccaatgaaatggtgccgtaatattgtatacatctttgtcgccagcaccatttaacgtgatacgtgtcccaaacgcagcactattttcccggtaaacttgcaacaaattttcgattgtattcattctattcctccactctaagcgcaattccagtatgcgcacccattctaatgccatttcctaccatcactgcttctccaaaaacaagctgatagttcccctgaagcggataagttacctcttcctcaccaaaatgaagtaaaaagataaattcgcctcgctgataactgagtacttctccatccaacttcaaaaaagtatattccatctctttaaaatcattttctttacgaaatgcgagtaatccttgataaaatcgccacatcgttcgtgcttctttttccggcaaagtcgccattttaatccatgattcacctagagtaaatggctttccatctgggaaaatcatcggcccacgtgctttgtcacgcgttttttcaatagcaatttcgagtgcttgtttttcatctgaaccagtttgtaaagcttgatagtacgcggctgtcccttgaatatcgcgcatctcttttacggaagaaaacgttaaatcaggcatacccacctcttctccgtagtatataaacggcacgcctttcgcagttaacattaaaaatgcgagcaactgggtctttactatgtctccagatgcgaggcgacttgtgggcctggtcatatcatggcttccaaagagaagcgtcgtccactgcccttcatttaatgccgtttccatctcattcaatgtcgtaaatacagattttgcatctagctgatcaacactgccaaaattaaaattaaatgtgacatctagcatttttttcgagctatatctagcaatttcagctaattggtccgagctaatttcgcctactagaaacacgtcgcgctcttttcgacaaaaggaagcgatatcctctaacgcttgttctaagccactctgattacggtcatacacatgctccatttcaccagatgtgactggattatccgtaaattcaagtacgagcgttaaattattgataacatctaacctgaatcccgccactccctcattcaaccaaaacactaaaacttgctccatttctgcgcgaacagcttcattcgcccagattaagtcagcctgtcttt

SEQ ID NO: 1763 - DNA, 1669 bp, Listeria monocytogenes-4B
cacagtgtgctggaaagaattcgtgtgtggcagtttttttcgtttgaaagtgaaatcagacgggaaaacaagctaggaaggagtgatttaaatggcaaaatttacatatgatgtagtaataatcggaagtggcgcaagtggtacaacggtagcatttgaagcacaggcagctggattaaaagtagcaattgtagaggagcggagttggggtggaacgtgtgtcctcagaggatgcgaccctaaaaaagttctcgtcggagcaagagaagcaagaaatctttctaccagacttcgcggcaaaggtattaagcaagcagcgacaattagctggacagatttaatggcatttaaagaaacttttgttgagaatgtgccagaaagtcgtttggaaaactttcaagaagccgggattgaaacattctttggtgcagctagtttccaagattcccattccttacaagtcggcgatgatttaatacaagctaataaaattgtcatcgcaacaggagcaacaccaagcacgttaaaagtagaagggcaagaatacattcaaaccagtgatgattttttatcacttgaaaaactccctgattctgtcgtgtttattggtggtggctatatttcatttgaatttgcttccatagcactcgcagcaggcagagaagtgcatattatccatcataatagtgaacctttaaagaaatttgattctgattttgtggcggcattagttacccatatgaaagaagaaggtatccatttccattttgacacagatattacgaaggttgaaaataaaggggaaaaactgcatattcatggcaaagatggattttcattacagacagatttaattattggggcaactggtagaaaaccaaatcctcgcatttatcattggaaaatgccaacattgactacactaaataatgtattatcgttaatgaaaaacttcaaaccactaataaccctcatatctacgcatgtggcgatgtcgcggcaacaaaaggagcacctttaacacccgttgtcagcatggaagcagcatttgttgctaaaaatgtcattggcggcgacgaaaaaatgatttatccagcaataccaagcgtcgtttttacgagccccaaactggcaagcattggtataagcgcagaagaagcaaaagcgcatccagaaaaatatcaaattaaaaatcacgacacaacaaattggtatacttataaacgaacaaatgaacaaatcgcgcttgcaaaaatcattgaagatagagagtcggggcaaatcaaaggcgctcattttcttagtgaagaagcagattatatgataaattacgttgccatcttaatgaaagctaatctaactttgggtgatttgcaatctgttatatttgcctatccatctccagcaagtgacttaactgctttgaactagaggctaaatatgaaatagtgagggagaaattcgcataaaaggagcaaataagatggaaatttggatcattgccggaatatgtgctttcttaatttttatcgcaggtatcgtaattttatttttcccagccagacggaagattggagctattttaactagtgcagggatgatattaatggttggctccattatttccagcacacgtcggcgctcgagcatgggtggagagtgcctaaag

SEQ ID NO: 1764 - DNA, 980 bp, Listeria monocytogenes-4B
gctgatggtactttacagcatgtgcgagggccacagtgtgctggaaaggcattttccagagaatatgttatgataacagtgtagattatttataaattagtttgctcaaaaaagcacgctcgagaatgaacaataaatggaggttatatgatgactgaacaatggtatgaattcgcaggtggtaactggcaacaagaagtagatgtacgtgactttatcttaaaaaactatcgcttatatgacggtgacgacacattcttagttggcccaaccgaagcaactacaaaactttgggatcaagtaatggacttaactaaaaaagaacgtgaaaacggtggcgtactggatatggataccaaaatcgtttcaaccatcacttcacatgacccaggttacttaaacaaagacttagaaaaagttgtcggtgttcaaactgacgtacctttcaaacgcgctttgcaaccattcggtggaatccgtatggcagaagttgcagctgaatcttatggctttaaagtagacgaagaaattagtcatattttttctgaataccgtaaaacgcataaccaaggtgtatttgatgcttatactgctgaaatgcgcgcagctcgtaaatcaggcgtaattactggtcttccagatgcttatggccgtggccgtattatcggtgactaccgtcgtgtagcactttacggagtagacttcttaattaaacaaaagaaacaagatttaaacaatacaggtttacgtacaatgagcgatgacgttatccgtcaacgtgaagaacttaacgaacaaattcgtgctcttggcgaattaaaagtactaggcgaaaaacatggtttcgatcttggtcgcccagctaaaactgcacaagaagctttccaatggttataccttggttacttagcagcaattaaagaacaaatggtgctgcaatgagcttaggacgtacatctacattccttgatatttatgtg

SEQ ID NO: 1765 - DNA, 2008 bp, Listeria monocytogenes-4B
  misc-feature (1)..(end): n can be any nucleotide a,g,c or t/u
cactgatgggcactgtcgatgctgttcgagcggccgtcagtgtgctggaaagagttttcgatttatctaggtttttattttgctaaatactaacaaaaaaggagaacaagatgaagaaaaatatttttaaattgatgatggcgttatgcgcagtactattaattgcaggttgcggtaacagtacaactgcagacaagaaagagacaaaagaaactaaagaagatggcactgtgacattttatgtagtacgtcatggtaaaacaatgctaaacacaactgaccgtgtacaaggttggtctgatgcggttcttactcccgctggtgaagaagtagttaaaagcgctggtaaaggcttaaaagacgttgatttctctgcagcttacagcagcgacagtggtcgtgctatccaaactgcaaacttaattttgaaagaaagcgataaatccgctgataaagaagtacaaactgatccacgtttccgtgaattcaattttggttcttatgaaggcgatttaaatgaaaatatgtggactgatattgcgaaaagccaaggtaaaactttagaagagtggcaaaaagctggtatctcgccaaaagattttgctgatagtgtagcagctcttgataaaactcgtgtgaaagaaggcgaaaactggcctgctgaagactatgcaactatccaagctcgtctaanagaaggtttaacagatgttgctaaaaaagaaagcaaaaatggcgatagcaatgtattactagtttcccacggactaagcatcggtgcgcttcttgatactatcgaaccaggatacaaactgcctgcagaaggtatcaaaaatgcaagtgtaacaaaaatcacttacaaagatggtaaattcactattggtgatgtaaatgacttaagctatgtggaaaaaggttctaaataaatagccagacaaaaagcccaaaacaatttattttgggcttttgttttactaaatatagacttgtgtttcttccttacaattactatacttagaaaaaaaggaactacggaggatatctagttgaagagacgtacctatgttattattactggtttagtacttatttttgtcgctggtgctttttggattacaaattctactaatcaatctgaccaaaaagccactcaaaccgagccactaaaaaaaacaagtccagctaatgttaaaaccatttcatcagaagctaagaaaaccttgaattccctagcaagttcaggagctgacaaagcttctatttccgatttaaatcaattaattaaagaactaaaatcctatccagttgaaaaaaatgattctggcgcctatctccaaaatctcacagcctgtttagaagctgtaaaatcgtatacgaccggcaaaacagatgaaaaaacgcttgggaaagtatatcctgcttttcttgcaagtgaacaaaaactatcagccatcgaaaaaacaaatcaatatgattggttttatgccgcagccgcaaccaatcaacaaggtttgaaagaaaaaggtgttgtcactttgaccatggttggcgataattcatttggaacctatcctgaaacgcccgaacacctcaaattcgataacgtattccaaaaaaacaacggcaataatacctatgtttataaaaactgccttccttggtttaaatctgatgactacactgtcattaacgctgaaagtgcctttacgaatgcaacaaaagcagaaaataaaaaatggcgcatcaaaagtgaccctgcacacgtcgcctttttaccagcgagcggtgtagaagcagcaaatttggccaataaccatacaatggattacttccaagttggttacgatgacacattaaaggcttttaaagagaataatattcctgttttcaataccgacgctccacttgaaacaaccattaaagggatgaaaactgttctactaggctacgattgccgtatgagtcagcaatcccctgcttatcttgaaagaattgtaaaagacgtgaa

SEQ ID NO: 1766 - DNA, 1119 bp, Listeria monocytogenes-4B
  misc-feature (1)..(end): n can be any nucleotide a,g,c or t/u
gtggaacttaactgggttaagagcccaatggcggatggctataaagtacttgtcttcaatgggaaagcctacgaagaatacgatgttggcgcagaaacaaagtggaccacccaaaataaagggatttggccaaccaaagaagaaattgcagaaggtaaattcgctcttcatcatgacggaaaaggcgatgaactagcaaaagatccttctccagtttataccaattctggcggtaattataaagaacgaacaaactactggttccgaattgttgcgtaccaaaaagcgggaaataacgccacaagtattcaatccgaaccagcgacaccatcccttccagaagtagtaaataaacagctaggaatggtagattactggacaagtgtgccggtacgtggcggcgaagtaaacgctacaaatggaaactttttattccatgaaacagattttaacttagaaggccacggcccgagtatcaatgtcgaccgtacttttaacagccaagatgacgcaacaggcatttttggtaaaggctggacaagtacgcttgaagagaaacttattgaagaagaaaacggaaatatcgtatgggtggaatcggacaagaaagtccatcgtttcactaaaaaaggcgataaatacgtggcaccaccaggcatttactccgagattactaaaaacgcagatggctatttgaaaatagaagaagataagtcagaaacgcgctttttagctgatggacgattaaaatccgaaaaagatacaaaaggcaacgaattaacttacgaatatactgacggcaaactaacaaacatgcgcgacgcttccggacgtaccgtgactttagcgtatgaaggcgagctcgtaaaagaacttgtcggaccagaagaccgtaaaatcagctacacgtataatgacaaacaagagctaatcagttcatccactgcccgcggtaaaatatactgctatggctacacagatggcttattaacatcgatttacgatccaaaacatacagaagaaaaaccatacgaaacaacctttgcttatgaagaagagactttccagcacactgtcggccctcgacagcttaagttactttagcccncaaaaaggtta

SEQ ID NO: 1767 - DNA, 1192 bp, Listeria monocytogenes-4B
agttttccatgcgagtggtccttattatttctgtgctttttattacttttgggagcgctaatgtttctaccgcacaagaaagggacacagcaaataagcttccagaggtggaactaggttctctggatacctctaatatcattgcagaagaagttacgcaagagaaaccagcagaagtggagcaactagaagaaatcccaactacggatgaattgatgcaaaatccaaatgttcttgagaagtctgttgccgattcggatgatccggatttaacagtggtaagctcaggtgcttactggacgatttattataattctgcgaacggcgaatatagcttgcgtatgtttggcaacgtaccaagcagtaaaccaaccgcttggaatagttatttgagtaacattaaacatatagagattgaagaagctacgctgacaggaagttttgaagcttattttagagataatgttttcacggtacttgaaagtgtgaggattgaacagtgtaatttgtctggagtgacgtcttttagatccgcatttgaaggtcaattagcgcttgaaaaagtgatcatcagagataattattatccgacaacgccaactttacgcactacggaaaatatgtttctgggatgttacaaccttagggagtttgatgtgagtggccttgatactagagcagtaactaatatgagggccatgtttcaaaattgtactagccttgaagagttagatgtaagcaactttgatacaagttccgtgaataatatgctgcatatgttttatgtttgtaataatcttgaagagctagatttaagtaactttgacaccagttcagtaactaatatgtttgccatgtttgcttattgtactagtcttaaagaaatagatgcaagtaattctgatacgagttctgtaactactatgagtgccatgttttttgagtgcagctcacttgccgcgctcgatccaagtccctccgctgctacccccgcgactcctatggcttccatgtgtcaaatcgtgctgccccacatctttctctgccatcatcctccccaccccctcccctcaccatctgtcccccggacaccctccccacctccttctccccctttcccctcccccccctcttcgccgccccaactccccctcgccctccgccccatcccgcccccgccccaacccccccc

SEQ ID NO: 1768 - DNA, 840 bp, Listeria monocytogenes-4B
ttatttatcattttgtctcgcaaaagtacaaaaattccggatatatgtgactcgattgtgtcggtttaatgactaaaacaatcataaaaactgatagcgattaattttcacgactatgataatataaaagtgtccgattaagttaaacgaaggggtgaatcgagtgtctcatttaaaagattatacgattggtattcaacatataaagcagctgacgtcggaaatatcacttggaactaaattggtatttgctatttctggacaaataacaatcaaggtttctgagcaaaaattttacttgcaggaaggcgatgttttagttcttgatcgcaataccttttatacaattgagggaaatgaagataatttatttattaatttaacgatttcagatacattttttgcgcattattatgaggattattttcagcattcttttaaatttttctcgaaggagagtgaccctgggagagagcgggttgttgggtctttgaggaagtcggtgagtgagcttttgattgcttcggcgacgaagaaacgagcgaataaattagaagcgcaatcggcgttgttccaaattttattattacttacgcgttttttgaaaaaaggaattccatcttctgctaggaaagaagtcaatgataaacggatttcgcgcattattcgagaagtggaagagcggtttgatgaagccttgtcgcttcgtgagtttgcgcaaaaagagtttttaagtgaggcgtacttatcacgttattttaaaaagacgacggggcttggttttttacagtatttgacagaagtccgattgaagcatgcgattcaagatttactacattc

SEQ ID NO: 1769 - DNA, 902 bp, Listeria monocytogenes-4B
gcaagaattgcaaatcccatcaaccgttgtcgtgttagaacaatggagcgatgaagcgacttattatatgttcaatgacgccgaatatgacgaaaaagccccatctgaagcatataattacgatgaaattagattcccttcatggggtagatggccagatccaaaagggatggttgactatatccatgacaacaaaatgaagttaattctttggcaaattccgattcaaaaatacttaaatcgccaacaacacccactaaaagaccgcgaagaagcctatatgattgaaaaaggctatgtagtgaaaaatccggatggctcgccataccgtattccagaaaattggttcacagaaagcttgattatggatttctccaatgaagaaggaaaaaaatggtggtttgacaaacgacaatacttgattgatattggggtcgatggctttaaaacagacggcggcgaattcgtctttggtgaaggtttgcaatttgctgatggtagacgtggtgatgaaatgcgtaatctttatccaaatgactatgtggaagcttactaccaatttgcacaacaaaatgatggcatgacatttagtcgtgctggctacactggcgcgcaaaacttcccggcgcactgggctggagacgaacgttccacttttgatgcatttagaagatcgctcattgctggactttccgctggattttcgggaattccgttttggagttttgactttgcaggttttaacggcgatattccgacggctgagctattgcattcgttctgctgaaatggctactttctgcccgattatgcggcgtcatgctgaaaggaagcggaatgtatgaagaccgcgccgccgcatacttttgcacaccccccgccaccccagtgcagaccccaaa

SEQ ID NO: 1770 - DNA, 838 bp, Listeria monocytogenes-4B
agctgaaaagatgaatacagctaacttgaagtttttttgttataataagacatcaggaattttaaaggagacggaactaaatgaagaagttgctttttttaggtgatagtgtgacagatgcggggcgagattttgaaaatgaccgcgaattaggacatggttatgtgaaaataattgcagaccagcttgagcaagaagatgtaacggttataaatcgtggcgttagtgcgaaccgtgtggcggatttgcatcgtcgtattgaggcggatgcaatttcacttcaaccagatgtagttacgattatgattgggataaatgatacgtggtttagttttagcagatgggaagatacttcggtgacggcgtttaaagaagtgtatcgtgtgattttgaatcggattaaaacagaaacaaatgcggaactcattttgatggagccgtttgtattaccatatccggaagatcggaaagagtggcgtggtgatttggatccaaaaattggagctgtgcgcgaacttgcggcagaatttggtgcaacgcttattccgcttgatgggctaatgaacgccctcgctatcaaacatgggccgacctttttagctgaggacggggtgcacccgaccaaagcaggacatgaagcaattgcctctacttggttagaatttacaaaataacgctgttacagaaaaattatccatgctatagttgggtctatgcgatgagcctaccagcagtgacttaagttcactgccccttttccgcgtttaccttttcgaagctgcggagattacccttgaatgcccttaacgtatttaggggcattttctataaaaaagaa

SEQ ID NO: 1771 - DNA, 1296 bp, Listeria monocytogenes-4B
  misc-feature (1)..(end): n can be any nucleotide a,g,c or t/u
gctttaactatatagtaagtgcttttttgtttaaactctactggatgatcagggtcactttccgcagttttaattattttattgtttgtttcactatctttaggtatttcatattcaaagctagatggagcggacgtgcttgcggacgtatttgcttgataatacacactgcttattgtccctatagcagaaagggttgttgcacttattatagaaataataatcaaggttttcgcattggatgatattctaaaggctaattgcgaggtcgagataatgttactacctttatagaaaatacgtttgttatttctaagttttgtaagtaaatacggtaagaaaaaggtaatgaaaagtgcagtaccaatgattaccgaagctaaaataactaatgccccaatagaaaagccaagttgtgcccaaatagaacctttagaatcaagtggttgtccagcgataaaatagcctaaaccaattaataaaatcgaaagtaaggctaagatgaatgaaggttttggacttttttcgcgttttgattctgagtggaacaaatcaagtaaagtggtgcggtaaataatacggtaaccagtaaatgatgtaaataacgtgatgataataaagacaatactcgtttgtattactgctgcccaagaaaaggcaaaaccaccaatactatcaagattaattaagttaagtaaaatggttacaaaaagcttggaaagtaatgtaccggcaataataccgatgattaatgcgccaagtcccataataaaattttcataaaacaacatgcgaccaatttcttttttacgaaggccgagtaaagagtaaagtccaatttctttttttctttttcgggtaaagaaattattggaataaaggataaaaatcgctacaaaaataagtagaatgactgaggagcttgaaaatgctgtcgataatttagctgattggtcaattctagctacaacagatggatctttcgaaagaacaaggaatgtaaaataaatcataatgctgaaaatcatcgatgcaaaatataaaaagtaatggacaaaattatgtcgaatatttttcttagctaaatcaaataacgtcatgtgagtcgccccccagtttggcaaggacgtgtagaattttttggaagaactccttacgtgttttagttccacgatagagttctgtgtataattctccgtctttaataaataaagatggtttgcaaaaacttgcctttccagcacatgctggccgtcgagatgctgtagagcaccgatcagcnnnntacagggaaag

SEQ ID NO: 1772 - DNA, 1168 bp, Listeria monocytogenes-4B
  misc-feature (1)..(end): n can be any nucleotide a,g,c or t/u
ttattttaattttttggcgtcaagttccggtccgccgtatgaatatgctgcattgattttgtttttgccgtgtcctggaatatctacgtatgtatcacgcatgatcgataccagttttggcgtatttgttttcttattataatgagcaatcatcttgctgtctgattttccttggtctttaccgcgagagtcactaccgataagtagttcattgttttcatcgccaactgctcttggcaccattgaatttgtagtcatttaatttactttcattttgcgcttcttttaagctagattgatattggaaataacctataactgcaactacaccaactaaaattaatagggctacaagaatcgtaacaaaaattctacctttgcgcgcttttcttttttgtgcatgtcttgccatatttcacacctcttttattgtaacttacttccatattacaataaaatgacaaaaaataggagcgataattccataagattttttaaagattggaaaaagccccctaaaatgatgatttctagagggctcgcaaatattaaagggttccgtcgctgcttgtagtactatcacttgttccagagtcagaactatcatctgaactatttggcgcttggccaggttcaccggacggcggcgttccactcggcatctcccctccaccaggaccttgcatggttccattagtattattttccggggtattttgactaactgaatacagctgataacttaaaacactaataattatgacagaaagaatactgacaataatcgtgctccacttccatttattgtggatgcctttcccacgaataatgaccttcttttctggttgttccatctcttccatccaacatcatcctttcgttaccactactttaccaagcaaataagaacaaattatgacatgaattagaaaaaaatatgtcgggcaaatctaaagttttctttaattttttcaacttttttagaagtgtttggtataattaattgaatataacatgaaattaaggggtgtattatggctagttatggtgggaaaaagaggaataacaaaaaagcaattatcattggaagcattgccgctgttgtcgtctcgcggcattgcattactttatcaataccaaaanaatctacacgaacttctcattgtag

SEQ ID NO: 1773 - DNA, 1476 bp, Listeria monocytogenes-4B
  misc-feature (1)..(end): n can be any nucleotide a,g,c or t/u
aatggtctgacagtaaataatcaaaggacgtgattttaaatggcaatttttggaacacctgatgaaaaagaaaccaaaaaatccgagcgtcaaaaagaacgagaagcctatgtacaagaagaaaacgaccaaaaacgaattggtcaaagatggcaagatattcaagtttccactggaccgattaatgtgaatcatgatatcctcacggttgttttcgccaaaagcgttcgcccgagaatcaaaagtgatccagaagcatacttagaaacagtgggctttgaaaatttactacaggaattacaaaagaaagcattagatgcaggcgggaatggcttaattcactgttcgtttaccgagcaattcgtcgatggcctcgtttatcaactcgcatatggaacagccgtaaacatcaaaattacgagattctaaaaaaagactagaaagccagtaattggttttctagtctttttcatttgttgcttgtttctttgctcgctttagtacattcgttaagtcaaaatcagccatcgctttcaccggtccatgcccacaagcaatttccgtcacatcgaaaagctgtaaattttccgccgatgcgatacttgttggaagatcccaagaacccatcgctggaaaagggaacaaccatcgcttctccccacaaatagccgctcctccacgagtttgaaataaatctcctacaaataaatgcccattacgctcatcaaaaaaggaaatggagccaggtgtatgtcccggcgtatcgataattaacagggagccaatcatatcaccatcttttaaaatgtgatcaatgcttactggaagttgatctgaataaccgccttttatcggcttctgcgctttaaaagcataaactttcttctcttttctacatgccattttaactctgcttccaatcattacatgcgcttctgttattctgctttttgtgccactaatccgacaatatggccaccttgctcctgcgttaataatgtccgttttaaaggcatatttaatatggggatgagtgcagtgattcctttcgcgttcggtggattgccagtatcaatgcatgttcagccagcttttgtcgtttcttaagtaacacttctcctgacatagacacggcaatgtcataatccgccgatattgtatgcttggctgtgcttttcttgcgctttacgtcgttctcgttcgctctttcgcccgcatccccccccgcgcccccctcctcgtgttcctctcttttccgtctcctccctctcctccccgcccctctctcccccccccccctcccccccttttcctcccgccccggccccctcccgtctcctcctctccgttcctctccgcgccctcctggtctgcctccccccccccgcctccctcttcccccccgccccgccccccttccgcctgccgcccgncgcccgccgtcccgtccccccccgctaacaaaaaacaagaaaa

SEQ ID NO: 1774 - DNA, 812 bp, Listeria monocytogenes-4B
  misc-feature (1)..(end): n can be any nucleotide a,g,c or t/u
ggactacttgcaggatacggtggttatgtattcggcgatgaaggtacgaatccaaaagacatcggtttaaacaataaaggttcggttgaaggaattacttatgcaacaaaatggttccaagatgtatggccaaaaggtatgcaagacaataagagtgcagatgactttatccaagatcaatttgttaaaggtaaagcagcggcaattctaggcggtccatggtcagcagcaaactacaaagaagcaaaaattaattacggcgtagcaaaaatcccgacactaaacaatggcaaagaatactctccatttgcaggcggtaaaggttgggttgtaagtaactattctaaaaacaaagatgtagctcaaaaatggttggattatgtaactaaccaaaaaaatcaagaaactttatatgatatgacaaatgaagtaccagctaacttaaaagcacgcgatacagcgaaatcaaaaaatgatgaattaactaatgctgttatcgaacaatacaaaaatgcgcaaccaatgccaaatattccagaaatgtcggaagtttggacaggtgctgaaaacttaatgtttgatgcagcttctggttcgaaaacaccgcaacaatcagcagatgatgcagtaaaagtaattgaagataacgtaacgcaaaaatatactaaataataatgatttggcggggcaaagatagcgcgctccgccatttttttcaacttagctagtgactctatatctagaattagggtaacaaaatgaaactagctttccgaggcacgttggncgtcgagcatcgttaaggtccacga

SEQ ID NO: 1775 - DNA, 1477 bp, Listeria monocytogenes-4B
cgcacttgttgttatgacaactggaattcccgcatctaatgctctgataatagctggcatcatttttggcgccacttgccctcgtccaacaccttctaaaacgattcctgatacgccactatctatcgctgcatcaataaacaaaccatctgcaccaatataacatttaatcacaaccacttctggtaaatcaaggcgaatatcaaaacactcatgctccagtggtttttgatacagaaaaacttggtcattatcaataatacccagatagccaaacccaaaagcactaaaaccttgtatgttggatgcatgaactttttttacatatctcgctgcaaaaattcgttcattgaaaacaacgactgtcccagcttgacgtaaatttatttcacacgctgtataaattgcatgacgaatattaacataggcatctgtccctggctcctcaggtgctcgctgagatccagttactacgattggtcgcgcatcggttactgcaagatcaagaaaataggctgtttcttctaatgaatctgttccgtgcgtcactactattccatcatatgtttcatccatgaagatagattcgataagttgcttcagactgattaaatcaggtagcgtaatgtgcatagatggtaattggaaagtagaatagatatcaatttgaatttctgttggtaattggcataatgcagctaattcttctccagataattctcctgatgcaagttttcctgatgctgttttcttacttgcaattgtaccgcctgttgtaattagtgctacttttgccatggttattcccccctacattttccttttaaacaaacaaatgagtctcggaagcgtttcccagacccattcagtgttgtttattactgtggaattgttagaactgtaccaactggaacattgtcacttcctagtccattggcttgtttaattttttctactccagcagctgcccccgcttgtccatatgttgaacgtgcaatactataaagggtgtccccagctttaacagtatgagatcctccagctttttgctgtgaggcttcattcgctttttgctgctcagctttttcagcagcagctttctcggcagcagctttgtcagccgcagctttttcttcggcagcttcttgttctttttttgcatttgcagctttcactgcatcttcttcttgttttttcttatctgccgcagctttttcttcggcagcttttttctcttcagctgccttttcagccgctgctttttcttcggcagcttttttcgctttttctttttcttctttagattgcgtgttgtcagatacatttacggttgattctgtttctgttttcacttcatttgatgaacccatattttgtactgttacaaatacaatcacgataacgattggtattaatagaaaaaaaacaatcaataaattaagtaatgggtatctaaaaatggttttcttttttcctc

SEQ ID NO: 1776 - DNA, 1450 bp, Listeria monocytogenes-4B
tcttgcggaaaagtcctatacgcattctgttcgtcgatttaccagctacccctgtcataatgatactttggataaaagtggcagcagcgaggagtacgtagcagagaatcagcatccaaatgatatggatgaagtcactcttgtcatcaacacccgtttgcattaaattaacaacgtaatctccaagttcttgaacggcgttaccaatatattgtggtgcttttacttgaaggtatgtcgcaaaaactacagcaattaaaatgacaaaaagttgaggcttataaccccgcagatagtgccagaaaaagcgactaatttgtttgaactctttcattatgcggttacctccttgcctttttgagtgtcgtaaatttcacggtaagtttcattttcttttagaagttctttatgggaaccgacgccaacgagtttacctttatctaacacgagaattttatctgcttgaataacagaagagattttttgtgcaatgatgaaagtcgttgtgtcgtctagctctttattcagcgcttctttcactaatttctcggattttgcatcaagcgcgcttgtgctgtcatcgaggattaggactttcggggaaccgataacgccacgtgtaatcgaaaggcgttgtttttgtccaccggagaagttgtttccacgttcggaaacaggagcttcataaagttttgcttgtttgtcgataaactctttcgcttgtgctattttacttgcgtgttccatttcttctgcagttgcgtcttttttaccatgacgtaaattgtctgcaattgttccggaaaaaagaatcgcgcgttggagcacgaaggaaacagtgctgcgaagcgtttttttgttgatatcttttaggttcgttccgcctgataataacttcaccttccgttgggtcgtaaagtcgggggattagttgggcaagagtggatttaccagaacctgttgcaccaacaataccgaccatctcaccaacacttgctttgaatgaaatatcttccagagcaggcgtatcgtcaccgtcgtatttgaaactaacattacgcaactcaactgtaccttgtaaatcttgttctggtgcgttttcattgtaggtaatatctggttctgtttccaaaacttcggtaatacgtttcaaggaaataagcgcacgagaagccatcatcatcagcataccaccgataataattgccatcataatttgcattaagtagttcatgaatgatgcgatagctccgataacttcagggttttcagcagccatgtcgcctacaaagaaaatagaaacaacaattgctaagttagaaacgagcataaatgcaggaatcattacagagaaaagcgttccaacgatgattgtgtggcgagttaatttgtcactgacagttgtaaagcgactgatttcattatcttctagcacgaaagatttaactac

SEQ ID NO: 1777 - DNA, 1425 bp, Listeria monocytogenes-4B
cgtaatgactggaattttgagttttaacgctttttcaatcattgggttgttgtacggaattccaggattttttatgacaagttcaaatccttcatctaaaagttcaattgggtgcgaaccgcaaataactttaataccttgctcaagtaaaccttgtgcttctggattctcgctaaaaggtttttgatcattaacagttacaaatgctcccagtttgtgcataattgttgccgcgctaacaccacttcttgcaagacccaagacaagtacttttttgtgatggtacatttcaatttttttcatttcctttggttcccccatttatatcaaaattggcggtcgaatttatgattttcacaaaaacgacggaaagcgccaaccagattctgtaaaaaaacagctaactagagacgcttttgccgtaaaaagattacggcgcattatttaaaaaatgactacacagacagaaataattgctccgattaacccgattccccagaacgttaaaacaacacgccattcggaccagccaccaagttcaaagtgatgatgaattggtgtcatacggaagattcgttttcctccagttgccttaaaataaaatacttgcaatataacagatgctgtttcaataacgaaaataattccgattaagagtaacagccattcttgatgtactaaaatagaaattgcggcgatacttccaccgagtgcaagcgaaccagtatctcccatgaagattttcgctggatttttattaaatagtagaaatccaagcataccgcccacaatcgcaaaacagaaaatcgcgacatccatttgttcttggtaaaatgcaatgacaccaaaagcagaaaaagcaatgacagaaaggccagagacaagaccatctaaaccatctgttaaattaactgcattagagaaaccaactaaccagaacaaaataaagataacaaagaaccaaccaagatccacttctatatttgtaaacggaatattaagcgtctcagcaaaaccatttaaatgatataccagatagaataaaatcgaaattgccacttgacctaaaaacttctgctttgaagtaaggcctagattacgtttttgaactactttgatatagtcatctaggaaacctaatgcgccaaatagtgccagcgcgatgaatagcagccacgtagctgcactaacttcaccactgatgaacgaaaagatcaagaaactaataagcattgcagtaatgaaaacaactgcccccattgtcggtgtccctgatttcttttcatgcattttcggaccttcatctctaatactttggccgaattttaatttcaccaagaatggtataaatagtggtacacctatcaccgctttccagcacacgttcggcccatcaaagcatgcatgtagagtgcccaaaaaggt

SEQ ID NO: 1778 - DNA, 1419 bp, Listeria monocytogenes-4B
atcttaacaaatagcttggaatcactttttcaacttgggcccaagatattcaaagcaagtctcgaacaattgtcccatgttttaatgccgagcgttccttttgcacggtgaaccccatcagggtgttcttcactttgaccagcgcccatttttattttgagcgctgtaacttggggggggctcttatccccattggccagagattgtcactgtttcgccaacaccttattttactttttaaatagggttgggtcaaaaaatcgattttgatgacttgcccctcagttgagacccggaaagagagcttggattttttgcgaccgtagaaagcaacggttgcctctgttaggacttcgccttgaatggtaatccgttcttcatgggccacttctgataaatcccgcaaccgataatcctcataccgatacgggaagttccaaagcaaatcatgcacggtggataaacctaactcttttaacgttttcgctgtttcttcgccaattcctttgatttcagttgtcgggattcgtttaagttcactcacgcttatcttctggcgacagtccaaaaatcttccgctgaattgcacgtccagtcggtgtagccgccaatcctccttctgccgtttctcttaaagagcttggcatttgtaagcctacgcggtgcattgcttcaattacttcatcacatggaatgcggctcttaatacctgcgagcgccatatctgctgaaataattgcttgcgaggaaccaagggcattacgtttaacacatggaacttctacaagccctgctacaggatcacacacaagtccaagcatatttttcattgtcatagccatcgcgtgtgctgattgttctggcgtcccaccggctgctgctacaatcgccgctgaagccatcgcacttgctgagccaatttctgcctgacagccaccagccgctccacttataaaagcattattcgcaacaacatacccaaaggcacctgctgtgaataaaaagttcaccatatcctcacgcgacatttctagacgatcttttaaggaaaaaagtacgcccggtacaacccccgcgcttcctgccgttggtgttgcgcaaataacgcccatcgaagcattaacttcattcgtcgcgattgcttttgctacagaatcaagtaacacttcgcctgataagaagtttccttttttgatatagtcttgcattaggacggcatctgcgcctgttaagccagttgtggaagtgactgccggctgaccttgacgaatagctggttgcatagtgtctaaattgcgcgccatcgcgcctggtatgggttgccgcgggcgaccacaggtgttggttgggcgctcggtcctcgtcctcccctctctctaccctgccggtcccgcctgcctctaaaaaaaaaaaaaaaaa

SEQ ID NO: 1779 - DNA, 1594 bp, Listeria monocytogenes-4B
  misc-feature (1)..(end): n can be any nucleotide a,g,c or t/u
gcgctggaaagtagttgtgacgtttagatgaatttctttgctataagcaaacagccgaaatctatagaaaaactatagacctcagctgtttttttgttgttattttactttgattgttttgcggagattaagcgttgcctgttcctaacaagaaaactcctacaaaaattggattcatggtatcgctgcccccagctgttttaagcgtggtatttccacctgaattgtttgtttttctcgncccattgccatttcctgttggggtaaccggggccccccccttggaatctggggtggcatttttagtaaactgggcgtatagcgttatatttcccgccggcatttttcctgtcgcaaaatcccatttagttccacctgttttagcatcataccaacctttgaacgtatagccatccttcgttggcgctgctggttcttctagcaagctttgataagtgactttttgcgtcgttaatttcccatcgatgtcgaatgtggctgtatagctattaatcgtgaactgcgcgtataatgtgatgtcttctgctggcattttgtctgtcgcaaaatcccatttattcccgccagttttcgcatcataccagcctgtgaaagtgtatccttctttcgttggagctgttggttcttgaagcaatttcgtttcttccactacttcatttgttttcactccatctacgtcaaatgtcgctgtataagcattgtgaagtggttgggtcactgttccgctaaaagaaccctgtgctaattgtttattaaatgtgtaacttacttggttagtataattagccaagttccacttaatattcgggcttgcataaacaccattatcgctaattgtatctggtgagattaacgctcccatttcatccttaatgttattagggaccacaagctcttgttggtacaatactggttcactcgttattttttgattgtctaaagtaataccaaaaaaattaggtgaattaaaaagtggttgtaaagaactaatatcactgatttgattttcagctaaaaatacatagcttaaattagccaaattcgcaattggggttacatcactgatttgatttttatctagtcgcataatttccatagcccctaagcttgaaataggactcaaatcacttatttggttattgtctgcagttaaatgacttaactttgctaagccagcaattgggcttaaatcactgatatcattataatctattccaagaccaattaagtttttcaaacctgaaactgggcttatatccgttatttgactgttgcttagttctatggtttctagattgattaaattactaactccatttaactgttttatttaaagaccagctaatcttaattggtgcagacttgtcacatttgctagtgcacttatatcgcttaattgattgtcatttgcttctaatatccttaatttagatagtcctgcaagtgaatttaaatccgttattttattattatttaaaattgatgtatctatattatttaaatactgcgccccctctttccagcacacgtcggcgctcgagctgctgtaggagccgtagcnttccatatttat

SEQ ID NO: 1780 - DNA, 1048 bp, Listeria monocytogenes-4B
tattaccagatcaacaaactgcgtgcgagaaaatcaccgcagcaactgatcaagaaacattcctaatacacggggttactggaagtgggaaaaccgaaatctatttacaaaccatcgaagcaaaattaaaagagggtaaagaagccatcgttttagtaccagaaatttcccttaccccacaaatggtagagcgatttaaaagccgctttggaagcgaggtcgcggtactacatagtgcgctatcttccggagaaaaatacgacgaatggcgcaaaatcgaacgcaaagaagcgcgcgttgtcgttggggctcgttccgccgtatttgcaccgtttgaaaatctcggcattattattatcgacgaagagcacgaagcgagttacaaacaagaagataatccgcgttatcatgcaagagatgtagccatttggcgcgcaacaaaatatcaatgtccagtagttctcggaagcgccacgccgtcccttgaatcttttgctagagcgaaaaaaggtgtgtatacgttaatcgaacttcctagccgggtcaatgatcgggcgatgccagaagtgagcgttgtcgacatgcgcgaagaattacgcaaagaaaaccgcaccgaattttcgactgaattactagaaaaaatcaaagagcgaattgccaaaaaagaacaaacagttttaatgctaaatcgccgaggttattcttcttttgtgatgtgccgtgattgtggttatgttgtggaatgtccgaactgcgatatttcgctcacctatcatcaatcgagcaatcaaatgaaatgccattactgcggacatgaagaacgtgttccgcaaaaatgtccgagctgtgagggcgagcatattcgttattttggcaccggtacacaaaaagtagaagaaagtttgaccaaattaattccagaagcgcgcgtcatccggatggacgtggataccactagaacaaaaggtgctcatgaaaaattactcaaaagcttccgcaatcacgaagccgatattttacttggaacacaaatgattgccaaaggact

SEQ ID NO: 1781 - DNA, 1422 bp, Listeria monocytogenes-4B
accttgggcacactactcctgtttgacggccgacagtgtgctggaaagaagaatctgtttgggaattgaaacacttaaaaccgaatgtcgatttctattcagcctccgtttatcatgcgcttggtattgaccgcgacttgtttacgcttgtgttttctgtaagtcgtgtatctggttggttagcacacattttcgagcaataccgtgataatcgtcttattcgtccgggtgcaatttacgttggacctgaaaatagaagttatttacctgtagaagaacgaatttaatcgaggaggaacaaactttatgagtcaaaaaattcaagtagaaaacggtgtgctcaaaacaccaaacaacccagtcattccttttattgaaggggacggaactggtccagacatctgggcagctgcaaaacgcgttttagatgccgcagtaaaaaaagcttacaatggcgaaaaagaaattgcttggaaagaagtattagctggtgaaaaagcatttaaacaaacaggagaatggttaccacaagcgactttagatacaattgatgaatatttgattgctattaaaggaccgcttactactccaatcggtggaggcattcgttcgttaaacgttgccctgcgccaagagttagatttatatgtttgtttacgtccagttcgttatttcaaaggcgttccttcaccggtgaaacgtccggaagacacagatatggtcattttccgtgagaatacagaagatatatatgcagggattgaatttaaagaaggcagcgaagaatcaaaaaaactaatcgacttcttaaaatctgagtttggcgttgacaaaattcgttttccggaaacttctggtattggtattaagccaatttccaaagagggaacagagcgtttagtgcgttcggcgattgaatatgcaattaaagaagatcgtaaatcattaacgcttgtacacaaagggaatatcatgaagttcacagaaggagctttcaaaaattggggctatgatttatgtgaacgcgaatatggtgataaagtatttacttggaatgagtatgatcgcattaaagaagctgaaggaacagaagttgctgatgcgaaacaaaaagaagcgcttgctgctgggaaaattttagtcaaagattcgattgcggatattttcttgcaacaaatcttaactcgcccggctgaatttgatgtagttgctacaatgaacttgaatggagattacatttctgatgcacttgctgctcaagtaggcggaatcggtattgctccaggagcaaacattaactacttaactggccatgcaattttcgaagcgacgcatggtactgcaccgaaatatgcaggtcttgataaagtgaatccttcatcagttattttatctgggacacttcttctagaacatattggt

SEQ ID NO: 1782 - DNA, 1526 bp, Listeria monocytogenes-4B
tgtgctggaaagccacggtgaacctggctttacgcgtgaaaaaatcatgccatctgcaagtttagcgaagcaactgtacgaacggattagcaatgaaagtaaactcctacctggagataaagtggttgtgctcgtgaacggcatgggcgcaacaccacttatggaacaatatgttttcgcaaatgatgtccatgaacttctaaaaaatgccggcgttcaagttgaaaaaacactcgttggagattatatgacttctcttgaaatggctggtttatccttaaccattttgaaattagaggacgaaaaatgggttgatatgttgaaactcccagtggacacaattgcatggtaataaaatttggaggaatgaatcatgacttatgataaagattgggcgttacgctggttaaatgacttcggcgaacgcgtacaagaaaacaaacaattattaagtgatctcgaccaagcgattggcgacggagaccacggtatcaatatggctcgcggactcggcgaactcaaaaaagctttcacagaaaaagaacccgctgatttaaaagatgtatttaaaaccgctgggatgacgatggtcagcaaggtcggcggcgcatctggaccactttatggaacagcctttttaaacatgagtaaagcggtagattcagaaacaattgacgcggaaggcttaaccaaagtgcttgaagcaggacttgaagggattgaaaaacgcggtaaatcccatgctggcgagaaaacaatgattgatgtttgggaaccggttgtaaatgcgattcatcaggaagatttaacagatgatgttgttgatgccgctttacaaaaaacaaaagatttaaaagctactaaaggtcgcgcgagttatcttggtgagcggtcaattggtcaccttgaccctggcgcttactcttctgccctgctatttcacgcaatgcttcaaacggaggtgagctaacccatggctaaaccttatggcgttgttatcatttctcattccaaagatgtggcaaaaggcgtccatgatattattaaagaaattgccccagacgtctctatcacgcatgccggtggaacagaagacggtcgcattggcacaagttttgatgccgtaaatgaaccgattgaaagtaacgaaggtaataaagtctacactttctacgacctgcgaagcgccaaaatgaatatagaaacagggcaagaaatcagcgaaaaagaaattattctctttaatgcaccaattctacaaggtgcttacgctactgctgctcaagtggaaatggatgaaaaaccagaagtcatcgcggcccatgttaagacactcgaaattaaataactgaaaaaaatccctttagatgcactctggctagagggacttcgttattgaatggtctgatgatgtaaaacaatgccccatggctaaaagctgggatccgaaaccatgaatgttgcgatcaaaatgcgcgaactacccatcgaaccatagtgaaaaagacttccaatgattctcacga

SEQ ID NO: 1783 - DNA, 854 bp, Listeria monocytogenes-4B
catctatcgaaaacccacactcccattcacccgttcgaagcaaagcgagttaccggccaaatatgcatgcgagtgaaacgagcatgtaatccttcccgtaaaatgcgccctccacacaacctttcacccagcatcaaaatccttccaccatctatcgaaaacccacactcccattcacccgttcgaagcaaagcgagttacgggccaaatatgcatgcgagtgaaacgaacatgtaatccttcccgtaaaatgcgccctccacacaaaaacttccaacccattaaaatccgtccaccatccatttgaacccctccatcccattcggctcgttcgaagcaaaacgaattacggcccaaatatgcatgcgagcaaagcgagcatgtaatccttcctgtaaagtgcgtccaccacacaacctttcacccagcatcaaaatccttccaccatctatcgaaaacccacactcccattcacccgttcgaagcaaaacgaattacggcccaaatatgcatgcgagcatgtaattcttcccgaaaaatatatcctccaaacaaatacttttcaatactttcagaataatataaaatcattgcccgatttatatgttatatatatccatctacatccttttaacgtctgtctattgaagaaaaacctagctccatcaacacattcccatcgtaaaacagtactaaaaacaattatgtcgaaaccttgaacctcactctattttaagtaaatcccatcaaaaaaaccatgcttaataaagattcctcatgatattataaccttgcttagaaatgtctttcgagcacagttcggcccgctcaggcaaagactagtgcctacaagc

SEQ ID NO: 1784 - DNA, 1489 bp, Listeria monocytogenes-4B
  misc-feature (1)..(end): n can be any nucleotide a,g,c or t/u
ctgagcgaaccattcaagaaatggctcagtttttgcgaggagagctcggttcggtacacaggcagtgattcttggccctgttcctagcaccatcacgagaattaaaaacaaatatcgctaccagtgcattattaaatataaaatcgaaccaaacttaaaaaaagaactaaaaacactaattacccattatcaaaaagaccaacaaaaaggtttaacaataactattgacgtacagccttacgtactaatgtaaaaggagcaaaccaatgactaaaattatttttatgggaacaccggaattttctgttccggttttaacgcaattagccagcacatatgatgtagttgcagttgtgacacagccagatcgcccagttggacgcaaacgagttttgacaccaccgccagtaaaaaaagctgctttagaactagctattccagtttatcaaccagaaaaattacggacatctagcgaattagaagaactaattgctctagaagccgacctacttgtaacagcagcttacggacaaattttaccaaatagtttgcttgaatcaccaaagcatggtgcgattaatgtgcatgcatctcttttaccagagtatcgcggaggtgctcctgtacactacgcactgcttgacgggaaaacggagacaggcgttacgattatgtatatggtagagaaattggatgctggggatatgattagccagcgtaaaattcccatcacagatgaagataatactggcaccatgtttgataaattgagcaaattaggcgcagaattattaatggacacattacccgactttttagctggaaaaataacggcaatcccacaagaccctgaaaaggtaacctttgcacgtaatatttctagagaacaagaaaaaatcgactggacaaaaccaggacgtactatctttaatcaaattcgaggattgtctccttggccagtggcttatacaacactggaagaaaaaccatttaaaatctgggaagcaacttatgaagaaacaaaagaggacggcgaaccgggtgccattttagcagataaaacaacgcttaaaatcgtagcaggcgacggcacgctcatcgtaccaacagtaatccaaccagcaggaaaaccgaagatggatgttcactcattcatgaccggagctggcacaaatttaacccacaccaccaggcttggcgccttaatgaacaaactcaccacagttcgcgcgattgcctcccacctcctcatctaaatcgctacttgtctcttatgcccccgctcatccaccgatcgacggctccctccacaccctcacctccattccccctgctcacagggtttcccctcctgcctccccccccccgcgcttcctcccctcgtcctccccctcccgccctctcctctccgctgtccgcgttctcccgcctcccgtcacccctccccgcgtgcgccnccacccacacatgccaccatacacacaaaaaa

SEQ ID NO: 1785 - DNA, 637 bp, Listeria monocytogenes-4B
agattactttagctattttagtatttgccttcacattattttttgtgatttggcaaccaagaaaattatcaatcggatggtcagcttgcggaggtgcgctaattgccatattacttggcgtcgtcactttatcagatgtcgcaacagttactggaattgtttggaatgcgacgctcgcttttattgctattataattatttcattgattttagataaaattggcttttttgagtgggcggctttacatatggcgcgattagcaagaggtaatgggttattaatgtttattcttatttctattttgggagctttcgttgctgcgttgtttgctaatgacggggcggcgctaattttgacaccaattgttctagcgatggtgcgagcgctgaattttgatgagaaaaaggtatttccatttattattgctagcggttttatagcagatacgacgtccttgccgctcgtagttagtaatttagtcaatatagtttcggctgattttttcggtattagtttttcgcagtatgcgcttattatgtggattccaacgcttttctctttagttgcgagtattttaatcttatatttttattttcggaaagcattacctaaaaaatatgatatgcgagtgattcg

SEQ ID NO: 1786 - DNA, 1771 bp, Listeria monocytogenes-4B
tttatcaagtattgccacaagttatcgaattcttcggtaaaggtgcatttttaaagaaataaaacagaagaaaatatcttatgaaaatagggtatttttttcttgtaattaatgaggataacctttataattgaataagaacgtttgttcgtttcggaggagatgcagttatggatacgagtagaaaaattattcatattgatatggacgctttttatgcatctgtggaacaacgcgaccatcctgagtttcgagggaagccacttattattggtggagaccctaataaacgcggagttgttgcgacttgttcttatgaagcgcgcaaattcggtgtgcattcagctatgcccaccaggcaagctgctaaactttgtccgaacggtatttttattcacggcaatatggctcattatgtagaggtttctaatcaaatccgcgagatcttttccagatatacggatattatcgaaccgctctctttagatgaagcttatctggatgtaactgaaaacaaaaaaggaatgaaatccgccacaatggttgcacgcgagattcagcagacgatttaccaagagcttggtctaactgcttctgccggcgtatcatttaataaatttatcgcaaaaatcgcttctgattttaagaaacctgctggtattacggtagttacaccagaagaagcagaagccttcttagaacaaataccagtcactaaattttatggggtagggaaagtaaccgcagaaaaattgcatcgtttaggaattgaaacgggagcagatttgaagaagtggagcgagtgggaccttattcgcgaattacacaaacatggctatcatttatatcgacatgttcgaggtcgttctaacaacattgtgaatccgcatcgtgatcgcaagtccgttggtaaagaaactacttttgaatttaatgtgttagatagccgagttctcgaacaaagcctcatgcaatttgccaaaaaagtagaagaacggctcattaaactacaaaaacatggtaagacggtagtactaaaactacgctacagtgactttacaaccattactaagcggcttactttaaacgaatataccaatgatgcaagtcaaatttatcaagcggcggcccttcttttaagagaaagctatactggtcaggatagtattcgtttgattgggcttactgtaaccaatttaaaacccgtttattttgaaaatttacgtttagaaggactataaaaaaggctagcacgatttaggtgctagcctttttgattatttcatttccagtaaacgttctttaagttcttgttccattgttacaagttctttctcagccacggcacgtttagcacgggcttcttgttggattttaagcgtttcttgcaaggtttcaattaagctggactgcgtttctttaagtgtttcgatgtctacgatacctctttcgttttcacgcgctgcttccataccgtttgtttttagcactctcggcgccccgccccagaccgcccctccttgttccagcacacttggcgcctagccctgctcccgctccgctccctcgccgcgcctcgcgccgtcgcataccctacctcgttttttaccaatggggactccgacgccctcatcgcccacttcgctcgcttgcccccgcccccgccctttaccccccgccccggccgttggtaccgtcctcgccgcccttcatttggcgctgcccgccgcagtcaccgtgtcacctccccgctcgccccttccgatgcaca

SEQ ID NO: 1787 - DNA, 1841 bp, Listeria monocytogenes-4B
  misc-feature (1)..(end): n can be any nucleotide a,g,c or t/u
aaatagttaatgtttggttgacgcttgatatactagactctaggctttccactaccgcttcttccgatgagattacaaggtctttacgtggtggcgaatagttatacgaatcgccatcatcgccattttccacaaaaagcatttgatctgtataggttctgcccgcttttttatcatgaatcgtgagtgaattgttggcagctagctggatttcataaaattcgttttcgatttttgtcatggtggattgtgttggttcttgctccgctgtttctttttctaaattaaagtagatggtgtcgtagcctagcgccggaagactatttacgtttactagcattgttgctaaaaagactttttctggcaaataaatggatttgctaggatttaggtcgatatgttgatttaagacgtaatcagttaggtctgttttttctaaaatcgtgtattcaagcgtgtttccttgcgtatcttctatctcgaaattatcttctgggatatacgcggtcattttaatcacaccgcttttttcgtatggtagtgggttgaaaacggtaaattggaacggttgtttttgttcgattttttcgctgattaggcgcatgtttaaatcgagtaaattggtcgctaaatccgaagccaatttgtaacgatgtttgacgtcgcggttggttgtatcactattacagccgccaatgctatcatgtgcagcattttcaaacattaacttccaaatttctgcgagttcattgtgcggatagcgatttccaagagagtagctgatggaaagaaccggctctaatacattacttaaaaagttttcgatttcattgtttgcttgttttaaatcagctcgagtagagaaaatcgatttgtgcagccgactatgttttccttctgttagttcaccagcaatgactggcaaattggtcacatctttttctaagtccgcgaaaaatgtttctggtgatgcgatttggtattcccgcgtgctatctaattcattgaatttcgcaactaattctggcaaatttttcctaactggcgcttggtctaagccatttgggaaatagacatttcgcgttgaggccttctcttccagagcaccaatttgatcatccaaataggttttaagttcggcttcgtcgtttccgagaatgttcgcgccgtagtaatagccaaacggaatntgctctgctagcatttccgtcccatcatcaccgcgccagataaattcggtttgttttaagcgattatcggcaactccgcgccaaaacagaaactttgaaatcccaaattctttataaatttgtggcatgttcccgccttgtccgaatgcatccgggacataaccgacagccatgctatgtcccatttcgcgtgcaattctcgtaccatataacaagtttctaacaatcgactcttgtgaaatgactaattggtccgtttgtgtataccatggcccggtaataagccgtttttcagcaatcagtggctctaatcttgttttatcttccgggcagtagcgcaaataatattatctaaagagctttgggcatccattaagtaaaaatggtaatcgtcaaacgcttccaatgtttcaattacttcttttaaatgcttcactaaatagattgttgaacggcttgaagtgaaataccattctctatcccagtgcgaatgcggaattacgtgtactttcgttttagccattttcattaaatcctccaactattatttaatatctatttcatcaaaactaatactttccgagcgcnncgtcgnngcgactcaaggcatgctgctacagttgctancagtcccgctncaaaaagnggcaa

SEQ ID NO: 1788 - DNA, 1159 bp, Listeria monocytogenes-4B
gtgaaaccagtcgcgccttctgtcacatgataatcaatatattgcgacatataagcttcatttgttctcactgctgcttgttctgcaagccccaagtcttgtaagtaaacaaaatcaaactcaagatccccatccactgagacatcataaaaccaaccgcgcgtatgaaaatgcatttgcacactataacgaaacggtccaactacaccgcgatactccacgccattttcgttaaaaccaacttccgcatctctgttaagtagtggataaatttctattttatctcctaaatgcgcgcgtacatatatttgcgacaagcggttttctaatggattttgaatcacttgatttaacataatatctttccattttaaccaagcaagctcaccgctcggataaaatgcggctgataaatccgcttttttaatttcttttaacatcgtcacacatatccacccacttccacttcaaaaacgtctacatcttcactactagtcccaacaaaaactcggtgaagtcccggttcctgcactttttcaagctgctggttatagaatgaaaatgcctcgcttgttaattcaaatctaactgttttttcttcgccagcttgaagcgctactttttcaaaagcttttaattctttgactggtcgtgaaatgctcgctgtcacatcttgtaaataaacttggattacttcttttccagcaatatcactaatatttttaatggttacttccacatgtagtgattcacctagatttagttctttcggaagactgcttgtttttaactcgaattcgctatagctttttccgtaaccaaatggataaaatggttcatttggaatatcaagataatgcgacacatagcgttcgcctttattttccggtgtttgtggtcgtccagtgcgtaaatgattataataaaccggaatttgaccagttgtttgcgggaatgacatggataatttccccgaaggattacttgcaccacttaataaatctgcagtgacacggcctgcttctgtccctgggaaccataattcaagaagagcatcactagattctgctaactctttcacttcgagcggtctaccattaaataatgtaataacaactggttttcctaatgtttggacgaatttcgctaattcatattg

SEQ ID NO: 1789 - DNA, 1723 bp, Listeria monocytogenes-4B
acatgaggcacctaagctctcgagggccaccatgtgctggaaagtaatggcacaaacaggtaatattttctaagcatagaaaggaaaacaatgacagataagaagagcgataatcagacggaaaagacagaagccaaggaaaacaaaggaatgactcggcgtgaaatgctaaaactttctgctgtagctgggaccggtattgccgttggggcaactgggcttggcacgattttaaatgtggtagatcatgtggataaggcgctcactccgaaagaaaaagcggaaacaggtgtaccgttttatgcgacaaatcaagcgggaattattacagcgcaacaaacctattgttacatcgccagttttgatattcaaaccgattcacgtcaaattttgaaagatttattaggaaaatggacaaaatttgcggatttaacggcaagtggcggggttctgcgtgatgtggataatgacatgttaccgtcgaacgataccggggaagcagatgggttaggaatttctaacttcacagtgacactaggttatggtccgactttttttgaaaaagatggcaaagaccgatttggtgtaagggcgaaaaagccgaagtatctagaaaaaattccgcatatggcgcatgatagtttggatgaagcttattctgatggtgatctttgtatccaagtgtgcgctgatgatcagcaagtcgctttccacggaattcgtaatttcatccgtttagcgagcggtgtcgccgtagttcgctggattgaagaaggtttcctgagtgcaccaaaaaacgagacgccacgcaatctatttggctttaaagatggaacagcaaacgttgaccatgactcaaacaaaggctacaaagacgtcgtttgggcagaaaatgatgaaccagaatggatgcgaaacggcagctaccttggctaccgcaaaatccaaatgcttatcgaaatctgggatcgttcatacttgcttgaccaagaagacacattgcggtcggaaaaaagcatctggagcaccgtatcataaaaaacatgaacacgatgaagtcgacccaagcaaactgccagctgattctcacgtgcgcctagccaaagacacgaagcaacaaatgcaccggcgcgcttattcgtacacaaacggtgttgataaaagcacgggaacgattgatgctggattactatttatctgcttcacccaaaatccgtccaaacaatttctgccaatgctaagtatcatgggaaaaatggataaattaaacgaatatactggcccaattggaagcgcgatgtttgcttgccaaggcggacttgctccgggagaaatttttggagaaaaactactggagtctaagggtcgcgagccttagactttttttggataatgaaggtgagtcaatgattagaaggagccgattttagtggaagaatgggatttgctaaatgagaatcgtgaattaactgggaaaacacatatccgcggtgaaaaactagcgcccggagaacttcatttggttggtcacgtatgtatttttaacgaaaaagggcaacttttaatccaaaagcgccaaaaagataaagaagggtgggcgaattattgggatctttctgcggcgggttctgcgctaaaaggcgaaacaaggccgcaagctgctgaacgagaagggcaagaagacctagggattacaattgatttagtaacacccggggcaaat

SEQ ID NO: 1790 - DNA, 705 bp, Listeria monocytogenes-4B
agaagcagaaaatggactggaagcagtgaaaaagtatgatgaagtaaaaccggatatcgtgacactggatattacgatgccagaaatggatggcttagaagcacttgcgcaaattatggccaaagatccatcggcgaaagtaattatgtgctcagcgatggggcaacaaggtatggttgtagacgccattaaaaaaggtgccaaagactttatcgtaaaacctttccaagcggaccgggttttagaggcgttagaaaaagcagctaagtagagaaatggaggtggattgcatgactacaaatatgttagacctgtttatagaagaagcttcagaacatttacaggcgctaaatgataatctgttacagcttgagaaagacccgacgaacggtcagttagtaagtgaaattttccgttcagcacatacatttaaagggatgtccgcaacgatgggcttccaacaggtggctgatttaacgcatgcaatggaaaatgtactagatgaggtacgcaataatcgattggctgtaacagaacatttggtagacattatttttacatgtacatctcatttggaaacaatggttcgctgatatccagcacggcggacaaggcgcggcggatattaccaaaaccgcacctgacttacaggcgctcttacctccccaacaggaaacacatccaacggcccaaaaaacgatcgag

SEQ ID NO: 1791 - DNA, 732 bp, Listeria monocytogenes-4B
aacggatgcgacaccaataataatacctagcatggttagaaaagaccttaatttacttgcctttaattgtttccatgccattttcatgctttggagaacattcatgcttgcgtcgcctcctcatggaataatttaccatcttgaatacggatacttcttgtaccgtatgaggcgattgttggatcatgcgtaatcataacgatggtgtttccagcacgattcaattcttgtaggattcccattacttctttacctgttttcgaatcgagcgcaccagttggctcatctgctagcaaaatttgcggtttgccggcgagtgctcttgcgatagccacacgttgctgttggccaccagaaagttgcgttggtaagtttctacgtttttcaagtaagcctactttttctaaacattcgattgcggctttttctcgtgcagaaacacttagtcctgcataaattagtggtagttccacattttcaaaggcagataattttggaagcaaattaaactgctgaaaaataaagccaatttttttatttctgatttcggatagtttattatcgctcagtttaaaaacatctacatcatcaaggtgatagctgccttcatccggaacatccaaacaaccaatcatattcattaaagtggatttaccggaaccggacggaccaacgatggataaaaactcgccttgctcaacggtaaaagctttccaagcacacggatcgcaa

SEQ ID NO: 1792 - DNA, 1421 bp, Listeria monocytogenes-4B
tctggtttatgtggacgattaatgtgttgcttgaaatatgagaacgatgaatatgagcaagctaaacgtgaaatgccagatgttggtgtaaaagtaaaaactccagaaggcatagaagcacgtgtttcgggaatcaacttgctgtctagaatcctacaagtgagtttgcccgaagaagagacggttatagaatacgagttggatgagttacgtccatataacgaatttctaaaacaaccggcaaagtcttgaggtgaaaaaattggataaaaaagctatttttgactcagtcagtaatatggaggagcaaattggcgaattgtatcagcaacttggagatctaaagacaaacttaggcgaaatgttggaagaaaataaccgattaaaccttgaaaacgaacatttgcgacgcagactttctttgacggatgaagcgacaccagaacctaaagccgaaatagaggcggaacacggtgtgatggcgcctaatcgtaaggaagcaatgcagcaaatgattgaacttggggaaggttatgacaatcttgtccaactttacaaggaaggatttcatgtttgcaatgtacatttcggcagcccgcgtggtaatgatgaagattgtttattttgcttatccttgctcaataaaaaataacatgacgggcctttctcaattcaagagaagggctttttgctagaaaaggtgaatcatttggaaaaactcgaattaattggtgatgaaagactagattatttactagcagaaaatttgcggattattcaaagcccatcggtattttctttctctatagacgcggttctcctcgctaaatttagttatttaccaatccgtaaagggaaaataattgatttgtgtagcggaaatgggattattcctttactacttagtacgcgaacaaaagcgaaaatagttggtgttgaaattcaagaacgtctggcagatatggcgaaaagaagtgttgcttataatcaactggaagaccaaatcgaaataatcgaatatgatttgaaaaaaattacagatcttattccaaaagagcgcgcggacattgttacctgtaatccaccttattttgcaaccccggatacaagtttgaaaaataccaatgaacattttcggattgctcgccatgaagttatgtgtacgctagaggatactattcgtgtagccgcaagccttttaaaacaaggtggaaaagcgaattttgttcatcgtccggaacgattactagacatcattgatataatgagaaaatatcgcttggaaccgaaacgcattcaattcgtgcacccgcgctcagatagagaagcgaatacggtgcttgtagaaggaatcaaagacgggaaacctggcgtgaaatatgttccacctgttatcgtatatgatgagctaggggaatatc

SEQ ID NO: 1793 - DNA, 1480 bp, Listeria monocytogenes-4B
  misc-feature (1)..(end): n can be any nucleotide a,g,c or t/u
tcgtttggccagttgattcatcacggtcgcttgcaagtttttgtgtcaaaatcgtttgtgctttcattttatcacgtaagcggtcgatttgcttgtatacttgctgcacttctaaaaagttctcgtcttcttcactcgtaatctttttctccaaatcgccttgtccgagcagccgaatcgagaagtcaattgattcaaatttttgtttaacaaaatacccgagcaaaccgcctataattaaaccaatcgaaatggctgtaagcggaacgaaaaccacaaagggaatgtaaaagattttttgttcgatgagaattttataccaagaaccttcactaaaaaaatagtaaccgaccgtaccgatggctgtagcaacaagtagtaaccctgagcaaacagccatcatcagtttcgaaaaactcatagtctaatcacctctaaatctccgaagattacagaagtcatgattttcacttttcgtgcggaactttcgtaattatctgagtagaccttgatgctattattttgaatagaggtgctttctttatcatattggatgtttccgaaaattgcggaatgttcaatgcaaataccgatatcaaatggaacaagtacccgaatttttcctgagacactacgaatcataatgacactttcgccagttggtaagaccgtgttccctaaatcaagaatcgtatcaccaatccctgtttgaatattgatgtcatcccattcatacactacatcaagtatacgctggttaccgaaccactgattacgaataaacttatccgtacggtcaatcttgctgtcaggttctctcgttttgagcatcaataattggggtgcccgcttcctactaatgtagtgaatgatcgcataaatacctgcaacaacaagcccaactttaaacgtggttgtaagtaacacggcgataataaatacgataccaataaataatgagtttcttgcacttttctttgttgcgcttgccttccttgatgtaaagataaaaaatatcccgagtgcaaataaaataagcaactcccactggaacagcatctccaaaccaacgccaacaataatcgcaattaaaaatacaaaaacaaccgagctttccatttttttcaagctgacacacctccttacgttcctcttttgacaaagttatttctcgatttttgctactttgtacatgctgtgttaattatagcgaggatttactgattgaaacaaccgcgctagttggaacatcccctactactttagtccgatgtttcttccgttatttttgtaacgacaccattctcttgagtgattcgtcttgcttttaaaagcgtaccaattgcacgcttgaattgngctctactaataccaaatttggcacgaatggcatctggatctgatttatctccgaatggcatttctccgccaacactttcgcaataagttaaaatcatttccgcgtcatcatttaatactt

SEQ ID NO: 1794 - DNA, 1281 bp, Listeria monocytogenes-4B
  misc-feature (1)..(end): n can be any nucleotide a,g,c or t/u
attaatggcttctttgttgcagcgcttactgtcgttgtcactcgctggatgagccattttagagaaaaatttgtctttatgaattcttcttttctctatgcgattgcgattttcttatttggtatttcgacaggaccgtggggagcgatttgtgccattattctcttttgcttcgcggaacttttgactgttggcttgcaacaaacctttgtttcacagttagctccagaggataaacgggcgatgtacttctctgctgctggacttcgttatacgctgggtaaagtcattgctccacttgcgattacactttcgactttaattggctatactgggacatttactattattggtattttagcgctcattagcgggctcatttattactatatgtattcagaatttgaaaaacagcggcaagtttcctaataaaaaacggctatctactctggatagtcgtttttgtttgattactttttttacgatttatttacgaaacaccgaaaacacctgtcatatcgccattttaaattaccttttcatttcatccatgtttaaataatgcttatatggtgaaaaaagtctatactgttagttgtacacctagaatttactcgctatttttaatagaaagttaggtgtgagaatgtttggaacaacaactattggaattgatttaggtactgcgaatattttagtttacagtaaagaaaaaggcattatactgaatgaaccttctgtggtcgcgctaaatgcgaatgatggaacggtacttgcgattggccaggaagcaaaagagatgattggtaaaacgccgacttcgatttctgctgtaagaccaatgaaggacggtgttattgctgattttgatttaacgagcggacttttgcgcgagattatgcgccggatttcagttagtggtgtgagaaagcccaatgtggtcgtttgtaccccaactggtgcaacgtcagtcgagcgtcgcgctatttcagacgcggtaagatcaactggtgctcgttcagtcgttttaattgaagaacctgttgcagctgcaattggtgctgatttacctgtcgctgagcctgtcgctaacgtaattgtagatattggtggcggcacaagtgagattgcgattatttcatacggcggtgtggtttcaagcacttcgattcgcacaggtggcgatcataaggatgaagaaatcattcaatctttccggcgacacgtgcggccgtncaagcaaagacctagtggctacagttccctcccccaagctaagac

SEQ ID NO: 1795 - DNA, 1243 bp, Listeria monocytogenes-4B
  misc-feature (1)..(end): n can be any nucleotide a,g,c or t/u
tgtatcttctataacagaatcgctcgcttgaataagaagtccaccatttacagatgttttctcgaaaccttttacggaaccggcaaacggaacagttaacaagcgaatatttttctttttcgctaaaatggcaaacgcttcttcagagaaacttggcgcaataataatttctaagaaaattttgctggatatgttcggctgttttcgcatccacttctttatttaaggcaacaatccctccaaaaatagacgtttcatccgcttcataagctttcaaataagcttcttcaatattttctccaacaccaacgccgcatggattcatatgttttactgcaaccgcgaccggctctgtaaattcacttgcaattttaagtgctgcatctgcatcccgaatattgttgtaagataactctttaccgtgcaactgtttcgcggaactaattgaattttctaccgtgccaggttctgtataaaaagcggcatcttggtgaggattttcaccataacgcaaaacttgttttcgattgtaagttaatgttactttttctgggaaagtttctccagtgatgttcgttaagtattctgcaattaaagcatcataggccgctgtgtgccgaaaaactttcgcagctagacgttggcgcgtttcaaaagtagttgcgccgtgttcttctagttctgtaagtaccgtatcgtaatccgctgtatcaactacaacagttaccgctgcataatttttcgcagctgagcgtaacatcgaaggtccgccaatatcaatattttcaatcgcttcttctaaagtaacaccagatttttgaatcgtttcttggaaaggatataaatttacaacgactaaatcaattggcttgatatcgtgtgccgcaatagcttccatatgttcagctgtatcgcgtcttgccagtaacccaccatgaattgctggatgaagtgttttcacgcgaccatcaagcatttctggaaattcagttacatcttctattcctgttaccggtacgccagcttgttcaaatgccgcttttgttccacctgtcgaaataatttctactccaagttctactaatttttctgcaaatggcacgatgccgtttttatctgacacactaataagcgctcttttcatgataattaatcgttccctccattttgaattaatcctcgaaatcactttgggataaanatatgtnctacttgatgaatnttncagctaagatctacgtcg

SEQ ID NO: 1796 - DNA, 1637 bp, Listeria monocytogenes-4B
  misc-feature (1)..(end): n can be any nucleotide a,g,c or t/u
gctatcttgggggcacactagcatcgcatgctacttggcgggcgaaactgtgctcggaaagaacaagtatatcatttatgtgttaccgcacgttggccttctggaccacgcgatgaagaagaagtagctaagtttacttgggaaatgaccaatgctctagtagaccgtggcatcaaaatgctcgttattgcatgtaataccggaacagcagcagcattatatgatattcgggaaaaattgtatattcctgtgattggtgtaatccaaccaggttcaagagcagctgtcaaagcaacaagagacatcaaaattggcgtattaggaacacttggtgcagtccaaagcatggcttacccaacagcgctcaaaggactaaaccgccgagtagaagtagattcactggcgtgtccgaaattaggatgcgttgcagaatctggcgagtataaaagcgccattgcaaaaaaagcaggagccgaatcactcttaccactgaagagtaccaagattgatacggcgatcttgggttgaacacattacccacttttaaaaccaattattgagaattttatgggagacggcgttgctgctattaactccggagaagaaactgctagtgaaggtagcgcgttactggattaccataatatatcagatgctacagacgaagaaattgagcaccgtcttttcactacaggctcgacacaaattctcacagatattgcaagagactggttaaatatgccagatatgactgctgaacatattagatagcaaaataagaggtgccgataatgagagttcatgnaagagacagtgatgcattacgagatattgaagtaacgccagattatttaatgcatccagaaggttctgtgctaattgcatcaggcaatacaaangttatctgttctgcgagtgtagacacacaagtgccgccatttatgcgaggagaaggccgcggctggatttctgcagaatactcgatgttaccacgagcaacaaacacccgaaatatccgtgaatcttcaaaaggtaaagttactggcagaacaatggaaattcaacgtttaatcggacgtgcgctccgtgcagttgttgatttagatgcccttggtgaaagaacaatttggctcgattgtgacgttatccaagcagatggaggtactcgtacagcttctatcaccggcgcattcatcgcgatggtcatggcaatcgccaaactagacgaagctgtaccatttgctaaatttcctgtcaaagattttctagcagcaactagcgtaggtgttttagaagagggtggaacagtacttgaccttaactacgtagaagacagcgcagcgcaagtagatatgaatattatcatgactggtagcggcgcctttgtagaactccaaggaactggcgaagaagctacattctcggaaacagaactggctgaactaattgccttaggtaaaaaaggaattagcgaattaatcgaaatccaaaaagaaacactcggagacaaagtcacagcgcggattaaaggagaataaaaaatgagtaaaattattatcgctaccgcaaacaaaggaaaagcaaaagaattcgaaaaaatctttgcgaaatttaatatcgaagtagcaacccttgct

SEQ ID NO: 1797 - DNA, 1387 bp, Listeria monocytogenes-4B
agctgatacgaaaaaagcaatgaaagaagtacttaccgacattcaaaatggtaactttgctaaatcattcattgacgacaataaaaatggttttaaagaattccatagaatgcgcaaagaacaacaaggtcatcaaatcgaaaaagttggtgctgaacttcgtgaaatgatgccgtttgttaaaccacaacattaatacttaattcggattgctaggtgagatttcttgcctagcaaccgtttatcctttttcaatatgagtttaaggaagaacctctttctttcctaaactgatactgaaagcaggaaaaatccaagcttccctatctaatataaaacaagaggtgaaatcgaatgaagaaaatccagttttttgatactacacttagagatggcgaacaaacccctggagttaattttgacgtaaaggagaaaatccagattgccttacaactcgaaaaacttggaatagatgtgattgaagccggctttccgatttcttctcctggagattttgaatgcgttaaggcgattgcaaaagcgattaaacattgttctgtaacagggctagcgcgctgtgttgaaggagatattgaccgtgccgaggaagcgctaaaagacgctgtttctccgcaaatacatatcttccttgcaacgagcgatgtgcatatggaatacaaattaaaaatgagtcgggcggaagttcttgcttccattaaacaccacattagttatgcgagacaaaaatttgatgttgtacagttttcaccagaagatgcaactcggtcagatcgtgcttttctgattgaagcagttcaaacagcgattgatgcaggagcaactgtcatcaacattccagatacggtcggatatacaaaccccaccgaatttgggcaattattccaagatttgcgccgcgaaataaagcaatttgatgatattattttcgcttctcattgccatgatgaccttggtatggcgacagcaaacgcacttgctgcaatcgaaaatggcgcaagacgcgtcgaaggtacgattaatgggattggtgagcgtgctgggaatacggcactggaagaagttgcggtagcgcttcatattcgcaaagatttttatcaagctgaaacaaacattgtattgaatcaatttaaaaattcaagtgatttgattagccgcttgtctggtatgcctgttccacgtaacaaagctgtaattggtggcaatgcttacgcgcatgaatctggtattcatcaagatggtgtcctaaaaaatcctgatacgtatgaaatcatcacccctgcccttgtcggcgtggataaaaactctcttccacttggcaaactttctggcaaacatgccttcaatacgcgcatggaaaaatgggctt

SEQ ID NO: 1798 - DNA, 1633 bp, Listeria monocytogenes-4B
tcgctttactttttaaaacaagcaaactcctgtatatgggtactaaagacaacgcatacattattaggaaaggtaagtgcgcccagatgattgaaaaaagaaataccattagaatggaacaagcgagagagatattatgtaatcaaataacgcatcttccagtagaaaagaaatgtgtgacagagacgttaaaccaagtattacaagaacctattttcgcgccgtttcctgctccctattttaggcgctctggttatgatggctttgcgatttctgaggaggatgacgagaattatcctatcactttgcacgttgtagcagaagttccgtgtggggaaacatacgataaactgctaaaacctggtgaaaccgtccgaataatgactggagcaaaagtgccagataatgcctcgaaaattattatgctcgaacaatcaagagaagcggataacgagcatgaaatcgtacttataaatacacaaaaatctactaacattacagaaatcggtacggagttcgccaaaggagatttgctgttagatcgtggacacattttaaatgccggttcgataagtttactgtcatcctttggaattcaagaagtacaagtcatcagaaagccaaaagtagctattttatccacaggtagtgaacttgttcctgctggaaatccacttccagatggcaaaatttttaatagtaatcaaccattactggagaatttactaaaagtacatcatgccgagatttgcgcggccgaacaattacctgataattatgaggatacgaaaaagcgattactagaattgactcaaatagcagacttgataatcactacaggtggtgtttctataggggactttgactatatggctgatattgcaaaaaaagaggcagaattactttttaataaaattcaaatgcgaccgggcagtccgacaacagggatgtggttggacaacacgcttatcatcgcactttctggtaatccaggggcatgctttacaggtttttacttattcgtagaaccggtattagctaccttaatggggaaagatacaactgagacgaccaaagtgcgtgcaaaaatggcgagcgattacactaaaagtgatggctatgatcgttttttacgaggaacctatcgtttgtctgacgaaggggaatatttggttgagttggtaggaagcgatatgtcaagtgcgttaggaaacctccatttaaccacctgtttatttaaaatccctcgcggtaaagttggaaaattaaaaggagaagaggtctaatcatggctactatcctccaaataatccggctctaaaaatagcgggaagacaactttactaaatgcactaattcaagctactctgaaggaaaactacacaggttctggcgtgatacatgatgggcatgatttttctgttgctcccgcgcgtactcgtctctactagcctcgtgaagcgggcgtcagggtggcgctccgtgcgtcgtcatacccccccccttgtttgctcgtgtccttttctctccgctgcgcgctggggtgccccttctgttagcggatccacagtctcctacgctccgtgccgcttaggtggtggttggatgctggggagccctccattgccctctt

SEQ ID NO: 1799 - DNA, 1946 bp, Listeria monocytogenes-4B
  misc-feature (1)..(end): n can be any nucleotide a,g,c or t/u
cagaactgtgctgcgtaagcgtgatgattgctaaacgtattgaaaaaatgggcgtagatcgcagttatcgcagaaggaacagaagcaggcggacacgtcggcgaaacaacaacaatggcacttttacctcaaatcgtggatgccgttactatcccagtcattggcgcaggtggaattgcagatggtcgcggaatcgtcgtagcgcttgctctattgtgcaaaaggtgtccaaatcggaacacgcttcctagcaaccgacgaatgcccagtacacccggactttaaagcagccgtgattaaagcttccgaccgcgacacaatggttaccggaagaaaagccggtgcccctgttcgctcgattaaaaacaaaatgattaaagaatacatccgtttagaagaagaaaacgccgatcgcgacacgttagaagagctaactttaggttctttacgaaaagcagtacaagaaggcgacacagacaacggctctgtcatggccggtcaaatcgctggcttaattacagaaatcaaaccttgtaaagatgttattgaagagatgatgacagatgctaagaatgtgattgcagggttagaattataaaataaaaacagttattttctgcttaataagtagagataactgtttttttgtagttgcgatgttgtttacaaaggtaaagtcaaaaaatgcactaatttgttctgtagttggctatatttatacacagaggttcacaaaacgctcacaaaaggaaagtagttacgatgctataatagaagggtggaaaactagacatagagaggaatcaccaagatgagagagataaaagtcaacgaagcaacgttccaaaaacatgcctcgaagctagacagcaaaagcgcgggaagctatttgccgttaaaaggtggaaatatggcatactcacgagcgaattctatcaatcagttacggtctgcattaattgatttggtcgatgtggtagaagatttccaagccgtgacaaagcaagatgcgggtagattaaagaaaatgggcatggcctatgcgaaacaagatcaagcgatgggacagaaaataaatcagctggaggtgcgatagatggacagcacgcacacccggttagaacagcaactacaacaagtgaaaaaagcgcaggatgttttacaagataatctggggcagactaagcgcaaacaagtggaacaagaatggttagaagaagatagtcaccaattagaaatggagaaacaaggattattggacttcttgcgaggcggttggcaaggggaggaagcgaatggtttccaccgctatctagaagaacaacaacacgaagaagcgatggcatggcgaaaagatttgtcggaaaaacgtgttcatttggaagaagaagcgcggactactagagcagaaatgcacgatatagagaccaaacaagcctccttgcgaaaggagtggaaccaatgagtcgaatcgacattgcagaactcaatggctttcttcaaggattacgaagcagtaatgctgaggctaaaaagatgatacgcggaattcaacaagcagcaagcaagtatgcgcaagataaaagtttaaaagggcaagcagtatcagcttcccaaagctattttgcttccagttatccctctattgcacaaagtattttagaagctctagaagaaagtgaagaacgtctagcacaatacatacgcgagtttggtagccaagtcgaacagttggccttccgcacgaattgatgcggaaatccttcaagaagcgatggcgaaagtggcgagtttgaagcgaaaagaagaagatttacatcgccaactcactgcaccgaatacgaaaccggatantgcacaagtctacgtagttcaagcaagaagagcgcgcgccccgctactgctgcaagctatcgaaaaagaagaatactagagaggacatgagg

SEQ ID NO: 1800 - DNA, 1151 bp, Listeria monocytogenes-4B
ctctttgggcaactagccgcttgcttgagcggccgacagtgtgctcggaaaattccaaatttttatccaaaaaaagcattttcgcacctcttttcgctttattttaccatgtaacacctcgttactcaaatgtgacaagttcctacttagaaaatccttacctaaacctcgtcaaatactagctattttttcataaaattcctatactataactgtgagaagaaaaggtgattccaaataagtaagccttttcaaaaaaatatccttggaggtataaataatgactaaaggtattaaaatcgcaactattggtggcggatcaagttatacacctgaactaatcgaaggatttattaaacgtcaagacgaattaccagttcgtgaactatggttagtcgacgtagaagctggccgtgaaaaattagaaatcgttgtaatttagcaaaacgtatggtagaaaaagctggcgttgacatggaagtacatttaacactagaccgtgaagaagctttaaaagatgctgatttcgtaacaacacaattacgtgtaggtttactagatgcacgtgtgaaagatgagcgcatcccgaattcatatggcgttgttggtcaagaaacaaacggaccaggcggcatgttcaaaggacttcgcacaatcccagttattttagatatttgtaaagacatggaacgcctttgcccagatgcttggttaatcaactttgctaaccctgcaggaatggtaacagaagcagttcttcgttacagtaaccaaaagaaagttgtcggcttatgtaacggccctatcggcatcgaacgcaatatcgctgaaactcttggcgtagacgtttctgaaatttacgtagaattcgttggtctaaaccacatggtattcgcgaaaactgtttatcataatggcaaagacgtaacaaaagatgttgttttcaaaatgacagaagatgaagctggctcaagccttaaaaacatcaacgcaactggttgggacaaaacgttcttgcgtacactaaacatgattccaatcgactacttgcgctactactggcaaacaaaacaacaactggaagaccaagctcgcgcatacgcagaacatggtactcgtgcagaagttgttaaaaaagtaaaagatgaact

SEQ ID NO: 1801 - DNA, 1629 bp, Listeria monocytogenes-4B
aaggttttggtaaggacttttttcatgtttattatgaaaataattatctgggaattaaaatctttttttctgataattaagcttagataaaattcgaaaggagatgaaggcaatggaccaccatcagggagaggaagtagaagaaccggactcgtattatagtaatcaagctgcaagagtgactaaccttcatctctggcgcacataaacgttattctcagcttgcctagaaagaattggaggcaaggaaaatgaaaaaactacatgtaaaaaagcaaggtaacaatttgctcaaagagtcacaaataggcaaagaaaaagttttggaaaagttaggtgttatggaaacggggctcacaaacgtagaagttacagaaagattagcggaatttggtcccaatcaaactgtggaagaaaagaaagtatcaaatttgcggctctttattcgggcgtttaatgatccgtttatctatattttagcgatgttaatggttgtttcgtatttgacggacgacatggaagcgactgtgattatggcactaatgatacttgcgagcgggatacttggatttattcaaacaagtagagcagaacgggcgagttacgcattaaaaaatatggtgaaaaatagagtcaatgttattcgaaatggctccatggatttgataatgcaagacgcaatcgtacctggagatttaattgaaatttcggcgggggatattatcccagcagatgcgcgagttatttcggctacggatttattaattaatcaatcggcgctcactggagaatcgattcctgctgaaaaatttgtggaagacaaaagtgccaatccagaaatttttgaacgggaaaacctattatttatggggacagatgtgttaagtgggcatggtcgggcagttgttttgcggactggaagctcgacgttctttggttcgttgtccatcgcagctactgaacggcgcggcgatactagttttgataaaggtgttaaatcaatttcgaaattactattttattttatgatggtgatggtaccgattgtatttatgattaatgggcttatgaagggcaattggttagaagcatttctatatgcagtagcgattgctgttggccttacacccgagatgctacctatgattgtcagcacgaacttggcaaaaggtgcaatcaatatgtcgaagaaaaccgtaatcatgaaagaactgagcgccattcaaaatattggtgcaatggacattttgtgtacggataaaactggaacactcacagaagataaactagaacttataaaatacattgatagtgctggcgaaacctcagaacgcgtcttaaaaatggcttatttaaacagttacttccaaactggttggaaaaatgttttagatcatgcagttattgccaaattggatgagagtactgcagcagcttggaaaaaagttggcgagattccattcaattttgatcgtcgccgtttgagcgtagtggtcgaaaataaggcagaaacaaggatgattacaaaaggcgcggtggaagaaacgctcactgtatgcactcataaggaatttggaggtgctgttccgacactatccgaatcgcgaaagagcgaacttcaacacatgt

SEQ ID NO: 1802 - DNA, 980 bp, Listeria monocytogenes-4B
  misc-feature (1)..(end): n can be any nucleotide a,g,c or t/u
acatattaaaaatatccggttattctatggtagaaagcgctatcaacaaacgttttaatttggtaacgttaccaaaaatgaggtggaatagttggacatacaagaatctgtcatcggaattgatctaggtggcactaaaattttaattggcgaagtaacaaaagatggtgaggtgctaaattccaagagttacccaagtaatacggagaatcagaccaaagctaccgaaacattgttaaaggttttagatgattacacgcaaaatattggttttatagcaccaaaacaaacgggtattggtgtaggattagttggtcgtgtgaatcacaagtcaggtgtttggttagagattgaacctggaaaaagcaatccaaccccgctcgcagacattttagaagcaaaaacaggattacctgtaagtctgggcaatgatgttgtttgtgccacaatggccgaaaagcaatttggttggggacaagaaacaaacgattttatttatttaaatgttggtactggtcttgctgctgggtttgtggtggatggacgaatcatacaaggcgggcactttaacgcgggtgaaatcggtcatcatgtagtagatattcatagagaggcactcagaggctaccgtagacgcggctgtgggggccgacttcttccggtacttggcattaaagaagaagcactgagacgtttaaacagctagccgacatccatacttgcaaaagcggaaacagaactaactgcaaaaatggttcttcatgcagcggagcaaagagatgagcttgcagaggaaattattgataatgcaacgtttcagctagctaatttgattatgaatttagtccgtgcaaccgagccctgaccgcgtaagtcttggcggaggcgtgactcaaaatgagcatttccgaggcnagttcgcncgctcagcatncgctaggttactttagccntnnnaagaggncagtctttcatccttc

SEQ ID NO: 1803 - DNA, 1281 bp, Listeria monocytogenes-4B
  misc-feature (1)..(end): n can be any nucleotide a,g,c or t/u
gcgctggaaagttagaatgatggaattaatttgttaaatgattttgcacttgccggtggaacactttcaggcatagagatttttaattttttacttttcgagaatttcgcaagcatggtaacactgactaaagcagcgatgattgcaaggaacattcctgtcgaacttgtcatttcttgggttaaaacgccgccagcctcaaaagctttaccgtcaaccgacattaaatgtgaagatgccggtattaaaacaacataagcagctacagcgataaccccttccgtacgcccttccattccgtatgatttagctaaaaagttcttattaagaatgctgctaaaatcgccataataccgagtgtcgcgtttagacttgaatacctacacccaaataattttctacatttggaatgaatttaagcagaccattttctggttgaagtaacacgttatttacaagcaagaaaaatgcggcaataatcgtaatcggaatcatcgctgcaaagccatcacgaattgccatgatatgcttttgcgatgaaattttttgggcaaaaattgataatccttcaataaatcggctagataaacttctctctgaactcatttttttgtcctcctatgactttcctgttattttgtttaaatctgctacaattgacatccatttgccggcattaccgacccaaacttccttataagttgcattattaaactccggccagtatggttcatcttcatttctaaaagtttccattccgactggtatttctcctgtgatttcgccatttagtacactgtattgctgtgcgtagcgataaccttcgccatgcatcattgattgtccaaacgggttcattccaattacccactgtaactgaccttccgcaatatctaaaagcgacttatctttcaaaatttttccagcaatcgatgcggcttttcctgccgaaagtaaaatagcgttatttcctctaaacgagaaccaaattgggaattttcgcaacgctatctcgtcgtttatttggataccttgctcgaattgtaattggtattcttctatcgcccgttcatctatgagtaaatgttgtaagtggaaacttgcttcgtctaaatactcatcttttttataaagtcctgctggaataagcggatatggtttagtgaaacgtgttacttttttcaaatagtcgccgtacaaatcgaccgcttgtagccactttccagcacatggtggccctcgcacagctctacagtnacttagttcngtccacagtaagcc

SEQ ID NO: 1804 - DNA, 1365 bp, Listeria monocytogenes-4B
agacacatgtaacggctgtggaaggtttggactcggctacaactactacatctggattaatgcccgccagcgacaaaacgaaattaaatggaatcgaagctaatgcagaaaaaaataatgtgactgcaatcgatattgccaattggaataaaaaacaggacgcaattttggtttctgaaaatggctctaatttcaaaataactgtcacaaatgctggtgaactaaaggcaacaaaagtggaataggaaggaggttgcgtatgaagttggatttatggaaatgggaaatgcttcttcaaggtcgagaatttagaaataaaacaaatgacaactggcaaaaattaatggattggtccgattttatttcaacaggtttaagcgcgatttatgtctatgtaaataaagcagatgctactttaaataacaaaattgatactgtggataaggcggtaaatgcaagggtaaatgaattgattagcgggacagagcagttaagtgaagtggtcgacgccagagtggatgcatttggcgcacgcttcccagtactaagagaacgtttaaaccaagaacaggtaatttacaataaaaaaagcacggtgcaatttgacgtgaatactattataaatatggaaaaacaagatattgggctgctaacaagtaaaacaatctcggaagcgcaaaccgtatgttttttaaatatatcaagccttaatgaagacgcggatattgttcttgaaaaaacaggcgagacaagcttctcagaaaatttaacaagtctagtctttgcaaaaattggaacgaatgaacgctaccaaatggagccagttggtgcataaaggaggagtgagcaatgactgaaataaagcgaatgctgcagacaaaagaagataattcaaaagaacaattttatccagagacgcatgttgcggggattgttgggttgacggaatatgtgtcaggccagcttccgacaggcgtggttagtgttaatggtaaggctgggcgcgtgttgctagatgcagaagatgtccacgctgccaaaaagagccacaaccacgaagtcgcaacatacacgacggacggctttatgagttcttttgataaacaaaagattgatcaattagtttcaccagaagctggcgtgacaagcataaatggcaaaacagggattgttgatttattcgcagcggacttagatgcagcagagataaaccacacgcatgcagaagcaactactacagaaagtggttttttggcaaaagaggacaaagaaaaactagacgcgatgcaaataatcgcgctggaaactattaaggaggttatagaatgactaattgtaaatgcgaaacactgctaattattgacg

SEQ ID NO: 1805 - DNA, 581 bp, Listeria monocytogenes-4B
aaaatttagaacaaaactcaatatggaaggagcaatgttctaaacggtttagatatctcgatctaaaatatttttcgtcaagtggtacatatcatcacgatatgcgccagctggtagttttttgatttcacgaagcgctttattcgtatacttgttggcaagtttgattgcctgttcgacacctttatacttagaaataagtgctaaaacttgttcggaagcttcatccgtcatatctagtttttgagaaagaagtggctcgaattcagccaagtgacctttcattgcataaataagtggcagagaataaataccttgtttcatatcatttaaaacgggtttgccaagaccttcatccgtacttgtgtaatccagtacgtcgtcaataatttggaaagccatgccaaggtaatgtccgatgttataacattttgcaactgtcatgcgtgttgctttactgccagttgcgccagagtaacaactaagtgcaaataattgtgctgttttaccagaaatacgcgttaaatattcacgaacagttacattcattttgtagcttgtgcgcatttggtctagttcgc

SEQ ID NO: 1806 - DNA, 1733 bp, Listeria monocytogenes-4B
cttcttggggcacatagatcgctgccctgacgggcgcaactgtgctggaaagcttttgctatcagcgctttttataaatgcagcgaactacggtttaacaagttggcttgcttcttatttgaatgaggttagagggatttctattagcgaagtgagctatattagctctttagctggcctttgtattttaattgcaggagttgtcggtggctatttcattagtcgttttttcaaaggaaaagagccgattattattttcgcattttgtgtgcttggagcgttcgcggtatacggggtgtatttatttgaacaattagcgctatcggttatttgcttgtgtttatgtaatatattcctaatcatggcctttacaacgctaatgggattgccgcacaagttgtttcagcagagccacattgcaacaaaatacgcggctataaactcgggcggagttttaggtggcttttttgcaccgatgattataggggatttggtaaacgcgactaactcttatcaatcggcttttctgttcttggcgttaactttattagcatcgggattgattgttttagcgattaaaaaagaccaataaaataaaaggaggaaaaccagatagctctgttttcctccttttttaattaagctaatccgccattggtgaaaatgacttgaccattcacccagcgtgcaggtccggctaaaaatgctacggtttctgcgatatcttcaggttgtcctaggcgttctaaaggtgtggcttttgctaagttgtcaattgttttatcgtcttttccagtcaaaaataacggagtggcggtcgggccaggtgctactgcattaacggttatatctttcccacgaagctcgcgcgccagaattaatgtgagcgactcaaccccggccttactagcaacgtaggccccgtaagtcggaaaactggttcgcgttaccgaagtggagaaattgataatcgcgccgccatctcgaactctgagggcagcttgcttggaaacgacaaaagtgccccggacattggttcgctgaatcaggtcaaattcatccatatccaaagtagcaatcggacttaatttcataatacctgccgtgttaacgacaacatcaattccaccaaactggctttcaatgaaatcaaatgcacgaatcatctgcgcctcgtcagcaacatcgccgccaacactaatcgcttctccaccagacttcacaatgttttcaacaagcgcctcggctttagccttattacccgaataatgaaccacaactgcaaaattttgttcgaccaatttttggacgactgccttaccaataccgccagaaccccctaaaataaatgcaacacgtttatttgtcataatctattcgctcctttaaattcaaaatggttactttttttaattttagtaactttatagttggaagtatactccttttagttactttgtcaaggatttgtaacttttctgttttcctgtataataaaaagcaaagaatgagttgaatcgaggggttaaaatggcgagactatcacaagaaattattttaaatgtggcagagaaaatgatttacgaaaaaggcatggaaaaaacgacactgtgtgatattgcgggtgatgggaacgtgacacatgcggtactgtataagcattgtggaaatgaataggatgtatgggaaaaatgggcgctgcggaggtgggaggaactggagaggatatggga

SEQ ID NO: 1807 - DNA, 1648 bp, Listeria monocytogenes-4B
cccttcaggcactcccctgctcggcggccgacatgtgctggaaagctaggttatggcgataaaataatagccattcagccagattcattacgagaaatgctactaaatgagcttggttccttgcaaaatcactttttaaaattatcgttataaaaaactccgattccattatcggagtttttttatttggatgaaaacatgaaaaaatttattgacttttttgaacatggagaatatgataatgataatcattttcaattagaaagagaggtgggttgtgtatggggcaaaagcttctaggccgatttatgttgctattaagcgttttagcagtggttttgactgtcaattttagtgaaacctttgctgcagaaaagccgaatattgataaaccggtcaaagcattagagcaaactgaaacggcagtggaagcccttgattatcctaaagcgaaggaagcttttcaagaagataaattatggtggtcagaaaataaacaagttgttaaagaaaaatcatatgacttggcaggacaaattgatcggcaaattgctgaaatatcgcttggaattttaaataatgataaacagcaagcgatggatgggatcacttcacttcataatttgctcaagacctatcaagagggtacatatacggataacgaaggcaatacaaacattactctatcaagctatattgcaaaactgactgcgacaaagaagctgatagatgagaaagaatgggcaaaagcatcaacccaaattcaagacttaaaaacagagtggcttgcggtggaaggtgatgtggtcagtcaatcgcaagcagcttacgataataccgagcgcgatttaatgttgcttgatgcttatattaatgatacttctaaacaagccaaaacagcagatgttctagatgggatgacggaggagttaaaaccttttgcagatgtgacttacacttggttcgatgctgcgctaattccatttcgcgaaggacttgaagcacttttgattatcgcgacacttcttacttatacaaaaagaacgaagacacgcgcggcgaaaagatggattatcggcgggactgcagctggtttggtggttagtttggcgcttggcatggtcgtggcattttggctatcagcgcttgcctttggagataataataatttaattaatggttgggctgggctgattgcgagtattatgatgctctatgtcagctactggttacatcgaaattcagatattactcgttggaataactacatggaaggaaaaagtaatcaagcactctccaatggaaaaatgatttcctttgcatttttagcatttttagcgattttgcgggaaggtttagaaacggttgtttttctaattggcatggttgggcggatgtcgaattttgagctgttaatgggaattttggcgggacttggtgtgttgcttattattgcttttgtgatgttgcgatatagcgtacatatccctgtgaagccattctttatgatttctagcgcgattgtgttttacttatgctttaaatttatggggtcaggaattcacagtttgcaacttgctggagtcattccaacatcagtagaagattactggccatccattccagcgataagtatttacccatcttg

SEQ ID NO: 1808 - DNA, 1226 bp, Listeria monocytogenes-4B
  misc-feature (1)..(end): n can be any nucleotide a,g,c or t/u
tacgtaccgcaacggagtgaagtagatttaactttcccaattaccgtttttgatatggtgttgctcggaacgtatccagcgctcggattaattaagcgtcctggaaaaaaagagaaacaactcgcattagatgcgttagaacaagtagaaatgacaggctttatgaaaagacaaataggagagctatctggcggccaactgcaacgtgtttttatcgcacgagcacttgcccaacatgcggaaattttctttttagatgagccatttgcaggtattgatatgacgagtgaagcgctgattatgcgcctgttaaaaaagctaagagataatgggaaaacgattgtcgtggtccatcatgattttcataaagtggctgcttacttcgacgatatcattttacttaataagaagttagtcgcgcacggtccagtggagcaaacatttacagaagagaaaattcaatttgcttacggtgacgcaccggtggcatttgcgacgggggtgtaatagatgttgtttttagaaggattaatgcagtatagttttttacaaaaggcacttattacttctgtgacagttggcattgtttcaggtgttattggtagttttattattttacgaggtatgtcgcttatgggagatgcgatttctcatgcggtgttaccaggagtagcgatttcttatatgatgggtatgaacttctttattggtgcagctacatttggcattgcagcggcacttggaatcggttttgttaatcaaaaaagtcggataaaaaatgatacagcgattggtattgtgtttagcgcttttttcgcactaggtattattttaatatcctttgcgaaaagtagtacggatttgtatcatattttatttggaaatgtgcttgcggtgcggagttcggatatgtggatgacgattattattgccattatcgtgatttcattagtagccctattttacaaagagtttctagttagttcatttgatccagtgatggcagaagcatatggtctcaatgtgaaattcttgcattacttcttgatgttacttttaacacttgtaacggtttccgctttgcaaacgggtggaatcatattagttgtggcgatgtgattactgccgctgcatcggtagctgantcgttacgttccatatccgaatgactgcttagcttttaatttgatccttctgccacactggggccattataacattttaca

SEQ ID NO: 1809 - DNA, 1409 bp, Listeria monocytogenes-4B
ttgcatgctcgaccgaccgccagtgtgctggaaagtagcttaggattgaatttaagcaaaaaaacatacatatcaacttggagcattttttgcatttatattactagctcaacttattggaggagtaatgatatatgtattctttatctctatagcggttttatgtatggcattatcttttctaggattagtgatctttcctgaacgaattttcactgcttattgtaattttaaagaatttcatatcgaagaatagggagcttaatataaataactattttgtaaagttcctaatggttttctatccaaggattgcagtaattaagaactactttgaatatgacaataacaagcagagaaagaaaaaggcaacacttacatataaattagactcaatccaaaaaataaaaaaacatccatgttaattttcctggtacctccaatctccccacctgctatactaaccccatcctaacaaatggagttgaaaccaatgacaaaaaactttgaaaaactaaaatccctacacgaactacccaccccactaatcctctacaactgctgggacgtcgcttccgccagagcaatccaacaaggcggagcaccagtaatagcgacaagcagttatgcgattgctgagtcacttggcgtagtggacggggagcatttaacttttgatgaaatgttttcagttatttcgcgcatcgccgagaatgtgagtttgccgctaacggtggatatagagactgggtatgctagaaatttggaggaactggctcagaatgtggagcggttgcttgtgattggtgtttgtggtgtgaacttggaagatcagcttattggcgttacaaatccggggttatgcagtactgaggagcaatgtgataaaatcgagacaatcaaagaaacggcggtgaaaatgagcacggaaatttttatcaatgcgcgtatagatgtctttttccaagggcgggatgagacggctgacttggtggaagaagcgattagccgagcgaatgcctataaagaagccggcgcggatgctattttcattccagggctgttatcgccgaatttaattcgcgcatttgttgagaaatcaccacttccggtcaatgtcatgaggatggatgggatgctctcaaacgaggacttacaaaaaatcggtgtgaaaagaatcagttatggaccggttagttttttttaggcttatttaacgcttcacatctgggaaggtgcgccgattttcgaggaggaaagccttgtgtaacgatcagcgggatttgataatatttcatatgttgtgaaaaattcgatttgaagcgttttttgtgaggaacacggatcttgcgcacgtgcggaaactaaaatggttaacaggcttttcctactactatttgatcctttct

SEQ ID NO: 1810 - DNA, 1694 bp, Listeria monocytogenes-4B
acgcgcgggggggagggagagaaagaaggggaggcgagcgggggcggaggaggcggccgggcgggcggccgggggggacgtggaaactgcgaaacgtagggcggggcgggaacagggaggcgcatccgcgggggggggggaggagagagggaggtgagggcggatggcggcacagaagagcggggaacgggcgaagggggaaaagagtgcggcctattgtcgcgcgaagagaggggggtgcgtttcgatggtgcgatagggcagctaggtgtgggaggccgtggatttgccgattaggcgcggataccccattagcggtttgtgtgcagcacaacatatcgttctggggggtgttgttgctgccccatgtataggcggaggatcatgatggtttttcccaattgcgatgatattatttggtggggtcataggcacttccatttccagttcaggtggatcaatatcccctttgattccttttagttcagggacaagcggcttttgtttgataaagtctaaaagagtagcaggtggattcgaaaaaattgtttgtgcagggataattttattttcaggtgttaaaatgccataattaaaatcgccctcatgctgataactcaaccatttcatttaaaaaccttcctttgtgtttatttgacatatatgttgtccatcgaagaaatataaataagctgcatcaacttttttaccacttatcgcttgaatcgcttttgcataaagtttgatttgaatatgatatcgttctttcattattttttcagcagcttcccaattagaatacctaccctctattttatctgttttatagtcaatcaaagtaattgtttcttcttcttcaatcatgctatctacaacaccttggataagtacacgttcgtctatatcaactttttcgtataactcagatacaggaagtaaataactaaatggcacttcacgttttactaaatcttttttctgcaacatagtttttcctaattgcgattcaaaaaagcctagcacttgtttaatattgattgctttaagttgtgcttctgttagtatatccttttcacgcattgtttgtaaaagctgttccaaatcttcctttgtcggttgatgttctaaagaaactgcttgcattagcgtatgcattgccgtgccaatttctgttgcagataatttattttgctgtaaaaatttgggtctgtctaatgaaactttttgaaattcttttaaaagtgtagtatcactccaactatcttgcaaagaaaattgccgcttgagctctgttaccgactgtttagcacgaatctttgtcgcctcttcattttggtactcatagttcatatatcgctgaatttcatccttataagggcttttgacaggtattggttgatgttcttttatattgtccaaccaattaaccgtttctgtcttttccaattcattagttagaaacatttccttggtttttatttcaatctgtagtttcatatctgtcggaagcgtttggatcatttcctcacacaataattctttaaaattagaatgtctaattgtggcgtttcctatccaatccaaataacatttcgctttagctcttgtggatgcaggtaaaatagtctctttttcttttgcaacttgtaaccaattcttacttgttttttcaaaatcaggcaccgttgctgtca

SEQ ID NO: 1811 - DNA, 1298 bp, Listeria monocytogenes-4B
gtggtggggtgggaggtggggggcggccggcggagcgaaacgagggggcgaggggcggatcgggggtcgagggaggacgagggggaggcaagggggacgggggggggaggagcgggggggctgggaggcgaggggggagggtgggcggggagggacagggaccggtccgcgcgcatccgggggggttgcgtcgggcagggagggagggagccattagggagatgctgcgcgtggagcgccgcgcgtggggtgcaggggacatcggggatggtggttcgggggtggggcgaccgaatttcatctgcgatgcatcggcaagatctttccccagtgccttttttggtttctgtcaacattggtcaccggtgtaagttcgcttggagtatttcgtgggttgtttcgttggtataagttaaccaacgcggtagttggtcaagcaacatttccaccgtatcaaagctaaatgctcgcggatggtcgtcacccggttgttcttctgtttttgagtagtcaatcgtacttgattttacacgcgggggtgttcctgttttaaagcgacgtagttcaaaacctagttcttccagatgctctgaaagtttcacagaaggttgttggttgtttggaccgctggaatagcgcagttcgccgacaataatttcgccacgtgagaaagttccggtagtaataacaactgttttcgcgtagtaaattgcgccactgtttgtaataacgcctttacacacgccatcttcaatcactaaacggtcaacaagtccttggcgcaaagtgatattttcttctttttcaattgtgtgtttcatttcgtgttgataatcccatttgtctgcttgagcacgtaatgcgcgaacagcgggacctttacctgtatttagcatccgcatttggatgtacgttttatccgtgttgcgacccatttcgccaccaagagcatcaatttcgcgcacaaccacgccttttgctggccctccaacagaaggattacatggcataaaagcgaccatatctaaatttatcgttaacatcagtgtttttgcgcccattcgaccactggcaagaccagcttctactcccgcatggcctgcaccaacaacgatgacgtcaaaagttcctgcatcataggtttgcattttataaaaacatctcctaaaaaatcattttccaaggcaaaattgattgaacaactgatcgagtaattcatcctggacagaatcaccagtaatttcacctagtaaatcccatgcacgagtcatatcaatctggacaatatccactggcat

SEQ ID NO: 1812 - DNA, 1038 bp, Listeria monocytogenes-4B
gtgatttggcttctgctacgccttgttttaaatcaccagcaccagttgctccgctttcaatgcctgtttggatttgtgcgagtgctgtttgtagttggttaattccttcttgtgttgcgacagtgcctttttgtaaatcgctcactcctgcaacagctttatccaaggcgggctcggattttttgagttctgaacttgctgaatctagtccttttttcacttcccctacgccatcagttgcttgaccaacaccgtcatttacttgtccggcttggtttttaatgtaaatgtcatctacccgttttccggctggacgtgaggcactcataaccatatcgatgccttttaaatgagataaatcatcggaaattttttcaatttgcgcgatgtaatctgtagttcgcatattatcgtcattttcgataaaaatttgtgtcggcgctacttggcctgctccgaaactgtccgatacgatttcaaaaccttttttggaaggatatttgtcactaatttcgtctaatgagttaaatgattctgttcctgtatgcagtaagattggcggcaacgtgatagctgcaacgattaataaagcaatccacggtcttgcaaaagtgaatttaccagcagcgccccaaattttattttctttatggctaatatttttatttaacggccagaataaatgggttccgagtgtgctcataaagaatggtacgagcgtgtacagcgcggcaagtaaaacgacaatcccaacgccgactgctactgcggaacgatataaatcaaattgcacaaaatatagcgaagtaaatgctacgagaacagctacaccactataaatgactgtttttcctgctgtacgatacgttgcatgaacagcttctcgtggattgagaccggcacccatttcttctttaaatcgactcattaagagaatacaatagtctgtcccaattccgaacataatacaaaccataaagatttgcgtgtatgtagagactgggaaattaaagatatcaattaagaatgctaccgtgc

SEQ ID NO: 1813 - DNA, 2357 bp, Listeria monocytogenes-4B
gcggccgcagtgtgctggaaagtcactaatactttaatttcatttcctgccataactgcctcgaaagcctcgcgccagtcatccaaaccgtatactttagtaatcattttatccgtattgattttgccatttgccagtaagtcgagcgctaaaatccaagaagatggtttttgcgaacggctgccgatataagcaatttcacgttggataatggattcttcatcaatcgcatttttcttttcggcaaaaagtcctacttgaacaaaatcgccttttttcttcgttagaggtaatccttgatttacagcgggtactgcgccagaacaatcaaatacgcgttccgctccgtaaccatctgtcatgccaagcacaacttcagccaagtcttcttttaaagtatcgacaatccggtccattccaagctcttttgctagacgtaagcggtcactatctttggtaattcctgccataatcaccgttgccccttgcgctttcacaacttgagctagtaacaaaccaattggacctggtccgaaaacaagtactgtgtcatctggacgaatcgttgttttttcaagcgccgaatgcacacaacatgcaagcggttctgttagtgctgctgcttcgagcgaaatacgttcatcaagcacgtgacaactttcttcgcgagataaaacaaattctgcaaaactaccatttgcttgcgtaccaatgccgcgacgtccgctacataaattgtaatcacgttccttacaataaatacattctccacaagtttcaaaagttgtttcacttgtgacacggtctcccactttgatacttgttacatctggcccaacttctacaacgacaccagaaaattcatgtcccagtgtgacgggagttgttggatttttgtattcacctttaaacgtatggatgtctgatccgcaaataccagtgaatgctactttgatttttactttgtcgccatagacctgtggttcttctacatctcttagctccatttgatcatatccgggatttgtttttactactgctttcaaattaatcgtcacctttctgcggcaatatcatcactttgttataatcatgctctctggaaagaatcatatcaaaagcttctttcgtttcttctagcttataacgatgcgaaattagtggtttcagtttaattcgaccttgtttcacgaattcaatcgacgtacgccactcctgacctggaaatggtgccgagtaagaattccaaaaacctttcagcgtaagttcacgtctaaaaatattttcaaaagcttcctcgtgtaaaagcacatctgcgtaagctattcctagaaaaccaactttaccttttttctttgttacaagaagacattgttcttgcgttattttggaaccagcacactcgagcgctatatctgccccaagaccatttgtataagcaaaaacgcgttcttttaagtcttcattttttggattaatggtgtatttacaaccgaattcccgcgcgtctgctaactttttatcactgatatcaaccgcgataatatcttttactcccgcaagaagtaagcattgtacaaccaagattccgatggttccaattccgaagacaatcaccgtatcgccaagtctcggctgaataccaagtactccgtgcattgatacagcaagtggttcaatcatcgcaccttcttcaaaatcaaggtcgccgatagaaatgacattgtcggctttcatgacgacattttcaacaaatccgccgtgaaaatgtgatcccaccatccggtagttgtcacataatgcaaagtcgcccgctttacaataattacattccatacaaggctcgagcggaatccctgcaacacggtcaccaatagctacgtttgttacttcgctaccaatttccgtaactacacctgcgaattcatgtcccattacagcaggcagtgggtatttccagcgagtctgcattttatgaatatctgatccgcatattccgactgcttttacttcgacacgaacttgatctttcccacaagtcgcttcatcaatttgttctgcttttattacattattctcgtataacacagctgctctcatgaaactatcacctcttatatatcattaagacaaaacttagaaaatagctgcccaagcttgagagaatttaagaataacccagttaaagaagttaccacccatatcaagtgtactaacttgtgttgctcctttagggaattcgtaaacacctttcatcattactgtatgaacaagaccgaagtcagttgccatctttccagcacactgtaggccgctcgaacatgctgtagagtgcccattacgaatttttttaaaaa

SEQ ID NO: 1814 - DNA, 1378 bp, Listeria monocytogenes-4B
gcgtatctaagtcattagtcggctcatccagtaataagacatttggtcgttccatcaaaatgcgaagtaagaataaccgtcgtttttctccacctgataagctaccaattttcttcccgtgggaatttggtgggaataaaaatcgttctaacatcgcactcacactgattacttttccaccagaagttgtgacttgctctcccgcttcttgcaaataagcaatcattcgcatatccgggtccatttcttcattttgttgcgtatagtaaccgatttgtacggtttgacctgtgactacttccccagcatctggtgctagttttccagccaacatgttcagtaaagtcgattttccagttccgttgttccctgtaataccaaggcgttcaccaggttggataatcaagctgaaatcctgcaatacttgtttttcatcaaagcgtttttccaagtttttcagttcgaaaacatcttttccaagacgactagtaacaaaatcaatcgccagttctgagtcatcggtttttgttttcacttttttctctaaatcgtggaaacggtcttgtctggcattttgtttagtggcgcgaccttgaggaccgcgacgcatccatgctagttccttacgataaaggtttttatttttctcagattcacggacttcgttttccatccgaatggctttagattccatgaatttctcgtagttcccaacgtatcgataagccgaaccccggtcgagctccaccatgtgatttttcactcggtcaagaaaataacgatcatgggtaacaagcaagacagcccctttaaagcgatttaaatattcttccaaccaacgaattgactgaaaatccaagtggttggtaggctcgtccaaaatgagtaaatctggcgtctcgattaagacttgcgccaaacctacccgttttcgttgcccaccagaaagctcgcttattttcgcggttaaatctgtaattcctaaacgctccaaaatcgttttcgcttctgtgttcatatcccaagccgcactagcatccatttcttggctggcggctgtataagcatcgtgtaatttggtattttccgcatcaagtgacatcgcaagtaacacttcttcgtacttgcgcattgcccgaagcgccgcagtatccccgtcaaaaacagccgaaagaactgtatcttcttcattaaattcaggatcttgcgccaaataaccaatcgtataatcttttgctttcgtaacagtacctttatccccagattcactaccagaaataatttgcaataacgtcgatttcccggtaccatttacaccgattaaaccaatacgttcgccctctgttatcgttagcgagatattttcaaacaggctttt

SEQ ID NO: 1815 - DNA, 678 bp, Listeria monocytogenes-4B
agaaatggatgctttattatcaatcgtttttgttacatcagaaaggtcaatttctgtgacgaaatcaactacaatttttttgtctgttgtagcataatcgccgataagttgaatataaaaaccagctggtgtcacatctttatcaatcgtataatctttgccttctgttaataagacgctattgatattatctgtataggcacgaacagtgtagctcttaagggcttttacaccagtagaaaattcatctgtgatattaagattccccatcttaattctgtcagagttggcagtgattttccatgtcatcgtgttattaaaatagtcaattgttccagcttcttttttcagtaaatctggttgaatcgcgatcgttgcgtcagcggaaacaccattttcatctgtaatttcatttttaattttacgatcactaaagtccgtgattttcgtggaataagtgatttcatatgcgtttgtgtttgtgtttttatacgttaaattaaaattcccatttgccgagattgctgaagttgtccaatcacttgaagcgtcacctccaacgattggcgatccattcgttgcgttaaaagttactcgtttaattttaagtgaatctgctacatattcgacatcattatccggtaaaacatcggtaagcaatgttgaaggagatatttc

SEQ ID NO: 1816 - DNA, 1477 bp, Listeria monocytogenes-4B
  misc-feature (1)..(end): n can be any nucleotide a,g,c or t/u
aatgcggctgttattactgttgaaagaaaattacgcggtggaatggcaaacgggtcacgagaaatgtttaaaaatgattccaataaagacattatcaatcgatataatttttcgatttatagcaatatgactttatataaaaaatatgaagaaaatgaagttgatagtcattttagtaatacatccattcaaattgtggaagataataaagacttaaatgagctttctataatttataaagcaactatttccgatccatatattgtagaaaataaaaagcgttatttacatttttggaattggaataattttattgatgatggtgcggaaaaacattttcataaggattttccatattggattgatcggaatgtcatcaaaacagaacttcatttgacgacagataaatcaattgatcagcaagaacgctacacacgtcaagaatgtgacatcaaatctaagtatttgaaccatcgtatgacgaagaaaattcacaaaaacggagcttcttgttatttagaatatcgtccatatcacaatctcactattaaagagaaggatttggaagaatatgtggaagctaataaagaaattctcaagagtaactggggtatcggtattgatatcattgaggatggattgtttaagaaattaggtaagttatttaaataaaataaaaaaagcatcctttataaaagggtgctttttttataaatggtcccgactggtctcgaaccagcgacccccaccatgtcaaggtgatactctcccaactgagctacaggaccagtaaactcagaaaataagtttagacgtttattttctgaatggattcacgttcaatcatttcggttttaataatagttgtttttggtacatttttatcttgatgaattaggcggaataataagttagtcgctttttttcctagtttattgattggaatgtcgatagaagtaagtggtggtgataggaaagatgacgctactttatcattatagccgatgacggaaaaatctgcagggatttgtaagtttttatcggcggccattttgtaaatgctaaggacctttaaatcgtcggttgcgaaaactgcggttggtttatctgggccttccattaggcgtagtgctgctttgtagctatcttctatactataaccgctatcaataatccagtcgttacgtaaatctaattggtggtcaaacaggcagctgcggaaaccagcaagacgatctatcgacacgtgataatcgagtggagcatggatacaagcgattttttgatgaccttgcttgattaaatgttttgttagagcataactgtcgccaaaattgtcggtgtcaacagagtacaatttttgtaagacttatattttccggtacgagactttccagcaccgttcggccgtcaagcagcctcatagacaacagccntnncaaaaaaaaacncnnnctccctccancnnnccgccccc

SEQ ID NO: 1817 - DNA, 2150 bp, Listeria monocytogenes-4B
aggaatccggtatgtttggcgcgatttcaagtagttctccactagtatctatacccgcaaatccaaaaaccaccgccaaccatattgcgccgagtgaggccgcatggagcccgtcatccgatgaatgcggctcatttccaaggtcaattaaacacgcttcttggaaaaattgataagcttgtgcgcgattaccagttcgattttctacaattgcgtggattgctttacttaaagaagaatcatgaattgttcgtttttcatagtaatccaaattctgcttcacagcatctggcgcaaacatcctcggaaacaggtaaaacaacatgactaaatctgcttgctttaagatttgtagttcgttcacttcttgacgagaataatctagtagaatcccttgtgttccttgtgccgccttatatttatccaaatttatccaatctttttctaagaaagtatcatcttgcggaattaagccagactcatttgcgacaggtaaatagattttttcaagaaaagcttctgcacgggctacaaaatcggcattatctttattccagtctagtgctttttctacattatagtgtgccatataattcgtataagtattattatcgatatgctcggtgtattcgtccggaccaatcacatcaaggatttccagtcgtccattacgattagttgcacggcttagccaaaattccgctgtttcaaggagcagctctgaaccacactctttcataaactgagcatccttagtcgccgtttcatattcacaaaccgcataagcaatatccgcaactaaatgatgctccgaaatcgccgacgctactttttgacgtgtgccagttcgaatattaatcgctgcaaattcaggcgtttcttcttcgccagagaatgcactttcccacggaaaaagcgccccattatagccgtttttcgttgccttttctttcgcttctttcaaatgaaggtagcgatattttaataattgtttggcaatttccggcttattataaaggaaaaatggcataataaaaatttctgtatcccaaaaaacatgccccttgtaaccttctccggtaagtcccttcgcaccaacactacaacgaaaatcatctttcggcgtcataatttctaagtgatagcacgcaaaatctagtgcaaattggtcaaaatcattcgtgctctcaacacggacacccgcatgctcccaaaaatctgcccataaagtttccgaagctcttttcaattctgcataagtcgtatttggaagttccgcatccacttgatccagggatgttttaaccatgcttattttctccaaagtaaatagttgattttcagcgatttcttgctctacttcggtcattaattgtctgtttttcgcagtgaaaatcccttttttattcacttttgttgctattgtaatatgctgtttgctctcgatggtctcatattcgccaaccatcaacttctcatcaaaaattcgtagactcaactccgccagctgctgtgttccaaaattagtttgttgcgcatcaataccagtttttactttgactttcgccgcaccgctcaaaggcattatctccactttagcagcaatgacgttttttgctgcttttgaaacaaatcggtgaaaattcagttgatacttcttgcccgcgctactttcccaagtaatttttcgaattaattctcctgtattcatatctaaataacgctcgtaagcatggactttccccgcttgcatcgaaaaattttccccatcaagcatcacttggaaacgcgtcacatccggcaaattaacaagttccgaactcagcgaaccgctcggacgattataaatccccgccacatacataccgcgaacttgctccggatattcttcttcaagagcaccgcgcacgcccaaatagccatttcccacagtcatttggctaccatatttatttagataatttaatgcaaattccttctcgattattttcttcataaagaaacactctcacctttttctgccgattcgtataaactttcaacaattttttgtatgatataaccttgttcagcgccagcaagttccacttttccagcaccaagaacgctatcaaacaatgctttcatgcctgtttcgtgttaatttctac

SEQ ID NO: 1818 - DNA, 1088 bp, Listeria monocytogenes-4B
acttgatgttgttccaaaatggcaagaatcttatcttctagttcatttttcatctcaaacaccttcctttggttattcagtgcacctttccactcggctcccggctttaaacattcgggcttgttatctctctagccatttgctataaaagagtataaccgttttaactagggggatttaaagtgattcccatcatcgaccataatgattcatttacatataatttataccaatattttttagagcttcaagaggaggtacaggttgtttctgctactaatttttcgcttgaaatatttcaacaactcgttcccgaaatggtagttctatcaccagggccaggttcaccggaagacttccctgtaagtttagctctactagataaaattcaagttcctattctcggcatttgcctcggtcatcaaatgattgctcattttttcggggcaaaagtggtgccggcaaaagtcccggttcacggaaaaacaagtatcatttcgcatactggggaagggttgtttgcagagcttgcaccaaagttccaagtaacgcgctaccattctttagttattgatcctgccacagttcccgctaatttaaaagtaaccgcactgacagaagacggcgttataatgggactagctcacgtatcaaaaccgattcacagcgtccagttccacccagaagcaatcctatctgaaaacggacatgcaatacttgaaaactttatacgattagggagaaatgttaaatgagcttattacgatttgattttgaaggcgacacaaaaatttttgaaaatccactgtatgaactagttacgcatgatttagcagaagttcttcctataatgaaagcagccgaagaagcccaaaaatcaggaaaatacgtcgccggttttgtcagttatgaggccgcgcctgcttttcgaagtaatttaaaaacaaaaaaaccgagcggaaacatgcccctcgtctggtttggcgtatacgataattttaacgatacagctaccgaaacaccagattcctcgccgctctcttttaaaatgaatactagtttccctgaatacgccgagaaaatagagc

SEQ ID NO: 1819 - DNA, 1576 bp, Listeria monocytogenes-4B
aaagtagatattaaaacttacgcttatccaggcttcccaacggacttacaacaaccgttaactgctcttttaacacgtgcggaaggtagtagtgtcatcactgatacaatttatccaagccgttttaaacacattgcggagattgaacgaatgggcggtaagtttaaacttgaaggtcgttcggctgtcataaatggtcctgtgcaacttcaaggttctaaagtgacagcgacagatttacgcgccggtgcagcgcttgtaattgcatcacttttagctgacggagaaactgaaattcacggggtggaacatatcgaacgtggttacagtaagattattgaaaaattatctgctattggcgcaaatattactcgtagtagcgcagcagaaacaaaattataaaaaatgaggctgaacgaatcaagtcgtttcagccttccctctaaatccctccattatcatttattcctaaatactatttattaactcaaaaaggtggtacatatatggctaaactgtccattgcatacttagaaagtttaacaatcaaagagatatatgccttagcaaaagaacacaaaattacttactatagtaaattaacaaaacgagaattgatttttgctttattaaaatcaaacgcagaaaaagaaggatttttcttcatggaaggtgtattagaaattattccaaatgaaggttttggcttcttacgccctatcaactattcatctagttcggaagatatttacatctctgcttcccaaattagacgtttcgagttaagaactggggataaggtttctggaaaagttcgtcctccgaaagaaaatgaacgtcactttggcttactccatgttgaggctgtcaatggagaaaatcctgaagtggctaaagaaagagtgcatttcccaggactaacaccgctttatccagatcgtcaaattcatttagaaacaggcaaaaatcctatttccacaagaacgattgatttgatttcaccaattggttttggtcaacgcggacttattgtagctccaccaaaagcaggtaaaacggtattacttaaagaaattgcgaacgcgattactactaatcatccagagtcagaattgattgtcttgttaattgatgagcgtccggaagaagtaactgatatcgaacgttctgtaaaggccgatgttgtcagttccacatttgatgaggtacctgaaaatcacattaaagtagcagaactggttcttgaacgagcgatgcgtttagtagaacaaaaacgcgatgtggtcattttaatggatagtattacgcgacttgcgagggcctataacctagtgattccgccaagtggtcgaacactttcaggggggattgatcctgctgcattccatagaccgaagcgcttctttggagctgctcgtaatattgaagagggtggaagcttaaccattcttgccacagcattagttgacacgggttctcgaatggacgatgttatttacgaagaattcaaagggacaggcaacatggagttacatcttgatcgccaacttgcagaacgtcgcgtttttcctgctat

SEQ ID NO: 1820 - DNA, 1286 bp, Listeria monocytogenes-4B
atgcgcgcataagaaaggacggaaacaacttgaccgtaaagaaagtaacagatgatattggcaaacaagccgcacttaaaattagaaatgatgtttttgtcgttgagcaacatgttgatccagcattagaatgggatgaattcgatgaaatagattctgttgtaatgtttgttgattatgcagaagatggcacaccgcttgcaaccggtagattccgcgaaaaggatggttatggtaaagtcgaacgcatctgtacccagaaaatagctcgcggcactgggagcggccggagaatcatggaagccattgaatccgaagctaagtctcgtggcttaacaaccttaaaattaggagcccaagtaactgctattcccttctatgaaaaattgggatacgaaacttgctcgggattgttccttgatgctggaattgaacataaagaaatgaaaaaaacattaacataggaaatttaataaaaatagttatttcttttatatagaagaaataactatttttttattagctctatttcgccatttgccttcgcacaaacaattatatccacataatgaagaaataatccatgctccacaatccctggaatttgcgctaatttttcttgccacatttctgcatccctaaaagtttgatttactatatccaaaatatagttcccgttatttgtcacatagatttctcctgaagattgtctccgtaaaattgtttgaacatgctctttttcaagtgttctctcaatttgcttccaaccaaaaggtattacttctataggcaaaggaaacttccctaagtttcttacaagcttctcctcactgacaacccaaatgtttttcagactcgcacttgctaccattttttcacgtaatagtgctcgtcctccaccttttattccttgaaaatccgtatcaatttcatcagcaccatcaatagtaatatctatttccgctacgtcatttagcgatttcaaaggtattcctaaattttgggctagttggcgtgtttcttcagaagttgccacccctgtaatatgcaaaccactatttaccaaatatccaagcttttcaatcgtgtaatagactgtactgcccgttccaaggcccacaaccattccatctttaatccactcacaagccttttctcctgctatcttcttttgattaatcatattccaacctcttttctagcattaccgcattactatatctaatgtttcattagactcgtaccctttccagcacactgtcggcgctcagcatcagaatgactac

SEQ ID NO: 1821 - DNA, 903 bp, Listeria monocytogenes-4B
atctaccggctgcaattaattttttcatgtcttcgccgacttgacctgcccaagcttttttgcctagttccgtcaagataacggttggggaaatcgcattgacattaatgttgtaaggcgcccattccattgctagcacttgtgtcatagaaacaatcgctgctttactcgcacagtaggcaacgtgtttatcaagtgcaataacagaagcttgagaggccatattaacgattttaccgccgccagttgcaatcatttcgcgaccgataatttgcgccattaggaacgaaccttttaagttcagttccattgttttatcccagtactcttctggtaaatcttctgctttttcgagaagtgcgacaccagctgaattggctaaaatatcgatttttggatagacttttttgatttcggcaacgactttttcgatgttttctttcttcgtaatatcgacttgaagtgctagcgttcttgatggattgatttttgctgcgacatcttttacatcttctttaatatcaagcaagacaacataagcgcctttttcggaaaaaagttctgccattgctttaccaatcccgcttgctgccccagttaccacggctactttgtctgtaatgttaaaatctttatcaaaacctttaaaagtcatttttcattacctccaataaattttttatctatttttttggtcgatttcttccattaaatctacttttgcttgggagcgtccgcccgaaaagtcgctatccagccatgtatcaagtagagatacggcaagggatggcccgattactagagctcccatggtcataatatgtgcgtcgttactttttcttgcgcgttctgctgaataagaatcatgaatttgtgctgcgcgaatgccgtgaattatgtttg

SEQ ID NO: 1822 - DNA, 854 bp, Listeria monocytogenes-4B
gccattgtcaaacgcatcattaaccaatttcgccgtgataaacggacgcttgccctaatgtttcttgcgccacttttacttatcacactgctcacttatttattcgaaggtgacacagtgaagccagttgttggtgtaagcgggctttctgactccatggtaaaagaactgaaagcaaatgatttaaccatcaaaacttactcggaaaataccgatgtaacggctaaaattaaagatgccaacctcgacgctttttttaaacaaaacggtgaaaaactcgaagtcacctatgaaaatagtgaaccaagcttgagtaaggaaatcggattaaaactacaaaaagcaatgatgacggagcaacaggcacaagtgaaaaagcaagcgaaagcaaccggtgagtcacttgctaaagctggtattgatccaaacaccattccttcacttacacaaagcccagaaaagctcagcatctcaacaaactacgtatacggagataaaggtactacctttttcgacacaattagcccgattttcattggctttttcgtattctttttcgtatttctgattgccggtatttctttcttgagagaacgaacaacaggcacgcttgaaagacttatggcaaccccaattaaacgtatcgaacttgaattagggtatttaataggttttggtatttttgcgttactacagtctatcttagtcgcagttttctccatccaagtacttggcatgatgcaaaacggctccttattctatgtgatacttattacattaacactcggcatggtttctctagcgctaggaattttactttctactttcgcaataatgaatttcaatcgttcata

SEQ ID NO: 1823 - DNA, 1385 bp, Listeria monocytogenes-4B
  misc-feature (1)..(end): n can be any nucleotide a,g,c or t/u
tgcccttttggacaagccattagttaattacagctgtgcgacggccactatgtgctggaaagcatgtgatgtcagaatatattgatgcaattatgattcggacatttagtcatgaaaaagtagaagaattggcgtatcatgcagaaattccaattattaatggcttaaccgacctgcatcatccatgtcaggcgttagcggatttaatgactatttatgaatggaaagatcagttggtttttgtcaaactagcttatattggtgatggtaacaatgtatgtcattcattgcttttagccggcgctatggtcgggatagatatttgccttgcgatgccaaaagggtatgaggtcgacgaaacaattcttgcaaaggcagaaaatctggcgaagcaaagtggtggcaagattttcgttacagaagatccaaaacttgcagtgactgatgcggactttatttatacggatgtttggacaagtatggggcaagaagatgaaaatgcgaaacgtttggcggattttggcgaaaaatatcaagtaaatgcagaattagttagtggtgccaagcctgattaccacttcttacattgcttaccagcacatcgggaagaagaagtgacagctgaaatcattgatggcaatcactcgtggatttatcaacaagcgggaaatcggctccatgcacaaaaaggattactagcagccatcttggaagnaaaataaaaaagtctggcgtaagtgccagacttttttattataagaaattacgtttcactttatcccagaaagaatttttaggcagtttgataatattgataaaacgatcgcctacttctaaattaacttcatgcacgtgttggatactaagtgcttcgctgtccattccaatcatcgggatttcgttatttccttcttcagacgcaatttcaatacgtagtttgcgttttggactaagaatgaacgaagaaccaagtgtgcggaatttgttattgttaatagaagccagttcacttacttgcatagatggaagaagtgggtccacgatagaaccgttcactgatttattataagcggtacttcctgttggtgtggaaataaccatgccatctccgcggaaagtttcgaagtgagaatcattaatataaagatccatcgtaagcgttctaataatagaagaacgaatgttaaattcatttaatacataaaaagctttggtgttattcactgttccatagatagttggataacgtcttactaaccaacgatcttcaatggctgccttgatgatttcatccaattgattaatatggaagtcacagtattgacctaattgctctgttagcgcaatccctgcatataaacaatcttgacggaagccagtttctc

SEQ ID NO: 1824 - DNA, 1599 bp, Listeria monocytogenes-4B
  misc-feature (1)..(end): n can be any nucleotide a,g,c or t/u
cacagtgtcctggaaagcttaattcttttgctttttatgtagttcttctggcgttcgataggaaaaataaaaaatagtttttgccatgttagttgtccctccagaatccaattttaatcaacaaacttattataacatgacttcagagcaatttctttcatcataagtaaaaaagtgaaatgggacactcttcatgagaaagattgtacaaaataaaagaggctggtattattactttatctaatcagaaaaaggggagaaataaatgaacgctaaaagatggattgcactagggattgtttttgcacttttgatagtcagtgcgttagcaaagtttacatcaagtcaaatcgcttcaaaggaagatagtagtccgacatttgtcgaaagcctattcgcagataccggcgaactaaccgaaacagtaattgaagaaggcgggaatgatacaattgctgtattatctgtagatggcactattcaagatacgggagattcaggttccttatttagtgaggctggctacaatcattctttttttatgcaacaattagaacaagtgagaaatgatgactatatccaaggcgtactgctgtatgttaattcaccaggtggcggtgtcatggaatccgcgcaaattcgtgataaaattttacaaattcaaaaagaacgcaatattccattctatgtttccatggggagtatggcagcatcaggtggatattatatttccgcgccagccgacaaaatttttgcaagtaaagaaacattgaccggctcgcttggcgtcattatgcaagggtatgactatagtgaactcatgaaaaaattaggtgtttcagataataccattaaaagtggcgaatataaagacattatgagcgggacaagaccaatgacggaagacgagaagaagattatgcagtcaatgattgatgattcttataatgagttcgttaaagtagttgcacagggccgtggaatgactgtagaacaagtgcgtaaaattgcagatggtcgcatatacgacggccgccaagcaaaagagaacggattgattgatgaatttggttatcaagaagatgccctagaagctttgaaaaaagaacaagggttagctgatgcgacagtcattcaatatgatacaccagaaaactttagctcgctattctctgtagctgcacaaaaaatctctggtcaaaatgcagatatttcccaactaatcaaattaactggcacacttaaagcgccaagaatgatgtatttatatggagaataatgtgagaggagaggcgcacatggctaatgaaaatgttacttttgaaagtaaacgccaagtctatcattatgaaccaccaattcagaaagaagaagccattcctaaacagtactttgctggcttttggatccggtttttagcttatttagtcgatttagttgtcatcgcagccttgaagggaatcattattaatccgattttccgcgtttctggaatggggatggatgacagtttcttcacattttattggggaatgacaacgattatctttttagcttactntattctgcttactaagtttttcggacaaacgcttggaa

SEQ ID NO: 1825 - DNA, 1225 bp, Listeria monocytogenes-4B
ttcgtcaggcatccacacctgctcgatgggcgacgtgtgctggaaagcactttcattaacattaaacggttatgagattgataataatcttcccggcattgatcgcccggagcaagtggctcaatttttcaaagaagctgatgagtggttgctccaataatttaaaaaggatagctagtttttactagctatcctttttaaatgaaggagtctcattttaaaattcgtcatacttagtgaaatataaacctcatgaaacggtaggtggttgtcagtgaaaaagagtaagacggttcaaattctattagttttttccgttgttgcgttaattttgagcatggttggggtggtatcaatttggtatgggcagaaaaatcatcaaacgaataatgcgaaaaccaccgccaaaaaagagacgacagtaacgaaaaaacaagatacctttaaaataaccgcgctcggtgactcacttacatatggcgttggcgatacagaaggcggcgggtatgtccgagtggtggagaatttctacaaacaaaaagagaaaaatgtcgagaatgtcaatcttgctattagtggggcgaaatcagaccagcttctcaaacaattagatcaaaaagaagtgcaaaaccaaataaaatcagccgatgttattttaatgacgattggcggaaatgatttgtttcgtggcggagaagcactggatgatttcaaaagcaatgcaattaaacaagccgaagcaagctatacgaacaacctgaaacaaatttaccaaacgatacgaaaattaaatccatccgcgcccgtttttcatattgggctgtataatccgtttatgtcattaaaaaatgcgagtgaaatgtcggcagttgcgaatgagtggaacatgcaaagtcaaaatctatcgcaaaacgagaaaaatatcatttatgttccgacttttgatttatttcagcaaaatggggatgcatatttagcgactgataaattccatccaaatcacgccggatatcagtttatcggtaatcgggtgacagaggttatacaaacgggagggggaaaagacgatgacggagctagcacttcaagtaactaatctgcataaaaaatcgggcaacgacgaattatgaaagggattgcttttgaaggaatgcccggagaagtatgtgctttgtttgaccgaatggagctgggaactttacagcgcacgggaggacaggctaag

SEQ ID NO: 1826 - DNA, 1214 bp, Listeria monocytogenes-4B
  misc-feature (1)..(end): n can be any nucleotide a,g,c or t/u
gtgctggaaagtaaaaaataatgtataccaaagaattgcaaaaaaatcttatggtatgtaattattgtggttttcatcatccaattggggcaaaagcacgaatcgatatgctagttgatgaaggctcttttgaagaaattgatgctagtttaacgacagcaaatccacttggttttgaagattatatggatcgtattgagaaagataagcaaaaatctggtttaaatgaagccattgttactggtcatgctacaattgatggtaatccgcttgttattgcagtgatggattctcgttttagaatggcaagtatgggctctgttgtcggtgaaaaaatctttcgtgccgtggaagatgccgataaaacaaataaaccgtttgttattttcactgcttcaggtggcgcgcgtatgcaagaggggatgctttcgcttatgcaaatggcgaaaacctctgctgcatttaaacgatttagcaatcacgggggactgattattacggtaatgacgcacccaactactggtggggtttctgctagttttgcatcccttggagactataactttgcagaaccaggcgcacttattggctttgctggacgccgggtaatagaacaaaccgttcgtgaagaattaccagaagacttccaaacgtcggagtttttattaaagcatggacaactagatgactgtattttacgccttgatctgcaaaataaattaagttttattttaagcattcacgtgaaaacacctgaagtaggaggtgaagcggatggcgaatgagatggaatttgagaaaccgattttagaattaaaaagtaagattgctgacttaaaagagtacaatgaaacttctgatgtggatttgaccaatgaaattgaaaagctagaaaaacgcttagctaagttagaatcaagcatttatagcaatatgactgcttgggataaatttcaagtagctcgccatccagaaagacctacgacacttgattatatttcacttttgttcgaagacttcatggaacttcacggggatcgcgcatttggtgacgatgctgcaattgttggcggtatcgcaactttccacggtatcccagtgacagttattggtcaccaacgtggtaaagatacaaaagataatttacatcgtaattntggtatgcctcatcctgaaggtttncgtaaagcgctacgtttgatgaaacaagcaga

SEQ ID NO: 1827 - DNA, 872 bp, Listeria monocytogenes-4B
aaccaatttgttgcgtatctggaacagataggaataaagagccataaaaaagaaaataaaagcaaatcgcaatcacgccattcgcgcctacacgactatctttcataatttccagcattcgctctcttttccgagaagaaaaaagtccatccgccgtatccgccagtgcatcaacatgaaaaccgccagtaatgataatttctgcaaaaagccccgcaataatcgcaactggtaagggcatcaaaagcgccaccaaagtaaaaatgagccaattccaagcgccaataatcaccccgacaaacggcagcaaagcactcccttttttcaagttgatttcatccatatttatttggacaggtaacggaattcgcgtaaagaattgaattaataaaatcaatgttttcatattacttccaccttttcggaatgccactcacgacaaaatagacttcttctacttccgttgcaatttgctgattaatacgaccaataatgtctcgaaagacgcgtgttaacttgttttcaggtacaacccctaatccgatttcgttcgtaacaaaaataaatttggctgaggattgctctcctgcttttaaaattgcgcgaacttccgattgaattcccgcttctacttcatcagcaatctcatttgtcaactcgcgctcaccaagcaacgaaaaaaacaaattagttactaacatcgttacgcaatcaagcattattacatcatatttatttccatttcgctccaaataagcagcaatccctttaaatgcttcaaaagtatcccagtgttctggacgcgttgcttgatgtttttttatcctagcttgaaactctgtatcattttgaaatgcaattccggtcgccac

SEQ ID NO: 1828 - DNA, 1400 bp, Listeria monocytogenes-4B
  misc-feature (1)..(end): n can be any nucleotide a,g,c or t/u
gaactttacggaaagtataaagcaaagttatcctatgataccattcactcgctaaaagataaagaaccaggaaaacttgttcttgttacggcgattaacccaacgcctgctggtgaagggaaatcgacagtgacagttggtcttggcgacgcactgtctaaaaaagataagaaaaccgttattgcacttcgcgaaccatcgctcggacctaccatgggtattaagggcggggcaacaggtggcggatacgcgcaggttattccaatggaagatattaatttacattttactggtgatttccacgcgattacagcagcaaacaatgctttatcggcatttattgataaccatatgcaacaagggaatgacctagatattgacggccgaagaatcgtttggaaacgtgtggttgatttgaacgaccgtgcacttcgaaaagtggttgttggtcttggaggtcctattcaaggggttccacgtgaagacggttttgatattacggttgcttctgaaattatggcgatcatttgtttagcaagtgatttaaaagatttaaagaaacgtttaagtgaaatcgtgatcggttataactataaaaaagaaccaattacagttggcgaaatgggctacgaaggcgctctaaccttactattaaaagatgctntaaaacctaatttggtgcaaacattagaacatacacctgccatcgtacacggtggaccttttgctaatattgctcacggatgtaatagtgtttctgcgacaagcacagcacttcgactaggtgagtatgtagtgacagaggctggatttggtgcagaccttggtgccgagaaatttttagatattaaagttcctgcccttggaaaagcgccagattgcgttgttattgtagcaacgattcgcgcactgaaaatgcacggtggcgctttgaaaaccgagcttagcgaagaaaatgtggatgcgctagctaaaggttttactaatttacaaaaacatacggaatctattcaaacatttggtattccttatgttgtagccattaataaattcattaccgattctgacgcagaagtagcgaaattagaagcactttgcgaagaacacggcattcctttctctctgacagaagtttgggaaaaaggcggcgacggtggccttgaactcgcggataaagtcattgcggctgttgaaagtggagaagcggactacaaacgcatttatgatgatgcgtggtcgatagaagaaaaactagaagcgattgtgacgaaggtttacggtggtattggtgtggaactttccagcaaggcgcagaaacaaatcgttgaattcaaaaaatatggttgggaccgctatccgatttgtatggcgaaaacccaatattccttatcggatgaccc

SEQ ID NO: 1829 - DNA, 1519 bp, Listeria monocytogenes-4B
gccacgatgcggacttagttgttgtaactgccgggactgcacaaaaacctggtgaaactcgtttagatttagtaaatcgtaatattaaaatcatgaaaggcatcgtggatgaagtaatggctagcggatttgacggtatctttttaatcgcttctaacccagtagatatcttaacttacgctacatggaaattctccggtcttccaaaagaacgtgttatcggttctggaacaagccttgatacagcacgtttccgtatgtcaattgccgactatctaaaagtagatgctcgtaacgtccatggttacatccttggcgaacacggcgatacagaattcccagcatggagccacacaactgtcggcggtcttccaatcactgaatggattagcgaagatgaacaaggtgcaatggatactattttcgtaagtgttcgtgatgcagcttatgaaattattaataaaaaaggcgctacattctacggtgttgctgcagctctagctcgtattacaaaggcaattctaaataacgaaaatgcgatcttaccactttctgtttatctagatggtcattatggtatgaacgacatttatatcggcgctcccgcagtcgttaaccgtcaaggcgttcgccatattgttgaaatgaatttaaacgacaaagaaaaagaacaaatgaaaaactctgcagatacacttaaaaaagttctagacgacgcaatgaaacaaatcgagtaatattctcaaatcctaaaagcatgcgccttcgcatgctttttttgttatacttaatttattcgagaggagtgacgcgtacgattacttttgaccaacttaataccgagctacaagccttagaaaaccccaatacgattaaaatttttcgtaatcacggctgtccggattcattagatctttacggactaaaaattggtgatttaaagaaaattattcgccgagaaaaactgacaaaaaatcacgaactcgccgtagagctgattgaatcaaataatagtgacttgatttatctcggtttgctagcgattaatcccgacaaaataaccacggaacaaatcgaaaaatggaatatcatttttcgcgaaacatggtcacaactaacttttggactagcatcgattgtaagcaaacgtgatgatgcactccttttcgccaaaacgtggattgaaagtgattatgatttaactaaatccatgggctggcagatttatagcgaacatattaacaatttgcctgaagcagaggcattacttcaacgcgcgaaagaaacgctgcaaacagaaaccaatagaacccgctattcaatgaacggttttattatcacttgtggaatttacaaagacgatttgcacgaaaaagcaatggaagctgcgaaatcagtcgggaaagttcatgtaaaccttggaaatacagcgtgtaaagttccggatgctatttcttatatagaaaaagcgagaaatcgtacgaaataaccggatatcctttgactagaaaaagtagta

SEQ ID NO: 1830 - DNA, 1465 bp, Listeria monocytogenes-4B
gaattcaaaagaaacaccacggccaattagcgcaagtaataagaatactagcggaatataataaccactaaacatggttgcataccagttagggaaagcggcgaaaatcgcgcccccagcagttagtaaccaaacttcatttgcatcccagaacggtccaatcgtattaacgagcacgcggcgttcaagtgcatttctagccataaatcgtgtagacatcccaacaccaaagtcaaaaccttcaaggaagaagaatccaatgaataagatggcgattaatagaaaccataactcatttagtgacaaagctttcatcccccttatcaaacggatctacggaaatctctgctttttctggtttgtgtccgtctggtccttttttaatttcacgtataaacaagtaaaccaacagaatggctaaaatcgtataaattgtcgagaacgcaattatcgagaacaaaatttgtcctgatgaaacgtttggcgatacggcatcggcggttttcatgtaaccgaagactacccatggttgtcgccctatttctgtcataatccaacccatggagttcgctaggaacgggaagccaatcattggaatcatgaaacgtaaataccattttgcattaacgagttttttcttccaagcaagcacgataccaattaatgcgaataaaatcattaacatacctgcgccaaccatgatacggaagctccaaaatgctgttttaactggtgggatgtagtcaccttcaccatatttttcttcgtattgtttttgcagcgtgttcataccttccacgctaccagttaatgttccgtaagataagaaacttagcgcgtaagggacattgacttcccattcgtttttcttctcttctgggttgatcttggcaatcatcgtccacggagctgggtcggctgtatcttcccatatcccctctgttgctgccattttcattggttgtgttttaaccaagtattgtgcttgtgagtgaccactgaaagccacaccaaagccaccgattaccgccatgaccattgcaatttggaatgatcgtttaaagaaggcgacatcttgttttttgagcatcttatacgcactgacaccagcaatgaaaaaggccccagtggcaaatgccccgaatataacgtgcgggaactccacaagtagttgtccattagtaataagttgcaagaagtcattcatttctgcgcgtccgttcttaaattcaaaaccaaccggatgttgcataaatgagttcgctgctaaaatccagaaactagacataattgttccgattgaaacaagccaaatacatgctaaatgaagttttttgccaagtttgtcccaaccaaaaatccaaagtccgataaacgtagattccataaagaatgcaagtaacgcttcgattgcaagtggtgctccgaatacgtccccaacaaatctagagtaatccgaccagta

SEQ ID NO: 1831 - DNA, 1381 bp, Listeria monocytogenes-4B
tgggcatctacagcatgttcgagcggccgacagtgtgctggaaagttatctgcttctttaatttatccgagttttctaagccgatggattacgaaagattatcaaaactcgatttttcaaatacaaaacacgaagggagtcgagttatattccaaccacccaaagaaacaaatccaaacgcctgaaaaacaaggatggcttcatgctgacaacaaaaaagtatactttcaaaaaacggaagatgaaacaagtggcttgaaaaacaatacgtttttatatcgagtaacagatgacagcgcgccgctcatcgaacttactttatttggtattgggctgttattagttattttttctattagcattaattttgttattagtaggcgttattctaagcggattttaacgattattggcgggatgaaccgggtggaaatggggacccttgatgcaaagcttccggtcgataataacggggatgagctgacgatgattagtgagcggtttaaccatatgacagaaaacctcgatgcttatgtgaagaaggtctatagcctagaaatggaagaacaaaaagcgcggctcaaggcactccaaggtcaaatgcaacctcattttctttataattcactagaagcaattaggatgaacgcacgcgtagaaggagccaaagcgacaagtgatatgatttatcaacttgcaacactactgcgctacacagctaatcaccgtgaaatcaccactttaggtgaagaaatcaattacgtgaaacaatatgtccgctttatggaaatgcgccacgaacagccaattaagctggaaatcaatattgaaaaacgtttcaatcatacgcagattccacggtttgctctgcagccgcttattgaaaactttttcaaatatgcttttaaagaaaatcaaaatccaatagtcgtaattacggtcactgcagaaaatgacaatttacaatttagaattgaagacaatggttcgggaatcgatgcagagaaattaaaagaagtgcaagcaacaattgaaagtaaagatgagacgagccacatcggtctagctaatttaaacaaacgattgcagcttttatatggagaaaattatcgattaacaatcaagagtaaagcaaatgaaggtaccatcattctgtttcaagtacctcaaaatacgggaggagaaaagtaatgctaaaaattgtactagtagacgacgagccccttattctcaaaggtttagaaagtattattccagaatttgagcaatcaattgaaattgttggaacggctaaaaatggcgcaatagccttagagttatttgctaatcaagacgtagatgtccttttgaccgatatagagatgcctgtaatgaatggttt

SEQ ID NO: 1832 - DNA, 1452 bp, Listeria monocytogenes-4B
atgaaacaaatgacaccggctcgacttggtttatggcgtgctggtccacgttacaaaacagaaacaattcttcgtttccgtgcggaccatgccgtagcacaagattccgttttctcttacgtttctgaggatttagtaaaagaaatgaacttcatcccagtgaacactaaatgtcaagataaagatgaatacttaactcgcccagacttaggtcgtgaatttgacaacgaaatggtagaagtgattcgtgcgaatacgacaaaaaacgccaaacttcaaatcgttgttggtgatggacttagctcagcggcaattgaagctaacatcaaagatatcttgccatccattaaacaaggtttgaaaatgtataacttagattttgataacattattttcgttaaacattgtcgtgtaccttctatggaccaaatcggtgaaatcactggcgctgacgtagtttgcttacttgtaggtgaacgtccaggcctagtcactgctgaatccatgagtgcctatattgcttacaaaccaacaattggtatgccagaagctcgtcgtactgttatttctaacatccatagcggcggaactccaccagttgaagcaggagcatacattgctgaattaattcacaatatgcttgagaaaaaatgttctggtattgatttaaaataagctagttagaggaggaaacttcatgaaaaatgataaattacctgcatccgttttaagtgtcaaagttgtatctaacgtagataatggtctatttaaacaactagacttaaaaccgcatcaaagaagccttggtattattacatctgattgtgatgatgtaacttatacagcgcttgacgaagcaacaaaagcagcagaagtagatgttgtttatgcgaaaagtatgtatgctggtgctggaaatgcatccacaaaattcgctggtgaagttatcggtattatcgccggaccaagccctgcggaagtaaaaagtggtctttctgtagcagtagatttcatcgaaaatggcgctagctttgttagtgcaaatgaagatgatagtgttccttacttcgcgcattgtgtttcaagaactggtacattcctttcaaaagaagcgaatgttgcagaaggtgaagcgattgcttacttaatcgcccctccacttgaagctatgtatgcgttagatgcagcactaaaagcagcagacgtaacaatcggagctttctatggcccaccatccgaaacaaacttcggcggagcacttttgactggtagccaatctgcatgtaaagcagcttgtgatgcgttcaaaatggcagtagaaaatgtggctgaaaatccacttcaatattaaggtggtgctaaaaaatgccaaatgaagcgcttggtttaattgaagtcacaggttttcttggtgctgttgttgctgccagacacttgtttaaaagcagcaaa

SEQ ID NO: 1833 - DNA, 1452 bp, Listeria monocytogenes-4B
actcttcatcgctacgccatagtctgtgtagatacgttctgttaatttattgcctttcaactccgcaatatgatgcgctaaaatttggaaaggaagaatcattaggaaaggcgcttggtattcatctaaatctgttggtataactagcgttcggtcatcttcacctttaccaaatttaactgtatacgtgaacggggtgtatttagattcataatcccgtaacaatactaatcgctcggtaactgcactcgccgtctccaagaagaagattctatgttgtggatttacttctaaatacggcccatgcataaacgcttctaaatcaagaccttgtgatggcacgcggacagtttctgagaattttgtttcaaattctttgcatgttccaacagtaggaccatatccaattgctgtgaatttcggtgcagtagcgaattcctcttgccatctttcataaaatgcttctgtttcggcaattgttgctgggattgcatcgattgctcggctaaacgcactgatttcattgttgaacctagtttcatcaatttgtactgttttgtatgcaaaatgaagtcctgtcagcattaatgttagaactgttgctgtaaaaccttttgttacgtagccaactcgttcttttccggagccgatatcaagcgtaatatccgcaaattcagcaatttcactcgttacatcactagttagagcgactactggaacggaagcttcttttttcactcgttctagcgcagaaatggtcgacgtgctttgaccgctttgcgaaatcccgataaccaaatctagatggcttgataatttttcataatataaatggttgaagggttcttcaatcgtaatgcggacatcggctagattttcaatgtaatatttggcgctttgagctgcatttaagcttgatccagttgctaaaattaaccattcttttgcgccattttttacgagtgattctagtttttctgcatttgtttggaaatctgctaaaattactcgacacatttcctcttcttcattaatatacgtcatcattgttggtttcattttaaacttctccattcgttactgtttctgcttctactttcccagcagctttttgttctaaaacatacgcgcggtttgctacgagtacaaatggtaggtaaatcagcgttccaacgataataattgcgatttgaaggatggacgcgcgaatgtctccgcctgtcgcaaggtaacccgaaagcactggtggcgtcacccacggaatcaaaatataagtttggctaatccagccccatgaagttgcgaagtatgccattgcagtcgaagctagaggtgcaataactaatggaataccataaatcgggttgaatacaactggcagtccgaacattagtggttcgctgacgttgaaaatactcggaattaagccgaattttgtgaccatgctgcgaa

SEQ ID NO: 1834 - DNA, 2099 bp, Listeria monocytogenes-4B
  misc-feature (1)..(end): n can be any nucleotide a,g,c or t/u
agatggttagtatttgcaattatatgtttaattatcactggatttttaagcccaaaagcagaagctgcaacagattacggcagcagtttttttactaatgtatcattacaaaatcaaaacggggagcaaacaacgaattttaaggaaaatagtaaagtgcgagtggcgtatgattttgtcattacacagccagttgcaagcggagaaacaatgacgcttactattcctaatcaactaaaattaattaattatggcggattccctcttatggattcgcaaggaaacactattgcaaatgcaaccattgatcaagcaacgggaaccattacattaacttttaccgactatgtaaatacacatacagatttaagtggccgcctcttttataacgcaacttttaacagcaaaaatattcaaacagatcaagtaaatccaatcgcatttccggtgaaaaattcgacccaaacgataaacgcctttattagcaaagttaatactggtggcggtacgggctcaccaacaatcgtttttaaacaagggcgaatggatgataaagacttgagtattttacattggactgttactttaaataatgcgctgacacctattgataatgccgtttacacggatacgcttggctcagggcaaaatctgcttggaagtgcaacaatcaaataccgcgatgccaacaaaaaagtgataactaccaatatccagccaattacgctggatgcagatcgcaattttgaattatctattggcacgttaaataatcaatctgttgtcattacttatgatacgaaaattacgacgaaacaaaaaagctatacgaataaagcaacactatccggtgataacctagatgctgtttcgagaaatgcgacagtgaatgattacggtagcggtggacaaggaacaggaaccccgccagccccaccggttaaagaagaaccaccatttattccgcctgaaaagcaaccgattgaaaaaacagtcgaaacagattttggtccacttgaaatcgttaaagattccgaacaaaatggtaaaattaaagtcatctataaagtgaaagatggcgatacattacctggagtagctaataagtttgatgtctctgttgcagaaattaaagactggaacaatctcacatcggatactttacaagccggtcaaatatttacaactaacgattgaaaaaacactcttatccaaaatcaccattccacctgtgcattttgtgactagcacaacaagcgtagacggtgtcgtaaaagcaacaggggttttacctcatactggggattcgaacccgtttatcccatttgtaacaggggtaagtttagtagcacttggttttacatttggacgtagaaattaacgaaaaaggaagcactcttcttatgaatgagtgcttccttttttattataataagtgccctttttttcgatgcgtcacttgttggtttttagaatgatcatgaaacgatttagagtttttctttggtttctctggaaggtttatggtgattgttttgctctcactagtcccatctgtcattgtcgctgtgattgtcactaaattatttccaggttgcaaattagctaatgcaaattgatggttttcggtgctaccagcaattgattgcgtttgattatttgtttcggtggtaatcgtggcggcttcctctgttacaaacattaattccgcgctattttttgtcgtttcaatataaggattttggatggagtaaggtagaaacatatccattaattcgtttgtggttgcagttgtataagtagttcctgttgcttctttttgcgcgtgggcaatctccggaagccagtttaacgttagtgataaaagcgctattattaatagaatataaccttttttcttcatccttctcacctcttcttgttatattataaaaaagaaatatgaacaaactatgaataaaacatgatagatttaaaaaatcgctaccaatttagctgtttttaacgtaagataaaagaaaaaaggagtagagcaatggaacttgatactttccagcacactgtgcggccgctcaaacagggggtaagtncccaaaggt

SEQ ID NO: 1835 - DNA, 1565 bp, Listeria monocytogenes-4B
  misc-feature (1)..(end): n can be any nucleotide a,g,c or t/u
gtgccctttggacggacttagcaactagtctatggctgagtggccgaactgtgctcgaaagacagctactttcaaaaatggttaagtactaataaatgctccccatcaaggtgaagcaaacttgcaacataaagtaactactatacaagtttttggagaaaaaacagacaaaattacaagggcgggaatttaatctatgaaagaaaaagattggtggaaaaaaagcgtagtgtaccaaanctcccaaagagtttttatgattcgaatggtgatggagttggtgatattcaaggaattatcgagaaattagattatttaaaagagctaggtgtggacgttatctggttgtccccagtatacgattcgcctcaagatgacaatggttacgatattcgcgattatcaaaaaatttacgaagagtatggagatatggcgacttttgatcaattacttcaaggtttacacgaccgcgaaatgaaacttgtaatggatcttgttgttaaccatacttctgatgaacacaagtggtttgaggaatccagaaaatccaaagacaacccgtacagagattactatttctggcgcgaggaaaacgaaatcaataactggggctcgattttcagcggtccagcatgggaattggacgaaaaaacaggtgagtactatttacacctgttctccaaaaaacaacctgatttaaactgggaaaaccctaaattacgccaagatgtatataatatgatgaaattctggctagataaaggcattgatggcttccgcatggacgtaattaattttatttccaaaaatactgatttcccagatggtccagtaccagatggtcaaatttatggcgatgctggcaatgatttttgtaatggaccgcggattcatgagttcttgcaagaaatgaaccaagaagttacttctaaatacgatgtgatgactgttggcgaaatgcctggtgctagtacaaccgacgcgcaaatttacacgaatccagcaaataatgaagtcgatatgatttttacatttgaacatatgaacttagattccgatggcgacaataaatgggatctaaaaccaatctacttaccagatttaaaagaaaatatgtctgaatggcaagtggcgcttcaagaaaacggttggaatagcttatattggaataatcatgaccaaccgcgtatcgtttctcgttttgggaatgacaatcgtttccgtgttcgttcagcgaaaatgcttgcaacttgtttgcatatgatgaaaggaacgccatatatttatcaaggtgaagaaattgggatgacaaatgttcattttgaaacgctagatgattaccgtgatatcgaaacgctaaacatgtacaaagagcgtaaggagcaaggacacaggcatgaaagcatcatgcaggcgatttacacaaaaggccgtgacaatgcgagaacgccgtaccagggggataatagcgagaatgctggcttgacaaccgggacgccttggctgaaaggcacccgggctttgcggaatggaggcggagaaaggccctgaaaacccagatggct

SEQ ID NO: 1836 - DNA, 1136 bp, Listeria monocytogenes-4B
gagaatcaactttaaaccaaacgcaatgattggagcaatgagtaatttgagtactaatgcaatgcctacttttgtaagttcgattcgtctaaacgaaataactgccaactgcattccaaggacaatcataattgttggaatagcagcgtcgccaacaagttttacgcaagtcattaaagcggatggaagtgaaacatgaagtaattgaagcgtaagcccgagtaaagccccgtaagcaatcggcatccgaacaacccgtttcatgaccgttttcattccatttgcatctttacttccttttgcggcaaaataaatcccaatggtactcatagctagttgctgcaacaccattaatacaacagcaatatcaagcccaacagccccaaaaacaagcaagacaacaggtgttccataatttccattattcataaaagcactagccaaaatgagcgcgcaacgatcttgcaagttataaccaagcaaaaaactaattaaactgacaagcaaaatcaaactcagacaaagcgcaaaaatgtaaatcgccaaatatgcataatctatcgttagcgcattggtataaaaagtattaaatgcaagaaacggtgacattaagtaaagcgtgagtttagataagttaggaatatcaaattttaaagtcttttgtccaataaacccaatagcgaagatcccaaaaactggaagtaaaataagtagaaattccatggcgcccctcttttctatgtatattgtagcttattgtaccataaaatgaagtttcagttagacacttttacatgttaccagtttagtatttatcttaatctaacagttattttagaaaattaaatttcaagctggagcgccattataaaatgtataatgaaaacgataaaattagttagtgatggtaggttcacgggaattaattagttttattcatttgaaatgagcaaagttttgtcacaaattagccacttttaagaaaaaaacacattttaaaagtgctttttagagtagtaaacatggtgctttgtcttatataatttagatatcgagttggaaatatagagataacatcaaggaaactttccagcacatgtcggccgctcaagcaggaggtaggtttcccaaaagtg

SEQ ID NO: 1837 - DNA, 937 bp, Listeria monocytogenes-4B
  misc-feature (1)..(end): n can be any nucleotide a,g,c or t/u
aaaagagaacgtggtccgtcagagatttatacagcgcgatgctcactatgtctgcaaatgatgccgcggaaacactgggagatcgtttagacggagctaattttcccaaagaaatgaataaccaggctaaaaaattaggtatgtcgagtaagactacatttgtcagtgctagcggacttgatgttgacggaaaatccgctgtttctaccacaaaggatttatttttgctatcatctaaattaatttccactcatcctgaagtgttagagacaacatccaaatctagtgtcaccactgacaaaggcgccaaacttgaatccaccaatgactcactcggttcgattcaaggcttagatggactaaaaactggatttacagatgaagcaggctattgctttattggaacagctgaacgtggaggaaaacgtgtgatttcgattgtcctagatgcgggaactgcggaaaaacgatttaaagatacagagaagctgatggaggttggatttaaagaaaattaacgaatgaaaagaacctctctttcgctgagaagttcttttttaaatagttcagcatcaactctttaaagcgcatagatacttttccatgtatacatctttatttttagaattatattgcataataaagcgtggatgttccaaaggtatgattgtatcaaaaaaatgatgctcctcatttattttcgataaaaaattaaaattctcgccgctgccaatgcagtaacagaccgaagtatctatcccgcaatctatttggttttgaagtgattctaaaataattggcttcagcgcctcttgtagtttcttattctcataatagcttgcaattaacctcaagccttttgcatcgttccagcacactggcggccggtctagcgatcagcgtcagtaccgttactgacgaactnnntaaaagggag

SEQ ID NO: 1838 - DNA, 1082 bp, Listeria monocytogenes-4B
aggcgagtcataggatagcaataaatatcctgtaaaacaaagttatgcgcatatagatcttcctgttactagcaaacaaattgttaagcaaacgtttaatgtagattcgccgttcaattctatccaaatagcggttctaaaagagccagatgaattttgtaaatatcttttgaaagttgtagataagacaaataagaaggatatttacgatgaagttatagctggatcagattttgtagaagctacaaattaccaaattaatgtaaatgaaaagccaaaaggtaaaactgaatatgttattgaagtctatcaagtggaaaataaaaaccctgaaaaaccattagttttaggtacctatactccagatgcagtagatctttatccgtatggagcactgtatgttaatggtgttaaaaaagagaagcaagatatgggcttcactgtctcacatgttgcttctgaaccaataataccgaaatatgtctccgctatttttgatttgggtgttataattatttttgcaggaacatattatgtgtttagaaggaaaactggagataatagatgacatatattttgaattagggagagtctataaatgaacagtgattcaaataataacatcaataagaatcgagaagcgggaataagtattattattccattatataatgtggaggaagtaatcctggaaacgctcgaaagcatccatgagcaaacatttgacatgtacgaagttttattaattgacgatggttcaacggataaaacaatagaaatggtgacagaatatatatcagataagccaaaatttcagttgcatactcaaccaaatggtggaccagcttcggctaggaattatgggttgcgtcttgcgaatagaatgtatatttgctttgtggacagtgatgatattattccgaactatgcacttcaactaatgtatgacggtgcaatatccactggttcaaaattgattacaggtgcaacgaaacgctttaattcagaaggtgaatggttcattccgatgcatatcttccagcacacgtcgcccatacgacatgctgctagagctctacgag

SEQ ID NO: 1839 - DNA, 1938 bp, Listeria monocytogenes-4B
ataaacgaagaagggtaacgattaagagggggaagggagagggggaaaagggggatataggcggagaataagaaggaagaggatagagaaagaacaggagggaaaagggggagattggaggagtgaagggggacagaaaggaacgaagacgcgaaaataaaagggtggtgcgaacaaaagagaaggggcgaaagaaaaagggagaggaggaaagggggaggagggaggggagaagggattaagagtaattcagcgaagaaaacgtatggagggagaaagcaagacaaaatcatgggaaagagagatcaatgtgtacgggtgcgagatcagtgtaggtgcgtggtgtatgtaatgataggtcttcggggttcaatggtgttaaggagatatagtggcagagatttgctaggccagatcgttgtatgtgggccatcaattgtgtacccacgcccgatccttgtgtgcttggatcaacagaaagaagagacacatataattctccgtacctgattttcgcagaaactcctcaaactatttcccctacttcacttaaagccgcaaagccaatatactctgtgtctttttttggaatgtcataacctaatctttctttatgttccaaaagcccctctactactttaggttctagttcttccagtggcatttcttttattttatattgcatccctaactcctccttcatacaaaaaagcatcactaaaaagtgacgctcagtaaaattattttaaatttgctactcgtccatatccagcaatatattttttccaatagccagatgtgattgtgtcgtattttacgccattattttgcgcattaagcattttgccatttccaacataaatcccaacatgtgcaacacccttaccataattgaagaaaatcaaatcacctttttttagttcttgagctttaattttcttagcagaggcatattgttgcttcgctgtacgaggaatggattttttaactcctttagagtatacatattgtgtgtaacctgaacaatcaaaacagcttgggccagtagcgccaattttgtagcgtttgccaatgtgttttcttgcttcgttatttaatgcggtaaaactttgcgttgttgcaacaggtgctttatatgtagtcacacatttacctgaaacataaccaactttgcctttgtatgtcgttttataccagttgttttttgttttagcagtgaaagtaaccgttgtaccctttttgtaaaaaccgatgactttacctttggtgttgtctgctgcgcgaacatttacatcagccgttgtcgtcattttatatgtagtcgctgctgaagcgttagttgttggtaaaaatagtactgaaaaagaaatcattaaagctataaacgcaaaaaaaatctttcttctcgttgctattattttcaatccacgcaccccttttttatatacacacagcatagcaggtcaatgttacagttgtaatacagggattttaaaacttggcgttattatgtaacagttttgacacagaaacaaaaaacccaagaaactagttcttgggtttgcttttatagatgatttttccgtaaagaaacgggcttatcaaggatttctttcgtaattatcgcttcttgtaatcttccgcgcaatttacgcgcttttttgtgatgactactagtgcttttaatgatgtttttcccttttgccacatccgattctcggcggatttctcttagcattttttgttgtgctgctttttgttcagcaattactttgtcttgttctttattttgtgtgaatgtcccttgtgacactttgcgtttttctggtttcttagtggtttgcgtacggcttgcttggtgcattgaacggcaatttggtctacgttgtggcgcgtgcttatttttctcttctgtgcctgtaccgaccacgcgataga

SEQ ID NO: 1840 - DNA, 1577 bp, Listeria monocytogenes-4B
attcttggaaaaaaggattctgatgaattaacaaaaagtgatggtgataaactcattggtaaaaaaataaccttagtttatgccggaagaaacagtgacacaaaaaatacggttaaaacagaaacaattatatccggtattaccaacccatctaaggaaggttttgctagaggatttgatgtttccacaaaaacaatgaacgactttattaaaacaactggtattgaaaaaccgattttatctgtagatgcattcacaaaaacgacagcagaagcagaagaaatcgtggaaaaatatgaggatgacaaagactgggcgaattattcgattactaacgcgaatgctttcgtagatacatttagccagtttaccgatattattgtgtacttgattgcctttattgcaggtctttcgcttgcagttgctggcgtgatgattgctatcgtgctttatatcggtgtggtggaacgaacaagagaaatcggtgtattccgagcgattggttatcgtaaacgccatattcgcggacttttcatgatggaagcaagttatattattattttagctaatgtgctatcaagtcttgtcgccgtgacaattgcaaaaatagccagtcccattttagaaacgaaaattggctttgaagatatgattcacatttcgttctggaatttccttgttacactcgcaataacaattacaattggctttattttctcgatttatccaagtaataaagcagcaaaattagatgcagcagaagctttaagatcagaatgacccaactaacagaaaagaggaatttaacatgaaaaaaccactaaaaatcagcttaatcgtcgtaggaatcgccgtagtcatatttgcaggagtgatgctatcctaccgttttattaaatcaatggacgttactgaaaatgccgaaataaataaatcagctacaggagatcatgtattactggcaactcaaggtagtaaattcaaagacagtgtaatggaccaagtgaaaaaagacatggaaggcaaaaacgtacatgtttcgattatcgatacaacaaaactagacaaagtaacagcagatgattatgacaaagtagttctattcactacagtgcagtccgatgatatcccagaaaacgtaaccacttttatgaatgataataaagataaaagtatccatattgcggtaacagcagattctggccgctgggatgataaaccgaaagatattgatgcaatttccgaagcatcgaaagcagaaaataaacaagatttcgtggacgatttgacaaaagcaattgtggcggaataagactaacagaaacacccatcctttggtgggtgttttttggaaaataaatccataacagctttctcctttcgtaaccacggttacagacgaaatcacaaaagctatctatactaaagttagattttagataaattagaggagatggtcataatgagcgttttaaacattgaaggagcaaaattatcgtatcagaaagtcggacaaggtcctattcttatttttataccgggagcaaatggaactggagatatctttttaccactgg

SEQ ID NO: 1841 - DNA, 899 bp, Listeria monocytogenes-4B
gtgctggaaaggtccataccctcacagctgaaggcattaaaacaaatgttacgcttattttcactgtttcccaaggattaatggctgcaaaagctggcgcgacttatattagcccgttcttaggaaggctagatgatattggtacagacggaatgattttaattaaaaacttgaaaaaagtgcttgataattatggtctaaaagcagaaatcatttcagcaagtatccgccatatcgggcatttagaagaagccgctgaagccggagcacatatcgcgactatcccaggaagccttttcccgaaactttggtctcatcctttgactgataaaggtattgaaggatttttaaaagattgggaagcgttcagtcagaaagaaggcaattaatatgagcagaattgatgaacaaatggttaactcgattcgcgtattatcaatggatatgattgaaaaagcgaactccggccatcccggtttgccgatgggagccgcaccaatggctttctcgctttggaaaaatcatttaaaattcaatccagaacacccaacttggtttaaccgcgatcgcttcgttttgtcagctggtcacggttcggcaatgctttatagtttgctacatctatttggttatgatttaccaatgagcgagctgaaaaacttccgccaaactggtagtaaaacgcccggtcatcctgaattcggtcatacggttggtgtcgatgcaactaccggtccacttggtcaaggtttcgcaatgggagttgggatggcgatggccgaggctcaccttggcgccaaatttaaccaacctgaattcccggttgttgaccataatacctacgtgctatgcggagacggctgtttgatggcacgcatctcctacgaagccgcatccct

SEQ ID NO: 1842 - DNA, 895 bp, Listeria monocytogenes-4B
gttgcaatgtatctggagtagctaattcgttgccatccgcgtcgacatatttcacggtaacaggagcgccgtccgctttttcgtacacataagtgaccgtttggttagcgtttgtgaatacgcccgttgcattggcaggagtcgttttgactgcccaaccagtgatgcttttggctgtagtttgataaggagcatcaattttgccgttcagtgtgtcggaagtagctaattcgttgccatccgcgtcgacatatttcacggtaacaggagcgccatccgctttttcatacacataagtgaccgtttggttagcgtttgtgaatacgcccgttgcattggcaggagtcgttttgaccgtccaaccagtgatgcttttggctgtagattgataaggagcatcaattttgccgttcagtgtgtcggaagtagctaattcgttgccatccacgtcgacatatttcacggtaacaggagcgccgtctgctttttcgtaaacgtaagtgactgttgcatcactatcgccaaattgtcctgaaggctggccttcaatttcttttaatgtgtagttagtaattgttttttctattgtttgataattttctccggatttaccagaaattgtttcacttggagctaattcatcgccattttcatctttgtaaaatacgtttactgttgaatcggattgtgcagatacattaattggttgcgatactttaatagaataactaagtggtactcctttagtggaggtagctgtgaatgttgctttataagtaacagtcttatttccaactggtaagttagtaaaagaaacggttttattatcggtagatactgttccgccatcagaaatgctagaaacacgcattttttcgccatcaatatctaaagt

SEQ ID NO: 1843 - DNA, 1816 bp, Listeria monocytogenes-4B
actgtaggtactttgcagctgctcgggggccgacatgtgctggaaaggttgatctaatgtttcaccacagcaaatgattggtgtcatgccgtgtttgaagattgcatgtgcttttttgttaatatcttcgtctgtttcgtggaaatactcacgacgttcagagtgtccgataataacataagaaacacctaaatcagcaagtgcaaacgggctaatttcgcctgtgaaagcaccttcgtcttcaaaataacagttttgtgcagctacgcgaagattagttccttcagtaagacgaactaattcttgtaaaaatagcgccggtgcagcaactactgattcaacagcatcgcttgatggcacgttattttttacgtcttctgcaaattgtcctgcttttgcagcagttttgttcattttccagttaccagcaataattggtttacgcatttggataaacatcctctcgatattaaaaattatttttggttcagcttatttgtcgctaatagaagcaacgccaggaagctctttaccttcaagatattctaatgatgcaccgccaccagtggaaatatgtgtgaatttgtcagcaaaacctaagtccatagctgctgctgcggaatccccaccaccgatgattgttgttgcatccgttaagtttgcaatagcttcacaaacgccaattgtacctttagcaaagttgctaagttcgaatacgcccattggaccattccatacaactgttttagcgccttgaagttcttttgtaaataagtcaattgtagcttgaccaatatctagtcccatttcatcagctggaatgctatctgcactcactgtatggaaaggagcatcgttactgaattctttagatacaactgcatcaactggcaatactaatttattgccagctttttcaagtaagcctttagcaagttcaactttatctgcttctaaaagagatttaccaatttcttgaccttgagctgccatgaaagtgaaagtcattccgccgccgacaagaactttgtctgcttttgtaagtaagttttcgataacaccgattttgtcagaaacttttgcgccacctaggattgctactagtggacgtgctggattatcaactacaccgccgatgaatttaatttctttttccatcaaaaatccggccgctgattctaagttagaagcgattccaacgttagacgcgtgcgcacggtgagcagtaccgaaagcgtcatttacgaaaacgtcgccaaggctagcccagtattttccaagttctggatcatttttgctttcttttttaccatcaatatcttcaaaacgtgtattttcaaaaagaagtacttcgccgtcttttaactcatcaattgctttctcaagttctggaccacgagtagttggaacgaatttcacttcttttccaagtaattcgcttaaacgagcggctactggacgaagagattttccttctttatcttcttctgtttttacttttccaaggtgagaaaatagaattgctttaccgttttgttctaagatgtactcaattgttggaagtgcagcaacaatacggttgtcgttagtgattttgccgtctttcattggcacgttaaagtcaacacgaactaaaacttttttgtcttttaaatctaaatcagttacaacttttttagccatttagagttcctccattaattttaaaggattggggtcgcccccgttatttcagaaaataagcggaaacaatagtgtctccgcttattcttgttattgctgatgtgactagcacttcagtaaaattaatctgcta

SEQ ID NO: 1844 - DNA, 2466 bp, Listeria monocytogenes-4B
tgcagcaacgtgtagggcttgcgagagcacttgctaacaatccagatattttactcatggatgaagctttctctgcacttgacccacttaacagaaaagatatgcaagatcaattactagatttacaagataaaatgaagaaaacaatcatctttattacccatgatttggatgaggcactacgtattggtgaccacattatgattatgcgtgatggctctgtcgttcaaacaggttccccggaagaaattctggcacatccagcaaatgaatacgttgaaaaattcattgaagatgtggaccgttccaaagtttatacagcgagcaacgtaatgatacgtccagaaatcgttaattttgaaaaagatggtcctcgtgttgcgcttaaacggatgcgtgaggctggaacttccagtgtattcgttgttaaacgtaatcgtgagctggttggtattgtccatgcagcggaagtttctaaactagtaaaagaaaatattacttcactagaaacagctttacatcgtgatgtacctacaactggcctagatacgccacttgcagaaatcatggatactatctcgacaacaacgattccgattgctgtaaccgaagatggaaaattaaaaggaattatcattcgcggatccgttctggccgcactttctggatacgaggtgaacgttaatgcctaatattccaacgattccattagctagttggattgacaaattagtggatggcttaacgcaatttcgaaggattttttaatgtaattacaaatatcattggcgggattgttgatgcattccaatgggtgttcgatttagttccaccgtggttatttattattttacttgtatttggcacattttgggtaaaccgtaaaggcaaaatatggggtttaattatctttgaagttgtcggtttactgttaatttggaacttagatttctggcgtgatatgacacaaacattaacgctcgttctgacaagtagtttaattgcgcttgttattggggttccacttggtatttggatggcgaaaagcaatattgttgaaagtatcttcaaaccggtactcgattttatgcaaactatgccagccttcgtttacttaattcctgccgtagcatttttcggaattggaatggttccaggggttgtggcttctgttattttcgcaatgcctccaactgttcgtatgactaatctaggtattcgccaagtttcaacagagcttgtagaagcagccgattcgttcggttcaacaccttggcaaaaactttggaaagtacagctaccaatggcgaaatcaaccatgatggcgggtattaaccaaagtatcatgttagcactttccatggtcgtaattgcttcaatgatcggtgcaatgggacttggaacacgtgtttacttcgcagtaggacgtaacgacgctggtggcggatttgtagctgggattgcgattgttatcgtagcaatcatcctagaccgtctgacacaagctttcaataaaaaagcgaaatcagaatgaggaggagagtagattgctaaaaaaattaatcaccaccgcagttttggctatgcttattttcactttagcagcctgcggaacaacccttgctccttatgacgcgaaaaaagatttaggcgaacaaatcaattatacaatcacaggaattgatgctggagcaggaattatgcttgcaacacaaaatgcgattaaagattaccatttagatgatgataattggcaattacaaacaagttctaccgcggcgatgacaagtacacttcaaaaagcgatgaaagataagcgcccgattgttgtgactggttggaccccgcactggatgtttacaaaatttgatttgaaatttttggatgatcccaaaaatgtttatggtaatgcagaaaacatccacaccattgtacgtaaaggcttaaaagaagataaaccttccgcttaccaagtgctagataatttcttctggactgcggaagatatgtctgaagtaatgcttgaagttaatgacggtgtagatccagaagaagccgctaaaaaatggattaaaaataatccagaaaaagtagcaaaatggacggatggcgtggaaaaagtagatggcgatgaaatcaagttaacttatgtagcttgggattctgaaattgcctctacaaacgttgtcgcagaagcattaaaacaagttggctacaaaccaacgattcaagcaatggaaattcaaccgatgtgggcgtccgttgctacggatgcagctgatggtatggttgctgaatggcttccaaatacttccgggatctactacaaagattataaaggaaaatttgaagatttaggaccaaacttaaaaggtgctaaaatcggtctagcagttccaaaatacatgacaaacattaattccattgaagatttaaaaacaagcaaataaacgtttaaaaaggcat

SEQ ID NO: 1845 - DNA, 1128 bp, Listeria monocytogenes-4B
tgcaacttgagatgcatgcctgagcggccgccactgtgctggaaagggttggttgtgctggtttttgatgaataatcgcaccaacctcgtgagctacaccattcatgctcaatgcatctgcgcggtttggtgtgattgccatatccaaaatcgcatcatctagtccaagtaaagtgattgcacttacacccgtttccacgtgcgcaggtaatacataaattccttctgcgtatgcttttggtacaactttgctttcaaagccaagttcagccagggagcaaatcattccctctgacacttcgccgcgtagttttgcgcgtttgattttaagtccacctggaagtcttgcgccaactttggctacgattactttttgaccagcggcaacgtttggagctccgcaaatgatttgaacaggttctacctcgtctgtttgaacgagacatttattcaatttctctgcatcggggtggcgttcgcatgataaaacttcgccgactacgacatttttcaaactagcgcttaattcttctacgccttcgatttcaatacctgttcttgtaattgcttcccctagctcttccgccgttaacgggaagtcttggaaaaattctttgacccaattatatgaaactaacattagatttcccccgtttctgtactttggaattgcttcgtaaagcgtaaatcatttgtataaaggtggcgaatatcatccaccgcatatttcaacatcgcaacccgttcaggtcctaagccgaaagcaaaaccgctgtaacgcgtggaatcaattctcgacatttcaagcacgtttggatgtaccattccgcttcctaaaatttcaatccaacctgttcctttacaaacgcggcaccctttaccgccacatttgaaacaagagatatccatttcaacggatggttctgtgaatgggaagaaggatggacgaagacgaatttcacgttcttcaccgaacattgtttttgcgagaacagttaatgttccttttaagtcagcaaacgtgatgttttcgccaacaaccagcccttcaatttgcgaaaattggtgggagtgagttgcatcatcattgtcgcggcggtacactttcactggacagataactttgat

SEQ ID NO: 1846 - DNA, 1769 bp, Listeria monocytogenes-4B
gaagatgtttcacttgtcccttatttggcggacttatatgaggctggattgaaaacatggaaactagatggtgttcttgcagaatcagagaattttgttcaaatcgcatcgctgttagttgaagcgaaagaagctgttatgaaagggcaatttgtcgcagagtattttgtgaataaattaacggaacttcagcctccaacacgaaaactagacgcaggattttatttgaaaaatccggatgatgtgaaatagggggaatagcataaatgagtaaaatattaaaaaaaccagaagtgctagctccggctggcaacttagaaaaattaaaaattgccattcgctatggtgcggatgctgtatatattggtggtcaggcttttggtcttcggtcacgagcaggtaattttagctttgaagaaatgaaagaaggtatcgcttttgcgcatgaacgaaatgcaaaagtgtacgttgcggcaaatatggttgcgcatgctggtgatacagaaggtgctggggaatttttccgaacattacgcgatattggtattgatgcagtgattgtatcggatccagcgctcattagcatttgttttcaagatgcgccagggttaccagtccacttatctacacaagcctcggcaacaaactataagacattagaattttggaagaagcaaggtcttgaacgagttgtacttgctcgtgaagttagcatgcaagaaattcaagaaatcggcgaaaaaacggatgtcgaaatggaagcatttatccatggggcaatgtgtatttcttattctggtcgttgtactttatcaaatcatatggctaatcgtgatgcgaaccgtggcgggtgtgcgcaaagttgtcgctggaaatatgacttgtttgaaattgataatggtgtctcgaaaaatttagtggatactgatgaagaaccgttttcaatgagcgcggttgatttatcaatgattaaatacattccggatatggtaaatgctggtgtggatagtttgaaaatcgaaggacgaatgaagtccattcattatgtttcgactgtcgcaagtgtataccgtcgtgccgtagatgcttactgcgcggacccggaaaattatgtattcgatccagcttgggaagaagaattatggaaagttgcacaacgcgaactatctacaggatttttctataaagaaccaaccgaggacgaacaactatttgggaaaacgcggaaaattcctcaatatgcttttgcggcgcaagtattggaatatgacgagaaaacgaaaatcgctactttacagcaacgaaataattttggtgttggagaagaaattgaattttacgggccaggagatactggatttaagcagattgtagaagtactttggaatgaagatggtgtagaaattgaccgtgctccaaatgcaatgatgaccattaaaatgccggtagataaacctgtgaagccattttactttatgcggaagaaaaaataaaaatctcatgttgcagtaggattgtcgtgtactccctaagtaaggtataatggggtaagtacatatgaaggaggagattaattatgataggatggattattgctatcgaagaatgttgttattttagtattgatttattttggtctatacaacagccttgtaaaataccgtaaccgtgtggatgaaacttgggcgcaaattgacgtacaattaaaacgtagatttgatttaattcctaatttagttgaaacagttaaagggtatgcaaaacatgaa

SEQ ID NO: 1847 - DNA, 1907 bp, Listeria monocytogenes-4B
acgtcacacagtgtgctggaaaggtgataaaggttttgcagacctctgccttaccacttggctatggcgccgcacaatgttcaatttaaaagcggaagacggggttcgaacccgcgacccccaccttggcaaggtgatgttctaccgctgaactacttccgcattaactgggccagctggattcgaaccaacgcatgcgtagtcaaagtccgttgccttaccgcttggctatggcccaacaattatattagacttaaaaacaaaaagggcggatgatgggaatcgaacccacgaatgcctgaaccacaatcaggtgcgttaaccacttcgccacatccgccattattttaatatatggcaggggcagtaggaatcgaacccacactggaggttttggagacctcagttctacctttaaactatgcccctataaaaatggtggaggggagtggattcgaaccaccgaacccgaaggagcggatttacagtccgccgcgtttagccacttcgctacccctccatattaaaaaaagaaaaaagtggcttgggacagaatcgaactgccgacaccttgagcttcaatcaagtgctctaccaactgagctaccaagccataatggcggtcccgacgggatttgaacccgcgatctcctgcgtgacaggcaggcatgttaacccctacaccacggaaccactctattgcgggggcaggatttgaacctacgaccttcgggttatgagcccgacgagctaccagactgctccaccccgcgacaataatattataaaattaatggtggaggttaacgggatcgaaccgctgaccctctgcttgtaaggcagatgctctcccagctgagctaaacctccataattactattttactctaaaaacatgaaaatgtctctagtaagtttaataataaatgacccgtacgggattcgaacccgtgttaccgccgtgaaagggcggtgtcttaaccgcttgaccaacgggcctaagtgaaaatatgatgcattattatgtgtaaacggagagcaagggattcgaacccttgagacagcttacaccgcctacacggtttccaaccgtgctccttcggccactcggacagctctccagaaaatggctccacaggcaggactcgaacctgcgaccgatcggttaacagccgattgctctaccaactgagctactgtggaataataaattgcccggcagcgacctactctcgcagggggaagcccccaactaccattggcgcagagaagcttaactaccgtgttcgggatgggaacgggtgtgaccttctcgccataactaccagacaatatttaagttgttgaaagattgctctctcaaaactagagaagaaagggttcagttaggtaacttcgtttcattttttggttaagtcctcgatcgattagtatttgtccgctccatgtatcgctacacttccactccaaacctatctacctgatcatctttcagggatcttactttccgaagaaatgggaaatctcatcttgaggggggcttaacgcttagatgctttcagcgttcatgcctgccacacatagctacccagcgatgctcctggcggaacaactggtacaccagcggtgcgtccataccgggcctgtcgtactatggacagctcctgtcaaatttggtgcggccgcgacggattgggaccgacctgcctgccgacgttgtggaaggcagtcggggcccggttgatgagtgttcgtgacccctttgtcttgcgctgccccgcgctctcgcctcgcctgtcctcggtcctccccccccccgcgccctttcgctctcctttgccactcgccacggctcccccgcggcacccctttttcttccccccttacttgcctcaattaagccccaa

SEQ ID NO: 1848 - DNA, 1261 bp, Listeria monocytogenes-4B
agtttgaaatacttacccgcgaagcatacgtacgtccaactggaactaaagaaaagaaatatgcgtgtgatatcgtttggtatttgtggactggtgccatttcttcgctatttggaaaaagtgaaatgactacatttgaacgttattttgttgcagaaaaagaaacacacacagaagaaaaaaatccttactacaaattgcgtaataacgaattaatttgcaaacaaattttagaagaatttgggcttgatggtgaatgcgggcatatcattaacggccatacgccagtcaaagaaggaaaaggtgaaagtccgattaaagcgaatggtaaaatgctcgtcatcgatggcgggttcgcaaaggcctatcataaagaaacgaacttagcgggttatacactactttttaatagttacggtttacaattagtgagtcatcagccatttactacaaaagaggatgctatcaaaaatgaaacggatattctttccacgcgtcaagttattgaaatggaaattaaccgtaaacgtgtaagggataccgatattggggctaaacttagtgagcaggcagaagatttaaaattgttactagatgcctatcgtaatggcttgcttcatgaaaaccgttaactaataggtttttaattgtcataaaactttcacaagtcccaaaaagcttgggctgcaacaactaacacttatatgaaaacttatctcttcatttttctagtgcatcttctgagaaaaaaagttatatttaaatagtagttatttctttataactctcataagagaatatctattcattcccacatcgcttctgattcccacagatcaaaagcaaaaaagtaggcctagcatcagctaggcctactttttttatttaccttgctcccgcgctaatcttcttgcttcacgtgctgctttccttgctgctcgctcatcatcaacgggcgctttcacatcttcagttgcttcttttttcttccatattttctctaaatcaagcccagccatcgtcgcatagcgtttaaagcgtttttctgcatctaaacgggttttttcggatagttttgttgcaacatctggatttgctttgtaaagcgctgagtatcgtgtttcgcgttttaggaagtcttcgaattgattgaaatcgacttttttataatccattgtcattggattttttactttttcttctagtgccgctttccagcacactggtggcccctcgaacatgcatggagagtgcctatagg

SEQ ID NO: 1849 - DNA, 996 bp, Listeria monocytogenes-4B
  misc-feature (1)..(end): n can be any nucleotide a,g,c or t/u
actgtcggcacttagagcatgctgagcggncgacatgtgctggaaagtcattattatttatctgtttgctatagagtaaaaggcgatatgccaaatgcaattaaagaagcgaacagcgctagagagttatcaagcaatccattttttgattcttattacgatgagttagaaaaaatcaaagaataagaggtttttaatgtgaaaacagtttatgatgttgcccaattactaagaaagcatggcattattgtttatttaggaaaacgacaatatgacatcgaaatgatggaatatgagataacagaactttttaaacataatattttagatagagaaacttttgctagagctagaagtatattgaaacaagaattaattaaagaacaacgaaaaaatagtagtttaaattaaattgattataaggagaacagcagaatgaacaaaaaattaattggtgtagatttaggcgggacaacagcaaaattagctattttaacaaaagaaggcgacattgaagaaaaatggacaattgatacaaatattgaagaaaagggcgcccacattgttaaaaacattggggattctatcaatcaaaaattaacggacttacaactggataatgatattttttatggtattggtatgggaactccaggtactgtaaattatgaaacaggtactgtaaaaggtgcgtacaacttaggctgggcagatgaacaaaatgttagtcaagatttagaaaatattactggtttaaaaatcatattagataatgatgctaatgttgccgctcttggtgaacgctggaaaggcgcaggcgaaggtggggctaatgtcgttttcgtaacacttggaacaggcgttggcggcggaattttcgcagaaggcaaaattttacatggtattcgcggagcagctggtgaaattgggcatgtaacagtagttcctgagaatggttatgattgtacctgtggcaanaaggctgtttagaaactg

SEQ ID NO: 1850 - DNA, 698 bp, Listeria monocytogenes-4B
aagtatcatcccggtcgagttcaccgcgaaatcagatgaacttgtaatcggattaaaaccttcatttgaagcgagcaatgttaaaacaaaatcatccggccaattgaaaaaagatgatttagagattatcgtttcaaacaatccagtgcgtctcgaagtacattttaaaggcaacttaattctagaatcgcataaaatttacccagcgttacagtggtatacagataagactggcgcaatcaacaaagtgaaactgcatttagatgctccgaaagaagaagagtattacggcttcggtgaacgatacaatgcattaggtcagcgcgggaatgtgcttgattgttttgtttataatcaataccgtgatcaaggaacaagaacctacatcccgatgccgttttatcatacgaatcgtgattatagtgtgttcgttgataccgctcgttacacaagttttgatttaggtaaccaactagcggacaagcatacaattacagtagaaataaatggctgtgacacagatatttatcttttaatgggagatattcgtagtgcagtagcaaattatatgaagaaaactgggaaaccggcgatggtgccagtttgggcgcttgggccgtggatgtctagtaacaacctgggaccgtgaatctgtcgttcgaacagaagtcgaaaccacgcaagaattgcaaatccca

SEQ ID NO: 1851 - DNA, 1269 bp, Listeria monocytogenes-4B
ttgaaatctgctagaacagcttggtcctcttttaaacttccaccaaatttaccataacccatactactaagaggatatgtatctttatctttttctccaagaaaaatggtatattcttgtcccttatctaatgcaatatagttttcaacagcgacatatttaccatcgcttaaataccacggttctgaaatatctactttactccctttttctaggtttcctttgtaactagtcaaaatttctatctcgctaatagtactaccatccttgcctatcgttttattttgaagaaatttcactttaacaatattagcactattatcctcaagttctttaatatcttttggaattttgtaatctgctcttattgtgatagtcttggatattttagtgtctttggttattttttcattcggcgaggaacagcttgctaagattgttgctaacaataatatgggcactagaatctttttcaatagtagagtcctccttatatgtattattcagcttaccttcccttaaattttagcataggtagattatgttttatagtacaatccatagtgaaaaaacggctttttattgcgtttattgccaaattgttaacagattgctcgtttgactataattattcacaaaaaaacaaaaccaattaatgagggttttgtttttaggaatttatttgcaaggaataattataacggaaatagataatcataagcataataggttttcatttatatttcatcttaagcaattaaaatgaaagtcattacttttggttattttgctacttctgcatttacaattcacaatgagtaagtaaacaatactacacgctattgttgttttccaaaggaaccaaatttatatttcacattaagtaactaaaactttcaaaggtaatcccttcatcatgactgaggagtccatttacatttcaaaataagtagctaaaacccgctaacttttcttcttactcccatcttacctcaaagagctatttctgacgattcccggtgtttttcacgctactcaaggtcgacagataacaaaaaacagcaactctactaagttactgttttttgcttattctttaaaacaacggatgcaacgagcggttttcttgtacgccttcgattgcgcggcctaagattcgtccgatggagatggttgttagtttgtcgaattgtttatcttctggaagatcgatggagtccgatgtgatgacttctttgattttggaattttgtaagcattcggttgcat

SEQ ID NO: 1852 - DNA, 1843 bp, Listeria monocytogenes-4B
taagaggtgaatacaatgggcataatgaatagcttattacaacagaaagaaatggtcgtgaaagattggctaacgtattatgtatctgtagatgatccatatatcttcacattaaaaaatgatcatcgtttaatggatgaaacgggctttgttttagaaaatttgtttattggaatgactgaagatttaggaaaaatgaatgctttcgcgcgtgagcttggaaaagcacagtttattacttcactcggaatttctcgtattttattccatattcgcttactggaagagtttttgctcgattatgcatcagaaatcaaaacaaaatctgctaattatcgtgaattatatttatttagcatcaagcttcatcaggtatttagtagtttcacgcaaaacttaatcgaaggctatacccgtgcaaatgaacaaaagattatacaaaaagaaaaccaaattattaaagaatcaaccaaactaatttggattgccgaaaatgtttttctgttacctttaattggaagaattaccgatgagcgagcaaaacaacttactgaaacagcgcttgttgaagtttgtgagcaaccagtgaactatttaattatcgacttatctggcgtgcagttagagtctcctaacatcggcaagtacattgagtatttcttctcgtcgcttaaattagtaggtgtgactccgattattacaggtgtgcaaccgcaaactgccaaagggatggttcaaggtaatttaactgaacaacatggtattaaaacatttgcaaccttacgccagggggcaaaaacacttatgaaagaaaaagaagcaagaaacgcccgtaaataggtgttcttgcttcttttttaatattcttcttgacgtaatgattttaaagctttttcaaaggaactaggaagtggcgcttcaaacatcattcgttctttcgttgtcggatgatcaaaccctaattttgcggcatggagaaattggccattgcctttgattgtatttttaggtccgtattttggatctcctgctaaaggatgaccaatatatttcaaatgaactcggatttggtgcgtacgtccagtgtctaatttgcaattaattaatgtgtaacctggtaaacgctctaatacttcaaaatgcgttctcgcttctttcccatcgcgtacgactgccattttttggcggtcttcttttgcacgaccgattggcgcttcaattgttcctttttggtggacaatgtcaccgtggacaagtgcgatatattctctatccgaagttttgtcttttaattgtttggctagtgattcatgggcatggtcatttttagcaaccattaataagccagatgtatctttatcaattcggtgaacaattcctggacggattttaccgttaattcccgataaatcatcacaatggaatagtaaagcattcacgagcgttccacttgcatgtcccgcagatggatgaacgaccattccttcaggtttatttacaacaagcatatctttatcttcaaaataaatatcgagtggaatatcttctgctaaaacttctagttcttctggttcacgcacttcgtaatgaatttcatcgccaacttgtactttgtaatttggcttcgcaagttctccgttaaccgtaatatcaccgtttttcagcatgagttgaattgctgaacgactttttcccatcatttcggcaatcactttatccacacgttcacgcgcatgactttcttctataatcaatgtttcattctgcattatttaattcctttcgtttttcggtcgtctacaaaaacatacacgagcattagtacgacaccaactgaaagcgc

SEQ ID NO: 1853 - DNA, 1370 bp, Listeria monocytogenes-4B
ggataaaattttaccgtggttgttgaaacgtacaagaaacatggtttgtacggtaaacgcgtgaagtattctaaaaaattcaaagcgcatgatgaaaataacattgcaaaaactggcgatgtagttcgtatttccgaaactcgtccattgtctgcaactaaacatttccgtttactagaagttgtagaagaagcagtaattatctaaatcaaaagttaaaaatagattgtgaaaagttgccgagtgcaatttttccgacccgttattctggaaggagggtgtcctaatgattcaacaagaaagtcgtatgaaagtggctgataactctggtgctcgtgaagtgttaactattaaagtactaggtggatcaggacgcaaaactgctaacattggcgatgttgtcgtgtgtaccgttaaacaagcaacaccaggcggcgttgtcaaaaaaggtgaagttgttaaagcagtaatcgttcgtactaagagtggagcacgtcgtcaagacggttcttacatcaagtttgatgaaaatgcatgtgtcattatccgtgacgataaaagtcctcgtggaacacgtatttttggacctgttgctcgcgaacttcgtgaaaacaactttatgaagatcgtttctttagctccagaagttctttaaaaaataagttccaagaaatcaaggaggtgctataccaatgcatgtcaaaaaaggtgataaagtaaaagttattactggtaaagataaaggcaaatccggcaaagtgctcgcagcatttccgaaaaaggaccgcgtacttatcgaaggaatcaatatggttaaaaaacatacaaaaccttccaacatcaacccgcaaggcgggatcttgaatgttgaagcaccaatccacgtttcaaacgtaatgctaattgaccctaaaacaggcgaacctactcgtgtaggatacgaagttaaaggcgataaaaaagtacgcgtagcaaaaaaatccggtgaagtaatagataaataaaagtcgtaggaaggagggaatattacatgaatcgccttaaagatcaatatcttaaggaaattgttcctgctttaatgagcaaattcaattatgactccgtaatggaggttccaaaaatagataaaatcgtaatcaacaatagattggtacgtacagcaaatgcgaaagttttagacagtgcagttgaggagttagctcttatcactggtcaaaaacctgtaatcacaaaagcaaaaaattctatcgctggtttccgtcttcgtgaaggaatgccaatcggtgctaaagtaactttgaatggtgaacgcatgtatgattctttccagcacatgtcggccgatcaagcagcgtggaagttactgaaaa

SEQ ID NO: 1854 - DNA, 2319 bp, Listeria monocytogenes-4B
  misc-feature (1)..(end): n can be any nucleotide a,g,c or t/u
caccatgcgctggaaagaactaattcgtcttgatgaagatgaaaaagtagctactgttgcaaaagtgccaaaagaagaagatgaagttgagcttgaggaagaaatcgatgaaacattaatcacacaagttcctgatgaaagttttgaagatgctcctggaagcgatatagaagaataaaatcaagctggagatgactctaatttgcgaattagaacgattttccagcttttttccagtataaaaagcgctttttggctataatttatgtataatatccttaatacgtcttaaaaagggaagagttgaacaaatgcgcaaactgattcaatttctgtttatagcagtagttttatttttagtggaatactttttaatcaatcaagcagctatattattcttagtaacaagtggacttatccaattatgcggattaattattgtgattcggctactactctttgatcaacggaatactagctcaaaagtcgcctggattgcggttattttcattttacctgtacttggaacgattagttaccttgtgtttggtagaaatccagcaactagaaaattcagcacagctcaagtaatggaaaaagctaaattaattaatgcgattcacgcaattccaaacaacactaatgaaaaattaccacgactatctaaaagaattgcgcatttaacgtccatagagccaattaaggggaataaaatcgaaatattaacaaatggcgaagaaacttttccagtgctcttagacgcgcttagaaaggctgaaaaccacattcatattcaatactatattttcaaaacggatgaaatttctacaaagattcgtgatattttggtagaaaaagcaaaagcaggcgttgaagttagatttatgtttgatgggcttggatcaagcaaactgggtaaagcctttttagctcctttgaaagaagctggagttagtattcacgcatttgacccaattacctctccctggattgtaagaacagccaatttaagaaatcaccgtaaaattgtcgtgattgatggtcaaattggctttacaggcgggcttaatattggagaagaatatcgttctaatacaccagatttccgtgtttggcgcgatacacatattaaaatcacaggccaagctgttatcgaacttcaagaatcttttctaaatgattgggtctatatggaaaaccaagcaggtgctgcagatcaatttattagtgaagctggattacaacaatatttttcaccagttgatgtgggtgacgaatgggcgcaagtgatttacggcggaccatatgataaagaaaaatgggttcgcgattcgatgcttgatttaattgattccgctaaagaatctgtttggattgtgtcgccttactttgttccagatgaggagtcgcttgcagttattcgccgggttgcgatgagcggtgttgacgtgcgagttattattccaggcaaaggtgatcgcgggatttcattccacggaagtaatgcgtatgtgaaaacaatgattgaagcaggcgcgaaaatgtatgcttatgccgatgattcttttgttcatgcgaaggcaatgctagtggacgggacgcgtgcagctataggtactgccaattttgacgtgcgtagttttagattgaatcatgaattaatggtattcttatatgatgaaagcgaggctatgcatcatttaaaacgtgattttgagaaagattttgaagatagccgactttttacgatgaaagatatggaaaacaaaccattattgactcgtataaaagaagttctatctagtttactatcaccaattttataatttaggagtggaaaaatgagtggagatttaaaacttagaccgcttgaacgagaagatttaaaatttgttcaccggttaaataatgacgcgaaaataatgtcttattggtttgaagagccatatgaggcgttcgtcgagcttcaggagctatatgataagcacattcacgatcagtcagaacgccgttttattttagaattagatggccaaatggttggattagttgagttaatggaaattgattatattcacagaagagccgaaaaaaaattattattgatcctaagtttcagggacacggttacgctgtttctgccacaaaactcgcaatgaaatatgcttttcacgtactaaatctgcataaactatatttagttgttgataaagtaaatgaaaaagctattcatgtctatgaaaaagttggttttattcgtgaaggcgaactactttccagcacagttcgcccgtcaagcaacgattagtggctcncagt

SEQ ID NO: 1855 - DNA, 1251 bp, Listeria monocytogenes-4B
ttacttcatctgcgtccaacgcaactcgagggtaaatcattaaaaactggtattgagcaattattaaaagaattaacaaccaaattgccaatcgaagtagaatggcaaatcgaggatattagtttgcaaaaaggcattgaggatcatttgttccgtattgttcaagaattactttccaatacattacgacattctaaagctaaattattagaagtacgcctcgtaacgatggataatttagcggtgatgaaagtagttgatgacggcgttgggtttgatatggataatgttcgacaaggctcttatggattacaaaatatgcgagaacgagttgctgaattcggcggcaccatcaaaataattagtttcccaggaagaggaactagtgtagaaataaaaatcccacttgttgcgaaaaaggacgtggaaagcgactgataaaagtattacttgtagatgatcatgaaatggtacgtataggtgtctcagcttatctttctgtgcaagatgacatggaagtggttggcgaggcagagaacggtcgtgaaggggctgatatggctctagaactacgcccagatattattttaatggatttagttatggatgaaatggacggcatcgaagccacaaaagaaattatgcaaaactggaaagaagcaaaaataattatcgttacaagttttattgatgatgaaaaagtatacccggcacttgaagctggagcgagcagttatatgcttaaaacttcaacagcgagcgaaattgcagatgcgattcgagctacatacggcggagactctgttcttgaaccagaagtaactggcaaaatgatgcaacggctaaccgctaaaccagagaaaaacttacatgatgatttaacgaatcgtgaaaatgaaatcttacttttaatcgcggaaggtaaatccaaccaagaaatcgcagacgaacttttcatcactttaaaaacggtgaagacgcatgtaagtaatattttatcgaaattagatgtgcaagatcgtacgcaagcagcaatctatgcatttaaacatgacttagtagaaaaaaagtagcaaggaggtaacgtacacatgaaagaaggatttgcagtcatcggtcttgggcgattcggcggaagtatttgtcgttcacttgtcgagcaaggaatggaagtacttgcgattgattcggatgaagaacgtgtcaacgaatatatgtctattgcgacccatgcagttatcgctaattcaa

SEQ ID NO: 1856 - DNA, 1212 bp, Listeria monocytogenes-4B
  misc-feature (1)..(end): n can be any nucleotide a,g,c or t/u
aaaaagaagctagcgaccatactcattcacacggtggcaagttgaaaatcaaatgcccggcctgccatgcaaaaatgaaattcaaagatagcgaattgctcgacgaaaaataagttttaaagccttctcagtgagtttgagaaggcttttttatctaaatgtgcattattttaagaaattcgggaaaaggaaacgagaggtgttgtcaaatgaaagctgtaggattaacgagagcgtcaacggattttgtggatatagaaatcgacaagccagtaccagaaaaccatgatttactagttagaattaaagcgatttccatcaatccggtagatactaaacaacgtgaagcaacgaagctatctggagatgaagtacggattttaggttgggatgcggttggagaagtagtagatactgggagtgaagttgcattatttcaaaccgggcaagacgtttatttcgcaggtgacgtcacaaggcaaggagcgtacgcagaatacactttaattgatgagcggttagttggtttgaaaccacataacttgaacgtagaggaagctgctgcgatgccactgacaactattacagcttgggaagcattgtttgatcgtttaactattactgaaaatgataaaggtaaatcaattttaattattaatggcgctggtggtgttggttctattgcgacccaactagctgcacatgctggtcttgaagtcatcgccacggcctcacgcccagaaacagtagaatggactaagagccacggcgcgaactatgttatcaaccaccgagaaaacatcccagaacaactggaagaacttggatttgagcagggagttgattttattttatgtttgcataacacgagtgctcactgggatgagatgcaagaagcgattcgcccacaagggaaaatttgctctattgtagaacttgcagagccagtgaaaatgactcttttaaaagacaagagtgctactttcagctatgaattcatgtttactcgttcgaaatatgatacaacagataaaatcagacagcatgaaattttaacagagcagctatatgctgatgcggcgattacacgacttaatcagtttataccgaccgactaagtcattttgaataccggtgaaccgcggcgccccgtnngaangangctnacaaaatttatctnattccggacaaattgattgagaaaataagtaa

SEQ ID NO: 1857 - DNA, 1272 bp, Listeria monocytogenes-4B
  misc-feature (1)..(end): n can be any nucleotide a,g,c or t/u
aaagatggtttttgttagacaaaagcaagataaaaaactataataaagttaaggtcaaaaaaggtcagacttatcttttataaggaggacgaatgaatggatttacaaaaatttacgcaacaagtccagcaaacaattgcggacgctcaaaatttagcaattgcatccgaacatcaagaaatcgacgtcgctcatgtttttaaagtgttattaacagagagtgattttgccaaacgtgtatatgatgtagcagaagtagatatagatgcacttcaaaaaacagtagaagatgctttaacaaaaattcctgtggtctctggaagcggtgtaaactatggtcaagcaatgagccaagcactttttcagttgatgcgggatgccgaaaaagaacaaaaacaattagacgatgattttgtatcaacagaacatctaatcttagctgtcatggatcaaaaatcaaatccaataacaatgaatctaaaaaaacaacataaatctaaaaaacaaattcaagaagctattttaaaaatcagaggagggaaaaaagtgacttctcaaaatgcagaagaaaactatgaagccttaacaaaatatggacgtgatttagtcgcggaagttagaagtggtaaactcgatccagtaatcggacgcgatgcagaaattcgtaacgttatccgaattttatctagaaaaacaaaaaataatccagttctgataggtgaaccaggcgttggtaaaacagccattgtcgaaggtttagcacaacgaatcgttcgaaaagacgttccagaagggctgaaagataaaacgattatctcgcttgatatcggttcccttattgctggagctaaatatcgcggtgaatttgaagaacgtttgaaagcagtacttcaagaagtgaaacaaagtgacggtcaaattttactatttattgatgaaattcatacgattgtcggcgcaggtaaaacagatggcgcaatggacgccggaaatatgttaaaaccgatgcttgcccgcggtgaactacactgtatcggcgcaactacgttagatgaataccgccaatatattgaaaaagatgccgcactcgaaagacgtttccaaaaagtacttgtcccagaaccaacagtggaagatacagtatccattttacgtgggttaaaagaacgctttgaaattcatcatggggtaaatattcatgataatgctntagttgcagcagcgagtctttctaatcgttatattacggaccgcttcttaccagataaagca

SEQ ID NO: 1858 - DNA, 2008 bp, Listeria monocytogenes-4B
tggggcaaggggatagcattttaattcaactaccatacaatcaagggaattatttaatagatactggaggccaacttccatttgaaaaagaagcatgggctaagaaaagaaaaccatttacaataggcggaagtacacttagcccagtgttaaaatcaaaaggaattaatagcttagataaagtaattattacacatagcgatgctgaccacatggaaggacttgatgatttacagaaaaacattactattaaagagcttatttttgctaaaggagcagaaaacaaacccatcatgaaagaagctctcgctgcgatgccaaaagtgaaacagacaattattttggccggtgccaagtggcaaattggcgaaaacagtttcgaatgcttatatcccgataaagcaggagaaggaggaaatgatgactctattgtattaaaggcagtattagatggtaaaatatggctttttactggtgatttagaggcgaacggagaaaagggcatatcagaacaacctatcaaagcagatattttgaaagtagggcatcatggtagcaagacctccagttccaaagaatttattcaaaaagtgaagccgacttttgcagttatttcatgcgggttaaacaatcgctttggtcatccacacgcagaaactattaatacaatagaaacagcaggagtaacaattttacgaacagatgtacaaggggaaataacttatacatttggaaaaggctttgaagcgactttgaaataaaacttgctatctcttatttcatgttttaccatagaaagagaaataagagtgaagcgaggcgaaatgaatgctgccagaatggaaacagatacgctccaaaaaaataatgccggtgtatttaatcattggtacggaagattatattattaaagaaacgaagcaacttttaatagataacattttggaaggcgaagaagtagaatttaactacgctaatttagatttagaagaaatgccaatagaagtggtcattcaagaagcagaaagcatgccttttttcggtgataaacgtttagtaatggccaataatccgctttttttaacaactgaatttaagtaaaaacaaagtggagcatgatactgcaaaattagaggcttatctcaatgaaccagtggattattccgtattatgctttgtagcgcgcgtagaaaagttagatgagcgtaaaaagcttactaagttactcaagaaaacagctactgttatagaggcaaaacgacctaatgagaatgagttgaaaaaatggattgaagcaaaattaagcgagaacaacatgcaaatgtcacaagaggctattactcgactggtggaattaactagtggtcagctaacaactgccatgaatgaactgcaaaaattaatgctctattgttttgattcaaaagaaattaccattcaggatgtagaatctttagttgtacgttcacttgaacaaaatatctttttgttacttgataagatgattgctatggatatcagcggggcacttcggatttattacgacttattaaaacaaaaagaagagcctatcaagatactggcattaatttctagtcaattcaggttgttaaaccaattaaagctattagaacaacaaggttattcgcaacaacaagctgcgactaaactaaaagtgcatccattccgcgttaagttagcatcaaaacaagcgaagaatttcacggaattacaattaaatcaagctttaaaacgattagctgaaatcgacttggaaatgaaaactggctttggtgataaagaacagaaactcgaatggttcttattcgaattacaagataatcggcaaaagagagtataaaaaatagctttgtcatttaagacaaagctatttttgcaaacaaaaaacaccacacaaggtgtgatgttttataccgaactcggtattatttagctaatttagcagctaagcgagatttgttgcgagcagcattgtttttgtgaatca

SEQ ID NO: 1859 - DNA, 968 bp, Listeria monocytogenes-4B
atcacattattcatcgtgatttaaaaccacagaatattttaatcgatcatgatggcgtagtgaaaattactgattttgggattgcgatggcactttcagaaacatccatcacacaaacaaattctttgttaggttcggtgcattacttatcaccagaacaagcacgtggtggaatggctactcaaaaatcagacatctattcactaggaatcgtgctatatgaactattaactggaaaagttcctttcgacggtgagtctgcagtttctattgctattaagcatttgcaagcggatattccatcagcaagagcgcaaaatccagaaattcctcaaagcttagaaaatattatcattaaagcaacggcaaaagatccatttttacgttatcaaaacgcggaagaaatggaaaaagacttgcaaacttgtttaaatcaagaccgtttaaatgagcctaaatatattttcccaacagatgatggtgatacaaaagcaattccaatcatcgcaacgaaagacacgatgcaaaaccttgacaaaacgattgtcccagaaggaaaagtagcagcggctgaagttgctcccgaagagaacaaaggtaagaaaaagaaaaaaatgagtaagaaaaagaaaattgctctcattgtttcttctgtcattatcatttttatcatcggtattttactactgtggcttttaggcaagagccctgatgaagtcgctgtgccggatgtttctggtaaaacggaagaccaagcagtagcgctactccaaaaagaaggctttgtcataggtaaaacggcagaaaaaaatagtgatgaagtagcggaagggaaagtaattaataccgacccagaagctggagaaatgaaagaaaaaggaacaaaaatcaatttattcgtaagcattggttctaaaaaaataactatggacgactatacaggaagaagctacacagatacaaaagcg

SEQ ID NO: 1860 - DNA, 897 bp, Listeria monocytogenes-4B
tcctgggtctttaaagaagtttttattcgtaattcgattaagtagtaattgatgccccatatgttccgccattgtgacaaacgcaagtggcgccatacttagaatgaccgtcacggtaattactgggtcgatatttacaaatggaatgctgaaatctggaatttggaagaaagaggcatttttgattaacgtgtaatctaccatcccaaaagccatacttgttaagtaaccgactgtgaagccgaacaaaattggaatcaagcccataaatcctttgaaaaacatcattgcgattatggttgcaaggagcgtaattactgctactgccaaagtttctaaactgtatttaccattgtttgttcccatcgccatcgctgctgcacttggagcaagcgacaaaccgataaccatgattactggcccaacaacaattggtggtaaaaccttttgaatccagtcaacaccagcgtagtaaacaattagagaaacaatcgcatatactacaccgacggagaacgttccgaccataactgcgcccggacctccgccagatttggctgcaagtagtgcagtaattggtgcaataaaggtaaaggaagaacctagatatgcggggattttcccgcgagtaattcctagataagcaagtgtcccgagtccgctagatacaagcgccactcccggacttaaccctgtcacacttggcacaaagatagtagagccaaacatggtgaaaaggtgctggatgctaagaataatccatttattgaagcttggtctttcgtgtatatctagtactggttttgtcactgtttctgtcgtttctgccattttcttccctctttcttcataaaaaataccccttgtctgtgtcgacaaagagtatagaataatccc

SEQ ID NO: 1861 - DNA, 1327 bp, Listeria monocytogenes-4B
aagatttgcgcgctcaaaattcgaacttgaaaataggggtttcagttggaggctggtctaagtcgggagatttctcgacagttgcagcggatccaacaaaacgggctaactttgtgaaaaacgtgatgaagtttgtgaaatatactaatatggattttgttgatttggactgggaatatcctgcttcggtacgggacgctgaccttgttgataataaaaacgatgaaggcacaccaaatgcaaaacctgcggataagcaaaactttattacacttttacaagatttaagaacggctttggataaacaaggcgtggatattaacaagaaatacgaattatcggttgctttaccagctgcaaaatctactttagaaaatgggattgatgtagcgaatttatttaaagtagtcgattttgcgaatgtgatgacgtatgacttaaatggtgcttggacaccgaatagtgcgcatcatacagcgctttacggcaatccgaaagatccgaattatgatagtggtttttctgtcgaccaaaccgttaaatacttaaaagaaaagggagcagtttcgaataaaattgttgttggggcagcattttacactcgaggctggaataaagtagctgctggaacggatacggcattgccagggcttttccaagctgctgaaaaaacgaataaagatgcggatggctcgcttacttacggggcaaacaacgaaaacccaattaaaacaggcgatgggggccgtgctggcggagtttgggcgtatagaagtattgatgcgctaaaagctaaaacgccaacattgaaagaatattgggatgatactgccaaggcgccgtatctttatagtaaggaaactggggagttttacacatatgacaatacgcgttcaattggctataaggcacagtatgtaaaagataataatcttggtgggatgatttcttggatgcagtcgcaggataaaacaacgacttcaactaagcgcgatgaactcacaaaggcgattaaatcaggattattcggcacaaacgctatcccgcaaaacgcgattacttatgcgaatttaaatgtggtagcgacagtgaaaccttatagcgaaaatggggtcgggtacgaaattacaattacaaacaatgaaaaagcggacgaaaccaatgaagttttgaaatcaactgagctatcgtttgaaacagtgaaattacctaagttttatattccagtaaaagcgggcgaaacgttaactgctggcgattataagcggtacagtactacttaggtgcatacagagttgattactctgttacacccacaagtccaagc

SEQ ID NO: 1862 - DNA, 752 bp, Listeria monocytogenes-4B
tttaaacgtccgaaatatctggtaaaccttctaaaaccacttcagattccgctaaaattgcagctggaatcaaggcaactgcgctattttttgcaccatctacttgcaaagttccggctaattttttagccaccttgaataatcaatttattcgtcacaaatgtacccttctttcctgaagcatgtaatactttttcattatccattaaattgtatggaggtttgcaagattctttcttcaaaaaaaagccgggaacagttcattccaagcttttcattacgacgaaatatttcttactggtgcttttgttaatgcttctatatgaggtttaatttttttagaagctgagtctttaattaataaggctcctgccccaaaaacaatgcaactataataggtaataattcgccataaaacgagcgccatcaatagttttgctggtccaagcaacataccaaacaacagcggaaatgtatactcactaccacctgctccttcaggagtgggcgtaccaggttccaacatattaatcaaggcgcgatatcttattcccctatcccggcccaatgtaagttacatcaatggctgggtaacatcaacattggttttgacaaaccccccctcgtcccgcccgccttctgcaacacccccccactaacgtgtttacacagtccgccagcatgcctcccacccacgtagaaggagcgacgccccctgcgtttcgcacgcgtggtatgatcgccgcgactgt

SEQ ID NO: 1863 - DNA, 1303 bp, Listeria monocytogenes-4B
ctaatgtccaactgtgcgctggaagaaacaattcaagcacacggcggacacacaccggacggagatacgcattctagagccgtaccaatttatcaaacgacgtcatacacatttgatagcccggaacatgccgcagccttatttggtttacaagaaactggaaatatttatacacgaattatgaatccgactacagctgttctagaagaacggttaacgctacttgaaggcggtattggtgcggttgcaactgcttctgggatggctgctattacttactctattttaaatattgcgggttctggagatcatatcgtcgcagccgcaacactctatggcggaacgcacacgctattttcccatacgtttaaaacttttgggattgacgtaacgtttgttgaccctaatgaacctgaaaattttgaaaaagcgattaaagataatacgaaagctgtttttatagaaacaattgggaatcctgatattaatattgtcgatatcgaaaaagtagcagaaattgcgcacgcatccgatatcccgctcatcgttgacaacacattcgcgaccgcttatttgaatcgcccgtttgattttggcgcagatatcgtcgtttactcggcaacaaaattcattggtggtcacggggttgcaattggtggtgcggttattgactcaggtaaatttaactgggcaaatggcaaatttccaaagctagtggtaccagatgatagctacaatggtttgtcttatacaaatgacgttggcgcggcggcatatattaccaaactacgcgtctcactccttcgtgatactggcgcagcactttctccgttcaacgccttcttactcattttaggcctagaaacactatccttacgccttgagcaacacgtgaaaaatgcgaaacaagttgccaatttcttaaatgaccatccaaaagtagcttgggtgaattatccaggtttgagcgacaacaaataccacgaattagcccaaaaatatttaccaaaaggacctggctccattttcacatttggagttaaaggtggctacgaggctggtaaaaaagtgattgaatcagaggaattattctcgcatttagcgaatgttggcgacgcaaaatcgcttatcatccatccagcttccacgacccatcaacaactaagcgaagaacaacaattaacagctggcgtgaaaccagagtccattcgcctatctatcggaatcgaaaatgccgatgatattatccaagatttaacgaaagcattagagcaaatttagaaggaagtgaagagaagtgacc

SEQ ID NO: 1864 - DNA, 1279 bp, Listeria monocytogenes-4B
ggggctggaaagctttaagcggagcggtttcgacaacgaacaacgtaaatagtgcggatgttttcaaagtaacgaaagcaagcaccgattcagaaggtaatatttccggagtgacatttaaaaatatttggactgataagtatatagcttatcgaaatggtattttgattagtaatagcgagactcctgattcattcaaattaatccgtcaagctgatggaagttatgtaccagaattgagcggtcgctatgttagtttctctgttggactagtaacagatgaagcagctggatcaaaaatcgatttatattcaactcaggaaaaattagaacaagtttcggaagctatttctgtaaaagcacttgaagagccagctatttcagctgagaatattagtgtttatgataaacgcgtcaaaatagatgttattggtgaggataaagacaatacaacggttaagaaagataacaagaatgaactgtttgtaaatgtttataaagcagatggaacaacgctcgttaaatcaattcggattgatggactaccaacacgcgatgtttctgttacagagctttcaccagattcagattatgttgttaaagttgaagggaaatatgatttgttagatggtaaaggcgaaaaagacaaagtgtatttttcagagacaattaagacagaaaaaagtttaccgagtatgacttcaactgattattcatggaatccagcatatggtcagcgagcaattaaaggaaatatccattttactgatgaaagtagcgtattaacaaatattgaatatcgtctgtacgatgctgcgacaatttcttccaatttatctaatttagtagctttagagcaagagttaggcaataaaactcccgtagctacatttgataatatgacaaatagtccagaattctctatatataacagttctggagctcaaaattttgtttctggaaaaacatatgtgattgcagcatatatgaagacaagtctaacaagagcacctatcttcctaagtgatgccaaggagctttatatttcaccgccaagtggtgtttctgctccaatcacgctagagaatgtttcaacaagagaagcgactctgaaattctcttataatgatccacaaagttattttgttggcggaacaaataaagaattccagtacgtattaaaaaacacgacaaatggaaaggaaattaaaaaaggatcgtttcaaggtgggaatacagctagttggataaatacttttgaggaattagaacctgcaac

SEQ ID NO: 1865 - DNA, 1269 bp, Listeria monocytogenes-4B
  misc-feature (1)..(end): n can be any nucleotide a,g,c or t/u
tttcttttcttggtagacgctccatttgtaaagaatgataaagagtggaatagatagcgccattaaaaagtaatccactggtttgaagtcatttgcgccgtttgagataagtggaaaaagtaatagtaaaagtgcaatggttagtagcccaactccaggcaaatcaaaactaatttttttcgtggagacagttcttttgggaagataaagcattgctaggactagcgttactaacacaaaaggtacgttaacgaaaaaaactgcacgccaaccattggtagttccgaaaagttcaattaaaagacctcctgtaagaggtccgatggcagttcccacaccaataacagatccaagaattccgaagattttcccaaggctttttccagaatacatatccataattgtggcattgatttgcgggaaaaataatccggcagcaagtccctgtattacccgggaaataattagactattttcggaatctgcaaaaccagctgtcacactcataattagaaatagcgtaatcccgataatgtagatattttttcggccaaatttatccccgagtcgaccagctaaaataagtacaagtccaaaagcaagcgcatagcctgaaattacccattcgatggtttcactcgtggcatgtagagcagttgtgatatcaggtaaggcaacgttgacaattgttgtatctaataatgaaataaaagctccaagcataattgaaataagtgctaaagtattacgtttattcgtctgttccatgaatcattctccttttttgaagctttttgagatattttccattataaacctaaaaactctgatgataaagaaggagcgaatgtttcacgtgaaacattttactttgcgagtaagatttgataagcttcttttattaaaagggcgggggttaacgtatggaaaatcggaagcaaatgataaaaacggaacgactttttttaagcgaaatgacgttagctgatactgaaatattgtttggttactggtcagatgattctgttactagatacatgaatattgaacctttccaaagtttgcaaccggttgaagaaatgattcggatgctacgacaactagaaattgaaggaaaggcacttcgttgtgtgattattttgcangtaacatgagaaatcgattgcacgtgcggatctcatctttccctcgcggacctgtcaattctttcgatccatggaacacgcatccggggcgggaactgtggcttatgatctgaagccgccacgc

SEQ ID NO: 1866 - DNA, 1094 bp, Listeria monocytogenes-4B
ttcaaagtacttgtgggcgagaacaaaatggttgttaattataaaaaaatcaaaaacgtaccagataaaaataaatatttagctgaaaaataaaaacgctttgttatagcctgataaaaggctaaacaaagcgttttttgtttttattaaggtgtaacaatattgaagacaggattaaattcatctaacaaggaagcaaactccccaaatttcttcgcgtctccttctaatttagctgtttggtcagcaaatgctgcttcaaagcttttcacaccaccgaaaatatgattaaatgtatcacgagtagtagttaaagttaaatcagctttatcgtctacttcaccttcacgataaataagtacggaattatttacaagtaaatgataattctcatcaacatctgttaatttccagttcatggagatacgtttaccgatggatctttccccatttaaacgaatacccatgtaatctaaaatcaagttaaacggcataccttctacaatatccagtgtaacaccagaaataacttcatctgggacagaatttctcagttcgtctgctccggctaaaaatacattacgccatggtccggactcagattgatagccaagttgttctaacgcatctgcaagaagagctcttgcttctccgttttctccgtctgcgaaaaccgcatgtttgacaacttccgcaacccagcgatattcacccgcttcataggatacacgcgcttttttcactacttcatcaacgccacccatgaactcgacgtattttttcgccacatcttctggaggtagcggataaaggtcagcaggatttccgttataccaaccaagataaaattgataaatcgctttaacatcatggttaagcgtgccgtagtatcctcgtaaataccatttttcttctagttcaggagggaatttcacagcttcagccacttcaatggcagttaatcctttattaataaaatgaagcgtttggtcatgcatatatttataagcgtcacgttggtgaataagcatgtcattaatctcttattaccccacgttggccagtgatgttgaccgatacaaacttcatatcaa

SEQ ID NO: 1867 - DNA, 1952 bp, Listeria monocytogenes-4B
ccgctagggcacctacagcatgcttgagcggccgcccgtgtgctggaaagcgcttctgctggactataaagaagatccgcgtgtttgtgatatgtatgaccaatacttattcggagaagcaatgctgatcgcaccagtaattgaagacggcgtgcgctccagagaagtttatctgccagaaggaacttggtatgatttctggaatggaacaaaagtgaacggaccaactttacgaaaatgctaagcggataaagaagaaattccagttttcattcgtggtggaaaagcagtgctatgtaatgtggacgctacattgaaactcggctcatgggttggcaacacagtggaagaatacgatacaccactacttaaaatttatgtggacggtgatttcacagaagaaatgacggatcacttatccgaaaaatggctagtaaaagtaacggaaaatgcggacgaagtagttgtttctgttcaaacaaacacaccggcatatgaagttgaagtaatcggcacgaccaaaaaagtacaaataaagaaagggagataatgatggatgcttccacaagttttgcgattctaccatctaatgtaaaacaaaaaacagctttcgaaagaaaagtaaatcaagtgaaaacggctagttgggcgaataattgcctgactggcacacttgatatcggtcagttcagttgctattttgttaatgaaaaaattgctcgcgtgacggtgaacccatttggagaagtggatttaacgccttcgattgctgcgattcacgatacggaaaaacaagcggctaaatttacagaaacaacggacggctatgagcttcattttgcggataaagagattattatttgtaaaaatcctttccaaattattatgaaacaagctgggaagcgtattttccaaacagaaggattggcaattaatcgctataaagaacaccaaatttcgattcaaagcgaaccaggaaccgcgatttttggtttaggtgaaaaaacgggtgccttgaataaagccggttccattattagtatgtggaacacggatgtatacagtccacataataaagatacagtggagttataccaatccattcctttcatgattgcggatactgcggaaacaacctatggcttattttatgataattcgcatcgtacagaatttgatttccaaagttttgaagaaatgtatacgattttagcagaaggcggacaagcgaatttatatgttatttttggtgaggacacgaaagaagttgtcgcgaattacactgatttaactggtaaaacaccacttccaccaaaatggtcattaggttatcatcaatcaaggtatagctacacctcggaagaagaagtggaacggattgcgaatacttttaaagaaaaagagattccgcttgactgtgtattcatggatatacattacatggatgatttccgcgtattcacttttaacccggatacttttccaaatggaccagaattgattgcgcgtcttcgggaacaaaatattgacgttgtaccaattgtcgatccgggaattaaaaaagatgttgattattctgtttatcaagaggggatcaaacataattatttctgcactaaattagaaggttcgatttattatggggatgtttggccgggtgtcagtgctttccctgattttctaagtacaactgttcaacattggtggggcgggttacacaactgttacacacatttaggtcttcgcgggattcggcatgatgtgaatgagccccctgtgcttcctgatagcgcaacgatggatgcgcatgtggtgcgtattctggcccggaaaatggttcccctcttgtagcgcctgctctctctgggttgctttctgtgccgctcccttcttacgggcttccccgcccccgcccgctgccgctccttcccctcacccagtaaacccaaaaa

SEQ ID NO: 1868 - DNA, 764 bp, Listeria monocytogenes-4B
ccgatgctaaagttggtacactgccattcatcttatttaatccatctgaaagtgcagtagaaccagtgtaagcttggttaattccgcctgctagtgtatctacaccagatgtataggtagaaactccgctagctaatttcgttgccccgccgtcaagcgctgctacaccgtcttttagtggtcctactccagctgcaagtgtcgaaacaccatcatttaatttatccccaccagcggccgcagtgtttacaccatctgtgtaagttttcaagccaacttctaacgtattagcgccatctttgaacgttaaagagctatctgcgagcgtttttaaattagtagaaatcgttttattaccttcttgtgatttcacaaggccatctttaatttttccagagccatctgcagcttgggcgaacccttcaccagactctttaattttatcaaaaattgcttccgcgtatgattttgttacttcagcggaaacctcgcttttcagttgtttggctccttgttcactcacgacttgacctaaatagttcagcgagccgtttgttttataggataattccatttttttcggatctttatctaaaacggatgctgcatttttagagaaatcttttggaatcgtgacaatcatataatatttgccatcttttaagccttgttccgcatcttctttggaaagaaaattccaatcaagttctttgttgcttttcagttttgtgactaactgatcaccaacatccattgtttggccg

SEQ ID NO: 1869 - DNA, 2338 bp, Listeria monocytogenes-4B
gaaaattgtacgttctaaacctcgggtaacattgtttaagatatttgcgacattttttatgccatctgttttgttcagtgagctattcgacatggtatcgagcttaattcttagcaagttagaaacgttttgcatgacttcgctatcgaattgttctaggctcgcgataccaatgacggtgttaatcattttttcttccggtagtaaggctagtagtttcgatgcttcttctggtttcatgtatgaagctatcatcgcgatggtttgtggcgattcgtcgctaataattgtaaacaaggagtcaacatcatcaatttctcgtaaaatatctagcgcggtttcgccgatacgtgattctgcttctaccccgtaaatgagttgatttagttcttccgtcgtcatgtctgggaacaagcgttgtaagtgttcgcggtcgagtttagcaattcctcctgaaagaagttctaattcccctaaaaattctctagttgcttcttctactgcgccgccgtccatttctttcattttggccatttcacgtgcaaggcgttgtttggatgcgtcagggagcaaatctaccacttcggtcgcgatttgttcgtcgaggctccaaataataagtgcggctttttcacgtcttgaaatacctgaatctgctgaagtagctgttttttcttccgtttcttctacttcgacagtttctagttcagcatttgtttcttctaaggtttctttgagtgtttctgccattgttattcctgcctttcattgagccatttttggatgactgctgcggcgcgccctgggtcttctttggccatttcaccgagtttatttttcaagctttctttgcgggcttttaattctggttctgataaatcgaatgcatctgtttggaagttgaaatctggatgttcttctgggttgatgattgcttcttcggctggaatgtagtctttttcttctggttctaatgcttcttctagttgttctttacgtttaaggaagataatgtaggcgataattccagctgcaatgatggcgaagagtaaacttcctgcaagccaccaaatccaggctttgcttgctggtgctgctttttctgttgtatcttcttctgctggcgtggcgttgtctaagaactggatcggcatgatggtaacatcgccattttggaaagtaccttcgaatgttggtgcggctgctgcttctccgtctgcgcccgcttcttcggttgtcatattaggcgttaatccagctgaaactccaattgcttttgtgaattcggccatgtcaacaccatttttatttaaagcattttgatcaacccagacaacgacatttgtctttgctagggctgggtgttttttgatttcttggatggtggagtctagttcataattcgttgtttcacttgatttttcgcttgtataggtgttcgtatcatcaccattttgttccgtgtaatttggtacgtcagcgtttgaggcggttcctgattccgtcgtattcgcggaaccttttgatgtgtctgttgatgtgtctttttggtccctcacgtacttttccgtcgtttggataatgttccgtattttgtttgatttcgtcaaaattaaccgagacatttgtattcacgcggaaattatctagggcaaaaatgctggaaagtgtcccttcgatatctgttttcacattttttccaatcgcattttggatatcgacttcatttttataagcagaactgccttcttctttggatgtgtctgcttcagagataacaccatttttcgtatcgataatcgctacgtcatcactagcaacatttggtacggctgcgctgacggtgcgctgaatgccgagaacttgttcgcttgttagtgtttgattgtttttggttttgagtgttactgcggctgttcctttttggcttgcttcttcaaaaatcgaacttgattctggtaaagttagctgcacggaggcgctatcgatggttgttccatagctttgaacgatttctttttctaaattgactttcgtaccaactttttcttgcatttttttatcttcttcactggctccaagtgagctgtttagtagaatgtcattgccataaggcctgtgtatggaatacctaggtccgcaaatttgtcacgaacgagtgtctccactttttcatcgactaaaatgttaccacttttgtcgacggtataatcaacgcccattttggctaattgatcggtgacttgttgttggcttgtttcggatagatttttataaagagtaacttctctttccagcacacgtcgcccgccaagcatgctgctaagtaactgcaggc

SEQ ID NO: 1870 - DNA, 1376 bp, Listeria monocytogenes-4B
gatagcatttacgattccctgaaagatttgcgagggggtggtggctataattctgatgacgatacacttgattgcaatcaaaaaccacacgccatcattaccatttgcgcgactggcgaaggtactgcagaaaaattacaactgtttatcgaaaatattttagataccattacgacagatgccattaaagtgattccgattggtttgcatgaacctgagacgaaattggtgcagttacaagaagaaaatgatattttgatggcaggcggtattcaagatccgaaaatccgaatccccttcatcccgctcgaacgacttttcggaattgatggcgaggagcaacttgttagcctcgtgaagcaacgtaatattatcgtaaaaaaaggcgaaactggtcgcatcgcaaaagaaattatcgaagaaagtcttaacgaatttctaacctacctcaatccgaagaaaaagattgaaattctaagctcgtttgctagtgtactggagaaaaagctaggatacaaacttgataatacctttaaaatcaatctactcatccatgtcggttgcgccttagagcgtatggttctaaatgatggtttaatttaccgtgaaccaaaagatatgcttgaaacaaatatctttaaagcgctggaacaaacaaataaagaagttatctacatttttacttaaaagtgtcgaatgacgaactatgttatttgtatgatattttgaacgaaattctttcagaagtactttcataattacaaacaagccaacattttttcataagttggcttgttttattttcagcaattgcgttttctggctaatcttttagggtaatgatgtatgtatgtctaagattagtacttagtgtattaagctcctatctagcgtattaaggcgcgccgcttctgttcgctcacgcttacatttttcttgaaccgcttctattagcaaaggaggttgtttaatacagaaatgttggcacagtttttgcgttagtattaatggatgattatatccacgcttaaggaggagatacctatgccagttggaattatcattggcacacatggtgaagctgcgcgtgaattgttgaaatcaactgaaatgattatcggcaaacaggacaatgtagaatttattacttttgttcctggagaaaacactgatacgcttattaccaaatacaaagaaaaactagacaaattggatacttctgaaggcgttatttttatggttgatttatttggcggcagtccttataacgcatctagccaaatcgcccttccagaagacaatatggatgttgtcacgggggtcaatattcccatgttacctgaaacgctctcaatgcggcctcgaagtaatcaaac

SEQ ID NO: 1871 - DNA, 1412 bp, Listeria monocytogenes-4B
cgacgtgtgctggaaagaagtggattcaacattttgttgattattggaacagtctctatccgtgtaggcattacgaatacgaaaacaacggtgatttcttatctaacggatattggcggagtcgcgaccatttgtattttaacagcagtcattgtcgttatatttgttgtcattcgaaaagtagatatggcgacctcgtttggtggtattgctttaattggtggagcacttatcccttcttttcttaaaaatatcgttcaacgaccaaggcctacgtataaattaatcgaacaaggtggatttagttttccaagtggacattcgaccggttctacggtattttatggtatgcttgctttcttgttaattctatacgtgagccgcagatggcttcgatttacaattggcattctagcctttggtctggttattttcatcatgtattcgcgtgtttacttaggggtgcactttccaagcgatgtggttgcaggattcttaatcggcaatgcagcacttttcagtggcattggatgttacttcatttggaatcaaaaattagcattatgggcgagtagatttaaaaaagcatagaaaaaaatcctctctttcaaaaagggaggattttttattaagcatgttcgtcagtttcgctaaaaattttcaagtaagtcggtaattcttcggcaatttcggttggaagtaccacatagcgttttttagccaaaatttcgccgatatagctgtgaagaaagaccgcggctaatgtgccggtaatcggtttttcagtttgcgccattaagccacaaattgtaccggcaagcgtatcacccataccacctgttgccattgctggtgttccgtacatattttgccaagcagactcgccagaatacacttttgtacggtgcccttttaaaacaatcgttgcgtcgatagcaagcgctacatcagttggtgttacggcatctggcgctaatactttaagcctttcccattctccagcatgaggcgtaaaagttagtttcgcggcaggatggggattttctccttttgcataaatagtaatcccgtcaccatcaataattacttgttgctgttcggttgatttttctaaaactaaacgaaaaatttcttccgcataggcatcaagtccaagcccaggaccaattaaaatcgtatcaaattggctgatttgttcgctgagactcgagatattttcataatcaataaacatgcattcaggtattcttgtttggagagcaggtcggttgacactatcggaggccacggttgttaaaccagcaccacttttgacacaagcttctgccgccataatagcagcaccaccaaattgtttatttccagcgacaatcagaacgcgcccatagtcacccttatgtgtttcatcttca

SEQ ID NO: 1872 - DNA, 2001 bp, Listeria monocytogenes-4B
tacttttaaaatagcccaagttttaaaaaacgaaacggatgacaacttagcaaaagaaatgacaatatctgtttatgaaaatgaaggttacgatgccaaaacgaatacgacataccatatcgctggctatacaaaaatggaaaaagaagaaaaatatctgttgttgttgcaaaaagattcagaagatgactattatgtcccgacagcggttattttcggaaaaataaacctcaatccgaataaacgatatgaattatttcctaaaaatagcgacacagaatcagcaatcaataaagtacaagccgaagttttaaaaaatcttgaaaatgaaattgagcgagagaataaataattgtactctgttgcattttagttaaattcgtcatctaattttaatacaaaaaaagggtttggattgggggagacgggtattatataaccataagcaatgacaatgccattactttttctcccttttttgtagtgggttgtctttacttaccttaaactcccttttatacttttagcggttgttagcagccactaagagtatttttttgtaaaaaacactaaataaatgaaaactcctcgaacaagggaaagttcgaggagttcggcatttaccaatatttataaatgccactggggatattctaagtgaacaaagatatggatgtttgggagagcatccacttggagaatttaccatagatagatagcgaccaggtggtatggtaggataaatcatacaattcttgtagtgcatcatatatagcactgaattattgaattcctgataaataagaaaagcctgcaataaaagtacctcatcaagtatatttaattcacgcgggatttaaagaggtgatagaaggttgagcaattttaacatcatgggatctttaatgcttatagctgttttagttttagcagtgtatgttattaccaaagtgattaccaaattaaaaaataagtagagtttaactaaaatacctcaataacattttggggtattttatattttagtgattatttctcgcaatcatcaatgggtggattttgtgtaaagttttattgctgatatgtattaaaaatctatagtttggaggtctaataggtttaaaggcctgtgaaaatagacacattttcaattaaaaatagaaatgtgtctattttatgaatctttattgtaagagcttgtgtaatgggatggatacatatatccttatagatacggtgaaatttatttacataggaggaaatatgggatttttagaagcttacaaatcattttggagaaattacgttaactttagtggcagagccccgagatcggcgtattggtatgtagtactttggaatgttattatttttgtaatactttatgctttagcttttatttttggtatttcagctattatggaagcagctatgggtggtacgggaatggctggcggtggcggtgcaatcgttctggtaatcattttatggctatacttgctagcggctttacttccaacaatcagcttaatggttcgacgcttacatgattctggcaaaagtggatttttcgtccttttaagccttattccatttgctggcggaattattatgttaatttttatgtgtcttgaaagtgatggaccaaaccaatatggtgatggggatatagatagtaaatttgatttttaaatagaaaacgagctaggagataatcctagctcgtttttttaatggattccttcgcttacaaggaaccaattcacttggttggtattaataaaatacgttaagtcgtatctcgttaactcgatacattcgttcgttaaaaaggttcttcaagcctgcttttgatgatccccggatgctgatgtcgccgatcctcgcctccccccccaggccaatccatccgccatcttcggtttacatctccatctctcccgcccctcccctttcctatcccatctgcatatcaccttccttcaacacacctcgaccctt

SEQ ID NO: 1873 - DNA, 1265 bp, Listeria monocytogenes-4B
tcgctttgacagccataggaacttagagctgctcgacggccaccatgtgctggaaaggagcgcaacccttgattttagttgccagcatttagttgggcactctaaagtgactgccggtgcaagccggaggaaggtggggatgacgtcaaatcatcatgccccttatgacctgggctacacacgtgctacaatggatagtacaaagggtcgcgaagccgcgaggtggagctaatcttataaaactattctcagttcggattgtaggctgcaactcgcctacatgaagccggaatcgctagtaatcgtggatcagcatgccacggtgaatacgttcccgggccttgtacacaccgcccgtcacaccacgagagtttgtaacacccgaagtcggtagggtaacctttatggagccagccgccgaaggtgggacagataattggggtgaagtcgtaacaaggtagccgtatcggaaggtgcggctggatcacctcctttctaaggaaaaggaaacctgtgagttttcgttcttctctatttgttcagttttgagaggttactctcttttatgtcagataaagtatgcaaggcactatgcttgaagcatcgcgccactacatttttgacgggcctatagctcagctggttagagcgcacgcctgataagcgtgaggtcgatggttcgagtccatttaggcccactttttctttctgacataagaaatacaaataatcatacccttttacggggccttagctcagctgggagagcgcctgctttgcacgcaggaggtcagcggttcgatcccgctaggctccaccaaaattgttctttgaaaactagataagaaagttagtaaagttagcatagataatttattatctatgacacaagtaaccgagaatcatctgaaagtgaatctttcatctgattggaagtatcatcgctgatacggaaaatcagaaaaacaacctttacttcgtagaagtaaattggttaagttagaaagggcgcacggtggatgccttggcactaggagccgaagaaggacgggactaacaccgatatgctttggggagctgtacgtaagcgttgatccagagatttccgaatgggggaacccactatctttagtcggatagtatccttacgtgaatacatagcgtgaggaaggcagacccagggaactgaaacatctaagtacctggaggaagagaaagaaaaatcgatttcctgagtaacggcgagcgaaacgcaaagagcccac

SEQ ID NO: 1874 - DNA, 1279 bp, Listeria monocytogenes-4B
gcaagacaagaagggaaatctgcaagaagtgtggcgcgctatattgcttcactgcgatctttctttcattatttaatgcacgatgggaaaatgtcacatgacccaatgattcaaattgaaacgccgaagcaagctcagggattaccaaaagttttgaaccttgatgatgtcgagaagttacttagttcctctgatacgagtacaccacttggattaagggaccaagcaatgatggaaattttatatgcgacagggcttcgtgtaacggaacttgtcagcctgaaaatggacgatttacatcttcatatgggttttattcaaacgattggtaaaggagataaagaaagaattatcccgcttggaaaaacggcaacaactgtgttagagaagtatttagaggaagcgagaccaaaacttcgtagaccgaaataccgaaatgattttgtgtttttaaatcatcacggccaaggactcacaagacaaggtttctggaaaattttaaaaggtattgcgaaagaatcaggcattgaaaagccgattacaccgcacaccttgcgtcattcatttgccactcatttacttgaaaatggggctgatttaaggtcggttcaagaactccttggtcacgccgatatctccactacacaaatttatacacacgtaacaaagctgcggttgaaagatgtctacaaacaattccacccgcgcgcttaaaaaatatagttgaaaaggatgagtaaatatgccagataaatttaaacgagtacatgtagttgtaatggattcagttggtattggagaagcgccagatgctgctaaatttggtgattttgatgtagatacatttggacatattgccaaacacgtcggcggactaaaaatgcctgaaatgggcaaattaggtctatcgaatattcgagaaatagacggaattaaaaaagcagaaaaaccacttgcttactatacaaaaatgcaagaagcttcgaacggtaaagatacaatgacgggtcactgggaaatcatgggcctatacattgacacgcctttccgcgtattcccagatggatttccggatgatttaatcaaccaaattgaagaaaaaacaggacgtaaagtaattggaaataaaccagcgagcggaacagaaattatggctgaacttggagaagagcatgtgaaaacaggtgcgcttattgtttacacatcagctgactcagttttacaactttccgagcacagtggcgcccgctcaaggcaaggggctagttgccccacaggg

SEQ ID NO: 1875 - DNA, 1322 bp, Listeria monocytogenes-4B
  misc-feature (1)..(end): n can be any nucleotide a,g,c or t/u
aaagcggcttatcaggtcttgatttagcggcaattcaaacacaagtaacagaattgcaaactggcgtagcgaaaatttccgctggttatcaagcagttcacggtggaacaaacgaagcctttaacagtattcaccaagcaattaatggctcaggtagtcaaactctacttggcggcgcgaaccaactaactgctggactcaaatcagcacaagctggaaatgccaaattagttgctggaacaaatcaacttaacagccaagtgccaaccctaacttctggcgtaggacaactcgctgcgggtagtgcaaatatggaaaacggattaagtcagttaaatgatggtggtaatcaacttgcaagtaattccggcgcattacgttcaggcgcaacagagttacaaggcggaacaaaccaattagctgcaaaagtaccaacacttgcaggtggagttaatcaactacaagcaggttcaagccaattagcaggcggtctaaaccaactatcagctaactcaccaaaactagtttcaggcgtaggacaactagcagacggctcttccaaaattgccgatggttcttccaaattagcgaatggttccttccaattaggagatggacttactaaattaacagacggcagcacagaattaacagacaaactagcagacggagcacaacaagtcaaagatacaaaagcaacagacaaaacatttaacatgattgctgctccaacaaaactcgcacataatgaatatacgcacgtaagtaactacggacatgcattagcaccatatgtgttatcactagctctatatgttggtgcacttgtatttaacttcatcatgccaatcagacgtgtttcgatggaaggacaaccagcttataaatggtggttaagtaaactatcacttggttttgtcgcagctgttgcgatggcgcttcttgaaggtggtatcatgatagcactaggactaagaccagatagcattgttgaattcttcggaacagcgattattacggcacttgcttacatgttccttatcatgctccttgccatgacatttgataatccaggtcgttttatcgcgatggtattactcattgttcaattagcgggatcaggcggaacattcccaatgccacttactggatggttcttcaatttaatccatccgttcttaccaatgacttactcgatttatgcgtttagagagtcactggagcaggttggaccaatgttacagatgaatgctcgtctcacatagcgtggtgctatttatttacatgaaacctgtgctatcattggaaataacacggnccca

SEQ ID NO: 1876 - DNA, 1422 bp, Listeria monocytogenes-4B
agttttttgtctttttctactaattgccacgtataattcggatgtgttttttgtagttcatacgctgctgcaagccctgataagccgcctccgataatgactatatgtttcactacttaaccaatcctctctatctactctttcgtttattctatctattttaccagatttcagggtgggtgaacaaaaaataaaagaacagccatttccaaaattacagtcgctattgatcagcgatttttaggaaatgacgtgttcttttttaatttattgttttggacgggctgtaccaattgtataccttgatagctaagtcttgattgatatagcgaacataagcttcagcgcttgtacttcctgatttaagccaaacatttaagtgccttgatcggcctttttccatccaaatgctttgtcttaagcttaaaccttgaattcgctctttgcggataatgtgcgttaacttggagaaaattgggcgtgactggacaaggagtgtgtgcttatctgtgaaaactccagtcgcgcggtagctggctaccccttttatccctgctaaaactggcaaaataatactaattaagccgagtgggaaaaataaaatacttgctactgcggctgggataattgtccagatcaagtaaatctgcaaaaatctgcgcaaactggcttttggagcacgttccattttttctatttcaaataaataatctggtagcatttcttttaatgtttttaaagccaacgcttttttcataataggcaaaagtaaaatgtcgccggatagtttttcatcacctgagttccctgcagtagtaactttgaccgctactaagccgagcatttgtcgtagtggtgattcaataatggtgattccttgaatacgcgaaagtgaaatggttgtatggtttcgttctaatagtcctttttctacaacaagtgaattgggatatttcatcaatttgaactggaaatacttgaacaatgtcgtcacaatcgatattccccataataccaaaagaatcaagacaattaatacaattagtacgataatgcccattttccataactcttctgcttgagcttccatccagtctgtcgggatgacttctcggaattgttgcatgaatgctagaacgataaggagcgtcccgaaaacgccgccggatgttactgccattaaaataagctgttttgataaatagcatgaccgttttttctggtgcttctgccacttctactgtggtttcctcggtttctggcacggcttcttggatgtctctctttttaccgtcgcgtaaatcatttaattcgtctactacgccaactgggacagcgactaaatcggcttctgcttacccgttaccgccagctgttctttccagcacatgtcggcgctcgagcagcggtagttactacagt

SEQ ID NO: 1877 - DNA, 1072 bp, Listeria monocytogenes-4B
  misc-feature (1)..(end): n can be any nucleotide a,g,c or t/u
tcgactagacacggccgacagtgttgctggaacgaagataccgacgataactccacgcatgatgtaataaccagttaattccgccagatacaccgtctccaacaaatgtacctaggggcccaataacaacaagcgtcaaaggaacaacaataaacattgtaattaatgggacaaacaacagttttaacgaggttggaataatccggtccacccatttttccacataagacataatccaaattgcaagtaaaatcggaataacagagtaagcatacgtcactggagttactggtaacccgataaagtgtggcgttgtccccgcactaagtaaagccgttaaatccggataaagtagcgccgctccaattccaagcgcgacaaacatattcgctttaaagtaacgcgcggcacttacagcaactaaaattggcaagaagtaaaataccccgtcaccgatagctaacaagatacggtaagtttctgtatctgttgctaaccaaccaagtgaaacaaataatgccatgaaacctttgattaaacctgctcccgcaatcgcaggaagaattggtgcaaacacgcccgaaagtgcatcaaagatattcgagaaaaatccttttattcctttttgccgtgtcgttttatttgtcgtttctttgtttttccaagcaggattttctgtcactaatgcgtcaaacactttaggcacgtcatttccgataattacttggaattgattccccgcaacattcgtccccatcactttatccaaatcttttaattgtttttcatttactttcgattgatcttttaataaaaaccgtagtctggacgagcaatgataaacttcattcacattatttttcccaccgactgcctgtaaaatttctaatgctaattgattgtagtccatgctaatcctcctaaatataatagaaaaacctgaatgaaatgcacctaaaaaagcatacaatcatccaggtattgcccacaaatcgcggtaacaagcatctttcgagcgcnggtcggccatcgatcaacggtgagagcttncagccngtccaaaaggttacac

SEQ ID NO: 1878 - DNA, 889 bp, Listeria monocytogenes-4B
tggaaagtcaaactcacaacgacctactacgtatgaatcaaataacctagtaaaagaagtgaatcctaagggacaagaagaaacatattcttacgatgcagatggtaatatcacgcaagcgacagatgcttacggtacagaatcatatacctacaatggaaataacgatgtaacgagcgcaactgacacagaaggacgcaaaacgacggttacttatgacggagcagatgcggtgtcagaaacacttgcgacagaatcccaagtatcctctgtaacgcagtatgacgcctatggaaatccaattcgaggtagtggtgaactttcttcagcaggtaacttacttcaaaacagcggctttgaaaaaggagcaggagtttccaactggacactgattcaatctgatgcaaaaggaagcatgacattcgatagcactcagtcagctccaggaacactcggcggcagcggttccgttaaactaacgagtgaagcaaattctaccgtaaaaggctattcatccgttactcaacgcgttgatgtagaaccagaaacaacgtatacatttagcgcctggattaaaacatccggaatgacaaacgccgatgcaattctcattggacgtttacaagatgcgaatgcaaaagatattaccgatgctggcgtatggcaatccaaccgtgcgacatccatcaaaaagaacggcggctgggtaaaacgtcaattaacctttaaaacatctaaaaacacgcgccaagtcttgctttatttggacaacgaacaaccagctccgcataaaggaaaaggaacaatttggtacgacaatgttcaatttgaaaaaggtagtgttgcttccagttacaacccggtagtcaacagcagttttgaagagcac

SEQ ID NO: 1879 - DNA, 1573 bp, Listeria monocytogenes-4B
gccattcctatttggtgtattatttgctagcttgattcaaggtatgccgattaatagtgatatggatatgtacgctgggttctttgattacattaccgtattctccgtatggggtggcgtgacgattacgctcatgtgcctacttcacggattactatttattactttacgtacagaagaggatattcaagaccgtgctcgtcgtatggcgaaacgtgtttggtttattactgtaccagctctagtaattttcgttgtacttgcttacttcaatactgacatgttccaagttagacctgtacttgtaccactgatgattggaattgtagtcgttatgtacgtgctatctgccctgtttatttggaaagatcgtgatattttggcatttacattcggcggacttggaattgtcttcacgattgcgacgattttcgtgtcactattcccacgtgtaatgatcagttctatcaacagtgcgtttgatttaactatagaaaatgcagcttccggacaatattcgcttagtgtgatgacgatagttgccgttacgctactgccgtttgttcttggttaccaaatttggagctactatgttttccgtaagcgcgtttctagtaaggagaaaatgacgtattaatgggaaaagatttaaggaactacaaaggaattaaaaaaataatggcgattctcgcagttttcacgctagttcaaggtgctgcgattatcgtgatggcgataactttagctcgtgcgattactgacttatttcacgagcacgcgtttcaatcagtcacaatacaaataggtctcttcgcgggggcctatttcttgcgtcactttttgaatgtatggaaaaaacaaatcgtttaccgttatgctgcgaaactagcgaaaacgatgcgggaagagttgcttgatagtttgttcgcacttggaccgcgttttgctcgagcggaaggaactgggaaagtggtcacgatggttatggaaggtgtggcggatttccgaaattacttggaactgtttttacctaaaatgatgaatatggcaattattccagcgatgatttgggtgtatattgcttttcaagactggacttctgcttttattttgatgattactttgccgattttaattgtatttatgattattctaggattagccgcgaaaaaacaagcagattcccaatttgaaacgtatcgcgtgctctctaaccactttgtagattcgttgaagggtttggaaacgttgcggtatttggggcttagtcacgaccatgaagggaaaattgcttcggttagttcgcgttatcgtaaagccacgatgaaaacgttgcgtgtggcatttatgtcgtcattcgcgctagatttctttacgatgttatcgattgcgctcgttgcgctgttcctaggtcttggtctcattgacggtaacatgaatttgccaattgcgcttagtgtcctaattcttgcgccagaatactttttaccagttcgtgaggttggctcggattaccatgccacacttgacggacaagaagctggtcgagttattcaagggattattgaccaaa

SEQ ID NO: 1880 - DNA, 1015 bp, Listeria monocytogenes-4B
  misc-feature (1)..(end): n can be any nucleotide a,g,c or t/u
gctgggctagtgcttcttttttcgcttcgatgcgatcaatcattttcccgagttcgtataagccgtccgcatcaattctcgcatcagcagaaccgtccacttgggcgtggaaatcagctatatattgcgataatcgttcttcgctttcgttcattgcttcgattatcgcatcacataatggaaaataggtcatttgatagtaatttttcgatgcatcaatcgcttttccttttaaactgccgtcttcggtatagtttttcacggcttttttgatgtctttaatgctttttcttccggcttcattagctgtatgtagttggtgcgcaaaggtttgtatttctccgatgtcaattcgactcactgtaacaactccttttgtaaatcttgttgttgattttctaattggtagatgtttttttggcaagcggtgattttttgttggtgttcttcttggttcgcttggatttttttatgccacttctgtttttcttcttcctgtagatctgccaaatagtagccgaaacttcttgattctgcgccttgccaaacttcgcgcagaagctccagcgactcccgttcttcttgatggacacgtgcaaaatcttctgctaaccactcttgttcattttgttgtcgttgtaaatcttgcaaaaaatcttcggccgcggattgttcttttttcagcagttgcagttgtgtctccatttgctggctctttgcatccatttatttacctcccaatcccatgcctcgttcaagctcttggtctttgcgagtaaatgatacgcctaattctttcaatcttttggcatccgttcctaccacaccttgaaaattgtccaccgcgtctaccaagtcaaacaatgctgttcgaaaatggttgacggaattggcttgactataggccatattgccacctttcatcggntaatattcagttgatttacctttagattctacttgcgcggtttcatgtgtctactttctattcacttaacttaatccttgttccttt

SEQ ID NO: 1881 - DNA, 1840 bp, Listeria monocytogenes-4B
atcgaagtaccgaacgttatcccagttagttatactggcgcgtcaggcatgttcgtcggtattatcgttggtttaattgcaaccgatttattcattaaattatcgaaaaacaaacgtatgcaaatcaatttaacaggaaatattccaccggcagttattaaatcatttaacgtgttatttccgattatgattacggttattattttctcagttatgtcatttgccgttaaccaaattttcagcatggactttaatacacttgtgacaacgattatcacgaagccgcttagctatgtgacgacaagtcttccagggttcttgctgattacttctatcgctaacttattcttcggtttggggattcatcaagcagttatttctggtccgttactagatccatttttacttcaaaatatgcaagaaaacatggtagcctacgcgaatcatcaagaaattccgcatattattaacatggctttcaaagacacatttgcggttatgggtggctcaggaaacacgattggcttattaattgccattttcatctttgggaaacgaaaagattacaaagatatctcgaaactatctgcggcaccatcactatttaacatcagtgagccaatcatctttggtctgccgattgtgttcaacccgttacttattatcccgttcgtattagcgccaattttctccttaacaacagcgtattttgcgacagcagcaggttggattaatcatgtagtcgtacaaacaccgtggacgacaccgccgattatttctggtttcctagcaactggcggggactggcgcgcgtccgttttacaagtaattatcattgttgtgacggtctttatctatctgccgttcctacgtatggatgaaaaagttgcttttgctacagctcaaaaaacagaagcaaaataaggaaggaagtttaaccaatgaaaaacattttattagtatgtaatgctggtatgtccacaagtttcttagtagaaaaaatgaaagcagcaggcgcggaacaaggcgttgaagcaaatatctgggctgtatccgacgctgaactacacgaaaactgggaaaaagcagatgtcattttgcttggaccacaagttggttatttaaaagggaacacagaaaaagtagttggcggaaaaattcctgtcgaagtaattaatatgctagactacggccgtgtcaatggagcggcggtacttgaaagagcaatcgaattaatcggttaaaaaagtaagggagtgtggcttatagtcgcactccttttttatcggggaagaaagtgttataatgtgtgaaaaggagcggaattattatgaaatatgtaaaatcacaaatgaaagagcttgtaaaagatagcgtagacttgcaagaacgccttcaaaagctaatgaaagaaatggacttagaaaaaactttcgctttaaaagcactttatcattcagaagtagctgatggtggaccgtaccaaacagcttatcaagatttggattataaatataaagattaacatcaaatggctctgctaaacaattagcagagccatttttagatatattttccttggatttcctttaagtagtcaacaaaattatcgtaaaagtcatcacggttttgaatggttacatgcgttccaagttggagcaaaaagcggtacccagcctcgtgatcaggaagcgtcacttttgccaaaaagtgtgcgtcatcttgctgcgagatttcgactagatcaaagcgctcgatgatttgctcgcgggcaattttatcgacaattaagttgacttcatgcatcaaaaacatcggtctgtcgggtggggcgccaaac

SEQ ID NO: 1882 - DNA, 1012 bp, Listeria monocytogenes-4B
ggctctagtgtgctggaaagtggcgccaactcagatgacggttccaaactaaccaccgattataaccctgcaattgttaacacatcaggggattatctagttcatctgtatgctgttgatgccgcagggaaccaagccacacctgtagaaattactattcatgtaaaggatactaccgcgccaatcattacggcagataagaaaattagttatcctgttggaacagataaaacggtaacggaatttttacaagacattcatgctacaacggacgatggttctaaaatcacgacagatttcgatccaaatatgttgaaaacaaaaggaacatatactatccacttaaatgcagtagatgcagacgggaataaagctaagacaatcgatgtaagcctcacagtagaagagaaagtgacgccgccgacaccaccgacaccaccgacaccaccgacaccagatgatggtggaaataatacgaataacggcagcaatgggacaaatgatagaaacgccaatataacggtaaatcctaccaagcaaaatactaccgctacaaatgaaagcatcccagcattaggtgatgcaacatcaactattccagttatcgtaggtatgttccttttagccacttcacttgttcttattagacgcaaataaaaaaagctagcgacaaacatgtcgctagctttttaggctgttttagcttttttcttttgtttaggtttttttgactttctggaaataaaacgaacgaggctaataataagagatacaacatattcaccgaatgaaccgatgaatatggcaatagctatttctgtttgggacatcccgccgccgtaaaaactaatgaaaaataccacaccacttgcaattagtcccatagttgctaggaaatatttaaaccaatataaacgaaaaacaaaagcatataaacccaaaacaagaaaaatccaagaaaaatctttccagcacacgtcggacgtcgagcagcggcaagttcccacagtac

SEQ ID NO: 1883 - DNA, 2151 bp, Listeria monocytogenes-4B
  misc-feature (1)..(end): n can be any nucleotide a,g,c or t/u
gcttcactggcatgcacagcgacagggaaggcgactttaagcaactggttacgatctcgccagtcgacctcggtttcaaatctgatttcagggctctcgtgataaaaatgaatccactgagtgatttgagattttcggaatgtagcacttgcttcatagtgaattggagtgggccgttctcggttatttcaactgaatctagcgcgctgatttctttttgtttttcttgatagaataggtcgatatcccaggcgtcatgccacatcggcttatcttcaaataattgaaatacattacctcgcgcattttccgctattacttggcggttattttttttgtcaaaaatggacgtgaattgtccggctttattccatttgatttgatagaagggtgtttccaattggttatttttatagtgaaaagatggttgttctaaaatgtttgctgtttctttaacagaaatagttgtagcaccaagcgcaggtatgtttggatgctggataagccaggtattatttaccaatttttgcgcaggcagtggagcattattttcatcataaaaggctaaatggttcgattgattgtcgggtgaaatttcgatgtatcgcggtctggaccaagtggaactattccaaagtgttattttttcatcggcatctgtagttaaattggtcaattgattagaaattaacgtattattttccgtcatagcttccgtgtactaaattagagcgtcgtcataaacttctttgatggaagagccgggaataatatcatgaaactgatttcgaagtaaaatttgccaaatgcctgctaatttttcagttgggtaagacgttccttgttttagattcgctataaccgatagccattcgctatttcgtaagccgagttcgatttttcgattcatttttttcgcaaatgcttggctcgtataagttccgcggtgatattcgaagtaaagttcgccgttccaagtatgaacatattggtctgtcgtatttatcgtttcgtgtaaatcgttgaaataagaagtagcactttttggttttacttcaggaattcctggcatcgtatcataacgacggagcatctctagcatttctcggttcacaccgccaccaccatctcngtagccgtaagcaagtagtaattcttggtttacctctttatcttgatatttgtcccaaagaccaacaagttctcgtgctgtcattttgccattataggttgaaatgcggctatttttttctggtgcagtgatgaaatgggtcaaaatttctgtaccatcaattccgcgccactggaacgtatcatgaggcatacgattatattgattccagcttattttggttgtcataaaagtcttaatgcctgatttacgaaggatttgtggtaaagcccagctatagccaaatacatccggcaaccatagaaaactagaaggtttaccaaattcttcgcgtaaaaatttctgaccatagagcatttgccgtacgagggattcaccgctaggaatattacaatctgcttcaagccacattccaccgtcagcttcccagtttccttcgctaattttcgttttgattttcgcataaatttctgggtaatcttctttgatataggcgtaaagttgcggttgcgattggagaaataagtattcaggatagtcttccattaaatgaagcacagtcgaaaatgatcgtgcggctttttcgcgagtatgctttaagcgccatagccatgctacatctatatgtgtatgcccaacagccgccactttgataggaaagtttttcggcattttttccagtgcggcttgtaagatttggttggctgttgccatcgaggcaaggttttgttcggatcctggtgtactccaatcaattgcaaggtaagcgcgattaatcgcttggaggagcggcgcatgggttggatttttttcttcgagttggtcgagtgtttttaaagttgctttactcgtgaaatacaaatcatcaatgacgagatttaagtatccaataaaggcttcttttaactggtgtgtctggatagtaggagtgccgccaccttccagtccggaccataaacggaagaccagttccaccttttttccagcaaaactatctgggaaaagaagaacttcgcggg

SEQ ID NO: 1884 - DNA, 1743 bp, Listeria monocytogenes-4B
atcaggtggcatggtttatacgaagcaaagaaaatcgaactcaaaaagtttcatcaatccttatagaaaaagcgacgatgcatattcgcatcgtcgtttttttatttcccgggaaatagttattttaattgttgttctgcaaaggaagcgtaaagtggatgggaagcaactaattcactatgtgtgccacgaccagttatttccccgtgttcaataaagagaatttggtcggcattgacgatagtagaaaggcgatgagcgataacaaaagtagttcgaccttacattaagtttgccaaaacttgttgaacgatttgctcggattggctatctaaactagctgtagcctcatctaacataaggatattaggattacgcaagaatgctcgagcaatggcaattcgctgtctttgaccacctgagagcttcacgccacgttcgccgacttcggttgccattttgtcaggaagttcggaaataaagccgtcagcataagctagttttgctacattccatagctcatcttccgtaatttctcggtccaaaccataacaaagattatcgcgaattgtaccagaaagcatcgcactttcttgggagacataaccaatttgtgttcgccaggaattgatcgaaatctcggaaaggggaatatcgcctactaaaatttctcccgttttcggttgataaaaacgctctaaaatcgcaaataaggttgatttacctccaccgcttggaccagcgaatgcgataacttctccgggttttgtatcaaaagaaacatgttttagaataggctcaccttcattataggagaaggaaatatcagacgcgcgaatggtttttccgctcacatctacttttttaccagcgtcaaaatcttcttctgtttcattcaaaatatccgcaattcgttctgttgcgccttttgctttttgaagttgggcgaagaatgttgcgaaagaagtgacaggaacgataatttggaacagatagagcaaaaaggcgatgagggtaccagtagtcatcgttccagctgaaacacgaatcccaccgtaaccgatgatgccaacgataacccccatgacaacaaagaaaattagcggtccaagcacagcaacaactttcgcctcacgaataccaaagccaaataggcgattaattccttgatggccagcctcggtttctagtgtttccgcattcgaagcctttacgagcctagcttctgatagcgtttggctaatggaaccagtgaagtcagccgtttcattttgaagacctttagatattttaaacattttctgaccaagtggtgcaacaactagcgcagtaatcggaacggccactaaaataatgagtgtcattttccagtccatgaagaacaaaataataatcgccccgacaacagaaattatccccgttacaaattgcggaaaatggtcggcaatcagctccttcactaccactgtatcatttaccatgcgacttaccatttccccagtctttgtattatcaaagtaagaaaccggtaaatgcacaattttcttccataaacgttcgcgaatcgttgcaacgactttctgacccatgtagttaagtaagaaaatcgagaagccattcgttatagcttgtaaaacaaatgccaacacaattaaagcaatcatttttacatcgagtgaagctattgaaaagccatcaattaagttctttgtaaaaagtggcacaacaaggccggcaactgta

SEQ ID NO: 1885 - DNA, 926 bp, Listeria monocytogenes-4B
cataagcaaacctcctccccttggtacatattagcataaaaagttaatgtataaaaaaactgctcaagaatggcttttcttcgttttaaataagcaaaaaaattttttttatagtaattattacactttatgtgttgaatttgctctttttagataaattccacacctatatgtggtcgttattcaaaaattattcagtttgtaaatcaaacagcaaaaagcgccataaaacattcatttaatactattcatttatcattttttattaattttagtagtaaagaaaaaattacatttgaatggatatgtatatttattcaatccacatgattattctaaaatcgtaattattttcttgactccatcgtttagcatccaaataaaaaagtgatacaaacagcttaaaaaagcagtttgtatcacttctcagtttccataaaatatggagatggtgggagtcgaacccacgtccagaaatatcggcacttaaatatctacgagcgtagtcaccgtattagcatttcgcataaacatcggcccggtaacaggcttccattcagctagtctgattaagctcttctatttaaccccagacggagattaactagtgtagcccacttagagtgagacccttaccgtagcacatgggcgatgcacggaggatcagctatgctactgcttattaggcagcgaaagctaggttttgtttttctttgccagttattattggctttgacgttgataacgaggacgatccccccgactcgcaactcaagctcgaactatccctgtcgaatccgtaacatccccagagttaaagtctaacagtagttattatacatgaaaaaacgaggctttaccaacagaaaaaacttgtgacatagccaaatgcgcaactattatttagcatgtcacaagttttccat

SEQ ID NO: 1886 - DNA, 1282 bp, Listeria monocytogenes-4B
ttgttcttattctccatcatcacgcctcaagggcccaaagggcattcgatcagcatgtgcgcatgcaaagtcagcgctttcagggcatgattttgatgatgaaattctcttgaaactggctgatttaatcgcatttagagaaaattaatcataattatctagtaatttcaaatttttttcgcatatataattcaaattgatttgcttttcctaaaataccgtgttatactaatgtaagattatttttgtgggtgaaagatacgattgtgaacaactttccatctcgtgccgttaagcaagaatagtaaataattagtgtgcataacacacgaggaggaacatgaacatggaacaaggtacagtaaaatggtttaacgcagaaaaaggatttggttttatcgaacgcgaaaacggtgacgatgtattcgtacatttcagcgctatccaaggcgacggattcaaatctttagacgaaggtcaagcagtaactttcgacgttgaagaaggccaacgcggacctcaagcagctaacgttcaaaaagcgtaattctattttttgaataagaaaaagcaaatcatttcggtgatttgcttttttatttgcctaaaattattttaccttgtttggtttaatggtgattgtttgctataataagaacaattaattgagaaaaaagaccttgcacacattcatgcaagtggctctttggaaagtgagttgtttttatttggatcttttaaaaataaaggatccttcctttatgaagcaattggatatacaagaattagaagcacttgcggcagatattcgcgcttttttaattacttctacttctaaatcaggtgggcatattggtccgaatcttggtgtggtagaactaacgattgcgttgcattattcttttaatagtccaaaagataaatttatttgggatgttggtcaccagtcatatgtgcacaaaatcctaactggaagggcgagccaatttggtactttacgtgagcacgggggattagatggatttccaaagcggaaagaatctattcatgatgtatttgaaacggggcacagctcaacttctttgtctgctgcagccgggatggttattgcgagagatattaaaaaggaagaattttatgttattgcgataatcggtgatggcgccttaacaggtggcatggctttagaggctttgcatcatataggccatctggcaaaagatgtgacagccgttgcgaatgatgctgatgtgcacctcgcccccgcaccagaaaaaaaaaa

SEQ ID NO: 1887 - DNA, 1614 bp, Listeria monocytogenes-4B
ccgcggactcaggtcgtagcactgatcgatagtacgggccgccagtgttctggaaagaggactaaaatgaatatggatggtgagcgggactatttcaaatctgaaatatgatacataccagctaatcgaaacaaaagctccacaaggatatgtgcttgatgcgtctccagtagaatttacaattgatgacgcgcaccaatcattatttctatccaaagaaaactctgccatcaaaggatccgtttcactagagaaagtcgaccacgacacacaaaacctactagctgatgccgaatttgaactacaagataaagatggcaacacactacaaccaaaccttaaaacagacaaaatgggcaaactaacggtgacggatttacttccaggcgagtatcaatttgtcgaaacaaaagcgccaacaggctatattttagatgctactccagtcaaatttaaaatcagcacagaggcactaaacgtaaccgtaacaaaagagaacacgaaaaaaccagaaataccaaaagtaccagtaccaccaaaaacaccagaacaaccggataaaccggataaaccggataaaccggataaaccagaacaaccagataaaataataagcgcagatagcaaacggacgactttaccaaaaacaggggatacaccacttgttaatggttggggaatactgctcgtagccatttcagcgagtggattaattgcacttagaagaaaataatcaaaaaaccgtaagcgataatacaatcgcttacggtttttcttatatagttctagtttgatcttgtaagacagcctttaacgaatgataggcaggaatagataagtttaattcaacacgattaatttgttgtgccatttttggttggatgccagaaataaatgcctcgacaccaagaagtttaagcatcgtcactaagttggtaagcatttctccaagtgcatcatcaaaataagtaattcctgataaatcaatacacaattgttccacgcctaagtgtacgcatttgtttgccgtgatttcggataacttttctgctctttcacggtcgacgctccccatcaaaggaaggatcgctaatttgtccgtgatagaaatgacgggtgtgctaatttcttctattaaacgatgttgttgttctaaatgtttgacgatatcattgtaatacatggcggagaaggcttcgtttatccggtcaaacccgtgattaaccatggacagacttgatgagaaatcacatttagacacttcatcattatgaatacaaaaatcaccaacagcagaaacaaattcacggcgtagtttatcaagggtggtaataacttcaggtaatggtacttcattttccatgcgacgcgcgtacatgttatccagccatttgtcgagtttctcaaaaaatgcttttttaccagcgaaataagaaatgattaagtccgctgtttgttcactgtcagcgcgcagttcatctttgtaacgcggcgagtaaacaaaactagtatacgtgttttcgttttcataaattttggatagccacttattaataatttcttcggtatgttctcttaaatatagctccatacttccattcaaatcattcatac

SEQ ID NO: 1888 - DNA, 1184 bp, Listeria monocytogenes-4B
agatgtcgtattagttagcgctgagaaaggccacggttttgatactcttttagagaaaattgaagaattgcgaaatggacaagatgtctatgttgtcggttgtacaaacgttggtaaatcaacgctaatcaatcgtattattaaacaagcatccggggaaaacaatgtcattacaacctctcaattcccaggaacaacgcttgataaaatcgaaatcccattagcagatggcaatgtacttgttgacacaccaggaattattaaccatcaccaaatggcacatttcattgatacaacaacgttaaaagctattacacctaaaaaagaagtaaaaccagctgtcttccaattaaacgaagaacaaaccctatttttaggggcgcttgctcgcttagattatgtttcaggtggtcgcaaatcattagtagtctatgtatctaataatttaccaattcaccggacaaaattagaaaaagcggatgcgttatacgaaaaacaagcaggaatagtgcttcaaccgcctacagaagaagggatggagacacttcctaagctagttccgtattcttttacaataaaagaaaaagcggatattgtcttttccggactcggctgggtgacaattccagaaggcggcgcgaaagttactgcgtgggttcctgaaggcgtgagcgcaactatccggacatcactcgtttaaaacgaaggaggcctgtcatttggaaaaatatgttgttatcggaaatcctattcgtcactcgttatcaccagctatgcaaaatcggattttccaagaacttggaatgaatgcggagtataactctgttttaatagaagaagacgcttttgaaacagaaatcaaaaaattaatggattctggagtgcgtggatttaatattacaacaccatttaaagagcgtattttaccatttttagatgaattagaggatcttgcagcagcttctggcgcagtgaatactgtgctaaaaaaagaggacaaatggtacggatttaatacagatggcaaaggctacttagaaggattagaagaaatccgctcaattacagaagatgattctattttaattaccggtgcgggtggcgcaagcaaggcaatttacctagcgctttccactcacacggatgctaaaataaccgttactaatcgtacaacggaaaaagcg

SEQ ID NO: 1889 - DNA, 2298 bp, Listeria monocytogenes-4B
tttacaaacccctctactttttctactacatttaaaagacatacctggatccgtcaccataaccaatatgcgaaaaacaataattaagaattcaatctgaacggatgattagactatgacacatgtaacattacctattctagaagactgggaaggcctttcactaactactatttttcaagaaaaatctcatctcggccaaaaagcgcgacatgaaataatgatgtctcaaaatgttttgctaaacaataagccactggatgattggaatacgccacttttcgttggagcgagtctttatttaccagatttcttacatgacataatacctgtatatgagtacgacttggaaattatttatgaagatgattttttactattactgaataaaccaactgatatgaaaactcacccagatgatagttatgaaacagatacttgcgctaatgccgtgcaatatgacttagaaaaaacaggccttgatgcgaacgccctagcagtttaccgccttgatcaaactacttacggtttactactgattgctaaatacaaattatctatcgacggcttatcttggcaaatggaaaatagagcgattcaccggacttatctcgctgcagttgatggaacttggggactcgtgatgcaaacaatcaacaaaccagttggcgaagatcgtcaccacggttccagacgccaaatcagcccatacagtcaaccagcagtaacgcatgttaaagtattagaaaatgataacgaaaaaaacacctctcttgtagaatgccaaatcgaaactggtcggacgcaccaaattcgcgttcatttaagcggaattggccatccaattattggcgatacgctttatggtggttcccctcgtgctaatcgcatcatgctacatgccgaaaaattacatttaaatcatcctttcaaaggtaaagaaatgaatttttctgctcctgctggagatgattgggtattttaaaaagccacaacattacgttgtgacttctgtacaaatttctacttttattccatttggatcttcaaaaaatacagcataatgattttcaccgccagcaaaaggatatctttcttcatatagaagtttggttccttttgcttttaatttggctcgaaaatcatccacccgttcttttgtgccaccatgaaatgccaaatgattgagcccaactcgtttgcgatgataaccttccgcgacaaacggttcctctgtttgcacaaatactaaatacgtatcggcgaatttataactaaagccttcattccaagtctggtataactcataagaaagttcttctaacagccctgaccaaaacaagcgactttcttctaaatcagctacatatatttccacatgatgtaacatatcacgcctccccgatgtgtttaagtgcttctcttcggcttaacggcgcaagcgagtgactatttacaaactgacgaactgccccgatatcgacttttgcatattgtctgagcgcccatccaatcgctttttgaataaagaattctttggaatccagccatttttcgcaattggaaaaaagtaaagctacatcggtttcttctttgtacttcaattgaaataaaattgccgttcgagcgagccaaatgttatctccatttatccacgcttcattataggtaggaatcaactcaggatatagtttaaaatgattacttactaccgttcccgctaggccatccacagtatcccaccaagatttcgttacaattaattgctcatatacttttatcgcctcactaggctgttttttaccgtaacggcttaataaatcaatcgccacatactgaaattcacgctcttcttcagcaaataaggctatcgtaaatccaagtaaatcttgcggcgccccattttctttcaaatattccgctaccaatttttttcgttcaccggctctaattcccaaaaaagtaaattgatttttcatgtaagcttccattggcggagcatctattaaagaacgattcgcgcggaataccatttgaatatctgtcattccgcattctcacctgataaataagcgcgttcccgttcaatactacttaaaaagtattctaaatcatctggatctggtccaacacgtttccccgtttctaagcgatcaattttttccatatcaatggcatctagttggaaataggacaaacgtgaattctcctcaatccgactagaagtaattggcttccgaaaaataatcgtattgcggttcaaatgccattggaaaatcacttgatctacaaatactt

SEQ ID NO: 1890 - DNA, 1743 bp, Listeria monocytogenes-4B
  misc-feature (1)..(end): n can be any nucleotide a,g,c or t/u
gcatgtcacatcggtgtgctggaaagtttcacattcacttcccttctgcttgcactaacaaacaggttcaaagggtcagaaagcattaccttcctatctcagccagaatcggcccccctagtttttcttattaagttgcgttcatcataacatagagttttaccgctgtaaatccccaaatgtaataagctcaaacccattttcaagaagccaatcccgcacccgcacatcacaaatcgtcgcaagctcgcggcaccgcatcaacgtataagaagaattatccagcacaaattgatccaaaaaaccgacatcaaaatgcatctcagcgatttcgtttggcgccaattttaataatccgaaatcatcgttaaggaaattttcaactgagacaccaccatttgtgtatgggagtgcgccagactccaacagtttagtaattggtaaataaccttcctgatctggccatttcttatcaccgctgtattttaaagtggtgtgaatcccgaactcacgcgcaatatcaaagaaagcttggtcaaccgtttcatcaccgattgagtggcagtcaatgtgttctgggtagtgacccgttagcgctttgaaccgttccatttgagcgatagtttccgtgcgcacatcttcgtattggaatttcagttctgggttagcacggtaatatttggaacgatggaattccccgttttcgtcgacaagtgacgggatttccgccgggtccgcgcatggttttccgagtaagaaatttgtgtgttgcccgatgaataggtctgtgtggtcttttgctagagtgattgcgtgctcggcagtttctaggttcggcatgagtaaagtggatgttgtgatgccggttttgtagctttcgatgatgccgtggttgatggctttggatagaccgaaatcgtctgcgtcgatgattagttttggcatggtaaatccacctctaattgtttaaacacaacatccaaaatctccaccggtatttccgcaaacgcatccccaaccgaaacctcaaacgcacaaacatccgccgatttctcctgcaaataccccgaaatcccaaccccagtttcatcctgaatcttcgtcaaaatcgccccaatctcatcagccgacttctcaaaataaacatgaaacatattagaaaccggcacttccggcacagtcttcacgcccgaacacgaattaaatcgctcagccaatcctttcgccgcttcaaaatattccgccattttcccaatccgtttttcaaaatagtaatccgcggacaaaatatacggatacagactaatcaaatctccgccataccgtcgtttccagattttcgcctcttgcacaaaatcatcattcccagccagaatcgccccagcaatcccgccaattcctttgtaaaacgacacatacacactatcaaacagcgcacaaatttcttccgcagacttgtgataaaacggcgtgatttcccataaccgtgccccgtcaagatgcaacgaaataccctgttcatggcaatactccgaaatttcctcaagctcttcaaaagcaggcagctgcccaccaatttctcgttgtggaagttcgataagcacactagaaactggctcgcgaaggcttttaatatcgtcaattgtcaaaagtcgattcgctgttccaagtaatatggagagtgatttgttgcaattctctttccagcgcncgtcgcccgtacgacatcagctgtagctaccc

SEQ ID NO: 1891 - DNA, 1518 bp, Listeria monocytogenes-4B
  misc-feature (1)..(end): n can be any nucleotide a,g,c or t/u
tgtaagttataaaggtgttatgagctcatttgaccggtctttaaaacgtttagggttggattacattgatttgctgctaattcatcaacctttcancgatgtatacggggcatggatagcgatggaggaattacaagcatcaggaaaaattagagcaattggcgtatcgaattttagcccggatcgcgtaattgacctagctgcgttcaatgaagtaactccgcaagtcaaccaaattgaagttaatcctttccaacaacaggcagcgaatctagctgttttaagaaaagaaggggttacaatagaagcatgggcaccgtttgcggaagggaaaaatgatatttttaataacccagttttaacgaaaattggtgcgaaatatggaaaatcggccgctcaagtaattttgcgttggctagtagagcaagatattatcgtcttagctaaatctgtaaaaccagaaagaatggcgcaaaatctggctatatttgattttgaattgacggaggcagataagggagaaattgccagcctagatcaaggggaaagccagttcttctcacatgcggatccagaaatggtgaaatggatggctagtcgcaaactgaatgtataaacgaaaaaaggttctgcgtaaatgcagaacctttttttatttaactattgatgtcgatagctttaatccatcctagtgaattttgtctgtctttaagatgcaaccaatcttcaccaagaatggttgctgttttatccactgctaataattttccataatagaagcccactgcttttgggttagtacttgttgattctacaggtttgttataaagttttgctgttgggtctttcgcgtaagcgacttgttttactggttcttctttagcgggagtataaaatacatttaagtctttttcgctagcccatccaacaagttttccatctactttaaactgataccaaagtgtatttccggctttagctcgagtcactagttctagtttttcgttatcataatctgcaagtggtgctaatttttctgcgttttttgtgttgaatggtgcagtccatacgttatcagttgcagatttacttactagagcatagccatcgtaagaagtttgttctgtgatgcgatcataaaggcgatcattcaacttatccgcgcgaacccagccaattactttctcgccttctgaaattcggaaccaagcatagcccccgcgagtgatttttttatctacttcaagggcttttctatcgtattttgcgatagttccattatcgaattgtttttcagggcttggtagacgatatacatgtgcgcttaaatcatctacatatttggttaaatgaacattttcatcttctttttgatgatagctgatttttaaggcattactatttatccaacctaatatctttgttgttctcgcgaataaagtaccatagacctttttctgttttagcttcccaggaaatttctaagttacgccctaagtaattttccagggtcccgat

SEQ ID NO: 1892 - DNA, 1406 bp, Listeria monocytogenes-4B
tttgagcagagtattttcactttttatttgtcgtttgaatgtttaaaggtatgataagtatatggttttctataaaaaggagattgagttaatgacgatacttgcatttgatttaggtggaacagcagtgaagtttggcgtgttaacaacagctggagaaattctagaaaaaggtaaattcaaaaccccggataatttggatgaaatgctgcaatcgcttatggatgtaaaagcaaattacgattatacattacaaggagctgcgtttagttgtccaggtgcggttaataatgaaaccggtatcattggcggcgcgagtgctatcccctacatacataatttcccttttaaacaattacttgaagaaaaactggggcttcctgttacgatggaaaatgacgccaactgtgcagctttagcagaggtttggattggcgcggcgaaagacaagcaagatattatttttatgattcttggaagtggagttggtggcgcagttattcgcggtggcaaggtacatcacggggccaatttgcatggtggtgaatttggttatatgttgatggaccgcgacggacgcacacttagcgagcttggtacagtcgtaaatgctgcgacgagaatagccgagcgtttagaagttccaaaagctagtatagacggtcttcgggcatttgaattacgtgcggaaggaaataaaatcgcaaaagaagagctagatacgatgttttattatcttgcgagaagtatttttaatttgcagtacacacttgatcctgaactagtcgtcattggtggtggtgtaagtgagcgggctgattttattcaagagttgaccgaatatgtggcgaaagtaaaagcgtctgtaccaattgcgactattagccctactgttgttggctgtcactttggaaatgatgccaatctcattggtgcaactgcatttcatttagcataaaaaagaagctggtcacttttttcgtgccagcttctttctatcctaatttttctgattcaccgcggctttctaatacttcagaaactgcttccagccactttttctgtttgtttacaacgaattggtactttactccggatatcatgtctatttctaaaatgttggagagtaattcttttccaaggattttggtgcggacaccccgaatttttgctactcgattcagcggaatattgatttcttcgtcaaagtaatcatttggtttgtggacaatatacgttgctgttaaataaagttttccggggactgctttaaaaccatttttcgcattggcaagacctttatgaatgacttctaattcttcttccataaagctttcatctccttattcttctacaattattgtaggttactttttaagtatgaatgggccgaagcgcttcttgct

SEQ ID NO: 1893 - DNA, 2015 bp, Listeria monocytogenes-4B
atccgttatacatgatttaccaagtttggagacgttttatgcgcaaaataatttgattaccaatattggtacgatggataatttaccagaattaacttatgtagatttatctttcaacagaataccatcacttgctccaattggcgacttacccaagttagaaatattaaaagttacagacaattattcttatttaagaagcctaggaacgatggacggtgtttctaagctgagaaatttagaattacaaaacaattaccttaattacactggaacagaagggaacttaagtgcattaagtgatttaacaaatctaacggaattaaatttgcgagataatggttatattagtgatataagtgggctttccaccctatcaagactaatctacttaaatttagattccaataaaattaaagatatttctgctttgtctaatttgacgactcttcaagaattaacacttgaaaacaaccagattgaagatatatcagcacttagtgatctggataatttaaacaagctagcactatcaaaaaataaaattattgatattagtcctgccgctaatatggttaatcggggggcgagtgttactgcgagtaatcaaacatatacattgccaactgtattatcatatcaaagctcatttaccatagataatccggttgtttggtatgacggcacaccactagcgccatcatctatagcgcactctggtacttacaaggatggggaaataacttggactaacatgaccgcagcctccagttccactgaatttaactttaataggctaaaagatggtttaaccttctcaggaacaatcacccaaccttataaatctgcagttaaagtaactgcaaatgcagagcaaacttatacaattggtgatactatttcagaggagcagtttttaaaagatgttaatgcaaaatcatcggacggagctcctgttacaagtgattttgctacagtggtggatttaaacacttttggtgaatatgaagttactctaacttctgaaaaagatggaatccaaggggatagttgcaaagtaattgtcaaagttcttcacggagcgcctgtcatttcggcagaccaaacaattaattatgataaacatgcgactattacagagaaacaatttttagaagatgttcatgcgagtacggatttaaatacagctattacaactaattttagtacagcagttaacttgaataaaggcggagattataccgttgcgctaaattctgaaaatgaggacggcgtgaaagctgaaacggtctatgtcactgttactgtagacaaagatccggcgccgattataagtgcgaaaactgacatcacttatgacaaattctctaaaaaaaccgaagcagctttcttagatgatatagacgcagatacaaatgatggctctataataacttctaactttgctacagcagttaatttagataaagcaggtgattatactgttactctgaattctattaatagtgatggtgtagcgtctacgccaactgcaattattgtccatgtggagaaagagaaaatagcaacgattagcgcaaatacggcacaacaatatgaaaaatatgcagagattaatgaaacgcaatttctaaaagatgttcatgctagtattaacgcgagcccaacaaccgcagttttggaaagtgattttgaaacagtagttaaactagacgtcccaggaacgtacacagtaacgattactgctacaaatgaagatggcggagtatcggcaccaaaagaagtttctgtcatagtaaaaaaacttccagcgccagaaatcactgctgataaggaaataacctatccgaaatttgatgaagtaagtgaagcagaatttttaagtgatattcatgcaactattaatgaaaaaaatgtaacgattacaagtaacttcagtgccgatgtgaatttaaataaagctggcgattacacggtaacattaaatgctacgaatgaagacggcgtaaaggcta

SEQ ID NO: 1894 - DNA, 1671 bp, Listeria monocytogenes-4B
  misc-feature (1)..(end): n can be any nucleotide a,g,c or t/u
cgttattggcaatttatccgccggggtataagcgggatttgaattgtgataggttgttggtcggcagtgatgtggcgacttttggacagcggttattttcgtaagtgcctttgttatcggtggttttgagcaagctaaagaaggcattcaagcgactatcaaaacgaaaaagttgaatgtggagctcttaatgattttagcggctaccggtgcatctattattggttattggtttgaaggggccatacttatttttattttctcggttagtggcgctttagaaacgtatacgaccaataaaagtaagcgcgaaatcacgaaattaatggcatttcaaccagaacgcgcctttcgtttgcttcctaatggagatttagaggaagtggctgcaaaggagttacaactggatgatatggtattcgttcggccaggagaaagtgttccaatcgatggagtcattgttcgagggtcaaccacgttaaatgaagcagccattaatggggaatcagtgccagcgacgaaaacagttggtgaggatgtgtttggcgggacggtcaatgtaagcagcgccatcacggtcaaagtaacgcaaacatttgataatacgatttttagtaagattattcgtttagtagaatcggctcaaagtgaaccttcgaaaaccgctcgctttattgaacgatttgaggatgcgtatgtaaaagcagttctattatttgtgttagtaatgatgttcttgcctcattttgctttagggtggtcttggaatgaaacattttatcgtgcgatggttttgctaacggttgcttccccttgtgcgctagtggcttcggtaacgcctgcgactttagcggcaatttcgaacggtgcacgtcacgggattttgtttaaaggcggcgtacacttggaaaatttgcgcggtgtaaaagctgttgcatttgataaaactgggacgctgacaaatggtacaccagaactgacagatcggttatttgctgaaaatgtcgataagcaacaagtaatcaatgtagttggagcgatggagcgacaatctttacatccgttagctgcggcaataacgcaagacctagaggcagaaatcaccgaaaagttaacagaaattgaagtgacggatgtagctggatggggagttcaagcgatttatcaagaggaaaattggcaagttgggaaagctgggtttgttgggaaagaagcagcggcagcattttcaaatggtgcatttgagcgacttgcgggtgaagggaaaacgattgtttatgtagctaaagacggcgtgattcaggctatgtttgcccttaaagatacatgccggcctgaagccattcgtacgattaaggcacttcaagcaaaagggattaaaaccataatggtgacgggagataacgaacaaacaggtgcagcgattcaagccgaactcggaatggactatgttgtttccggttgtttacctgagaaaaaagtggatgtgttaaaagaattgtcggttacttatggcagtgtggcaatggttggtgatggaattaatgatgctccggctcttgcacatgcggctgttggaaattgcatgggcgaggggacngacattgcgatgganacagcagatgttggtttaatgagaaatgatntggagaaatcccatatgcttacaca

SEQ ID NO: 1895 - DNA, 1409 bp, Listeria monocytogenes-4B
gctcagaagacacgcggtcaaaagctgattgtttctgatttacgaaaacacgaaatggcagagcgttctgatttattcatgcatccaaaacaaggaaccgattttgtttggttaacagcggttgcgaaatatatgattgatcaaggatggcacgatgaagcctttatggaaaataggattagcaatgtagcagattatctatcatttttagaaccatttacattggaatatgcggaaaaagaaacaggactatcagtagaaacattgaaaaaagtggcgcagatggtttatgaagcagacgggacagcggtttgttggggaatgggagttacgcaaaatattgctggatcacatacatcgtctgctatcgctaacctacttcttgtaactgggaacttcggaagacacggtgcgggcgcttatccgcttagagggcataataatgtgcaaggtgcttgcgatatggggtcactacctaacgttcttcctggaattcaaccgcttggaaatgatgaggttcgtgctcgttttgaagaagcttatggggtatcaatttcaccagaaccagggctgaaaaacaatgaaatgcttgatgctattgaggcgggaacacttcattctatgtatgttattggtgaggaaatggcctgggtggactctaactcaaatcatgtgcaagaaatccttgcgagccttgatttctttgttgttcaagatgtgttcttatcaaaaacagcacaatttgcagatgttgttttcccagcagctccttctcttgaaaaagaaggaacatttaccaatacagagcgccgtgttcaacgactttatgaggtgttagagccgcttggagattcgaagccagactggtggattattcaagaagttgcgaaagcgtgtggcagaacggactggaattatgatcatccgagcgagattatggacgaaattgctagtttagcaccattttttgcaggggttcgttatgaccggatgcaaggatttaacagccttgtatggccagtgagcgcggatgggaaggatatgccgttactttatgaagaacgatttaattttccggacggcaaagcgcaattttcgacgttaccgtatattgcaccgattactttcccagaagaatataatttaacgctgaataatgggcgtttattggagcagttccatgaggggaatttgacagataagtcgaaagggttggattataaattaccggaagtgtttgtagaggtatcacatgaattacccaaagaacgcgatttagaaagtgggttcgctcgttcgtctaagttcgccttatggccgattaagcttcgggccgtgtgactgaccggttgaaaggaattgaggctttgtgccatcgctttttgggggttgcgaaacccgggtaacta

SEQ ID NO: 1896 - DNA, 1310 bp, Listeria monocytogenes-4B
gatttcgtagccaatcatatgtcgaaatcaagtgattggtttaagcgattctccgataacgaagcgccgtacaatcaatttttcatcgagaaggacagccaatttgattataaaaacgtcacacgtccgcggacttctccgctgttccacaaatacgaaaacggtaaagaactttggactacttttagcgaagatcagttagacttaaatgtccgtaatatcgattgccttgtagccttaacagatgtactgcttttctatgcatccaaacaagcgacaagcattcgacttgatgccattggatttttatggaaaacttctggcactacttgtatgcacctgccagaaacccatgagatcatcacgctttggcgtctgctgattgatgaactatatccaaatctgcaaattatcacagaaacaaacgtccctcatgaagaaaacattagttattttggcgatggtgaaaatgaagcaaatatggtttatcagttcccgcttccgccacttgtgctccataccttcacttgccatgatacaacgaaactttcgaagtgggcgaaatccatttcacaagtttctagcacagcgacttattttaacttcttagcaagtcatgacggaattggtatgcgccctgcgaccggaattctttccgacgaagaaatcaattctctcgtccaaaaagcggtccaaaacggtggccaagtttcctataaagacaacgcagatggcacgcagtcggtatacgaacttaatattaactactgttaagccctgcaaaacccgggcgaagacacaactgaagaactcgtaacgaaaaaaattatcgctgctcatagtattttgctaacacttcaaggcgtcccagcgatttactatcattcccttctaggttctaaaaacgaccttgttggttacgaagaatccggtattaatcgccgcatcaatcgtgaaaaactggaaaaaaatcaattggttcatgaacttgaaacagacacttatcgccaaaccattttcacatcgctgaaaaaattggtgcaaatcagacgaaatcacaccgctttttcaccatttgcaacccaagaaattttagatttaggaccagatgtttttgcgataaaacgggaatctgaggaagaatgtatttacggaattatcaacgtcacttctcataatatccgcaaaacgctcgctttctctggcacgaatctattaaccaatcaacccgttacgagtgaacttgatttaactgcgtatgaagttgtctggattaagaaggcggtccaatgaaaatcgtcatcgcacct

SEQ ID NO: 1897 - DNA, 1662 bp, Listeria monocytogenes-4B
gtgttagagaaagaaaagcggatgataatatccgtagaactgacacaggaaatgatacaagaactcgacgtagttgtagaaaaagaaaaaatggggcggagtgaagttataatggaagcaacgcaacagtttttacaagagaaaagggctcgcgaattaagagacgagatggagcgcggctatgcagaaatggcgacaattaatttcgctatcgcatgcgagtgtacccatgtcgaagcagaagcagaagacaggaatattagtattttaggaggttaatggctgatggtgaagcgtggtgacgtatactacgcggacctttcccccgtggtcggaagcgagcaagggggaatacggcctgttctcatcattcaaaatgatattggtaatagattcagtccaactgtgattgtggcagcaataactgcaaaaattcaaaaagcaaaattgccaacacacgtggaagctactcgtaaagatggctttgagagagattctgtcattcttttagaacaaattagaacgattgacaaacagcgcctgacagacaaaattacacatttggacgaagatttaatggccaaggtaaacaaggcacttgaagtcagtctaggagtagtagaattttaatccatcctaaaaaataacatacaatgatgaatgcaggacaaaagggtctgacgtaaaataataagtttaatacataatgaaataattaactgctgtgaagaaacagtaaggacatgagaaacctacaaacaacgcgtatcaacatactcgctaaatttgtttctaatgtcttttttaaaaggcagttaagcaaaccgcacaataagagagaaaattttgttaatagtggagaaaggttggaaaataactgatgtataaagattttgcaaacgtgggagtccgtacaaataaagcagacttactaaacaactggatgaatgaaatggaaaaacaatcagatcagctaatcaacgacattgcaaaagaagcaatgtacgaagaaactagcaaagaatttgtggatttaattgtttcgaatgttaccgaaaacggctctaaatcaacgaaaaactagatgatttgcagagaaagtggtccacctaggttggccgattcattttgttaccactggcctacgtgtttttgggcttttagtatatacagcaatgagagatgaagatttatttttaaagagagaagaaaaacctgaagatgatgcctattatcgctttgaaacatggctttcctccatgtataacaaagtggtcacagcctacgcggatacgtgggaaaagacagtttctatccaaaaaagtgcactacaggaattatcggcaccacttttgccaatatttgaaaaaatttctgtaatgccgttaattgggacgattgacacggaaagagccaagttaatcatagaaaatttattaataggtgttgtaaaaaatcggtcagaagtggttttgattgatattacgggagttcctgttgttgatacaatggttgcgcaccatattattcaagcgtccgaagcggttagacttgtcggctgtcaggcgatgcttgtaggtattagaccagaaatcgcgcaaacaatcgttaacttaggaattgaattagatcaaattatcacgaccaacacaatgaaaaaag

SEQ ID NO: 1898 - DNA, 725 bp, Listeria monocytogenes-4B
atccgtagtactggccgccaggtgctgagaactgaatggatattggtgctttgctctggtttccggcaccagaagcggtgccggaaagctggctggagtgcgatcttcctgaggccgatactgtcgtcgtcccctcaaactggcagatgcacgggtacgatgcgcccatctacaccaacgtgacctatcccattacggttttttttcgcgtgttcccacggagaatccgacgggttgttactcgctcacatttaatgttgatgaaagctggctacaggaaggccagacgcgaattatttttgatggcgttaactcggcgtttcatctgtggtgcaacgggcgctgggtcggttacggccaggacagtcgtttgccgtctgaatttgacctgagcgcatttttacgcgccggagaaaaccgcctcgcggtgatggtgctgcgctggagtgacggcagttatctggaagatcaggatatgtggcggatgagcggcattttccgtgacgtctcgttgctgcataaaccgactacacaaatcagcgatttacatgttgcccctcgctttaatgatgatgtcagccgcgcttgactggaggctgaagttcacatgtgcggccagttgcttcactccctacggttaacaagcctcttttgggccgctgaaacccaagtccgcagttgcacccgccttttcgcgttgttcacccattagcgcggtgacaagt

SEQ ID NO: 1899 - DNA, 74 bp, Listeria monocytogenes-4B
aagtatgccagctacgtacgcgctctttccgtagtacgagccgccagtgtgctggaattctgcagatatctatc

SEQ ID NO: 1900 - DNA, 1937 bp, Listeria monocytogenes-4B
  misc-feature (1)..(end): n can be any nucleotide a,g,c or t/u
cactgagggcattcgagttgctcgacggccgacatgtgctggaaagaacagaaattactggaatggatgatttgcatcacccagaagatgtgattttggaagcagaggagttacttgcggaatgttatggaagcaaaaaaagctactttttagtcaatgggacaagcggaggaagcttggcagttattatggcgacgttgaagcacggggagaaagttttagtgccaagagatgctcataaatcaatcttgcatggaatcgaactggcaggcggagaaccgattttcttaaccccagcgacaaacaaagaagttggcgtcgcgagtggcgtgacaaccgaacttctcgaagaaacattacataatcacccagatataaaactatgtattttcacttatccgagctattatggaacgacttttaacttgcanaaatgtattcgcattgcgcatgattttggtgcggttgtgtttgttgatgaagcgcacggagcccactttttaacaagttctgaatttccgaaaagtgcagtggagcttggtgcggatgtggttgttcagtcggcgcataagacgttgccggcgctaacgatgggttcctatttacatgtggtgaatgatttaccgatttttgaaaaactaccttattacctgcaagtattccaaacgagcagcccatcttatttaattatggcgtcacttgatgcggcgaggaaatatgcggcaacttacacagcggcggacgtcgaagctttttggaaaatgcgtgccagatggattaaatggctgaagaagaataaatttgacgttattttgccagatgatccgcttaaaatcatcgtgcgcaaaacaggctacacgggctacgaactgcaagcaatttttgaagaaagctcttatttcccagagcttgccgatgagtcacaggtattactgattttaccattaattaaaaaagggattgatttcacgcctattagccggattcattctccggtgaaaaaagaaatcgcgaaagaaccatatgaaatgtcagcgccttttgcgtcaggtcttgcgctaacttacgaagaaatgcacgcacgcgcgaccgaattcgtattactagatgaagctacgacacgcgtttcggctgaaacaatttcgctctatccgccgggaatcccagcaatcatccgcggagaaagcatcacagaaaagcatatccgcgaactaaaaaacattcgcacacgccactaccaaggcggcgaaaaactagccgagaattacatccgtgtattccgctaatttatgctataatcaaacagaaagcgacacgaaagggaaaggaaattactaaatgaaagcaatttttattacactcgaaggcccagatggctctggtaaaacaacagtaggaacactacttaatcaaaaaatgacggaagctggcattgattttattaaaacgcgcgaaccaggtggcagcccgatttcagaaaaagtaagaaatatcgtgctcggaattggcaatgaagaaatggacccaaaaacagaagtactacttattgcgggagcgcgccgtcaacatgtcgttgaaacaatccgtccagctctagcggcagggaaaacagtactgtgtgaccgtttcatggatagctctcttgcgtatcaaggtgccggacgtgacatgaatatggaacaagttttacaagtgaatttatatgcgattgaggatacattgcctgaccggacgtactatctcgatgtgcctgccgaagtcggtttagctagaatcgccgctaataagggccgtgaagtcaatcgcttggataaagaagatattacctaccacgaaaaagtccaagctggctacgaaaaagtcatcaacatgttcccggaacgttttatgcgagtggacgctacaaagacaccagaagaaatcacagaaactatttt

SEQ ID NO: 1901 - DNA, 2442 bp, Listeria monocytogenes-4B
cgatatgtgaattcgatgatgctcgacggccgacagtgtcgctggaaagtgtacggcgtgattaatagtgttagcctagatttgcggagatatacgatttaacgcatcaaattcctcaatttaatatttgggaagcatcgtatcgtttactccaaacggttacttattggcccgaagataccatttttgtttcgattgttgatcctggagttggttcgaagcgtcgaagtgtcgccgttttaacagaagatggtcattatattattacaccagacaacggaaccttaacccatatcgcgcattacggaacaattaaagaagttcgactgatagatgaagaaaaaaatcgcctaccaaaatcaggtgcatcccatacatttcacggtcgagatattttcgcttataccgcggctaggctcgcagccggcgtgattaattttgaagatatcggtccatcagctaccccagactccattgtttctctaagtctaagtgactcctacttagaaggcgagcaagcttttggcacaattgatattattgaccgtccattcggtaatctttggacaaatattcgccgaactgatttcttgcagctaggtgctaactatggcgattccatcgaagtcctcatcaaacaccacgaccgagtagtttataagaatttcgttacttatagccgctcatttgccgacttacggattggcgaagcgctcatctacgtcaattcactcgacaacctcggactaggtatcaatcaaggctccttcgtagacgcttattcagtcggcaccggcaccagctggaaagtcacccttaaaaaagtataaaaaaacagggtcaaacatccaaattggaagtttgaccctgtttcatttttttatttcgtatattctttgacgattggctcttgttttttggttttcaggaataaacttaagatcatcccaatagccgcaaaaatcgctgcaaccataaacgccgcacgcattccgtccaagctagcatcttgcgctctttgagcaaaactagccggatccgttgccataagcgctttacctggcatattatctttcgttacattcggtagcactgtaataagtaccgtcgtcccaatcgaaccagcaattatgtcgaatcgtattatttaccgtcataaccggggttaatcaaatggttaggaagtgcattcatacccgctgtctaaactggcatcatcgccattgaaatcccgaagaacctcacaggatacaatacaacaatataccaaagcggcgtatccatcgttaagaacatatatggaattgtaccgatagtcaaaatggtaaccccggtaatcgtcaaccatttcgccccaattttatcgaaaataatacccgtaatcggactcattatccccataataatcgcacccggaagtaataacagacctgattgaagcgccgactccccgcgaattgcttgaatataaagtggcaatacaatttccgcaccaatcattgccatcgttacaatcgaaccaagagtaacagacaatgaaaatactggatatttaaacacatgtagttcaagcattgggttatcaataactagttggcgccgaacaaataatgcaatatcaacgacaccaacaattaacattgtgaataaccgttgcatctccccaaccatcattacctgctgaactaaatccataaaggagtgaaccaaaaccaattgaagacattacaatggaaaagaaaatcgatttttgtatcagtaaatttcactacttttttcattccaaagaacgctagaattatatcgataaccgcgattggaattaaaataaggaataatacgcgccaatcatacgaatccacaatccaaccagacaaagttggcccaattgctggagcaaacgcaataacaagtcccatcagccccatcgccgccccacgtttttcacgagggaaaatcagcaagaagattgtttgaagcaacggcatcataatccccgcaccagctgcttgaacgatacgaccagtaagtagtaccgggaaagaacccgccactgacgcaataatggtaccaattgtaaatacagtcatcgctgtaataaataatgtttttgaactgattttttcaattaaaagtgccgtaatcggaatcataatcccatttgttagcaagaaagccgtcgtcaaccattgccatgttgctgctgtaatatgcaaatcatccataatcatcggcagtgccgtcgctagtaacgtctgattcaagatcgccacaaacgccccaataatcattgtaactactaataaacttctactataagatttcccgttaacatcaacgggccgttctactgctgtactattcaaaattaataccccttcccatgtggaaactttccagcacacgtcggccgctcaagcagcatgcaggttgcccaaaagt

SEQ ID NO: 1902 - DNA, 879 bp, Listeria monocytogenes-4B
aattgatgtgagtacaggtggtttagttaatgtggctgcaccagttttcccaggttatcaagtgccattcgcagatgaaattcgtcgcggggcgggtattgcgactggagcgcttggacttattacacgaggcgaacaagcggaagaaattttatgcaatgaacgagcggatttaattattgttggtcgtgaattattacgaaatgcttattttgctaaagatgcagccaaacaattaggcgaaacaattgaaggaccaaaacaatattcacgcgcgtggaaataaataaaaagctggaagttcagagtttttgaacttccagcttttttagtagaaattaattaatagttacattccaatcataagagcatacgcctccagtggcataattgtgattatacgagatgtctaatttatactcaccaggacttagagcggatgtatccactgttatagagttgtcctccgcattaactgtcgtcggaagttggactatattagtcccgatatattctcctgtaacttctgggctgactaacatgttaatttcttccatttggaaataaataggtaaatcaatagtacatgtattgccctgattaatagtttgatcaggaagctctccattttgactttgaacataaatagtatctaatacattagaaggtagttcagttaaaaaattataatctaagtttaatgattctaaactaggtaagttggtgtagttaaccatcgtaccggttaaattgttatgtcttaaatttaaatcagttaagttaggtaaattttgaaaatctggtgtattggttaataaatttgcatttaaatctaaaaatgtgagatttggtatattttgaaaatcagaaatagttgtc

SEQ ID NO: 1903 - DNA, 1498 bp, Listeria monocytogenes-4B
aagtaaaactgcaaaacatcgaagctttcactcagaaaattactgaagcgaaagatgagattaaactggcgcaccgagcgcacgcggaacttttacgaaaactatcttcagagaatcgaatgagagaggtggatttactgcttgttcatgcggaaggtcacttgtcttctacggatattgccgtggaaatgattcgggaactgggagaaatttatcaatggaaatggagtttatctaatgaataacaactttttatggggaggtgcaacggcctcttatcaatgtgaaggtgcttgggatgtggatggcaaggcggaatcgatgtgggactactacttgcacgaagcaggtcttgagaatggcgatgtggcgagcgatcactaccaccgctacgaggaagacattcggatgatgaaagaaggcgggcaaaattcctatcgtttttccttatcttggccgcgaattattaaaaataggcaaggtgacatcaacttaaaagggatcgaattttatcaaaacttgctagatacgtgtaaaaaatatgatattgagccgtttgtgacactttatcattgggatttgccgcaatattgggaagaaactggtggctggttggatcacgacgtttgtgctgcattcgagcattatgccaaggtttgttatgaccactttggcgataaaatcacgaattggactacgtttaacgagccaaaatggtttgttgctaatggatataaaatcggcaactacccgcccggctatcaagatacacaaaaaacgatgattgccgcttataatgtgatgtacgcgagtgctttaggcgtcaaagcttttaaagaaggtggctactcagggcaaattggtattgttcatagctacacgccggtgaacggtgtcgatgaaagtatcgaaactaaaatcgcgatgcgctacgctgataactattgcaacaactggattctcgacacagccgcacttggcgaattcccggtcgacctcattgccgaactagcaaaatcgcacgacatcagctttatgaaaacagacgaactacaaacaattaaacaaaacactggcgacttcatcggcttaaattactattcgcgcacgctcgttaaaccatacgcggggggggaaacccaactacaattcaaccacagcggtaaaaaaggcgaaagtaaagttctcatcaaaaactggttcgaacaagtgaaagatcccgccaacgaaacaaccgaatgggacacagaaatttatccaaaaggcttacaagatggcttaatcgaggcttacgaacgctatcaattaccactttatgtgacagaaaacggcattggtgttcgcgaagatgtttcagtgtctatagtagatgatgcctaccgaatcgcctttatgaacgaccatattaacgccattttcaacgcaatcgatgctggttgtgacgctcgtggctactacgctcggcccccgctcgacctttactctacgaacaatggcg

SEQ ID NO: 1904 - DNA, 2360 bp, Listeria monocytogenes-4B
ccattgattgttttaactgctgatcgtccacatgagcttcgaaatgttggagcaccacaagcgatggatcagttgcatttatatggttcacatgtcaaggattttacggatatggcacttcctgaaaacagtgaagaaatgcttcgctacgcaaaatggcatggaagtcgcgcggtggatattgcaatgaaaactccacgtggccctgtgcacctcaatttcccattacgcgaaccgcttgtgccaattctagaaccttcaccgttcacagctaccggaaaaaaacatcatcacgtacatatttattatacgcatgaagtattggacgatagctcgattcaaaaaatggtgacagaatgcactggtaaaaaaggcgtattcgtcgttggtccaatcgataagaaagaattggagcagccaatggttgatttagcgaaaaaactaggttggccgattttagctgatccgctttctggactccgttcttacggggcgctagatgaagtagtgattgaccaatatgatgcattcttaaaagaagcagagattatggataaattaacaccagaagtagttattcgttttggaagtatgccagtttctaaaccactgaaaaactggttagaacaactttcagatattcgtttttatgtggtggatccgggtgctgcttggaaagatccgattaaagcggtaacagacatgattcactgtgatgaacgatttttactagatatcatgcaacaaaatatgcctgatgatgcgaaagatgcagcgtggttaaatggatggacatcgtataataaagtggcacgagaaatcgttttggctgaaatggcgaacacaaccattttggaagaaggtaagatagttgcggaattacgccgtttgttaccggacaaagcgggactctttattggtaatagtatgccgattcgcgatgttgacacgtacttttcacaaattgataagaaaataaaaatgctagcaaatcgcggggctaatggtattgacggagttgtttcttcgcgaggaggtgctagtgttgtcttccaaccaatgtttttactaattggtgatttatccttttatcatgatatgaacgggttacttatggcgaaaaaatataagatgaacctaacgattgtgattgttaataatgatggcggcgggatattctcgttcttacctcaagcaaacgagccgaagtattttgaatcattatttggtacatctactgaacttgatttccgttttgcagctgctttttatgatgcagattatcacgaggctaagtcggtagatgaactagaagaagcaatcgataaagctagctaccataaaggtttggatattattgaagtgaaaacaaatcgtcatgaaaataaagcaaatcatcaagcactttgggttaaaattgcggacgcgttaaaggcattagattaatatgctagtaaacggtcgacattatcatctgacaactgctataagtggagaaaagccagctttactgatgttacatggttttactggaacaagcgaaacatttcaagatagtatttcaggtttgaaagaacattttaatattattgcgccagatttacttgggcacggaaataccgcaagcccagaagaaatatcgccttacacaatggaaaatatttgcgaggatttagctggaattttacatcaattaaatatcagtagatgttttgtacttggctattcgatgggcgggcgggtcgcgactgcgtttgcagcaacctttccaaaaagggtgcgtggacttattttagttagtagctctcctggccttgaacaagcagatatccgagaaagccgtgttgcggctgataatcgtttggcagactggattgaagaagagggcttggtgccttttgtggactactgggaaaatttagctttgtttgcttcacaaaaagttttgtctcctgaaatgaaaagaagaattaggtcagaacggctatcgcaaaactcgcatggtttagcaatgagtctacgtgggatggggaccggaaaacaaccatcttactggaactgtttagcgaactttacttttccagtgctactcattaccggtgctttagatgagaagtttgaaaaaatcgcgcaggaaatgcatcaacttttaccaaatagtacgcatgtttcaattcaagaagcggggcatgcagtttatttagaacaaccaaacagcttttcaagtcagcttaattactggctggaagatattttgaaggaggaagaaaaatgagttttaattggcaaacagaaaaagtatatgaggaaatcaaatatgaaagttacgaaggaatcgcgaaaattacgattaatcgtcc

SEQ ID NO: 1905 - DNA, 1986 bp, Listeria monocytogenes-4B
cttttttttttatttattaaatataggtggggatagcccgacggccacacggaggacgaagacatggagcgccacaagggccggcgcaacgatcagtattcgaggcagaagacgcgcaacaaagaaaaagcggcacccgagaagaaacaccggcacacccacaccagcagcgcccccaccccgcagcacagccagttttgtcccaccccatcattcaagcacaaacttgggcgggtacacgattatattcgtatttcagtaacagatcggtgtaatttaaggtgtgtgtattgtatgcccgaagaaggcctgacatttttgcctcatgaaaaagtactatccaaagatgaaattgtcagctttatggaattaatggtgaaattcggcatcaaaaaagtccgcatcactggcggagagccgttactaagaactgatatagtggaaattgttcgcgggctgggagcaattcctgaaatagaggatatttcgattacaacgaatgctatgtatttggcaaaaaaagcagaagcactgaaggatgcggggctcacacgtgtgaatatcagcttagattctcttcatgcagatcgttttaaagcaattacacgaggtggccgtttgcaaaaagtacttgatggtattcaaaaagcagaagaagttggactgttcccaattaagcttaatgtcgtactaattaaaggacaaaacgatgacgaaataactgatttccttcgatttacaaaagataaagatattaatattcgtttcattgaatacatgccaattggtcatgctggtacgagttggaaagaaaaatatttgccgcttgatacaatttttgaagcttgtaatgaagctggttatgagtatgaaccagtggactcgattcgtggaaatggcccctccgaaaatttccgtataaaaggagcgaaagggacgtttggtgtgattcacccggttagcgctcatttttgtgatagttgcaaccgactcagacttactgcagatggttatattaaagcatgtttatactgggatgaagaaatgaatatccgcccatttatccaagatccagtgaaattaatgcaattggtgcaaaaagcaattgataataagcctgaaaatcatgaaatggcattaaaattacaagatgaagtacaatctaataaaccaacttggcggcgtatgagtcaaattggaggataaataaaacatccggtcacatgtgtggtcggatgttttatttttgtcgttctgctattaaatgaggtaattctgggataatcaatttttgaacagcgagctggcaagcgttacttgatccaggcaacgcaaaaagcagtaagccgctttctgaaaagccagcgaatgcacgagacaccatggcgcgactaccaacttcttcgtaactgagcatcctgaaaatttcaccaaacccagggatttcttgctgaatcgttgcgaataatgcttcatacgtaacatcacgcctagcaataccggtaccaccatttgtgataaggcaaaaggacccattagctgctaactcgtttattttttgcttaatgagcgtaacatcatcaggcacgacaatccgcgaaataacctcatgcccagcagtttctaaggcagagtgaatcagttgaccactagtatccgtatccaaattccttgtatcactaatcgttaaaatactacaagttaccttaataaatgttttttgttccataactgcctcctttaattgaaaaataagtgatatgtttttttcgcttctgttatattttctgtcccatgaagtaacacgcgtccatttttgaaaataacaaattgaaatttttcgtattggaaactgagtaaagcgggattttcattataaataattttttgttccgtcagcatttgtttaatttcgtgataattgcttttatttggcagacgaaattgtactgtatctcttccgcaagagcgactgtttgctcggaa
